United States Patent Application Publication US 2026/0191920 A1 - sequence listing, part 19

SEQ ID NO: 84355 - protein, 521 aa, unidentified
  source 1..521: note = Caulobacter rhizosphaerae
  REGION 1..521: note = tr|A0A561NLZ7|A0A561NLZ7_9CAUL Flavin-dependent dehydrogenase OS=Caulobacter rhizosphaerae OX=2010972; GN = FHW61_104324 PE=4 SV=1
MTKHIVIVGGGTAGWMTACYLARMLAGPDAQAVKITLVESEDIGIIGVGEGTFPSIRKTLKRIGLDEAALVREANATFKQGIRFANWRHAPSVDPGDHYYHPFQIAEQHTDLDLLPYWLLGEAGEAPWARASTVQQAVIEARRAPKLIDHPDYAGPLSYAYHFDAVAFGQVLRRHAIGQGVVRIADTIGEVRLTEDGAIAALVGAVSGELRADLYIDCTGFRAQLIGQALKSEFTSYRDQLFCDRALAVQLPYEQPDAPIASCTISTAQESGWTWDIGLQERRGVGYVYSSRHTDDERAAQVLSAYAGVAPDRLEPRLLKFEAGFRRTQWRKNCVAIGLSAGFIEPLEATGIGFSEIAALILANLFPWSGEYEQAARQFNAQMQRRYEHVIDFIKLHYCLSQREDTAFWRDNRDDRSMSETLKEKLRIWRHRPPSFLDVDLNHDIFVEQNWQYILYGMGFATDLSGRAPALRFSAEARAEFASIAEQARFALTVMPDHRALIDQVRRSGFQRPAPARRASR

SEQ ID NO: 84356 - protein, 502 aa, Sphingomonas sp.
  REGION 1..502: note = tr|A0A1I5G4X1|A0A1I5G4X1_9SPHN Tryptophan halogenase; OS = Sphingomonas sp. OK281 OX=1881067 GN=SAMN05428984_3404; PE = 4 SV=1
MKRVQRLVILGGGTAGWMTAAAMSATFGDLVNISILESDAIGTIGVGEATIPTIHWFNQLIGLDEEAFVAATKASFKLGIEFVDWARPGTRYFHPFGRYGVDLGPVPFHQHWLRGKGDGLDRPLSVYSLAAQLAAAGRFAKPVDDPRSILSTLGYAYHFDAGLYARHLRQLAEKRGAVRHEGLLRDIERDPKTGFVTALTSDRGERLEGDLFIDCSGFRALLIGETMGARFEDWSHWLPCDRAVAVPCARIAATTPFTRSTLRPAGWQWRIPLQHRTGNGYVYASSFVSDDEAVATLLSNLDGEALADPRMLRFTAGFRREAWRGNVVAIGLSSGFLEPLESTSIHLIQSGIAKLITLFPDADCDPVLARQFNTLFARDMDGIRDFLILHYHATQGHDAPLWQHTHHMTPPPTLVDKIAQYTRAGRLMLSADELFREPSWLAVLEGQGVGALGHAPLADTLDAATNRRQLNQIETVIARATPTLPLHDAAIAALVAPQVAGR

SEQ ID NO: 84357 - protein, 521 aa, unidentified
  source 1..521: note = Thalassotalea sp.
  REGION 1..521: note = tr|A0A516HEG6|A0A516HEG6_9GAMM Tryptophan 7-halogenase OS=Thalassotalea sp. PS06 OX=2594005; GN = FNC98_12860 PE=4 SV=1
MNAKSTNSVKSVLIVGGGTAGWLSACYLAKQLNQQQQNITITLVESPDIPIIGVGEGTWPTMRTTLQRIGIDESRFIRECDVSFKQASKFVNWHRPADNGKDNFYYHLFDGPGFSWEFNPVPFWLDGSLGDISFANAISLQEQVCQHNLAPKMMVTPQYQGVFNYAYHLDAGKFGQLLKTVATEELGVNHISANVTDVHLDDDGDIAFLSTDRTQSLTADLFIDCSGFKSLLLGEALNVPFKDLNDVLFVDRAVTIQAPYEDQQGPIASQTISTAQEAGWIWDIGLQSRRGTGYVYASKYSSPERAEQLLREYLGDKEQKLEARHLQMRVGHRQKFWEKNCVAIGLSAAFMEPLEASAIFLVEAACFMLAEQFPKDSQSMSYVRDNFNDSFAFRWQKTVEFIKMHYVLSERDDTPFWRDNKHPDSIPEELQKRLSHWLQNPVSKYDFASQFEPFTKESYEFILYGMRPNLSISAPILDPSLRDKAQKQSKWIQESWQQAQQQLPTNRELLNRLKENGFQKL

SEQ ID NO: 84358 - protein, 517 aa, unidentified
  source 1..517: note = Thalassotalea sp.
  REGION 1..517: note = tr|A0A516H9M0|A0A516H9M0_9GAMM Tryptophan 7-halogenase OS=Thalassotalea sp. PS06 OX=2594005; GN = FNC98_03320 PE=4 SV=1
MNQPVKRIIIVGGGSAGWLSAGLIAAEHETKNSNSIEVVLIESANIPTVGVGEGTWPSMRASLKKMGISETQFLTECDASFKQGSKFSNWLHGDGDSYYHPFTPPVGFFETNIAQHWYPHRDKVSFADAVTCQGQLCDNNLAPKQIATPEYAFHANYGYHLDAAKFSKLLQQHCTQALGVKHILDDVTDINSCPQSNDIASVSTLEHGDIEGDLFIDCTGSKSLLLGGYYGVEFIDQSAVLFNDSALAVHVPYQTPDAEIASHTLSTAQTSGWIWDIGLPSRRGVGHVYASDYISDEQAEQQLRDYIRADIGDQADTLDIRKISIKPGHRKTFWHQNCVAVGMSAGFIEPLEASALALIEQSAKMIAEQLPANRQIMDITAKRFNQRFSHHWQRIIEFLKLHYVLSKRSEPYWQDNRAQHSIPEPLQELLTLWQYQTPFTFDSSRTEELFPAASFQYVLYGMGFDTDLSWLQKRHVPMQSVQQYFNENNKKTQHLLRTLPSNRELLNKIRQFGLNKV

SEQ ID NO: 84359 - protein, 582 aa, Sneathiella sp.
  REGION 1..582: note = tr|A0A2E2QK04|A0A2E2QK04_9PROT Tryptophan halogenase; OS = Sneathiella sp. OX=1964365 GN=CMN56_08360 PE=4 SV=1
MDNQINEVTIVGGGTAGWLAAAFLVRFMNLRKEESPTKITLIESPNVPTIGVGEATVPTMAALLKSLGISEKEFFIRCNASFKMGVRFTNWSHDEEGQPKSFIHPFEAIRTQLGGQNPAYHFHKYGGPPGREGIDDCMSFSGTAIKHKLGPKLLTHGDYETQLNYAYHLDAGKFAEFLRDISIERGVNHVLDDVEEVEQDERGFISALKLQRQGRRPVELVIDCTGFKGVVINQVLGVPFRDYSKYLLNNRAMAVQIPHRDVSKIEPCTNSTALGAGWVWRVPLYNRIGTGYVFSSNFRSDDEARDEFLAHLGEDGKKAEPRVIPVRIGRMERAWEKNCIAIGLSAGFIEPLESTAIYMIENFVKLLLINFPDKSFPPILAQRFNEKTEKMMQSIRDFIILHYCLNNREDSEYWRVAREEMTIPDSVKDLLDEYRHSLPVNTEFDGTYLFNYFNYNVILFAKGYLKDIRYPAERFIARRDWEQRMADFIRYEQKELKGLPNHYELLRKIRGEDEVKVSQSGVSFGGFGGPAFGAPPGGVQMPQATVQLGGGPMKPSIRFAAKKSEEPAKETEQDDLSGSHIL

SEQ ID NO: 84360 - protein, 515 aa, unidentified
  source 1..515: note = Caulobacter rhizosphaerae
  REGION 1..515: note = tr|A0A561MXK6|A0A561MXK6_9CAUL Tryptophan halogenase; OS = Caulobacter rhizosphaerae OX=2010972 GN=FHW61_11359; PE = 4 SV=1
MSKRILIVGGGTDGWLTAGYLARTLGAQSPGGIEITLVESAETGILGVGLGEGALPTIRRTLRCIGIDEATLIREASATFKQGARFAHWRFEPGAGQPDHYLHSFQVPQEPSGLDLLPYWLLGAAGESEWSQINTPQKIAADAGCGPKLITHPDYVAPLNHAYHFDAAKLAGVLRDAATGLGVRHLVDTIDEVSLTEDGAIDTVRGRASGPMTADLYVDCTGVRAKLIGQALKSPYKSCRSVLFCDSALTMQVPYERPDAPIASYTISTAQKAGWTWDIGLDSRRGVGHVFSSDHTDVETAERVLRDYVGEAGEGLGVRHIKFEAGYRETNWVKNCVAIGLSSGFFEPLEATGIVFAEAAAVMLATLFPWGGEMETAARQYNALMRRRYERALDFIKLHYCISERRDTAFWRDNVEASTIPDSLHELLDRWRFRPPDAIDIDPNVDIFTETSWRYVLYGMGYQTDLGPKAGAYRHFNEARAAFADILEQADHACQNLPTHRDLIELAQRRGFGEG

SEQ ID NO: 84361 - protein, 502 aa, Sphingomonas sp.
  REGION 1..502: note = tr|A0A1I5C952|A0A1I5C952_9SPHN Tryptophan halogenase; OS = Sphingomonas sp. OK281 OX=1881067 GN=SAMN05428984_1042; PE = 4 SV=1
MTDPNRGPIRKVVIVGGGTAGWMAAAAAARYLDDGQRQVVLIESDAIGTVGVGEATIPPILGFNALLGIDERDFLRATGATFKLGIEFVGWDTGHDRYMHAFGGHGRDIQGLAFHQLWLKLRDRPGIGALDAYAPSAVAAYLHKFGQPNGQQPLAYAYHFDAGLYAAFLRRRAEAGGVTRIEGRITGTDRDADTGHVHAVRLDDGRSVDGDLFIDCSGFRSLLLGETMGVPFEDWSHWLPCDRAVAVPTEPTAPLLPYTRATARTAGWQWRIPLQHRTGNGHVYSSAHLSDDEATSVLLANLDSKPTAEPRQLRFKAGRRAKMWEGNVVALGLAGGFLEPLESTSIHLIQTGISKLFALFPDRGFSDVERDEYNRLMGDAYTSVRDFIILHYHATRRDDSPFWRHVRTMPIPDSLTRKIALFREKGRIFRYDDELFGISSWVQVLLGQNVIPVGYDPIVDALDADRVADAVRQIRATTLRDVQALPSHAEFIANSASSPRTM

SEQ ID NO: 84362 - protein, 490 aa, Sphingomonas sp.
  REGION 1..490: note = tr|A0A1I5C995|A0A1I5C995_9SPHN Tryptophan halogenase; OS = Sphingomonas sp. OK281 OX=1881067 GN=SAMN05428984_1041; PE = 4 SV=1
MTSRAPVASIAVLGAGIVGLSAAIAFARALPGLSVTLVETPDDPAALTDRLPGTLSSIAEFHDRIGLRERDLLAASTTHRIGTRLSDWTADGAPFVLAHGERGGAIAPGAFHQHWLNARRGGKVAGFDAFSVATVLAAGDKFVHPSDDATSPVSGFDYALRLDPPRYRDLLRALARHIGIVPTPGVFADVERTVDGRVAALRLADGRRIVADLYLDCSGPAASLRSALDVQWEDWRTGLPVDQLLLGTAPVQLPTPTDDLVAVPAGWRFASPLRDRTMVGLAFASDQTSESSARRILPAGETIVALAPGARREPWRHNVLALGDAAVVLDPLADANLHLAHAAILRAIDLLPGCDCAPTELAEYNAQSVRQASRVRDYQAAHYLPTGRTRGPFWKRASRLPRPDGLAHTLEQFAHRGRLPFYEDESFDTDDWHGLLLGLGVIPRVPDPIASAHPPETVAATLKRLADATAALPARLPPYPHYLAQLERAR

SEQ ID NO: 84363 - protein, 533 aa, unidentified
  source 1..533: note = Caulobacter rhizosphaerae
  REGION 1..533: note = tr|A0A561NEB4|A0A561NEB4_9CAUL Glycine/D-amino acid oxidase-like deaminating enzyme OS=Caulobacter rhizosphaerae OX=2010972 GN=FHW61_106193 PE=4 SV=1
MRLSPSAGGRYQGGMDRRRRILIVGGGAAGWLTAAYLAKSLRIAEQAHLEITLLESPEVGIIGVGEATFPTIRTTLQFLGVDEARFIRQTSATFKQGIRFNDWAWAPREDGSRHQYFHPFEAPFSTDGASLAPYWLLQNEATRAPFAEAMTIQARVADAQRAPKRPHEGNFSGPLNYAYHFDAAKLAQVLAERARELGVRHLQGRLTHVELDAAGAIDHLVCAEHGRLEAELYVDCTGFHAELIGKALKAPFRSARPILFADRALACKAPYDRPDAPIQSFTIATAHEAGWIWDIGLNDARGVGCVYSSDHVDDGRAEAILRDYVGRGVEIAPRALSFEAGYRTKQWVKNCVAVGLSAGFLEPLESTGIVLIEAAVAIIAELFPHNGPISAPALRFNELMTARYDNIITFLKLHYCLSRRTEPFWRENADPASMPERLVDLLEQWRWRPPTRYDFILDLETFAFFNYQYILYGMGFKTDLSPGRDEFPDVAGAEKLFAKIRNFGERATHDLPSHRDLIAQINRFGFDRSLEPA

SEQ ID NO: 84364 - protein, 509 aa, Sphingomonas sp.
  REGION 1..509: note = tr|A0A1I5C918|A0A1I5C918_9SPHN Tryptophan halogenase; OS = Sphingomonas sp. OK281 OX=1881067 GN=SAMN05428984_1040; PE = 4 SV=1
MAKMEHAPTRVVVVGGGTAGWMTAAALVRLLPSACSVHLIESAEIGIVGVGEATLPHIRAFVERLGLDEADFMRATHATFKLGIDFRDFGAIGDSYIHPFGTFGRPLDDVGFHHYWLRLAAEGRAGPIGDYSVAVAAARRHRFAIPDGAPDDLAASFGYAYQFDATLFGPYLRRFAEAHGARRTEARIVRVEQDAVSGDVRALRLDSGETVEGDLFVDCSGFRSLLLGDAMAEPWEDWSKWLPCDRAVAMPCTSPDGPIEPYTRATAKPAGWQWRIPLQHRVGNGYVYSSAHITDQAAAEALVASVEGTPLADPRFLKFRAGRCRNSWVGNVVAIGLASGFLEPLESTSIYLAQMAITQLIELFPQRAGSQGIAATDRTEFNRMVDMEYDRIRDFLILHYHATTRDDSDFWNHVRTMDIPTTLADKMELFRRAGRVTRYSEGLFLEPSWIAVYLGQGIIPQAWDQRADRPGLDGLDRALASLRDTVASTAGAMPDHAAFIARRNATIAA

SEQ ID NO: 84365 - protein, 539 aa, unidentified
  source 1..539: note = Porticoccaceae bacterium
  REGION 1..539: note = tr|A0A2D4QQW1|A0A2D4QQW1_9GAMM Tryptophan halogenase; OS = Porticoccaceae bacterium OX=2026782 GN=CMK43_07830 PE=4; SV = 1
MRKVVIVGGGSAGWMTAAYLNGALNRQGRDNNVHITLLESPDIPRISVGEATIPSMRHLLAVVGVDENDFMRTTDATFKQSIKYVNWVKNDNSFYHHPFSRYEQFPIDHSSADWLKSDRSIPYMETVSAQPILCEMGRAPVMMSKLAMDPPLNYAYHMNAQKFADYLRDFSLPRGVVHVQANLSGVNQQENGFIKSIETDNEMTLSGDLFIDCTGFKAKLIGEAMTIGVEDCSQWLLCDQAVTMHVPYDSHYPGLVRPYTTATALSSGWVWDIPMQSQRSIGYVHSSHFISDDDAEREMRAYQGSSADQLNSRQIKFSVERRHKVWEGNCIAIGLSGGFIEPLESTGLYLSDLGAVALAEHFPFDDSHIESMAYRYNRVLSNRFYEILDFINMHYCLTKRTDTSFWQEVQRPERINDRLKAKLEYWTMRPPTPLDFEDQCFPTLSTAASSNPAFPHAPVDTAALWNHQSYQCILLGMNFMDEIHDSKSQAQRPQPRVADAVINRLTEGNKKLPPHELWLQENVGMGHYAKGTKPAGWVA

SEQ ID NO: 84366 - protein, 496 aa, unidentified
  source 1..496: note = Porticoccaceae bacterium
  REGION 1..496: note = tr|A0A2D5U7Z7|A0A2D5U7Z7_9GAMM Tryptophan halogenase; OS = Porticoccaceae bacterium OX=2026782 GN=CMK25_07315 PE=4; SV = 1
MSTEKVTKVVIVGGGTAGWMAAAALARLIGRNIHVSLIESEEIGTVGVGEATIPTMMTLHHLLKINEREFLSAVQGTFKLGISFENWKNLNQDYIHSFGLTGQDCWAGGFQHFWLKGRQRGISEDFGHYSTELMAAKANKFAVLPNNGLSYAYHMDASLYAKFLRKLAEAAGVQRIEGKIVKVDINANSGDIDKLTLESGQVVEGELFVDCSGFRGLLINETLQTPFDDWSQWLPCDSAVAVQTASVSPPIPYTRSIAREAGWQWRIPLQSRVGNGLVFSSKHLDDEQATDVLLKNVEGDVLTTPRVIKFRTGQRSQHWVKNCVALGLAAGFVEPLESTAIHMVQRGIIRLLQMFPKEGIEQPDMVEFNKQMTDEYVFIRDFVIMHYHITEREDTPFWRHCKSMAIPDSLQHRLDLFKQTGRVFQQAGDVFAENNWTQVMLGQGLIPDQYHPIVDMMSDSELENFLSNLKQRTDSIVSQLPKHEEFIASYCKGASN

SEQ ID NO: 84367 - protein, 526 aa, unidentified
  source 1..526: note = Porticoccaceae bacterium
  REGION 1..526: note = tr|A0A2E8HS42|A0A2E8HS42_9GAMM Tryptophan halogenase; OS = Porticoccaceae bacterium OX=2026782 GN=CMK37_05950 PE=4; SV = 1
MTQTKNINRIVILGGGSAGWLTAGVIAAEHCTGGDSAGLADTTITLVESSTISTIGVGEGTWPSMRSTLQKIGISETDLITKCDASFKQGTLFHGWKTGEGDSYTHPFTVPYGYKDTNLADQWRRFRHQIPFAEAVSSQNSLMFSDLAPKQITTPEYAFNTNYGYHLDAAKFAELLKMHCVENLNVNHIVADVVGVNSNSTGDISSLLIDAEEDVEGDLFVDCSGSRALLLGEFYGVPFVSKKKFLFNDSALASQVPYSSSEDPIASSTISSAQTEGWVWDIGLPTRRGIGHVFSSAHSDEDQVGESLLKYIEKTVSPEAASKTSIRKISFSPGHRAKFWHRNCVAIGMSAGFIEPLEASALVLVELSASMIAEELPANREVMDIVAKRFNDKFLYRWDRIIDFLKMHYVLSERKDSDYWRDSVSSESIPDSLAEKMELWRWQSPWHRDTMHVDEMFPSASFQYILYGMDFKTRARTANRRSDFDAQNSAERLFQENAQRTKKLVAAMPTNRELINKIQTYGLQKI

SEQ ID NO: 84368 - protein, 522 aa, unidentified
  source 1..522: note = Porticoccaceae bacterium
  REGION 1..522: note = tr|A0A2D8WR82|A0A2D8WR82_9GAMM Tryptophan halogenase; OS = Porticoccaceae bacterium OX=2026782 GN=CMK26_01655 PE=4; SV = 1
  VARIANT 9: note = Xaa can be any naturally occurring amino acid
  VARIANT 29: note = Xaa can be any naturally occurring amino acid
  VARIANT 34: note = Xaa can be any naturally occurring amino acid
  VARIANT 71: note = Xaa can be any naturally occurring amino acid
  VARIANT 99: note = Xaa can be any naturally occurring amino acid
  VARIANT 237: note = Xaa can be any naturally occurring amino acid
  VARIANT 396: note = Xaa can be any naturally occurring amino acid
  VARIANT 408: note = Xaa can be any naturally occurring amino acid
  VARIANT 414: note = Xaa can be any naturally occurring amino acid
  VARIANT 430: note = Xaa can be any naturally occurring amino acid
  VARIANT 498: note = Xaa can be any naturally occurring amino acid
  VARIANT 501..502: note = Xaa can be any naturally occurring amino acid
MNDPQITDXVIVGGGSAGWLTAGIIAAEXLKTEXSSSRVKVTLVEAPNINTIGVGEGTWPSMRSTLKRIGXSETDFIRDCDVSLKQGTLFSGWTDGKDXYTHPFTVPHAYSQHNLSRDWQNKFSDLPFAEAVCPQSKLMLKNQAPKKISTPEYSFNVNYGYHLDAGKFAEKLRSHCTLELGVVHKKAEVIQVNSAENGDIRSLRLDTGESLTGDLFIDCSGSRCLLLGEHYGIPFKXIRDILFNDSAIASQVPYLSAGDSIASSTISTAQKHGWIWDIGLPSRRGIGHVYSSRYTDADNAEVTLFKHIEKLVGSKIAKKVKMRRISFSPGHRQKFWHHNCVAIGMAAGFIEPLEASALVLVELSASMIAEQLPQNRKVMDIVSKRFNEKFLYRWDXIIDFLKLHYVLXKREDSXYWRDNANKNSIPESLXEKVELWRWQGPYHKDTMHVDEMFPSASYQYILYGMGFKTNIGLSTKQSEVQTSKVAQELFDENLKYTXLLXXSMPSNRDFIEKVHQHGLQKI

SEQ ID NO: 84369 - protein, 547 aa, Streptomyces sp.
  REGION 1..547: note = tr|A0A2T7M1F9|A0A2T7M1F9_9ACTN Tryptophan 7-halogenase OS=Streptomyces sp. CS147 OX=2162715; GN = DBP21_21600 PE=4 SV=1
MTHLHSGLPQLPGKSGPRSTGICGATEKESPVLNNVVIVGGGTAGWMTASYFKAAFGERINITLVESGNIGAVGVGEATFSDIRHFFDFLGLKEKDWMPACNATYKLAVRFENWREEGHYFYHPFEQMRSVNGFPLADWWLREKPTDRFDKDCFVMPSIIDAGLSPRHLDGSLIDQPFVEGADEMQGLTMSEHQGKTQFPYAYQFEAALLAKYLTTYSVERGVKHIVDDVQQVNLDERGWIRNVTTAEHGEIGGDLFIDCTGFRGLLLNKALEEPFISFQDTLPNDSAVALQVPMDMERRGILPCTTATAQDAGWIWTIPLMGRVGTGYVYAKDYISPEEAERTLREFVGPAAADAEANHIKMRVGRSENSWVKNCVAIGLSSGFVEPLESTGIFFIHHAIEQLAKNFPGEDWNPVQRNLYNDSVAHVMDGVREFLVLHYVAAKRSDTQYWRDTKTRKIPDALAERIEKWKTQLPDTETVFPYYHGLPPYSYHCVLLGMGGIDVKPSPALALGDSAAAEREFAEIREKTRHLTSVLPKAYDYFSRMR

SEQ ID NO: 84370 - protein, 503 aa, Asticcacaulis sp.
  REGION 1..503: note = tr|A0A2T5XR32|A0A2T5XR32_9CAUL Tryptophan halogenase; OS = Asticcacaulis sp. CF398 OX=2135738 GN=C8K45_0874 PE=4; SV = 1
MVHAPIQTLVIAGGGTAGWMTAAALAHHFAGTPLKIRLVESSDIGTIGVGEATIPTIRSFYQSLGMDDAGVIRATQGTAKLGICFSGWRQPGHDFIHPFASYGQDFGEIAFPQVLARLAAEGAPHTLENYSLGLQLARAGKFAFAPNPPPFSGAYFDWALHLDAGLFAAHLRRFAEGLGVERIDARIEEVTTDAETGFVTALRLDGGREVAGDLFVDCTGFQALLIGKNLGTGYESYADWLFCDRALAVQSESRDVGAPYTLVTAREAGWTWRIPLQHRTGNGYVYSSRHTDDETALKTLTGAIPDKLLMEPRPLRFTPGRRADAWVKNVVAIGLSSGFLEPLESTSIALIQTGIEKLKQLFPRTDFHPSLAAEYNDMSKREFERVRDFLILHYWASQRDEAFWADCRQVDLPDTLKHKIELYRARCHFVRYRWEMFHPQSWLAIYDGFGIAPDACDPAAERLNRADIDAALKQMRDYISTTVAKAPSHAAFIQWCQQQEKAA

SEQ ID NO: 84371 - protein, 496 aa, unidentified
  source 1..496: note = Hyphomonadaceae bacterium
  REGION 1..496: note = tr|A0A0F2QFJ7|A0A0F2QFJ7_9RHOB Tryptophan halogenase; OS = Hyphomonadaceae bacterium BRH_c29 OX=1629720; GN = VR75_15785 PE=4 SV=1
MESQKIRKVVIAGGGTAGWIVATALSRLLGPLLDVTLVESDDIGTVGVGEATIPTHRTFHHLVGIDERDFMRATKATFKLGIAFENWGQVGDRYIHSFGQVGKPNWMGEFYNIWLLAKERGFGGSLEDYCLELKAAEANKFYTAKDAPINYAYHLDASLYAGFLRKHAEARGAKRVEGLIETVEQDPESGFIKALILKSGERVEGDLFIDCTGFRGLLIEQTLKTGYEDWSRWLPTDSALAVQTRSTESAIPYTRAIAHQAGWQWRIPLQHRVGNGLVFCSQYMSPDDAHDVLAQKVAGERLTEPRLIRYKTGRRRKVWNKNCIAIGLSSGFVEPLESTSIHLIQINATRLVQQFPFAGCSDAIANHFNAQSERELDKIRDFIVLHYKLTERDDSPFWRAMRDADIPDSLAQRIALFRENGLVYRGPDELFLTDSWLQVMLGQRLEPKGYHHMGRLMSDEQINMVLNGIRDNISKAVDRLPLHQDFVDQYCRVDEV

SEQ ID NO: 84372 - protein, 503 aa, unidentified
  source 1..503: note = Gallaecimonas xiamenensis
  REGION 1..503: note = tr|K2K9M4|K2K9M4_9GAMM Tryptophan halogenase; OS = Gallaecimonas xiamenensis 3-C-1 OX=745411 GN=B3C1_09358; PE = 4 SV=1
MNQGVRKVLIVGGGSAGWMAAAMLARLLDKQVAISLVESDAIATVGVGEATIPPIQLFNKVLGLDEAEFLAKTQGTIKLGIEFENWGKQGQRYMHAFGDLGRDLGLTPFVHLWLRAKAEGHGQGLWDYSLNYQAAKAGRFIPLERIPGSPLKGLVHAYHFDAGLYAKLLRQHAEGAGVTRIEGEITAVPLDDSGAIAAVQLASGRRLEADLYIDCSGFRALLIEGALKTGFEDWRHWLPCDRALAVPSSNSGQPRPYTRAIAHEAGWQWQIPLRHRTGNGHVYASEYLSDDEAAAKLLANLEGEPLAEPRLIRFQTGRRKAQWRKNCVSLGLASGFLEPLESTSLHLVQSGITRLIKLFPRLQINPALVDEYNRQSAQEFEAIRDFIILHYHLNQRPEPFWQARRQMPVPASLARRMALFAATGRVFWEQHELFTEPAWYQVMLGQNLAPADYGPMADGLEQGQLQKLLADTRTTISQTCQKLPSHGDFLARVQALAKERGLV

SEQ ID NO: 84373 - protein, 505 aa, Asticcacaulis sp.
  REGION 1..505: note = tr|A0A2T5XI36|A0A2T5XI36_9CAUL Tryptophan halogenase; OS = Asticcacaulis sp. CF398 OX=2135738 GN=C8K45_3114 PE=4; SV = 1
MPKPAISKIVIVGGGTAGWMAAAALAKTFPAPHYSITLIESDEIGTVGVGEATIPSIQTFNELLGIDENAFMKAVNGTFKLGIRFRNWKTPGSDYFHPFGVYGVDMGGLNFTHYWMRYHKAGGSGDFGLFNPQTLASREGRFGRMAEINPNVPRVNYAFHFDASLYARFLRSYCEPRGVVRQEGRITDMQQDAQSGDIASVTLADGKQISGDLFIDCSGFRGLLIEQTLKSGYEDWSQWLPCNRAVAVPCEKVGPAAPYTQSTAQEAGWQWRIPLQHRTGNGYVFCDSYMDEDTASDLILQRLDGKAQANPRVIRFTTGHRKQMWNRNVVAMGLASGFLEPLESTSIWLVQEAIMKLIRYFPRDRITDSHRRSFNADLLAAYDNVKDFLIAHYKVTEREDTPFWAYCKHMAIPDTLQARLDSFREANDSLVKSDELFKEASWFAVLAGQGMMPQSYHPGADLMLEDEFRWRMQKVREGSQGLAKMMPSHESYITKACPSSQLVAV

SEQ ID NO: 84374 - protein, 500 aa, unidentified
  source 1..500: note = Hyphomonadaceae bacterium
  REGION 1..500: note = tr|A0A0F2QLD5|A0A0F2QLD5_9RHOB Tryptophan halogenase; OS = Hyphomonadaceae bacterium BRH_c29 OX=1629720; GN = VR75_03830 PE=4 SV=1
MEHLRKVLIVGGGSAGWMTAALFAKLLNGIYDVTLVESEEIGTIGVGEATIPAIKKYNALLELSEDDFLRRTNGTFKLGIQFNDWLRLGSSYIHGFGVIGQDLGWLRCHQYWLKMQGLGKASDFANYSINTAAALSNKFMRSAPELKESPLAHIAHAFHFDAGLYARYLRGFSEARGIKRVEGKIGEVKLRPEDGFVESVVLQNGETLAADLFIDCSGMRAIVIEGALQTGYENWSHWLPCDRAVAVGCQRSENFTPYTKSTALAAGWQWRIPLQHRTGNGHVYSSQYMDADEAERILLANLDGSPTNDPLHIRFETGKRKKIWNKNCVAIGLSSGFLEPLESTSLHLIQSAIIRLLRFLPDQSFDPATIAEFNRQTDYEYERIRDFIILHYKATERGDSEFWRYCRGMSVPATLQRKMDLFAGSGRIFREDEELFSEESWIQVCIGQGIMPKAYDPMVDIRSEAEIEAYLNNIEAVVRKCVAVMPTHAEFVERNCLAPA

SEQ ID NO: 84375 - protein, 140 aa, unidentified
  source 1..140: note = Oxalobacteraceae bacterium
  REGION 1..140: note = tr|A0A4V1TKX4|A0A4V1TKX4_9BURK Tryptophan halogenase (Fragment) OS=Oxalobacteraceae bacterium OX=1871070; GN = EOO77_44125 PE=4 SV=1
KATRQAKRFNEQAAADIERIRDFIVLHYVLTERNDTPFWDTCRTMEIPETLKDRIALFRESGMAYQDAEEIFRVASWAQVMIGQRMSPREHHRMGRIMGEERLRQVMSEMRSHVSRQVSLLPTHHGFIDNYCKDNKVSVS

SEQ ID NO: 84376 - protein, 498 aa, unidentified
  source 1..498: note = Xanthomonadales bacterium
  REGION 1..498: note = tr|A0A354Z9W3|A0A354Z9W3_9GAMM Tryptophan halogenase; OS = Xanthomonadales bacterium OX=2006849 GN=DDZ76_12790; PE = 4 SV=1
MTDQPMRTVVIVGGGTAGWMAAAVLSKAFGSSLTIELVESDEIGIVGVGEATIPQIRLINQFLGLDENEFLRASQGSFKLGIQFNDWTRLGDSYLHAFGEIGLPIGLLGFHHYWLRASAEGLTEPYWAWSLNAQAAAGLRFDRLERIGQSPLGGIRYAFHFDAGLYARYLRSHSEARGVRRTEGRIVTVERREPDGDIAAVVLDGGRRIAGELFLDCSGFRGLLIEGALASGYDEWSHWLPCDRAIAVPSSRSETFRPYTQANARSAGWQWRIPLQHRTGNGHVYSSRHMSDDQAAAILLANLDGEPLADPRPLRFVTGMRRRCWVGNCIAIGLASGFMEPLESTSIHLIQSAIGRLLQLFPQRHIDPALRDEYNRQTRFEYERIRDFLILHYKATERDDSEFWRACAAMPIPESLQRRIDLFRADGRIQRDADELFTEGSWVQVLLGQGIVPKQHHPVADAIDRTRLHEILHASHALIARTAQALPSHAEFVAGISA

SEQ ID NO: 84377 - protein, 169 aa, unidentified
  source 1..169: note = Oxalobacteraceae bacterium
  REGION 1..169: note = tr|A0A4Q3LTV1|A0A4Q3LTV1_9BURK Tryptophan halogenase (Fragment) OS=Oxalobacteraceae bacterium OX=1871070; GN = EOO77_07865 PE=4 SV=1
GIGLAAGFLEPLESTSIHLIQLGIMRLLGLFPTADFAPVLPATYNREMRRKYDGIRDFLVLHYLATERDDSEFWRERQATRPSEALARKIDLYRAGGILIHDQEELFRPSSWLAVFEGQGIRTDERLPLVDRFPQELVDRRLEELDKIIGLAVADMHAADRYIRDVQTS

SEQ ID NO: 84378 - protein, 501 aa, Shewanella putrefaciens
  REGION 1..501: note = tr|A0A3S4R1T7|A0A3S4R1T7_SHEPU Geranylgeranyl reductase family OS=Shewanella putrefaciens OX=24; GN = NCTC10737_02922 PE=4 SV=1
MKVKQAIRKIIILGGGTAGWMAAAALANNPVFAAIELCLVESDNIGTIGVGEGSTPHLKRFMDNLGISENDWMERCHASYKTGIDFINWNGDGQQYFHPFYFQMDVKPAEVFFINANARRRGHGNAVKPDAFFSSGVLAKRNLSPMAQKSLPSANEYGYHFDATELTNYLKDYACQRGVRQIIADVVEVSTSQNQQIETLILANGERLSADFFIDASGFSAKLIHKALGVPFQSFADELLNDSAVTVPVPALMDSTQTQQAKYHTRATALSAGWLWQIPLTHRLGNGYVYSSRHLSANAAAKELLHSVNLPESTQVRFLKLRVGVSDKAWHNNVLAIGLAQSFIEPLEATSIMMTQFTLERFMSLFERYQLNKQAETLSRQTLNQAVMQLVLGIKDYIQAHYVTSQRSEPYWMAARKVAMSQRLTQLLKAWYQGEDFDLLLYQYDQQLAYFRPSWYALLAGMDYRDPKLKRPFEPISADITAQAISYCQTLVEQYFQPKHS

SEQ ID NO: 84379 - protein, 530 aa, Saccharothrix texasensis
  REGION 1..530: note = tr|A0A3N1H0S3|A0A3N1H0S3_9PSEU Tryptophan halogenase; OS = Saccharothrix texasensis OX=103734 GN=EDD40_1405 PE=4; SV = 1
MEDRRIKKVVVLGGGTAGWMAAAYLGKALGPGVTITVLEAPSIPKIGVGEATVPNLHKTFFEFLGIAEEDWMRECNASYKMGIKFTNWRTPGRGEANPRPYGDGTDHYYHLFGLLPNHENHPLSHYWAHKKLGGQTDEPFDYACYREPPIMDAKLSPRFMDGTKWTNYAWHFDTNLISPFLRKWATTNQGAIHIQDLMTEAVIDQRGNISALKTEGGLTIEGDLFIDCSGFRGLLINQAMKEPFLDMSDHLLNDSAVATQVPHDDAANGVEPYTSSIAMSSGWAWKIPMLGRFGTGYVFSSRFQSRDDATLEFCTMWGLDPETANLNQIKFRVGRNRRAWVKNVVSIGLASCFLEPLESTGIYFVYAALYQLAKYFPDKNFDSVLQDRFNAEIETMFDDSRDFVQGHFSFAPRNDTAFWQACKELRLADDFQEKVRMYKAGLAVNMPITDESTYYANFDAEFRNFWNNSNYYCIFAGLDYLPDHSLPALAARQDVLDSAEPVFAQIKQTQKELLTTLPSTYEYLKQLHGK

SEQ ID NO: 84380 - protein, 503 aa, unidentified
  source 1..503: note = Alphaproteobacteria bacterium
  REGION 1..503: note = tr|A0A2N3B1M8|A0A2N3B1M8_9PROT Tryptophan halogenase; OS = Alphaproteobacteria bacterium HGW-Alphaproteobacteria-7; OX = 2013670 GN=CVT85_07205 PE=4 SV=1
MPARLKTILIVGGGSAGWMAAALLSNLFQGLYRIKLVESEDIGTIGVGEATIPAIKKFNELLGLDEVQFMRLTQGTFKLGIQFNNWDKIGSSYVHGFGVIGQDLGWLRCHQYWLKMKLQGEASDFANFSINTAAALENKFMPARTDAGDSPIGHIAHAYQFDAGLYARFLRTYAEERGVVRQEGKIVDVNLRPDDGYVDSVVLESGETLAADLFIDCSGFRGLIIEQAMKTGFEDWTHWLPCDRAIAVPCERSDNFTPYTKATAHGAGWQWRIPLQHRTGNGHVYASSYMDEAEAERILLENLDGKPLAEPNRIRFTTGKRKQIWNRNCLAVGLAAGFLEPLESTSLFLIQSSLIRLIRLFPDGDFDQANIDEFNRQTDFEYERVRDFIILHYKATDRDDTPFWRYCRDMDVPATLARKIDLFRANGRIFREDEELFSEESWIQVMLGQGVIPQGYDPLVDIKSEAQVAQFLGNVENVIKKCVAVMPTHEDFVAKYCDAKAPV

SEQ ID NO: 84381 - protein, 539 aa, Pelagibaca sp.
  REGION 1..539: note = tr|A0A2D6BET6|A0A2D6BET6_9RHOB Tryptophan halogenase; OS = Pelagibaca sp. OX=1979400 GN=CMI67_21790 PE=4 SV=1
MGQPLSSITIVGGGTAGWLAAVYLRRACAERIRITLIESPNIPTVGVGEATVPQMPFTLRQIGLDERTFFRRCDATFKTGVMFRNWNTDRKGKLVSYLNPFSNAPSLDGVSIGNHFHAFGAGKRDYVSCYSPYAHMAKAFKGPFSFKDPKADPMPKPAYAYHLNAVAFAKLLAEVGTERGIEHILDDVDDVELDERGYVAALQLRERGRHPVELVIDCTGFRGRIIREALDEPFEDYSDYLGNDRAMALQIPHTNPEKLPPFTSSTALGAGWSWSVPLFNRVGTGYVFSSAHRTDDEARDEFLAHLGAAAPPGSEPRVIPMRIGRSRRAWVKNCIAMGLSGGFIEPLESTAIHMIDQSIRMLLFNMPSTDYEAPVRRRFNRLVDDLYGEVRDFICLHYRMGNREDSAYWIDARTELKITDRLAENLELWQYQLPTQHDLESAQLFTHDTYQTVLFGKRCYENGYGAERLNTPREVRAGSWKAYLRDADIRFAKIVDYKGDHHRLLMALRGELAPGGARKTPAVVAARTGSCLKETPVLF

SEQ ID NO: 84382 - protein, 509 aa, unidentified
  source 1..509: note = Halieaceae bacterium
  REGION 1..509: note = tr|A0A2E1NN00|A0A2E1NN00_9GAMM Tryptophan halogenase; OS = Halieaceae bacterium OX=2026743 GN=CME53_03485 PE=4 SV=1
MLGQPIQNIVIVGGGTAGWNAAALLVRMMSRVISITLVESEEIGIVGVGEATIPPVIRFNNALGLNEDDFLKSTQGSIKLGIQFENWGELGDSYMHAFGDVGRDFAFCPFHNFWVRSQQLGIEADFWDFSPNYQAAVRHKFGKVSSRSGTSDGGLPYAYHFDAGLYAKYLRGYCESQGITRVEGIVDHSSTCSDTGFIKSLTLKSGKEIEGDLFLDCSGFRGLLIEQALQTGYEEWSHWLPCDRAVAVPSESTGPIRPYTRSIAHKAGWQWNIPLQHRTGNGHVYCSSYVSDDEACHTLLSHLEGPPLAEPRQIPFKTGRRKLQWNKNVVALGLASGFLEPLESTSIHLIQTGIRRLMDNFPHQGIRQIDIDAFNKQSKLEFEQIRDFIILHYKINQRTDSQFWVNCRNMSIPDTLEQKIELFKHSGRVLRYSDELFAEVAWYQVMLGQGLIPDDYHPIADSLSEQKMLRMFAELRAMVGDTVSQLPTHDQFLASVTQQQLRTSSAASA

SEQ ID NO: 84383 - protein, 505 aa, Janthinobacterium sp.
  REGION 1..505: note = tr|L9PL15|L9PL15_9BURK Tryptophan halogenase; OS = Janthinobacterium sp. HH01 OX=1198452 GN=Jab_1c09490; PE = 4 SV=1
MIRRIVIVGGGSAGWLTAGLIAADHQGTPLHITLIESPDIAPIGVGEGTWPSMRDTLRRIGVSEADFFRECDAAFKQGSRFNRWVDGGDRDYYFHPFVLPQGYGEVNLPQQWQAQHPDTPFADLVSFQPHLCVNGRAPKQVSTPEFASVANYGYHLDAGKFGVFLRKHCLEKLGVHYVPDKVVGIVSHDNGDIAALQTQSHGALEAELFIDCTGMQSLLLGKHYEVPFISQKHVLYNDSALAVQIPYPADDYPIASQTSSTAQSAGWIWDIGLPTRRGVGHVYSSAHIGDDQAEAELRRYISATGGPQDIPPPRKLSFNPGYRARFWHRNCVAIGLSAGFIEPLEASALALVEMSAAMVSDELPATREAMDIVARRFNDAFTYRWERVIDFLKLHYVLSRRRDSDYWRDNTAAVPERLSELLTLWRHRAPSRNDFNRIEEVFPSASYQYVLYGMGFRSEYTHPHAQQAAQADHYFREAAALTRKMLGALPDNRELINHITKRHHA

SEQ ID NO: 84384 - protein, 519 aa, unidentified
  source 1..519: note = Sphingomonadales bacterium
  REGION 1..519: note = tr|A0A101VEA1|A0A101VEA1_9SPHN Tryptophan halogenase; OS = Sphingomonadales bacterium BRH_c3 OX=1734408; GN = APF78_09730 PE=4 SV=1
MDEAMTGTIGKVVILGGGTAGWLSACYLAARRPWLDITLVEAPDIPTIGVGEGTWPTMRGTLAAIGIAEAEFFAECDASFKQGSRFDGWATGEAGDSYLHPFTTPPRGEAEDLIAAWRSAAPDLSFAEAMTPQARICAADLAPRQRAMPDFAAASNYAYHLDAGKFGALLARHATGRLGVRRIAAHVNGVIGAPSGDLSAVQTREGETIEGDLFIDCTGRAGVLIGGHCGVEWIDRSDVSFNDCALAVQVPTLPGSAIASQTVGTAHEAGWIWDIALPQRRGIGCVYSSRFMDDARAEEILRSYIGKHMPHAAWNKLSPRKIAFSTGHRARFWHRNCIAIGLSAGFIEPLEASAIVLIELSLKALAENFPASRETMDIHAHRFNELFRYRWDRIIDFLKLHYVLSAREEPYWQAQRDPATIPPRLAEQLTLWREQPPSNWDFPQVDEVFSAASQQYVLYGIGFPAPAKLPAAPSAKALAQIAEVREQARALVSALPTNRAYLDNLAAATQSPALKETTA

SEQ ID NO: 84385 - protein, 507 aa, Pseudomonas fulva
  REGION 1..507: note = tr|A0A0D0IDB6|A0A0D0IDB6_9PSED Uncharacterized protein OS=Pseudomonas fulva OX=47880 GN=RU08_22805 PE=4; SV = 1
MLNIRSARRHVVVGGGTAGWFAALTLRRLFDPSIEVRLIESPDIGIVGVGEGGLINLIEALNRNGIPVSDFMRETGAAFKMGFCYEGWRGGGEQDRFYHLFADPKAEELGWSEFGGYPLMAALIHHNHALDGGVLGYNVGYEAVVNNLSQMEMAQLLVSGRSGLSMSLHFDSHRVADFLRKVAVSRGVVHQQGKVDSLVRDERGLVQSLRVTNTDGSAEALDLGLMIDASGFARLGIGKTEGSRWRSFKDYLLMDSAIPFHMPHPQANPSLVTRAIAMEAGWMWQIPLRERVGAGYVFSSAHMDPERAVREIEAKVGHAIEPMRTLRFEPGHFEQVWMGNVLAIGLASGFVEPLEATSIGQMLEQLKNFERVLVQSQGVVLDSVIDGFNAANTQSWSEIRDFLRMHYDCPRRDNPFWRDVADSNMPVSYQDLKASFAVRTPRLIDIQGNSLHGWGAIFHVMNWMFVAHPLGLLSREAAQADVLALPEDKRQRVDAYMDKVRQARTAR

SEQ ID NO: 84386 - protein, 505 aa, Janthinobacterium sp.
  REGION 1..505: note = tr|L9PGC9|L9PGC9_9BURK Tryptophan halogenase; OS = Janthinobacterium sp. HH01 OX=1198452 GN=Jab_2c25050; PE = 4 SV=1
MTNNRIKRVVVVGGGSAGWMAAAAVATYLGKQTSVRLIESEEIGIVGVGEASVPHIRMFNGQMLGIDETEFVKRTQGTIKLGIQFQDWSRIGDSYIHGFGVIGRSLGPLPFHQFWLKLFQSGRAAPIGEYSLQTVMAPQGKFVPGDRNSPPNSPLADIAYAYHFDAGLYARFLRQLSEQRGVQRIEGKIVGVNQRADDGFVESVTMENGQVVDGELFIDCSGFRGLLIEQALKTGYHDWSHWLPCDRAMAVPSERIDPITPYTRATARAAGWQWRIPLQHRTGNGYVYSSKYIGDDEAAATLLANLDGKPLADPRPLRFTPGMRKKCWNKNVVALGLASGFLEPLESTSIYMVQSGITRLLGLFPGSDFNPLLAERFNRESAFEYERVRDFLILHYHATERNDTPFWDYCRTMSVPDSLKEAMDLFRSDGRYFRNGEDFFALPSWVQVMLGQRIMPQSYHPIVDDMPEDKLVQYVEDMRATLAHAVAAMPTHQQWLDRYWKASAL

SEQ ID NO: 84387 - protein, 492 aa, unidentified
  source 1..492: note = Halieaceae bacterium
  REGION 1..492: note = tr|A0A3D0GKN0|A0A3D0GKN0_9GAMM Tryptophan halogenase; OS = Halieaceae bacterium OX=2026743 GN=DEO43_01275 PE=4 SV=1
MSQINKVVIAGGGTAGWMAAASISKLVGRRLDITLIESETIGTIGVGEATIPSLLTINRLLKISEPEFLRETKATFKLGIAFENWRKLGHRYIHSFGDTGTGCWAAGFHHFWLRGVNEGFAKPYGDYCLELQAAEMSRFGLVSSHKINYAYHLDATQYAAYLRRLAEQAGVRRVEGIIDQVSLDPSNGNITHLLTKSGQIIEGDLFIDCTGFRGRLIAEALGTGFEDWSHWLPCDRAVALQTESVSPAIPYTRAIAHGAGWQWRIPLQHRVGNGLVYCSKYQTDEEAIDLLRRNTQGEATTEPRFIQFTTGQRQQHWTKNCIALGLSSGFIEPLESTSIHFIQNGLLWLLLMFPSDTILESVRNEYNAKMRREAERIRDFIVMHYHLTERDDTEFWRYCRGMDIPESLKHRMSLFGSSGTVFKDQDDVFAENSWVQVMMGQGLIPKTYHPIVDQMSSVELSEFLRQNLERVDQSLSQLPDHFNFVKQYAQSG

SEQ ID NO: 84388 - protein, 500 aa, unidentified
  source 1..500: note = Halieaceae bacterium
  REGION 1..500: note = tr|A0A3D1YM94|A0A3D1YM94_9GAMM Tryptophan halogenase; OS = Halieaceae bacterium OX=2026743 GN=DEX20_07390 PE=4 SV=1
MSKEVNNVVIAGGGTAGWMAAAALAKLVARPLSITLIESEEIGTVGVGEATIPSILTINRMLKIPEPDFIKLTSGTFKLGIKFENWRRQGESYIHSFGDTGKGSWAAGFHHFWLKGKEAGIDHDYGDYCAELKAAEQEKFAITSQRPLNYAYHLDAAKYAQYLRSMAEAHGVKRVEGRITSVTTDEDGYITSLDINDGVRQVDGDFFIDCTGFRALLSGGALGVAYDDWTHWLPANRAWAVQSELNEPPKPYTRSIAHTVGWQWRIPLQHRAGNGLVYSSEFMTEEDARALLVRNVNDRLITDPRPIRFTTGQRAKYWEKNCVALGLASGFIEPLESTSIHMIQNGIMWLLLMFPDTTIEGSTVNEYNQRIRSEAEYIRDFIVLHYTVNERHGEPFWDYCRNMALPESLSHRIELFTRTGRIFQAQDDIFTENSWVQVLLGQGVTPQSYHNITDSLTPPQLEEFLSGIRHEVNQTVSGLPAHGDFIQSLIRHTELRAASS

SEQ ID NO: 84389 - protein, 506 aa, Asticcacaulis sp.
  REGION 1..506: note = tr|A0A2T5XQM7|A0A2T5XQM7_9CAUL Tryptophan halogenase; OS = Asticcacaulis sp. CF398 OX=2135738 GN=C8K45_0687 PE=4; SV = 1
MSEVIRKIIIAGGGTAGWMCASVLRKGLGHTVDILLIESEEIGTVGVGEATIPPIRKFLEHVGIDEGEFIRATEASFKLGIEFKGWGAADSRYFHGFGDFGAVHEAVRPYQLWRRLREAGDEMPLEDWSLPTALARAGKFFPPNPDPRSPMHDYAYAYHFDAGLFARFLRQHCEAQGVRRLNAKIDVVQLRPEDGFIEALQLDNGTTEAADFFIDCTGFRGLLIDGALKAGFDDWTHWLPADRAWAVPTEKNPAGITPYTASTAHAAGWQWRIPLQHRTGNGHVFSSAFMDEETARDVLLQNLDTPTLKDPMLIRFTTGRRPEPWTKNCVAVGLSSGFLEPLESTSINLIQSGIAQLLELFPSRQAEEVLRREYNRQMGLSYERVRDFIILHYKLNTRSEPMWRYCAGMSIPDTLAHKIELFAARGDVVKYDWDHFAEPSWIAVLNGQGVVSRFADPLAERLPLDSVRALMRQRRETIAQVARQLPAHADFIAQHCLSPNYMKAST

SEQ ID NO: 84390 - protein, 530 aa, unidentified
  source 1..530: note = Halieaceae bacterium
  REGION 1..530: note = tr|A0A3D0GKA7|A0A3D0GKA7_9GAMM Tryptophan halogenase; OS = Halieaceae bacterium OX=2026743 GN=DEO43_01260 PE=4 SV=1
MTEEFDQVKRIVVVGGGTAGWLVAARLAAHYELSSETLTLTLVESDQTGPIGVGEGTWPSMRTTLNKIGITETEFVRECGASFKQGSKFIGWSRGAEDYYYHPFSLPQDHAEENAWWSWQNLANNEPFADSVSPQPAVCDRDLAPKQISMPNYAYALNYGYHLDAGRFAGLLMRHAVERLGVCHIKDHLIGVESDSDGDIAAVIGKNYGRIEGDLFIDCSGFESLLIGKHFEIGKVDCSKYLFNDRALAVQVPYATELDSISSVTLGTAHDAGWTWDIGLQHRRGVGRVYSSSHQSDEQALEGLKSYLKREAPHVDFESSSPRKLSFESGYRSKFWHRNCVAIGLSAGFVEPLEASALVLVELSAQFLTDQLPAYRSGMDAVADRFNRQFTYRWTEIIRFLKLHYAISSRDDSAYWRQHKESDSIPESLRSDLARWNYQAPWHHDEGRIDDLFPSASYQYVLYGMGFQTRDPVLRSRSHARRLTQYRERQLRTQQAQARFCEHLPTNRELVRQLQSQSFSSVPHSAVERL

SEQ ID NO: 84391 - protein, 514 aa, Asticcacaulis sp.
  REGION 1..514: note = tr|A0A2T5XR29|A0A2T5XR29_9CAUL Tryptophan halogenase; OS = Asticcacaulis sp. CF398 OX=2135738 GN=C8K45_0873 PE=4; SV = 1
MTQPVKSLVIAGGGTAGWMCAAILSHYLPKTIRIQLIESEQIGTIGVGESTVPPFVEMIRRLGIDEQDFIRQTQGSFKLGIRFKDWRHKGEEYYHPFGHIGGIIDDQDFYQHWLRARHLGDDTPLQTYSAAGEMARNHKFMLPFRAPRTPIASAAYALHVDASLVAKYLRRFAEDKGVTRHEGMIGRVDQDARGFISALELTDGRRIEGDLFLDCTGFRALLIEKALGVGYVDWSKELLCDRAIALQTENINDPHPYTYAEAQDAGWRWRIPLQHRAGNGYVYSSRHISDEDATKTLLSQVEGQPVTKPMVVPFRTGMRTEIWAKNCISVGLASGFIEPLESTAIHLIYRSMDFLLRYFPGADCDANLVREYNLRMGTDYTEIKDFVVLHYCLTQRDDTPFWRDVQAAPVAESLREKIALFAENGSLRAGADDLFRAPSWQSVMDGMGVKPRRYNLLVDRVSEADLRATLKAVREQLPAFVATLPSHGEFLRANCPAVTTEKIIGHEKHEKQMS

SEQ ID NO: 84392 - protein, 492 aa, Pelagibaca sp.
  REGION 1..492: note = tr|A0A2D6B976|A0A2D6B976_9RHOB Tryptophan halogenase; OS = Pelagibaca sp. OX=1979400 GN=CMI67_11590 PE=4 SV=1
MRVTIVGGGSAGWIAAATLQAQLNGTGPGPVSITVVESPKAPRIGVGEATIPTMRDMLRRFGLSERGVLAACDASFKHGIRFDDWSGPGSRCLHPFHRHALPRDIAARWLASSGEPPFAAIASAQAALIAHERAPRPAGAPEFTGPVPYAYHLDAEKFAEYLAGALTSRGVTRQSAHVTGVLREGETVTALRTEDGPPLSADLWVDCTGFAGLLLPEEGRDWVSYADRLLCDRAVTMRVPEDDPAYTPAPFTRARALEAGWCWDIGLRHRRGRGYVYSSAHLSDDEAEAALRAEEGQHSAELPARVIHFTPGRRAAPWQGNVVALGLAAGFLEPLESTGLFLADFAARALVEMFPAAPGLPMQPLARRYNALLTEMHDDLADFLALHYAVAQRRDTTFWRDAAKAALRSERLRELLELWQLRPPSFADFSYRYSPFSHTAWEFILLGMGWRPATAPAGTTPCAAPAEALTRQMLDALPDHGTLLRHLAQAGR

SEQ ID NO: 84393 - protein, 503 aa, Janthinobacterium sp.
  REGION 1..503: note = tr|L9PFY3|L9PFY3_9BURK Tryptophan halogenase; OS = Janthinobacterium sp. HH01 OX=1198452 GN=Jab_2c25950; PE = 4 SV=1
MQQAAIKNIVIVGGGTAGWMTATALSTILRGQYNIRLVESDEIGIVGVGEATIPMIQRFNQVAGIDEAEFMKATQGSYKLGIEFVNWGKLGDRYIHGFGVLGQDLWTVRFDQYWQRLRGLGKARELDEYSITRMAARHNKFMPPRRDLANSPLSDIAYAYHFDASLYARYLRTVSEQRGVRRTEGKIAQVSQRADDGYVDAVVMESGERIEGDLFIDCSGFRALLIEGALKTGYEDWNHWLPCDRALAVPCESVSPLTPYTRATAHRAGWQWRIPLQHRTGNGHVYSSAFMEDEEAQRILLANLDGKPLAEPRMVKFRTGMRKLGWNKNVVAMGLASGFLEPLESTSIHLIQSSIARLVQFFPDRGFNQLEVDEYNRQSRFEYERIRDFVILHYKLNQRDDSDFWKQCAAMPVPDSLQHKLDLFRARGRVVRFDNELFAEAGWLQVMHGQNLKPEGYDPLVDLLPVDEAEKYLESIRDVIGQCVQHMPDHAEYIAQHCAATRR

SEQ ID NO: 84394 - protein, 506 aa, unidentified
  source 1..506: note = Acidobacteria bacterium
  REGION 1..506: note = tr|A0A2E4W4U5|A0A2E4W4U5_9BACT Uncharacterized protein OS=Acidobacteria bacterium OX=1978231; GN = CL489_05060 PE=4 SV=1
MTINNIIIVGGGSSGWLTAAYLSNNLPHQVKIALIESSEIPTIGVGEGTQPFTMPFLQDCGLEPADWMKKTDATYKYGVELIGWSDDPVFIDNDTQEMAVLGPNIMFHNYWLSKKCGAKEYINSMPAYILAKHNKAPKANHPDLDYTPGYTEQSCDAVHFNAHDIISTLKAHCKDRITYIDDLIVEVITDEQGVTGLKTKNNGILTADLYIDCSGFDSLLLEKSLGVKFIPVNDVLLCNRAVAIPKQYTNKKEEMHPYTKAIAMDAGWRWTIPTYSRIGNGYVYCDDFISSEKAEEALRKSINEWSAPANHIKMKTGIHEHIAYKNVYAIGLSAAFAEPLEATGITFTTKAISNLVQVLNNSNGQWNDDIRNFLTNKYQVMVNEIVNFLFLHYKLAPKDDTPFWKATKDIPYSSGCLPGVGIKNVLDKFVPNPPNTLIENGYFEMFHVGQWFSLLYGYDVYNKYVYNIDKHIVNYGDWVNTMYKDRTKYALNFFPNQYEYLKELYG

SEQ ID NO: 84395 - protein, 495 aa, unidentified
  source 1..495: note = Alteromonas pelagimontana
  REGION 1..495: note = tr|A0A2A6ATK8|A0A2A6ATK8_9ALTE Tryptophan 7-halogenase OS=Alteromonas pelagimontana OX=1858656; GN = CA267_14200 PE=4 SV=1
MSSQIKKVVIAGGGTAGWMCAAALSKLLGKNLHVTLVESDDIPTVGVGEATIPTLLVLHKLLGIDEAEFMAATNATFKLGIAFENWRDINQDYIHSFGFLGKDCWAAGFQHFWLKGLRQNMVSEIGDYIPEHLACREGRFAVLANQDKNYAFHLDAGLYAKFLRNLAQRHGCVRTEGTITQVNLREDNGYIKSLTLASGQEIEGDLFIDCSGFRGLLIEQALHTGYEHWDHWLPCDSAIAVQTETVGEAVPYTRSIAHDAGWQWRIPLQNRTGNGLVFCSKYLSDEKAKQLLLENVEGKLLNEPRVIKYRTGTRRKYWNKNCVAIGLSSGFIEPLESTSIHLFQQSIVRLMLMFPSEGINPASVDEYNRQCRSEIENIKDFVILHYHLTDRTDTPFWRYCKNMSIPTTLKHRMDLFQQSGKTLKLAEELFGETSWVQVMLGQGLMPKQYHPIVDLMSDKELKDFLDTIKAGVKRKVNNWPNHLDFIRHYCQATRV

SEQ ID NO: 84396 - protein, 501 aa, Pseudoalteromonas ulvae
  REGION 1..501: note = tr|A0A244CTI2|A0A244CTI2_9GAMM Tryptophan halogenase; OS = Pseudoalteromonas ulvae OX=107327 GN=B1199_01115 PE=4; SV = 1
MAQPIKNIVIIGGGTAGWMTAASLAKYVNQHATITLIESSDIATVGVGEATIPNIVQFNHNLGIDEVELIKATQATFKLGIQFENWTKTGGSFFHPFADYGLRIDNVDFHHYLQHANQLGGKHQLDEFSFACQLAQRGCFAQPHTHPSSPLADYAYAYHFDAGLYADFLKKFSKNLGVKHVIGTVEDVSLTADTGFIDYVTLTCGSQYHGDLFIDCSGFEGLLIEKALNTGYEDWSQWLLCDTAIAVQTTSTSEPDPFTRSIAQTAGWQWHIPLQHRTGNGYIFSRRHQSEEEAKALLLANIQGTPITTPRTIRFNPGRRKQIWNKNCIAIGLSSGFLEPLESTSISLIQTAIAKLLSFFPDMSFNPADIAEVNRLHNSELEQIRDFLIMHYTLTDKNDSPFWLDYQNIALPDGLSHKIALFKSRGHIAMYDNESFEPSSWLTFYRGYGITPKRIDPRAQAVPADVLQQRLMQMKQSIATAAQGALSHQAFISQHCLAEKE

SEQ ID NO: 84397 - protein, 503 aa, Janthinobacterium sp.
  REGION 1..503: note = tr|L9PI41|L9PI41_9BURK Tryptophan halogenase; OS = Janthinobacterium sp. HH01 OX=1198452 GN=Jab_2c25940; PE = 4 SV=1
MSLGLVKNIVIVGGGTAGWMTAAAMSALISNCCKIRLVESDEISTIGVGEATIPVIRGFNQLIGVDENEFLRQTQGTFKLGIEFVNWSKQGESYIHGFGVIGRDQLLAKFYQYWLKLYQAGKAPGVEHYSINTMAASMNKFMRADSDSGDSPLSDISHAFHFDAGLYAKYLRGLSEGRGVRRTEGRIVDAVLRADDGFVEAIVMENGERIEGDLFVDCSGFRGLLIEGALKTGYEDWSHWLPCDRAIAVPCESVSPLLPYTRATAHDAGWQWRIPLQHRIGNGHVYSSKFMEPEQAESILMNNLDGKPLAQPRHLKFTTGKRKRAWNKNVVAIGLAGGFMEPLESTSIHLVQTGITRLLMMFPHLGYDQADIDSFNEATDNEYAAIRDFLILHYKLNAREGKPFWDYCRNMEIPATLQRRMDLYRSNGRIVRASDELFTETSWLQVMHGQGLRAKGYHPLVDQRSEADIAAFLANVKDVVLRCVEHMPTHEEYIASCCAAPKM

SEQ ID NO: 84398 - protein, 496 aa, unidentified; identical to SEQ ID NO: 83657
  source 1..496: note = Halieaceae bacterium
  REGION 1..496: note = tr|A0A2D7P4X3|A0A2D7P4X3_9GAMM Tryptophan halogenase; OS = Halieaceae bacterium OX=2026743 GN=CME51_09480 PE=4 SV=1

SEQ ID NO: 84399 - protein, 72 aa, unidentified
  source 1..72: note = Halieaceae bacterium
  REGION 1..72: note = tr|A0A520R949|A0A520R949_9GAMM Tryptophan halogenase (Fragment) OS=Halieaceae bacterium OX=2026743; GN = EVA64_03800 PE=4 SV=1
MHQPIKKVVIAGGGTAGWMAAAALGKVLGKTLDITLVESDEIGTVGVGEATIPTILTLHEVLKIKEQDFLTA

SEQ ID NO: 84400 - protein, 503 aa, unidentified
  source 1..503: note = Sphingomonadales bacterium
  REGION 1..503: note = tr|A0A117S650|A0A117S650_9SPHN Tryptophan halogenase; OS = Sphingomonadales bacterium BRH_c3 OX=1734408; GN = APF78_01555 PE=4 SV=1
MTQRLKTILVVGGGSAGWMTAALLSNLFQGLYRIRLVESEDIGTIGVGEATIPAIKKFNELLELDEADFMRLTQGTFKLGIQFNNWDRIGSSYVHGFGVIGQDLGWLRCHQYWLKMKLHGDAADFANLSINTAAALENKFMPARADAGDSPIGHIAHAYQFDAGLYARFLRGYAEDRGVVRQEGKIVDVALRGEDGFVESVTLENGERIEADLFIDCSGFRGLIIEQAMNTGYEDWTKWLPCDRAMALPCARSDNFTPYTTATANGAGWQWRIPLQHRTGNGHVYSSQFMEDDEAEAILRANLDGEALGEPNRIRFTSGKRKRIWNRNCVAVGLSGGFVEPLESTALFLIQSSLIRLIRLFPDLSFDQANIDEFNRQTDFEFERVRDFIILHYKVTQRDDTPFWRYCRDMDVPDTLQRKMDLFRANGRIFREDEELFSEESWIQVMLGQGIIPHGYDPLVDIRSEAQILQYLGNIENVIRKCVAVMPTHADFVGKYCAATASG

SEQ ID NO: 84401 - protein, 520 aa, unidentified
  source 1..520: note = Halieaceae bacterium
  REGION 1..520: note = tr|A0A2D7YJM7|A0A2D7YJM7_9GAMM Tryptophan halogenase; OS = Halieaceae bacterium OX=2026743 GN=CME50_06575 PE=4 SV=1
MSEQMQKVVIVGGGSAGWLTANILAARFQTGNSGIAITLVESPNVPTVGVGEGTWPSMRTTLKNIGIDEADFIRQCDASMKQGTWFKDWLNLGDESYYHPFSLPEGFDTVNLAEYWLNGDAGNLSFAQAVTPQYAVCELGRAPKQLGIPDYAYTVNYGYHLDAGKFAALLTENAVSRLGVTHIEADVTEVLCDDHGYISAIKTEQAGDIEGDLFIDCTGFKSMLLGGHYGVLLKSQRQYLFNNAALAVQVPYDNDDAPIAATTHSTAQRNGWVWDIGLQHRRGVGHVFSTDYQTAAETEAVLDQYLKSNGRAAGLDGLTPRLLSFEPGYRERFWVKNCVGVGLSAGFIEPLEASALVLIELSASAIAEQLPSDRATMAVVAKRFNREFSSRWEQIIDFLKLHYALSQRTDTQYWQDNRDAESMPETLAENLLLWRSRAPWYYDDRRSDEMFPSASYQYVLYGMGFESTVTALQLRNNQHQRETALRFFAEAKKKAQRYSQHLPPNRFLMNQVQEKNFAAI

SEQ ID NO: 84402 - protein, 496 aa, unidentified; identical to SEQ ID NO: 84259
  source 1..496: note = Halieaceae bacterium
  REGION 1..496: note = tr|A0A2D7LWR4|A0A2D7LWR4_9GAMM Tryptophan halogenase; OS = Halieaceae bacterium OX=2026743 GN=CME52_03430 PE=4 SV=1
  VARIANT 181: note = Xaa can be any naturally occurring amino acid
  VARIANT 194: note = Xaa can be any naturally occurring amino acid
  VARIANT 206: note = Xaa can be any naturally occurring amino acid
  VARIANT 283: note = Xaa can be any naturally occurring amino acid
  VARIANT 302: note = Xaa can be any naturally occurring amino acid
  VARIANT 488: note = Xaa can be any naturally occurring amino acid

SEQ ID NO: 84403 - protein, 512 aa, unidentified
  source 1..512: note = Streptomyces lunaelactis
  REGION 1..512: note = tr|A0A2R4TE69|A0A2R4TE69_9ACTN Tryptophan halogenase; OS = Streptomyces lunaelactis OX=1535768 GN=SLUN_13725 PE=4; SV = 1
MTASYLGKALQGTVDITVLEAPSIPRIGVGEATVPNLQRSFFDYLGIAEEEWMRECNASFKMAVRFVNWRTPGAGEPTPRALADDGPDHFYHPFGLLPDHDQTPLSHYWYKRKYEGETTEPFDYACFPEPPVMDAMKAPRSLDGEAATRYAWHFDAQLVADFLSRFATKKQGVNHVQDEMVRVEQDERGYVTALHTKGGLVLDADLFVDCSGFRGLLINKALEEPFIDMSDHLLCDSAVATQIPHDDEKNGVEPYTSAIAMSSGWSWKIPMLGRFGSGYVYSSQFTSQEEATEEFCKMWGLDPEQTEFNHVRFRVGRNRRAWVNNVVSIGLSSCFLEPLESTGIYFTSAAIYQLAKHFPDRTFNQGLVDSFNREIELMFDDTRDFLQAHFYYAPRTDTPFWRANKELELTQNIKDKIAAYKAGLPINPPISDESTYYGNFEAEFRNFWTNGSYYCIFAGLGLEPDAPLPSLAHKPESVAGALPLFKQVKARQKELVESLPSAYDYLRHLHNS

SEQ ID NO: 84404 - protein, 527 aa, Couchioplanes caeruleus
  REGION 1..527: note = tr|A0A3N1GRZ7|A0A3N1GRZ7_9ACTN Tryptophan halogenase; OS = Couchioplanes caeruleus OX=56438 GN=EDD30_5987 PE=4 SV=1
MASNVVIVGGGTSGWMTASYLKAAFGDRVNVTLVESKNVPSIGVGEATFSTIRHFFNYLGVDEGEWMPECHATYKLAVRFEDWREPGHVFYHPFERNRIVDGFPLTDWWVQKKPTERFDRDSFLLASMCDAKSSPRYLDGSLFDSIFDLSDGGRTTLSEQNTQFPYAYHFDAALLAKFLTRYGVARGVRHVLDDVVDVVLDDQGAIDHVRTRQQGDVHGDLFVDCTGFRALLVHKALEEPFISFQDHLPNDSAVALRVPSDMAAEGLRPATTATAKDAGWIWTIPLFERVGTGYVYASEYATPEEAERTLREFVGPAADDVAANHIRMRIGRSQRAWVKNCVAIGLSNGFVEPLESTGIFIIQNGIEQLVKNFPVGHAETDDGLRKAYNRQAAHVMDGLREFMVLHWYASGRADNQYWKDTKTRTIPDGLAERLEQWKVKLPDQDSIYPHYHGFESYSYRAIILGLGGLPVPSLPVLGKLDGTAADREFQQVADQAAALLEKLPSQYEYFAHLHGLPPARRTATAGR

SEQ ID NO: 84405 - protein, 515 aa, unidentified
  source 1..515: note = Xanthomonadales bacterium
  REGION 1..515: note = tr|A0A3N5JGT5|A0A3N5JGT5_9GAMM Tryptophan 7-halogenase OS=Xanthomonadales bacterium OX=2006849; GN = EHM68_12835 PE=4 SV=1
MSTPLRDIVIVGGGSAGWLTAGILASDHRVRDNPAVRITLVESPDVRTIGVGEGTWPSMRDTLRRIGVSESEFIASCNASFKQASRFAGWRSGEAEDHYYHPFSAPQGFGEVNLVPAWLRLGEQARFADQVSFQPRLCEHGRAPKQKVTPEFAAVANYAYHLDAVKFGDFLQAHCVDRLGVRYQPAHVQGIRAHENGDIAGLETPEAGTIAGDLFIDCTGFSSLLLHRHYGIPLERVSNILFCDTALAAQVPYADPNDPIASHTLGTARAAGWIWDIGLPTRRGVGYVYSSAHTSHEQARETLLDYLRRSGATVEPEPRRIELNPGYRKTFWHRNCVAVGLSAGFVEPLEASALALIELSAKMISDDLPPNRELMDVVARRFNDRFRYRWGRIVDFLKLHYALSGRGEQFWVDNRRADSIPDRLRELLELWRFRPPGGRDFPDTEEVFPAASYQYVLYGMGFRPEPPSHPLRLDDPEAARRGLQTVAQTARKYLAGLPANRELIEHVRTQGLPRV

SEQ ID NO: 84406 - protein, 495 aa, unidentified
  source 1..495: note = Halieaceae bacterium
  REGION 1..495: note = tr|A0A2E1NQA1|A0A2E1NQA1_9GAMM Tryptophan halogenase; OS = Halieaceae bacterium OX=2026743 GN=CME53_07735 PE=4 SV=1
MQKSIEKVVIAGGGTAGWMAAAALSRLVARPLSITLIESEDIGTVGVGEATIPSILTINRMLQIPEPDFIKLTSGTFKLGIQFENWRVSGESYIHSFGETGKGSWAAGFHHFWLRARELGIAGEYGDYCAELKAAQEEKFAISSQQRLNYAYHLDATKYGRYLRGLAESAGVTRVEGKISSVNLSDDGDIASLDINDGDSTVEGDLFIDCTGFRALLSGAALNGTYDDWTHWLPANRAWAVQSELGEHPKPYTRAIAHKVGWQWRIPLQHRAGNGIVYSNEFMSDDDARDTLVANVPEKLIIEPRPIKFVTGQRRQYWNRNCVALGLASGFIEPLESTSIHMIQNGIMWLLLMFPDPVIEKSTIKEYNLRIRSEAEYIRDFIVLHYAANERYGDPFWDHCRNMALPDTLSHRMELFKKTGRIFQAQDDIFTENSWVQVMLGQGVTPTAFHNIAAGQGEPSLDKFMQGIRDNVENTVAGLPRHADYIKQLMAHAKV

SEQ ID NO: 84407 - protein, 495 aa, Nostoc minutum
  REGION 1..495: note = tr|A0A367RL85|A0A367RL85_9NOSO Uncharacterized protein OS=Nostoc minutum NIES-26 OX=1844469; GN = A6770_14485 PE=4 SV=1
MNFHIKKVAIVGGSSAGLLSAVTLKYFFPKLHILLLYSKKHAPIGVGESTTAWFPQFLHEHLNISREEFYKSIWPVWKLGIRFEWGVPHISHFNYTFDGQFRYESQLLSKIPGFYCMHDMRQASRYSILMDKHHAPLLHDGKGNIKILSDGFGYHIDVYEFINYLTAKALSLGVDIQDLEVLDAKLDEYGNVQHLCCADDLKVNADLFIDCSGFKSQLLGKALQEKFISFGYRLFCDSAIVGNWKRRSPIFPFTTATTMNSGWRWRIDLRDRVSFGYVYSSSFCSQDEAIQEYLSLTPYATEDLRKISFRSGRYKRFWVNNVIAIGNASGFVEPLESTGQHMIVETIWRVVLALQDSNLCPTPKLIDATNRYVVDLWDEICDFLTLHFKFNRRLDTPFWKYCQEETDLGSLQNLVELYQDSGVCHAIAHLIPKSSIFEIDGYLTLLCGQQVLVKNLQPMADAEITEWLKYRQILHNNLENSVSPQEAFYFLESLY

SEQ ID NO: 84408 - protein, 533 aa, Streptomyces sp.
  REGION 1..533: note = tr|A0A1C4LG25|A0A1C4LG25_9ACTN Tryptophan halogenase; OS = Streptomyces sp. TverLS-915 OX=1839763; GN = GA0115251_120711 PE=4 SV=1
MPETDNRIRKVVILGGGTAGWMTASYLGKALQGTVDIQVLEAPAIPRIGVGEATVPNLHRVLFDYLGIPEEEWMRECNASFKMAVKFVNWRTPGRGEPDSRTRPDGKPDHFYHPFGILPDHDNTPLSHYWFKNKYEGITDKAFDYSCFREPPVMDAKKSPKWMNGESSTRYAWHFDAALVADFLRRFATDKQGVEHIQDEMVRAEQDERGYVTALHTKSGRVLDADLFVDCSGFRGLLINKALGEPFIDMSDHLMCDRAVATAVPHDDDANGIEPYTSAIAMSSGWAWKIPMLGRFGSGYVYSSRFTTQEEATREFCELWNLDPETTKFNHVRFRVGRNRRAWVNNVVSIGLSSCFLEPLESTGIYFITAAIHQLAKHFPDRTFPQALVDSFNEEIEVMFDDTRDFIQAHFYYAPRDDSEFWRAQKTLKLPENIQRKIAAYKAGLPINSPITDESTYYGNFEAEFRNFWTNGSYYCVFAGLGLEPDAPLPALAHKPESVAGAQPLFTKVAQEQRHLLDTLPSAHDYLRRLHAK

SEQ ID NO: 84409 - protein, 509 aa, unidentified
  source 1..509: note = Alphaproteobacteria bacterium
  REGION 1..509: note = tr|A0A2N3B3J7|A0A2N3B3J7_9PROT Tryptophan halogenase; OS = Alphaproteobacteria bacterium HGW-Alphaproteobacteria-7; OX = 2013670 GN=CVT85_03365 PE=4 SV=1
MAERGVEKLVIVGGGTAGWITAAAFARLLGQRLTIELVESDAIGTIGVGEATIPQIIRLNTILGLDEHEFLQRASGTYKLGIEFVDWGRIGSRYLHTFGDTGMNLGNVAFHHYWRRSVMGEAAPDARGLWHYSLHQLAADQARFGKLDRVGNTAMAGLAYAYHFDATRYALHLRDYAEAREVTRTEGMVESVERDGTSGDITAITLDDGRRVAGDFFVDCTGFRALLLGGALGVGYQDWSHWLPCDRALAVPSERLPTLVPFTRATAKSAGWQWRIPLQHRTGNGHVYASGFTDDDAAADTLLAGLDTKPLGDPRPIRFTTGRREALWAQNCVSIGLSSGFLEPLESTSIHLIQSHVSRLIQLFPRGKNAAAERAEFNRRCMAEFDQIRDFLILHYHRTDRDDTEFWRYCKHMAVPDSVTHKLELFAASGRVGRDADDLFREASWVQVMLGQGIMPADYDPMADQIAPAQLDEFLANLRNVIERSVAGLPTHADYVQRHCPADTGSTPA

SEQ ID NO: 84410 - protein, 616 aa, Nostoc minutum
  REGION 1..616: note = tr|A0A367R573|A0A367R573_9NOSO Tryptophan halogenase; OS = Nostoc minutum NIES-26 OX=1844469 GN=A6770_21125 PE=4; SV = 1
MYSIQTQEYDVVIMGAGLAGNCQARHLLLNVPNIKIALIDPRPEERTEKDLKIGESTVEVAALFICKELGLYEYIIENHPPKFGLNFHWPKDPAKTGTIDDYYHIWTNRQPPMTATQLNRAKFERDLLKMNKDMGAVFYNGRVVDVDLTPGDALKTVKVKVGTESVELKAKHVVDAAGRKFIIGRKTDNVLFGPDNLCGINTGSAWVRVKNVDRTIFHNGYDPAGASCSHYYATNHWFGHGHWLWMIPTDTQSMELSIGIVQHHDVIPAESINTQEKFYAFLKANHNMLYELIASGENIDFHYWPRLAHTSKTMFSPDNWYVIGDAACIFDAFYSMGSSMTAFAIESVTEIIRAKLAGEADAEAKRSAYNEFNLIQTGGINQLMSNHAKQLGNASVMSWRIYFEYMLWFGIVVPLYVGKWHLNLTFINSFMKVYRDTVTGLFVDVYKQFNQLVDRGANIGFMDCYRADQLLGDYNTLMHFDHFLENAKFEPWRCNVFASLKYTHFYFAIWYMKLQWKGFGLPGLLAPRHLYHFFRLLILAGYISISELVYKYKIKGVPTNSQVAKMRQDFTSYRYQSELQPWDEGVVNFPVQNQKSTHQQLNDQDVARVQKLSVSG

SEQ ID NO: 84411 - protein, 526 aa, unidentified
  source 1..526: note = Halieaceae bacterium
  REGION 1..526: note = tr|A0A520R943|A0A520R943_9GAMM Tryptophan 7-halogenase OS=Halieaceae bacterium OX=2026743; GN = EVA64_03815 PE=4 SV=1
MAAGGQMTRALNRVVILGGGTAGWLTAATLAAEHGASLDIKLIESPDIPIIGVGEGTWPSMRTTLQKIGISEKALLKECDATFKQGTEFIGWLSESETHSYYHPFSLPAEYASLNLAEHWLASTVTSDFCSTVTPQAGVINACRAPKALGVPEFAFQYNYGYHFDAAKLSQLLRAHAVKALGVAHLLANLTGVERSASGAITALNLDNGASLEGDFFIDCSGQRGLLIGEAMGVPMKSMSHVLPNDRAVATQVPYSDPGAQIASVTRSTAQASGWIWDIGLQSRRGVGYVHSAAHISEDQAVSSVLDYVKRSDDGIDVGQLDVRVIPFNAARREKAWVKNCVAIGLAAGFVEPLEASSIALIEQATTRLCQILPLDADHYEAEASAFNDQMSRQWSQVEEFLQLHYVLSQRSDSAYWRDVRSDERVLPELREKLKKWRRHAIWHTDAPRFDELFPSASYQYVLYGMAGRYVSPQTHRRSFQSARDRADRAMHDVRERSNAVRSLPGNRELLNALVTNTNGTLESVA

SEQ ID NO: 84412 - protein, 503 aa, unidentified
  source 1..503: note = Halieaceae bacterium
  REGION 1..503: note = tr|A0A2D9NM13|A0A2D9NM13_9GAMM Tryptophan halogenase; OS = Halieaceae bacterium OX=2026743 GN=CME49_01475 PE=4 SV=1
  VARIANT 58: note = Xaa can be any naturally occurring amino acid
MHQPIKKVVIAGGGTAGWMAAATLGKVLGKTLDITLVESDEIGTVGVGEATIPTILTXHEVLKIKEQDFLSAVQGTFKLGISFENWRDVGEDYIHSFGFTGKDHWAAGFQHFWLRGQQLGMVKEYGEYCAEWLAAKQNRFAVLPNLTLNYAYHFDSSLYAKFLRGIAEENGVVRREGKIAEVRQNPFNGYISELQLSDGAVIDGDFFIDCTGFRGLLIEQTLSAGYDDWTHWLPSDRAVAVQTESVGPPIPYTRAIAREAGWQWRIPLQHRVGNGLVFSSKFWSEDEATEKLLSNVQGARITDPRVIRFQTGTRRAHWKKNCVAMGLSSGFMEPLESTSIHLIQRSVIRLLQMFPHDGVRTPDVNEFNQQMQFEMDNIRDFIILHYHVTNRRDTPFWRHCASMEIPDSLKHRIELFKQSGRVFKVPTELFGENSWVQVMLGQGLVPEQYHPIVDMMSQEELKSFLEGIKGSVGNMVAQLPEHQQFINHYCSIPTSAVPQSRSA

SEQ ID NO: 84413 - protein, 558 aa, unidentified
  source 1..558: note = Blastocatellia bacterium
  REGION 1..558: note = tr|A0A321LLD9|A0A321LLD9_9BACT Tryptophan halogenase; OS = Blastocatellia bacterium AA13 OX=2169413 GN=DMF61_08610; PE = 4 SV=1
MNNHNEPIRDVLIVGGGTAGWMTAAYLAKAFGHQLNITVLEAPTIPRIGVGEATVPNLQRVFFDFLGIPEYEWMQHVNGSFKSAVKFVNWRKSENGAPNHFYHPFGILPSIDGVPLPQYWFLETNGAEEPVDYACFREPPLLDAKKSPLFMDHTRAVPHAWHFDAHLVAEFLGNWSKERDVNHITDEVNQVELDERGYIKSVHTVRGNNLTADLFVDCTGFRGLLINKALGEPFIDMNDHLLCDSAVAAAVPNDDEKVGIEPYTSAIAMKAGWTWKIPMLTRFGSGYVYSSKFATVDEAARDYCALWGLNESAVNFNKIRFRTGRNRRAWVNNCVSIGLSSCFLEPLESTGIYFITAAIYQLAKHFPTKTLDPVRIEAFNRDVEFMFDDCRDFVQSHYFTTTREDTPFWRANKNELFLSDNLKEKISLYKAGLPVNPPSYNEDDYYGSFDTEFRNFWTNGSYYCIFAGMGFLPERPHSRLLYRPESRAKALDEFVRIKNEQQTLLEQLPSTYEYLQHLHATQQSALRSPALEISHGKKRRPREWERLHEEPGELPYRP

SEQ ID NO: 84414 - protein, 496 aa, unidentified
  source 1..496: note = Halieaceae bacterium
  REGION 1..496: note = tr|A0A2D7YJJ6|A0A2D7YJJ6_9GAMM Tryptophan halogenase; OS = Halieaceae bacterium OX=2026743 GN=CME50_06590 PE=4 SV=1
MSERKVERVVIAGGGTAGWMAAAALSRLVGRKLSVTLVESEEIGTVGVGEATIPTILTINRLLQIPEPDFIKLTSGTFKLGIRFENWRTEGEDYFHSFGDTGKGSWAAGFHHFWLRAKELGLAEQYGEYCPELKAAEAERFAITSENKLNYAYHLDASKYGMYLRKMAEASGVTRVEGKISHVNTSPHDGFIEALMLDNGHRIEGDLFIDCTGFRALLSEGALNTGFDNWSHWLPANRAWAVQSELSEHPKPYTRAIAHKVGWQWRIPLQHRAGNGLVYCNDFMDEETARDLLLDNVPEKTLIEPRPIRFTTGQRKQYWNKNCIAIGLSSGFIEPLESTSIHFIQNGIMWLLLMFPDLSIEESTVREYNTKMRSEAEHIRDFIVLHYALNERHGDPFWDHCRNMELPDSLKHRMELFERSARVFKPQDDVFAENSWVQVMMGQGLTPQGYHNIAQAMSSEQMTAFLKGIQHEVAQTVAKLPQHGAFVNTLIQHAKV

SEQ ID NO: 84415 - protein, 523 aa, unidentified
  source 1..523: note = Halieaceae bacterium
  REGION 1..523: note = tr|A0A2E6YRH8|A0A2E6YRH8_9GAMM Tryptophan halogenase; OS = Halieaceae bacterium OX=2026743 GN=CME58_08260 PE=4 SV=1
MSQINQHIVILGGGTAGWLTANIIAAEFDPAAGISVTLVESPTTPTIGVGEGTWPSMRSTLMKIGISESAFIEKCSATLKQGTRFERWQTRDDSGDVYYHPFTLPHGFQDLNLAEFWSAGLLGSESFAESVTPQVAACEAGKAPKQIQVPEYAFTLNYGYHLDAGKFAELLRENATQRLGVKHLLADMTGVRTTASGDIESLETSEGIVSGELFIDCSGFASLLLGGHYGVPVNSQRDVLFNDSALALQVPYSDASDSIATTTHATAHHAGWFWDIGLQHRRGVGAVFSSRHTDRDSVEAALDQYLRDTGHATGLENPEPRLITFDPGYRQQFWHRNCVAIGLSAGFIEPLEASALVLVELSARRLAEQLPTLSANMATAANDFNREFNERWQQIIEFLKLHYVLSERDDTAYWRGHRDPESIPPRLQQKLGEWRYRCPWHQDERRVDEMFPAASYQYVLYGMGFRSEVQPSVYRGASSRQQRAQELSEEVRRSSHQYLQHLPLHRNLLDQVNSQGFATRAGS

SEQ ID NO: 84416 - protein, 540 aa, unidentified
  source 1..540: note = Halieaceae bacterium
  REGION 1..540: note = tr|A0A3D0GLI1|A0A3D0GLI1_9GAMM Tryptophan 7-halogenase OS=Halieaceae bacterium OX=2026743; GN = DEO43_03580 PE=4 SV=1
MRSLVIVGGGSAGWITAAYLNGALNDRGQNMKVKISLLESPDIPRISVGEATIPSMRHLISVIGIPEVEFMRATDATFKQSIKYCNWAENDGSHYHHPFTSVRERPLDLSGERWLESDRSMRFMDTCAVQPAVCEANLAPIILRKQAVPTTLNYAYHMNAQKFADYLRDFSVARGVEHVQANLVSVATDTEGWIESVSTDRTESLHADMFLDCTGFNGHLISKTLGVGFEDYSQFLLCDRAVTMHLPYERFYPGTVRPYTTATALSNGWAWDIPMQNQRSVGYVHSSQFISEDDAEAELRAYQGKGTEDISVRSVPFKVGRRHQLWKANCVAIGLSGGFIEPLESTGLYLSDLGAVLLAEHWPANKASVQNLADRYNRLMANRYYEILDFINMHYCLTKRTDTAFWREVQKPERINPRLQAKLAMWKTKPPTAHDFEDQWFNGMEAYESLFDFSHIGGRLPIDTGALWNHESYECILYGMGFAPITDQDGASEARPKSRRNQSTERAMNVLNILPDHVDVLSKALGMKAYHKAYQPNGWV

SEQ ID NO: 84417 - protein, 522 aa, unidentified; identical to SEQ ID NO: 83705
  source 1..522: note = Halieaceae bacterium
  REGION 1..522: note = tr|A0A2D7P4X6|A0A2D7P4X6_9GAMM Tryptophan halogenase; OS = Halieaceae bacterium OX=2026743 GN=CME51_09465 PE=4 SV=1

SEQ ID NO: 84418 - protein, 520 aa, unidentified
  source 1..520: note = Halieaceae bacterium
  REGION 1..520: note = tr|A0A2D7LWT6|A0A2D7LWT6_9GAMM Tryptophan halogenase; OS = Halieaceae bacterium OX=2026743 GN=CME52_03445 PE=4 SV=1
MSERIQKVVIVGGGSAGWLTANILAARFQAGNSGLCITLVESPNVPTVGVGEGTWPSMRTTLKNIGIDEADFIRQCDASMKQGTWFKDWINLGDEPYYHPFSLPEGFDTVNLAEHWLNGEAGELSFAQAVTPQYAVCELGRAPKQIGVPGYAYTVNYGYHLDAGKFAALLTENAVSRLGVTHIEADVTAVLCDDHGYISAIKTEHAGDIEGDLFIDCTGFKSMLLGEHYGVSLKSQRQYLFNNAALAVQVPYDNDDAPIAATTHSTAKRNGWVWDIGLQHRRGVGHVFSTDYQSAAETEEVLDQYLKSIGRAAGLDGLAPRLLSFEPGYRERFWVKNCVGVGLSAGFIEPLEASALVLIELSASAIAEQLPNDRATMAVVAKRFNREFSSRWEQIIDFLKLHYALSQRTDSRYWQDNRDAESMPETLAENLLLWRSRAPWYYDDRRSDEMFPSASYQYVLYGMGFESTVTASQLRNNQHQRETAIQFFAEAKKKAQRYSQHLPPNRFLMNQVKEKDFAAI

SEQ ID NO: 84419 - protein, 499 aa, unidentified
  source 1..499: note = Halieaceae bacterium
  REGION 1..499: note = tr|A0A2E6YRK2|A0A2E6YRK2_9GAMM Tryptophan halogenase; OS = Halieaceae bacterium OX=2026743 GN=CME58_08275 PE=4 SV=1
MTDFSTKSIQSVVIAGGGTAGWMAAAALSRLVARKLNITLVESEEIGTVGVGEATIPTLLTINRLLQIPEPDFIKFTRGTFKLGIKFENWLRDGHEYLHSFGDTGKGCWAGGFQHFWLRGQKEGLADDYGSYCTELKAAEANRFGILSEHKLNYAYHLDATAYGQYLRGIAEASGVKRVEGKIQTVELNQNDGFIESLHLDSGERIHGDLFIDCTGFRALLSEGALNTGFDDWSHWLPCNRAWAVQTELNEEPIPYTRAIAHDAGWRWRIPLQHRAGNGLVYCNDFLDEDAARERLLASVDGKPLIDPRPIQFTTGQRRQYWNRNCIALGLASGFIEPLESTSIHFIQNGIMWLLLMFPDPMLSSASIDEYNQKLRSEAERIRDFIVLHYIANEREGDAFWDHCRHMAVPESLTQRVALFRDSGRVFKPQEDVFSENSWVQVMMGQGIQPEGYHNIADAMSREQLQSFLSDIQRNVNQTVSALPSHADFVNKLVSIAKK

SEQ ID NO: 84420 - protein, 519 aa, Pseudoalteromonas ulvae
  REGION 1..519: note = tr|A0A244CW49|A0A244CW49_9GAMM Tryptophan halogenase; OS = Pseudoalteromonas ulvae OX=107327 GN=B1199_05135 PE=4; SV = 1
MKKRINDVVIVGGGTAGWLSAALLAKKLNILAPDSVNITLVESPDIPIMGVGEGTWPTIRTTLQEIGIDEVEFITFCEASFKQGAEFVNWSNTPTNGQSSSYFHPLNAVFHASYDFNLAPYWLAGELGEMPYDQLAASQSRVSQLGLAPKLITTPQYQAIQNYSYHLNANKFAELLTKHCVEKLGVKHISANVTQVNLSVDGNISSVLTDIAGDIKGDLFIDCSGSKALLLGETLGVKWKGISDIIFNDTALAFQVPYQSDTSPIASNTIATAHDAGWTWDIGLQTRRGVGYVYSSQHTNDVEAEQVLRNYAGKMAEDIDVRKINLNLGYREKFWHKNCVAIGMSAAFIEPLEASAIFLIEAGVNMIADQFPRDFAAMPYVEKKFNNTFSLRWQKSVDFIKLHYCISNRRDTQYWVDNCDPKSIPDSLQEKLAHWQYHPPSKHDFDNAFEPFVLDSYLFVLYGMGFKTNLADNLSAFPHVAQAKMKKQQIDKLTEQLISQLPSNRDLIDKIKQYGMAKL

SEQ ID NO: 84421 - protein, 507 aa, Shewanella putrefaciens
  REGION 1..507: note = tr|A0A3S4P110|A0A3S4P110_SHEPU Tryptophan halogenase; OS = Shewanella putrefaciens OX=24 GN=NCTC12093_00772 PE=4; SV = 1
MTIRKIAIIGGGTSGWLAANHLGRVLQGRSELSITLIESPDIPIIGVGEGTVPSIRKSLQSFGISESEFIRSCDVTFKQSIKFVNWLDKVRHGKDNFYHHLFDIINLQSVDTVSAWLAEKQGDFADYVSPQHLVCEAAKAPKLITTPEYAGVLGYAYHLNAAKFAKLLAKNAIEKFNVEHIFATVQDVRLGDDGAISSLQTEQGTLSFDFYIDCSGFESILLAKALKVPFISKAHQLFIDTALVAQIPTQPTDIIPPYTQATAHRAGWIWDIALTQRRGTGFVYSSAHMAQSEAERKFDQYLGGKLADVPHRKIPMTVGHRQQFWVKNCVALGLAQGFLEPIEATSILLTDFSARFLAERFPVHTDDVDYLAKRFNDTVGYAWERVVEFAKLHYCLSDRTDSSFWLDNQASETIPEGLRQRLELWKSYSPIAEDFPSKFEVFNLDNYLYVLYGMKYQTNLRGGSSATQASLNMYMNKMSKVKQQMLDGLPEHRELLDKICTYGLQSI

SEQ ID NO: 84422 - protein, 494 aa, unidentified
  source 1..494: note = Xanthomonadales bacterium
  REGION 1..494: note = tr|A0A3N5JVZ9|A0A3N5JVZ9_9GAMM Tryptophan 7-halogenase OS=Xanthomonadales bacterium OX=2006849; GN = EHM68_12820 PE=4 SV=1
MDKPIKKVVIAGGGTAGWMAAALLAKTMGKVVDITLVESEDIGTVGVGEATIPPLVTYLRLLDIKEQEFMAATQATFKLGISFENWQNVKENYIHSFGTTGTDHWAAGFQHFWLRDRQRGSTVDYGDYCLELRAAKASRFSHLPKQGLNYAFHMDATLFAGFLRKYSEPLGVRRVEGKIVEVNTDPASGFVESLVMESGERVEGDLFIDCTGFRGLLIEQTLHTGYEDWSHWLPCDSAVAMQTESTIEAIPYTRSIAHEAGWQWRIPLQHRVGNGLVYCSRYMSDEEARALLLKNTVGGHVNKPRVLKFRTGRRLKNWNKNVLAIGLASGFVEPLESTSIHLIQRGMIRLMQMFPHDGIRQSEIDEYNRQSLTEIQHIRDFIILHYKVTNREDTPFWRHCRALQVPDSLAHRIQLFRETGRVFKIDGELFHENSWIQVMLGQGILPEQYHPAADVLTDEELTRFLAGIRTRVEQTVARLPGHEAYVRQYCRAKA

SEQ ID NO: 84423 - protein, 494 aa, unidentified
  source 1..494: note = Acidobacteria bacterium
  REGION 1..494: note = tr|A0A2E4W7H0|A0A2E4W7H0_9BACT Uncharacterized protein OS=Acidobacteria bacterium OX=1978231; GN = CL489_09980 PE=4 SV=1
MNMIKKIGIVGGGNAGLISALILRSAFPEHEIVVVKSDMIGTIGVGEGSTEHWLGFMNFCGIEPAEMIVAALATHKKGIRFEGWTDHTPDYFHVTSGLPDFVPRMFGFNGAYAGFLSKEWLLTEHTCHKGLLENKVPADNPHRSVNQFHFDTEELNDFLRMKVSNRNIKIIDGEVQRVVVKDDWIVSVELDDPTASADRTIRADFWIDASGFNKVLISHLSKQTWNSFGEYLLTDSAIAFRTPSDESGELRPYTRARALDSGWAWEIPTQAERGNGYVYSSSFCTEEEAVAEMEELLDVQISDHRHFQFDPGHLEEPWVGNCVAVGLAGSFVEPLEATSIGSTITQAKSLIGYLASFQKGNEWIPKEYNRQFNGMMANILDMIRLHYVSDRTDTPFWSALQDMPIPESLERLLGLWSERPPQQMDFSHGELAMFGLPHFYHVGQGQGVLNPDSAFRAIQAFVWEDSVEDAIWKIRENQSAHPIMDHHEALENLQ

SEQ ID NO: 84424 - protein, 494 aa, unidentified
  source 1..494: note = Alteromonas pelagimontana
  REGION 1..494: note = tr|A0A2A6B1S6|A0A2A6B1S6_9ALTE Tryptophan 7-halogenase OS=Alteromonas pelagimontana OX=1858656; GN = CA267_01210 PE=4 SV=1
MQNSKVKKVVIAGGGTAGWVAAAGLSKQLGKLVEVVLVESEQIGTVGVGEATIPPMRVFHSLLGIDEQEFMRATEATFKLGILFKNWGQIGDEYIHPFGTTGQGSYLADFQHFWLHGQSKGINQAYGEYSLEVQAAKANKFVVHKGGKINFAYHLDATRYAQYLRQFSERLGTKRIEGKIKQVQQHPNGYIKALQMESGELVEGDLFIDCTGFAGLLIDKTLKVPFEDWGHWLPCNSAIAIQTESVGPANPYVTCTAHNAGWQWHIPLQHRVGNGNVFCGEFMSDDQAKQHLLNNVQGKVLTEPRVIKYKTGRRQQFWAKNCVALGLSSGFVEPLESTSIYLFMNGIIRLMRLFPFDGVTEPLMNEYNQQSIDELENVRDFIILHYHATEREDSEFWRYCKNMSVPDSLSHRMDLFRQNGTVQLGEKEMFRLESWAHVMIGQRLIPEQYHKIFNTMSDQELTGYLANIRNQITEVVNKLPTHQDFINQYCKASS

SEQ ID NO: 84425 - protein, 524 aa, unidentified
  source 1..524: note = Acidobacteria bacterium
  REGION 1..524: note = tr|A0A2V7Z3I3|A0A2V7Z3I3_9BACT Tryptophan halogenase; OS = Acidobacteria bacterium OX=1978231 GN=DMF53_03920 PE=4; SV = 1
MSKSVVIVGGGTAGWMTAAYLKKAAPSVNVTLIESANIRTVGVGEATFSTIKLFFDFLGLEEQDWMPSCNATYKLAIKFAGWRPDGADFYHPFQRYEMVDGYNMGEWWLKLKQHEVPFDQACFTIPAMCENKLSPRFLDGRVFDDKVQDFFGGSRRPKNSFLAEHKVQYPYAYQFDASLLAEYLKGYATRRGVRQIIDEVDEVKLAEDGSIDHLVTHGHGTLRGDLFVDCTGFRGLLINQALNEPFISFRDTLLCDRAIALQVPRDIETHGIEPYTTATALSAGWVWNIPLYGRVGTGYVYCSQFLSEEEAERELRAHLGPDAHGLRANHIKIRTGRCRNSWVKNCVAIGLSSGFVEPLESTGIFFIQHGIEELISHLPGNTIDEDMVRSYNRVVGEAVDGVRDFLTLHYYASQRMDSEFWRATKQVPLSDDLRERLDIWKSRLPNAKNINPNYHGFESYSYSVMLMGLGYQPERGLPALDHMDDTNALLAFRAMRERTDRLMASLPTQYEYLTQVRAEMFVAA

SEQ ID NO: 84426 - protein, 194 aa, unidentified
  source 1..194: note = Xanthomonadales bacterium
  REGION 1..194: note = tr|A0A3N5FQ98|A0A3N5FQ98_9GAMM Tryptophan halogenase (Fragment) OS=Xanthomonadales bacterium OX=2006849; GN = EHM84_06555 PE=4 SV=1
RVIKFRAGRRLKAWSKNVVALGLASGFLEPLESTSIHLIMTGTTRLMRLFPFNGVVQSFVDQYNEEVLRELEAIRDFLVLHYHAVERDDSPFWRHCRRMAIPASLARRMEMFRKSAHAWQYEGELFRVDSWTQVMLGQGITPERYHHYAKAMSDQDLARFLSALRGSIEQAVAQMPRHQDFLDRYCKASNAGAS

SEQ ID NO: 84427 - protein, 504 aa, Caulobacter sp.
  REGION 1..504: note = tr|A0A2G4JQ62|A0A2G4JQ62_9CAUL Tryptophan halogenase; OS = Caulobacter sp. B11 OX=2048899 GN=CSW58_09385 PE=4 SV=1
MSHLKKIVIVGGGSAGWICAAMLGHYFEKGFCEVELIESEEIGTIGVGESTIPPFLQLIRTLGIDEQDFIQKTQASFKLAIRFEDWRAKGETYYHPFGQIGGPVDVHEFYQCWLRAKANGHPSKLQDFAPATVMADTGRFMLPAKAQRTMIANANYALHIDAKLVAAYLRRFAEARNVKRTEGIVTDVATRADGGIEKVILRDGRAVAGDFFIDCSGFRSLLVGKTLNEPYRDWSDLLLCDRAIAVQTANVGAPHPYTLSQAQDFGWRWRIPLQHRSGNGYVFCSQYLSDDEAKAVLMRQVEGEVLIEPQVIPFKTGMRERLWVKNCVAIGLAGGFIEPLESTALHLIYKGMDYLLRFFPDMDADPTLAAEYNRRMTGDYEEIRDFIVLHYATTQRDDTPFWKACAAVELPESLKARIDLFQASGVLRDGVDDMFRAPSWQSVMEGMGIRPRRYQQLVDRVPYSAIEQLMDRSAPMLADFVRTLPTHEAFLRTHCPAEPVRKSA

SEQ ID NO: 84428 - protein, 514 aa, unidentified
  source 1..514: note = Pseudoalteromonas fuliginea
  REGION 1..514: note = tr|A0A063KSV0|A0A063KSV0_9GAMM Tryptophan halogenase; OS = Pseudoalteromonas fuliginea OX=1872678 GN=DC53_08270; PE = 4 SV=1
MNKTIKTIKTIKTIAVIGGGTAGWLSAAIIASYHQGKNGDGLKVMLVESSDIPTIGVGEGTWPTMKNTLQQIGLREVDVFKACNATFKQGGKFVNWTHGNNDFYYHPFTVPLGYGRIDLAPYLDNVEDFAQQTNFQHDICEASLAPRGIAQGEYQGNCNYAYHLDAGAFAEMLKQHCKSKPGVEHIIGTVDQVKLDDDGAINELTLKDQTRIISADLFIDCTGFSSLLLGQALNVPFKKMDHVLFNDSALAMQVPYDENDDSLASHTIATAQNAGWIWDIGLTHRRGVGHVYSSKFLSDDEAEQNLRNYLGDAANGLTARKISFESGYREKFWHKNCVAVGMSAGFVEPLEATAIMLVEISARFVAEHMPADTQVMPIVAKRFNEQMNYRWQRIIDFLKLHYMLTKRPEPYWQAHVHPDTIPQTLQEDLLLWGSRGPLIQDFHGALELFPAASYQYVLYGMGFKPDFTKQAYLYSQDAQAKQIIERNSQLTQQMLQTLPPHRAYIEQWLAANPV

SEQ ID NO: 84429 - protein, 450 aa, unidentified
  source 1..450: note = Oxalobacteraceae bacterium
  REGION 1..450: note = tr|A0A4Q3I774|A0A4Q3I774_9BURK Tryptophan 7-halogenase (Fragment) OS=Oxalobacteraceae bacterium; OX = 1871070 GN=EOO79_02335 PE=4 SV=1
HFFRKIGVEEAAWMKACHATYKLNIRFEDWSPASGVAAYSHPFFSKIDTFNQQAFFVNCMTRRLGLDVTTLPERFLLGGVLAAQGKGPLAPAHFPFDIEYGYHFDAALLGSFLAHHAVSRGVERIAATIRTAELNSQGDITAVLGDGGLRIEGDLFVDCTGFRSLLLQQALGVPFNSFSDNLFNDAAVVIPTAAPAPALLPVQTVSRALSAGWSWHIPLTNRVGNGYVYSSAFISSEQAEAELRRSLGPGAAEGEARHLNMKVGQVERHWRRNCLALGLAQGFIEPLEATALHLAQVSIESFMHCFEEGRFTALHQARFNHDIVERFERVRDYIVAHYKLNTRSDSDYWHANREKEHLSDALGSLLQAWFDRADIAKEISRIQGNSHFSAVSWHCLLAGYGAFPPIAPNQPGTGDLHAEGRIDHFLNACASNFSSHENCLHKHPERDTHD

SEQ ID NO: 84430 - protein, 521 aa, Pseudoalteromonas ulvae
  REGION 1..521: note = tr|A0A244CVL4|A0A244CVL4_9GAMM Tryptophan halogenase; OS = Pseudoalteromonas ulvae OX=107327 GN=B1199_05130 PE=4; SV = 1
MAIKAILDSIVIVGGGTAGWLTAANLAKSLNCDKNDAIKITLIESPNIPTIGVGEGTWPTMRKTLAKIGIDESEFIKQCGASFKQATKFVNWKSNPLNGENNHYYHLFSSIYDPTDFNLSPYWKLGYAGDESLTYANAVSPQALCCELGLAPKQITTKAYDGLQSYAYHLDAGKFSEMLKKHCTENLNVHFIADDVIDVCLDETGSISGVNTQNSGLIEGDFFVDCTGFSSLLLGKALNIGFKSVADTLLTDYAVTVQVPYDDPNADISSCTISTAQEAGWIWDIGLANRRGIGHVYSSKFMSHEDAERILLEYAGPQAKGLMTRKIKMEVGYREKFWHKNCVAIGLSAAFVEPLEASAIFLIEAASNMLAEQFPRQRVGMEHAERKFNESFKFRWDKTIDFIKLHYVLSKRDDPFWRANKDETTIPDSLKAQLAHWSVQPVSNYDFANVYEPFPLESYQFVLNGMGFEQNLEPSRALFPMVDKATMSFDKVKKITEFAVKDLPTNRALLNKVHQHGFSKI

SEQ ID NO: 84431 - protein, 516 aa, Pseudoxanthomonas sp.
  REGION 1..516: note = tr|A0A4Q8M3B3|A0A4Q8M3B3_9GAMM Tryptophan 7-halogenase OS=Pseudoxanthomonas sp. NML130969 OX=2480811; GN = EA655_15155 PE=4 SV=1
MDEAIRHVVIVGGGSAGWLTAGLIAAEHRDRHGPTLRVSVLESPDVPAIGVGEGTWPTMRDTLRRIGVGEADFVRACDATFKQGSQFVGWVDGGAHDRYTHPFTLPKGYGETQLAVAWAAQGQLPFAHLACFQPHLCDAGRGPKQFATPEYAAVANYAYHLDATRLGAFLRQHCVERLGVQHVVGHMDAVLSHENGDIAALAVRDQPALQGDLFVDCTGLRALLLGAHYGIAPVGVEDILFNDRALALQVPYADLNAPIACQTLSTAQRAGWIWDIGLSARRGVGHVYSSAFTSDEEAEADLRAYIQASGGPAAATLPPARRIDLQPGYRPTAWHRNCVAVGLASGFVEPLEASSLVLVELAAARVADEMPATRGQMDLLAARFNETFAYRWQRVIEFLKLHYVLSRRTTPYWQAHREDASLPPRLRELLQLWRHQSPSRSDFPRSEEIFPSASWQYILYGMGARPHSRPARRSEDLQAAQACFAESAALVQRMLPALPSHRALVEHIKAHGLPRL

SEQ ID NO: 84432 - protein, 513 aa, Sphingomonas sp.
  REGION 1..513: note = tr|A0A3S0TKH7|A0A3S0TKH7_9SPHN Tryptophan 7-halogenase OS=Sphingomonas sp. TF3 OX=2495580; GN = EJC47_01100 PE=4 SV=1
MQSVKNIVIVGGGTAGWLTAGIIAARHRGRMSEGFSVTLIESPGTPIIGVGEGTWPTLRTTLSKIGVSESDFFRECNASFKQGARFARWTTGEPDEGYYHPLMLPQSFSRVNLATHWLADGHGQSFCDMVSPQGRLCDDGLAPKTIATPEYEALANYAYHLDAGKFAGFLQRHCCETLGVRHILADVQHATQAENGDILTVVTEQAGEIAGDLFIDCTGFAALLIGKTLGVPFKSCSDTLFCDTALAVQIPHEDPDGPIASHTISTAQSSGWIWDIGLPTRRGVGHVYSSSHISDDAAEQELRAYLGPRGRDLAVRKLAIRAGHRETFWKNNCVAIGLAAGFLEPLEASAIVLIELSAKLVAEQMPVCREVMDILAARFNATTLYRWGRIIDFLKLHYVLTKRTDSDFWRDNVRPETVPDRLRDLLTLWKYQPPWFHDEFDRVEEVFPAASYQYVLYGMNFHTEVSRDAIAGETRLAAQARREAATQTERLRAGLPRHRDLIRKIVEHGLPTI

SEQ ID NO: 84433 - protein, 502 aa, Sphingomonas sp.
  REGION 1..502: note = tr|A0A0S9C9F5|A0A0S9C9F5_9SPHN Tryptophan halogenase; OS = Sphingomonas sp. Leaf231 OX=1736301 GN=ASE95_16225 PE=4; SV = 1
MTQEPIRSIVIVGGGTAGWMAATFLARRLAHLRLSITVVESSAIGTVGVGEATVPAIRDFFSAVELGEADVLRETEATIKYGIRFAGWKHEGHDFFHPFGLYGVAARGVAFHHYWLKRRAAGDETPLATYCLATQLAERGLFLPPVERPANDLGVFNFAVHFDASKFAALLRRLALANGVAHYDARIIDVRRDGESGHVTAVALDDGTQLAGDLWIDCSGFRSLLLGEALGVPFVDWRRWLPCDRAIAIPCKAAQVHRPFTTATATKAGWRWHIPLRHRVGNGHVYCSDFIDDAGAEDVLLSALEGEPLAQPNRIRFTAGHRARFWDRNVVGLGLSTGFLEPLESTSITLIQSGLERLMPLFPDRGFDPRLADTYNRQSVLEFERIRDFLLLHYSGNARIGEPFWDHVRAISLTDGLQAKLDAWRAAGEFVRREWDTFQDASWLSMYAGFGDLPARRSPMADQVSDADLRDSLTRMRAAIEATLAHAEPHAAFLARVHEGQA

SEQ ID NO: 84434 - protein, 524 aa, Massilia plicata
  REGION 1..524: note = tr|A0A4P7BD07|A0A4P7BD07_9BURK Tryptophan 7-halogenase OS=Massilia plicata OX=321984 GN=E1742_10580; PE = 4 SV=1
MQPIRNVLVVGGGTAGWLAAGFLARTLGTAGGGIAVTLVESKEIGIIGVGEGTFPSIRGTLSILGIDEGRFIRECNATFKQGVRFNHWVRPPGTPGADHYFHPFSQPSQRPGGPELLPYWLMGAAGPDVPFAAAATMQKHVADMRHGPKRTTDADFMGPLNYAYHFDAGAFAALLAAHAQTLGVRRIEATVDQVKLGASGAIAAVVTREAGELAADLYIDCTGFRARLIGEALGSPFRNINDTLFVDRALAMQVPYDRLDAPIPSYTISTAHEAGWTWDIGLHERRGIGYVYSSRHTNDDRADQLLRQYIGPASDGREPRMLKLNVGYRETQWKKNCVAIGLSGGFLEPLESSGIGLIEAATYLVSYLFPYDGNLAPAAKLFNGQMKARYERIVDFVKMHYCLSQRTDNAFWIENAHASTIPESLREQLSMWRSRPPHRLDFVTDIEMYPPSSWQYVLYGMEFPTQQLAHRAALPDLAAAQREFQTIAQLSHHALADLPAHRALVEHYRARGTRAAQPARRLYV

SEQ ID NO: 84435 - protein, 514 aa, Pseudoalteromonas luteoviolacea
  REGION 1..514: note = tr|A0A1C0TW38|A0A1C0TW38_9GAMM Tryptophan halogenase; OS = Pseudoalteromonas luteoviolacea OX=43657 GN=A7985_05870; PE = 4 SV=1
MNGEIKRVVVVGGGTAGWLAACHLAKQLEPSTNRGISVTLVDSPDIPTIGVGEGTVPVMRDTLKYFGISEVEFIKRCDVTFKQSIKFVDWEVAPRDGHSTYYHHLFDFPNIRPFNPTPYWLSNNAINKTHFADLVSVQSHVCELGLAPKLNRDGEFSGLFNYAYHLDAGKFTQMLSEHGTAELGISNIKANVERVHLNDDGEIMHLETDSAGVISGDMFVDCTGFKAMLIEKSMGAKFIDKSDVLLTDTALAIQIPYEDENTTIPPFTISTAQKHGWIWDIGLTQRKGVGYVFSSAHQSEDQAVHTLAEYLGQSAAQIEPRKISMKVGYQKQAWIKNCVAMGLSQGFVEPLEATGLLMFDVTARMFSEALPDFKEDMPLRAKRFNEDICQMWESTSDFIKLHYYLSKREDSQFWVDNRDPQSISTELAEKLQMWQRKLPSQFDFRHTVDSFRVSNYLYVLYGMNFNTELNGRYDQYHNVEAINKLRTEIEKGVKYCKSNLLSHREYLEKVRKLS

SEQ ID NO: 84436 - protein, 419 aa, Kangiella geojedonensis
  REGION 1..419: note = tr|A0A0F6RDB4|A0A0F6RDB4_9GAMM Tryptophan halogenase; OS = Kangiella geojedonensis OX=914150 GN=TQ33_2224 PE=4 SV=1
MINSNQEYDVIIIGAGPAGALAASLLVQNHLRVLVIEKQTFPRFSIGESLLPQSMVYLEQAKLLSAVEASADELGFQYKNGAIFNSSEQDSIFDFSQKLSEGPAYTYQVKRAEFDQLLAQKAQEFGADFAFGYTVKSIEFTPEPILTISHPKDDELKLHSKFVLDASGFARVLPRLLDLDLPSDFPVRSSVFAHISDNINNSSFDRNKILIGSHPQAQDVWYWLIPFADGTASIGCVAKPQFFDDIRNTEALDSDNALLLHCIQQNKRFGALLSEAEIIRPAQQLTGYSSNVKQLYGDHYALLGNAGEFLDPIFSSGVTIAFKSASLASDCLLKQFNHTPVCWEREFSQPLKAGVETFKAFVHSWYQGQLQQIIQFEEAPQNVREMICSVLAGYAWDEQNPYNQNTQRRLNALGELCAS

SEQ ID NO: 84437 - protein, 504 aa, Sphingomonas sp.
  REGION 1..504: note = tr|A0A0S9CH68|A0A0S9CH68_9SPHN Tryptophan halogenase; OS = Sphingomonas sp. Leaf231 OX=1736301 GN=ASE95_10405 PE=4; SV = 1
MEKTARQRVVVVGGGTSGWMTAAALAKLLPTRCSVELVESEAIGIIGVGEATLPHIRAFNERLGIVEAEFMAATRATFKLGIEFRDWGRIGDSYIHPFGTFGRGGGDVQFHHYYTRLACAGVALPPIEAFSMACALARANRFGPPSRDAQQIASTFGYAYQFDAVAFAPYLRRFAERLGARRTEGRIVAAERDPESGDVTAILLDDGRRIEGDLFVDCSGFAALLIGKELDEPFEDWSRWLPADRAVAMPCRTATSVTPFTSAVAMPSGWRWRIPLQHRTGNGYVFASHFLSETAAADALTAAVEGTPLVAPRTVRFTAGRRTRSWVGNVVAIGLASGFLEPLESTSLYLVQQAITALVELFPERAISSIDRDEFNRLINMEYDRVRDFLILHYHATERDDSPFWNYVRTMAIPDSLAEKMELFRRRGRVVKYREGAFLDASWVSVYLGQRVLPAGADPRAEGPSHDSLVAGLERMRGEIAGAVGAMRDHADFLADYCPMPAAA

SEQ ID NO: 84438 - protein, 531 aa, Sphingomonas sp.
  REGION 1..531: note = tr|A0A0S9CH82|A0A0S9CH82_9SPHN Tryptophan halogenase; OS = Sphingomonas sp. Leaf231 OX=1736301 GN=ASE95_10415 PE=4; SV = 1
MNEHTIRSVVILGGGTAGWMAAAALSRFLNNGVTRITLIESEEIGTVGVGEATIPPLRTFNQMLGIDEHDFIRETGGTYKLGIEFVDWGDVGERYFHPFGAHGHDIGGVHFHQLYLRERQRRVLPDISAWSMSAVAAQAGRFAPPAPQAQSAVKDLFYAYHFDAARYAGFLRRFAERNGIQRVEGKVVAVAQRPEDGHVTALKLDDGQIVGGDLFIDCSGFRGVLIEETLETGYEDWRHWLPCDRAVAVPSANPGDPEPFTRATARGAGWQWRIPLQQRMGNGLVYCSEFQQQGAAERELLANLEGVPLTDPRHLAFTTGRRKLAWNRNVVALGLASGFIEPLESTSIHLVQSGIARLIALFPDRRFDPVERDEYNAQMHELYADVRDFVILHYKATRRADTPFWDRCRTMAIPDSLARKIALFRGKGRVFREGRELFATTSWVSVCMGQHVLPEGHEPAVDALDEQKVAGALEQMRRDYLDVAAQLPTHGDFLRHIAGAPGAATPVPSAELAPTFSFASETPFDFSADPL

SEQ ID NO: 84439 - protein, 491 aa, Caulobacter sp.
  REGION 1..491: note = tr|A0A0Q8FVS1|A0A0Q8FVS1_9CAUL Tryptophan halogenase; OS = Caulobacter sp. Root655 OX=1736578 GN=ASD79_07315 PE=4; SV = 1
MGDNRIRQVVIVGGGTAGWMAAAALAKALGPLVSIRLIESDEIGTVGVGEATIPQIKLFNGLLGLDEDDFIRQTQGTFKLGIEFVGWTRPDHAYIHAFGGVGRDLGMVNFHQYWLKHRQDGGTSDFWAYSLNGAAAKANRFDRQPGLAYAFQFDAALYARYLRAYAERLGVVRTEGKILGATLREPDGFVESVTLERGEAVGGDLFIDCSGFRGVLIEQALKTGYDDWSQLLPCDRAVAVPTASAGPLRPYTQAIARPAGWQWRIPLQHRTGNGHVFCSRYVSEDEATATLMANLEGEPLAEPRLLKFVTGRRKAFWNRNVVALGLASGFMEPLESTSIHLIQSGLSRLLNLFPDKGFAQADIDEYNRQAGLEFERIRDFLVLHYWANQRPEPFWAACRDMTIPGELARKVEIFRAHGRLFREPEDLFFETSWLQVLLGQGIEPRGRHPMTDLVSGPRLEGFLADLRKITADAANALPDHADFIRQQCAAR

SEQ ID NO: 84440 - protein, 533 aa, Streptomyces virginiae
  REGION 1..533: note = tr|A0A0L8M4T4|A0A0L8M4T4_STRVG Tryptophan halogenase; OS = Streptomyces virginiae OX=1961 GN=ADK75_31630 PE=4 SV=1
MTSSDTRLQKVVILGGGTAGWMTAAYLGKALQGTVDITVLEAPSIPRIGVGEATVPNLQRSFFDYLGIAEDEWMRECNASFKMAVRFVNWRTDGQGESTARELPGGGPDHFYHPFGLLPDYDQTPLSHYWFKRKYEGRTTEPFDYACFREPPVMDAMKAPRWLDGRPATRYAWHFDAQLVADFLRRFSTEKQGVNHVQDEMVRVEQDGRGYVTTLHTKGGLALDADLFVDCSGFRGLLINQAMEEPFIDMSDHLLCDSAVATAVPHDDEANGVEPYTSAIAMSSGWAWKIPMLGRFGTGYVYSSKFADQDTATREFADMWGLDVEETKFNHIRFRVGRNRRAWVKNVVSIGLSSCFLEPLESTGIYFITAAIYQLAKHFPDKTFNEGLVNSFNHEIEVMFDDTRDFIQAHFFYAPRNDTPFWQANKKLVLPENIQQKISAYKAGLPINSPITDESTYYGNFEAEFRNFWTNGSYYCIFAGLGLEPDAPLPSLAHRPDSVASAEPLFDAVKRQQQNLLETLPSAYDYLRQLHGA

SEQ ID NO: 84441 - protein, 483 aa, Caulobacter sp.
  REGION 1..483: note = tr|A0A4V2UE44|A0A4V2UE44_9CAUL Tryptophan halogenase; OS = Caulobacter sp. BK020 OX=2512117 GN=EV278_13811 PE=4; SV = 1
MNKRILVVGGGTAGWLTAGYLARTLDAQSHGGVEITLVESAQIGFLGVGEGVFPTIRKTLQRIGIDEATLVREASATFKQGARFAHWRFEPGGGQPDHYLYPFQATQEPSGPDLQHCGLSGDHVATPNHACHLDAVKLAGVLRNAATGLGVRHVVDTIDQVPLTEDGAIAAILGRASGRMTADLYVDCTGFRAQLIGHAQKSPYKSCRSALFCDSALAMQVPYERPDASIASYTISTAQEAGWTWDVGLNSRRGVGHVFSSDHTDAETAERVLRDYVGKAGDGLDIRHIKFEAGYREISWRKNCVAIGLSSGFLEPLEATDIAFTEVAAVTLGTLFPWGGEMETAARRYNDLMRRRYERALDFIKLHYCISERRDTAFWRNNVEASTIPDSLHDLLDRWRFRPPDAIDIDPNADIFTEASWRYVLYGMGYRTDLSPKADACRDFNRARPAFEDIRQQAAYAYQNLPTHRERAESAQRRGFGEG

SEQ ID NO: 84442 - protein, 506 aa, Xanthomonas arboricola
  REGION 1..506: note = tr|A0A2S7CMS4|A0A2S7CMS4_9XANT Tryptophan halogenase; OS = Xanthomonas arboricola pv. corylina OX=487821; GN = XacyCFBP1159_03015 PE=4 SV=1
MIPAPLRNIVIVGGGTAGWMAAAAFARVLGPGFKVQLIESEQLGTVGVGEATVPHIKAFNNLLGIDEAEFVRQTQGSFKLGIEFVDWQRPGTSYIHGFGTQIGHPLGLLPFHQYWIKQHARGKAQPLGAYTLNTVAAVRGKFMTSAGDVPANSPLANIAYAYHFDATQYARFLRTYAEQRGVTRIEGLVEQVQLHADSGHVQSLQLASGQVVSGDLFIDCSGFRGLLIEEALHTGYHDFTHWLPCDRALAVPSENVGPPTPYTRSTARAAGWQWRIPLQHRTGNGYVYSSAHISDDEAAATLLANLDGKPLADPRPLRFTTGRRKQFWNRNVVALGLASGFLEPLESTSIHLIQAGISRLLELFPREGISPVLVQRYNDRLAFEFDRIRDFLVLHYHATERDDSAFWRHCRTMPITPELQTTLDLFRDSGRFYRNAEEMFAEISWVQVMVGQGILPRGYHPLVDQVPDHDAERFLASVAQTIGHCVDVMPTHQQFIDRYCKATAPR

SEQ ID NO: 84443 - protein, 498 aa, Pseudoalteromonas luteoviolacea
  REGION 1..498: note = tr|A0A0C1MS76|A0A0C1MS76_9GAMM Tryptophan halogenase; OS = Pseudoalteromonas luteoviolacea OX=43657 GN=JF50_10280; PE = 4 SV=1
MTERIQSVLIVGGGTAGWLSASLLKRVLKDQVNITLIESDDIGTVGVGEASIPPMVNFNAALGLDERTFIEQTQATYKLGIEFEGWGHQGSRYMHAFGELGKSFPFCDFFQVWLKAKQQGLTDSLAEYSLNTQAAKANRFTHLQHIPNTQLQGLTYAYHFDAGLYAKLLSKQSQTQGVRRVEGKITEVKTDPNTGHIAAVLLANGEQYSADLYLDCSGLKGLLIDQTMNVGFEDWSHWLPCDSAWALPSEQLDGEIKPYTRAIAKQAGWQWQIPLQHRVGNGYVFSSKFISEQDAKEALLHSLPSRPLAEPKLIKFKTGMRRKQWQGNVFAVGLASGFLEPLESTSIHLIQTSILRLIRHFPFDVIKDCAIENVNIEFSNEMAQVRDFIILHYKLTERDDSRFWQWCKNMSIPRSLQRKMALFEETGHCAAKTDDLFQNVAWQQVMVGQGLVPKTYHPLAEQFDDEHLKSLLDSVKVLLQSTVNKLPSHQAFIDKMTK

SEQ ID NO: 84444 - protein, 514 aa, Microbulbifer sp.
  REGION 1..514: note = tr|A0A0X3U7W2|A0A0X3U7W2_9GAMM Tryptophan halogenase; OS = Microbulbifer sp. ZGT114 OX=1685377 GN=AVO43_05290 PE=4; SV = 1
MKEKQTRVINIIGGGSAGWMTAIYLNRYFNRGKKNFSIRLIESPDVGIIGVGEATVHSIRFFFAAMGLDEAELMAETNATVKAGIMFRNWNKPQGSEPHEYFHPFDQQQPGGSVDISSAWFIANRDAWQRYDQAVSLNAHLIEEGRCPKTMSSPPFQAVTPYGYHLDAKLLARYLRKNAVEAGVEHVEASVSDVTVEGDRVLSVTTDRGEFTGDFFVDCSGFRGLLLEKLAEDNWHSFSDALPCDRAVAIQRPLPEGDGPKPYTVATALSNGWAWQIDLVNRQGSGYVYDSDRISPEEAERELREFLGPDSESLKCTHLEMKVGCRDRFWIGNCVAIGLSGGFIEPLESTGLHMIHLGVSLLATHLAAGEVPQALRDAYNEKMRGFYHDLKQFIVLHYCLSDRDDSDFWRGASATVEHCPWLQRQLEIWRHKICEYQDFAGSYSSIFTDSSYRYVLYGMQHKPDLEFVLSEEEQQGLFQRFEDMVRRAKVASMEHKAFLRTLPAEVRPEMIEVG

SEQ ID NO: 84445 - protein, 129 aa, Pseudomonas sp.
  REGION 1..129: note = tr|A0A2R7S1N6|A0A2R7S1N6_9PSED Tryptophan halogenase (Fragment) OS=Pseudomonas sp. HMWF010 OX=2056847; GN = DBR41_24335 PE=4 SV=1
RYNRVMAFEYEKIRDFLILRFKATSRNDTPYWDYLREMAIPDYLADKIALFESYGRIFRENEELFNDTSWFSVMVGQGLRPRGYDPMVDVMPVEELRARMADIRTVIARSAEVMPDHRAFIRDHCDAMA

SEQ ID NO: 84446 - protein, 261 aa, Pseudomonas sp.
  REGION 1..261: note = tr|A0A2R7S9C7|A0A2R7S9C7_9PSED Tryptophan halogenase (Fragment) OS=Pseudomonas sp. HMWF010 OX=2056847; GN = DBR41_21300 PE=4 SV=1
PNDRAVAMPCETAGDGLTPYTRATADTAGWRWRIPLQHRTGNGYVYASAHLSDDAAVARLRATLDGPPRGEPNFIRFQAGRRREMWVKNCVAIGLASGFLEPLESTSIHMIQSGITKLLALFPDRGFDPVETAEYNRLTILQTELIRDFIILHFKANERDEPYWQQAREMAIPESLQRKIDLFAARGRLFQSDYDLFAEPSWVAVMLGQNIRPRGYDPLVDSLDAQLVQDQMQRLAALVRQTAEALPSHQAFIARYCAASA

SEQ ID NO: 84447 - protein, 506 aa, unidentified
  source 1..506: note = Caulobacter zeae
  REGION 1..506: note = tr|A0A2N5D7W3|A0A2N5D7W3_9CAUL Tryptophan halogenase; OS = Caulobacter zeae OX=2055137 GN=SGCZBJ_18880 PE=4 SV=1
MDRAIGSIAILGGGTAGWMAAAVLAQVLRGTKTTITLVESAEIPTVGVGEATIPPIVDFLRLLEIDQGQFMAATEGSFKLGIRFDDWRVVGERYWHPFGTFGPSVDRRPFHHVWHRLVAAGDDPRLEAYSLATALGDAGRMAFADGQGLDGQGQGPLGGMRHALHFDAGLVARFLRTYSEQRGVRRLERRVEGATLKDDGFVEALVLDGGERLEADLFIDCSGFRGVLIEGALKTGYEDWSAFLPCDRAVAGLTGRDANPPPFTQAAARPAGWRWRIPLRHRTGNGYVYSSAHVSDDEALADLEGEAGKLLTEPRVLRFTGGRRKAFWNRNVVALGLASGFIEPLESTSIHFVTSGLMKLLDHFPDKDFDGANIADYNKALIAEYEAARDFIVLHYQPTRRDEPFWRERAAATLPPDLAERLALYRGTGRIPHRPTELFTELSWFYVLEGMGVRPQAYDPLVDLSNLSQVREGLAGWRRRVAEIVQAAPLHDAALDQVAGQRRPAA

SEQ ID NO: 84448 - protein, 519 aa, Sphingomonas sp.
  REGION 1..519: note = tr|A0A0S9CBE9|A0A0S9CBE9_9SPHN Tryptophan halogenase; OS = Sphingomonas sp. Leaf231 OX=1736301 GN=ASE95_11860 PE=4; SV = 1
MTQPHGETDRPVKRVVVVGGGSAGWIAACRLAAAVRRSAGDVTVTLVESAQVPTIGVGEGTWPTMRNTLAKIGISETDFVRRCDAAFKQGARFVGWADGRPGDAYYHPLNPPAGATEIDLAPHWQPRGGAAEFASWVDYQAALCDAGLAPKSITTPEYLGQANYAYHLDAGKFAALLHEHATGRLGVEHVVGDVVRAEMADNGDVAGVSLVDGRTIAGDLFVDCSGFAALLIGGVYDIPFRSCRDVMFADRAIAMQVPYADPDDPVTCHTVATAQDAGWIWDIGLWTRRGIGHVYSSAHISDDQAEAALRRYVGPAAEELSARTLRIEAGHRERFWQNNCVAVGLSAGFVEPLEASALMLIEASMDAIADRLPRTRAAIDTAARQFNAAFTHHWSRIVEFLKLHYAITRRTDSAFWRDHADPSTWPDGLAERLALWRDHPPAAADFDHAREVFGWPSYQYVLHGMKYPTRYPRHDAAPDAALARRWIARTDRTRADAMQRLPRHRDLLRAVRDHGLQAV

SEQ ID NO: 84449 - protein, 507 aa, Xanthomonas vesicatoria
  REGION 1..507: note = tr|F0BGX6|F0BGX6_9XANT Tryptophan halogenase; OS = Xanthomonas vesicatoria ATCC 35937 OX=925775; GN = XVE_3504 PE=4 SV=1
MWSHLQENAVNQARIRKVVIAGGGTAGWIAACALSHQFRDLLDITLVESDQIATVGVGESTVPPIRTFHRFLNIDEQEFLRAAAGTFKLSISFEHWRRQGERYIHPFGITGQSTLVCAFHHLWLESQRRGMPGAFADYCLETVASRADRFALPREPAVNYAYHLDAALYARFLRTRSEAHGVKRVEGKIQQVTLQPDSGDVAALVLEDGQVLEGDLFIDCTGFRGLLIEQTLHTGYEDWSHWLPCDRAVAVQTEAVGPPVPYTRAIAHEAGWRWHIPLQHRVGNGLVFSSQHMSDDEAHAKLLRDTGATPVKDPWLVPFRTGRRRKAWNKNVVSLGLASGFIEPLESTSIHLTIAAVVRLITLFPANGIAPSQVDIFNDISRTEMEHVRDFVTLHYHATQRDEPLWQQCRDMELPESLRLRLRAWRERAHAWQGTDELFRVDSWTHVLLGQGIVPQQHHPLAAALSDADLRRLLDGIAQPLQRAVEQMPSQQEFISAYCKMDARAWG

SEQ ID NO: 84450 - protein, 513 aa, Caulobacter sp.
  REGION 1..513: note = tr|A0A0Q8FV69|A0A0Q8FV69_9CAUL Tryptophan halogenase; OS = Caulobacter sp. Root655 OX=1736578 GN=ASD79_21800 PE=4; SV = 1
MAGNRIVIVGGGTAGWLTAAYLAKQLGADRPGGARITLIESPEIGVIGVGEGTFPTIRGTLATLGVSEARFMRESSATFKQGVRFVDWERRSADGKSSEYFHPFNLPLRPEGRDLSPYWLLDHQAGAPLAFADAVTTQGRIIEAGLAPKRPEDPDFQGPMNYAYHFDAARFADFLRGVAKELGVVHLAGKVETVQLDAETGDIASVTASELGVIEGDLFIDCSGFRALLIGEALGAPFKRCDDVLFNDRALAVQVPYPTPDAPIAPYTLATAHEAGWTWDIGLDGRRGVGYVFSSRHTDEARAEAVLRAYVGSEADHLPVRLLKFQTGYRERQWIGNCVAVGLSAGFFEPLESTGIMLIEVAATMIAEVLPLRDRAAMDSAARTFNGLMAGRFERIVSFLKLHYCLSKRDEPYWRDNADPASWPQGLRDLMAQWKHRPVSRFDFLVDLETFLPASYQYILYGMNAATDFAPVEGRYADGAMAQQAFAKVAGAATEALKHLPPHRALVEAYYRR

SEQ ID NO: 84451 - protein, 506 aa, Xanthomonas vesicatoria
  REGION 1..506: note = tr|F0BDY3|F0BDY3_9XANT Tryptophan halogenase; OS = Xanthomonas vesicatoria ATCC 35937 OX=925775; GN = XVE_2354 PE=4 SV=1
MIPAPLRNIVIVGGGTAGWMAAAAFARVLGPTFNVQLIESEQLGTVGVGEATVPHIKAFNNLLGIDEAEFVRQTQGSFKLGIEFVDWQRPGTSYIHGFGSQIGHPLGLLPFHQYWIKQHARGKAQPLGAYTLNTVAAARGKFMTSAGDVPANSPLANIAYAYHFDASLYARFLRGFAEARGVRRIEGMVDQVQLHPESGHVVSLQLASGQVIAGDLFIDCSGFRGLLIEDALHTGYHDFTRWLPCDRALAVPCEKVGPPTPYTRSTARAAGWQWRIPLQHRTGNGYVYSSAHISDDEAAASLLANLDGRPLGDPRPLRFTTGRRKQFWNRNVVALGLASGFLEPLESTSIHLIQSGISRLLELFPREGISPVLVQRYNDRLAFEFDRIRDFLLLHYHATERDDSAFWRHCRHMPITPELQTTLDLFRDSGRFYRNAEEMFAEISWVQVMVGQGILPTGYHPLVDQVPDTDAEGFLSSVAQTISHCVDVMPTHQQFIDRYCKAAPAR

SEQ ID NO: 84452 - protein, 530 aa, Actinophytocola oryzae
  REGION 1..530: note = tr|A0A4R7V1D1|A0A4R7V1D1_9PSEU Tryptophan halogenase; OS = Actinophytocola oryzae OX=502181 GN=CLV71_1163 PE=4 SV=1
MGDRRIRKIVVLGGGTAGWMSAAYLGRALGQQVSVTVLESPAVPRIGVGEATIPNLHRVLFDFLGVPEDDWMRACNASFKMGIKYVNWRTPGAGEATSRQRSGAPDEFYHLFGLLPTYQNLPLSHYWTHRALAGETAERFDRACYPQAPALDANLAPRNADGTRWTNYAWHFDAQLVADYLRQFAVDKQGAVHIEDMMTEAVLDQRGHVTGLRTQGGRLIEGDLFVDCSGFRGLLINQAMREPFLDMSDHLLNDRAVATAVPHDDEAHGVEPYTSSIAMSSGWTWKIPMLGRFGSGYVYSSRFANQDEATLEFCRMWGLDPEEQTLNQIRFRVGRNRRAWVRNVVSVGLASCFLEPLESTGIYFAYAALYQLVKHFPDKNFEPVMRDRFNREIEVMFDDSRDFVQAHFTFAPRDDTPFWRACKELPLADAIAEKVAMYRAGLPVSMPVVGEETYYDNFEAEFRNFWSNSNYYCILAGLDFLPDHSLPMLAARPELADQAEPLFARVKQEQRRILDTVPTCYDYLRQLHGK

SEQ ID NO: 84453 - protein, 513 aa, Caulobacter sp.
  REGION 1..513: note = tr|A0A0Q8FES5|A0A0Q8FES5_9CAUL Tryptophan halogenase; OS = Caulobacter sp. Root655 OX=1736578 GN=ASD79_13490 PE=4; SV = 1
MRPVKNIVIVGGGTAGWLTAGLIAAKHRARLATGFTVTLVESPNTPIIGVGEGTWPTLRTSLAKIGVSETDFFRECDAAFKQGAKFARWTTGAADDAYYHPLMLPQGFAQVNLAPHWLVGARGQSFCDAVTPQGRLCDEGLAPKTITAAPYQGAANYAYHLDAGKFAPFLQRHCCDKLDVRHVLADVQSVSMTDDGDIRGVVTKQHGEIQGDLFVDCTGFRALLLGDALGVPFRDCGDVLFCDTALAIQVPYETETSPIASHTISTAQSAGWIWDIGLPTRRGVGHVYSSRHISDEDAERELRAYIGPAGRDLPARKIPIRSGHRETFWKRNCVAVGLAAGFLEPLEASAIVLIELSAKLIAEQMPACREVMDIVAARFNATTHYRWGRIIDFLKLHYVLSQRSDSAFWRDNRARETIPDRLADLLLLWSHQPPWLHDEFDRADEVFPAASYQYVLYGMGFRTQIEPQALADERVLAERALRETAAQTERLRASLPRHRDLIRKIVEHGLQPV

SEQ ID NO: 84454 - protein, 516 aa, Sphingomonas sp.
  REGION 1..516: note = tr|A0A0S9CKY6|A0A0S9CKY6_9SPHN Tryptophan halogenase; OS = Sphingomonas sp. Leaf231 OX=1736301 GN=ASE95_05710 PE=4; SV = 1
MSVSLKFAAEPIRSIIVVGGGTAGWMTAAALARSLGPQRPSITLVESDALGTVGVGEATIPPIREMNRLLGIDEDAFVRATAATFKLGIAFEDWRAIGHRYFHPFGRIGAAIGPLPFHHYWQALAAANPSAAGALTDYSLPAAAATAGVFCRPSDDPRSTLSTISYAFHFDAGRYARLLRQRAEADGVVRHEGRIVAVERGDGGHPAGPMVRAIRLADGGELAADLFIDCSGFTGLLIGDAADNPYQDWREWLPCDSALAMPTARTAEPLPYTRSIAEAAGWQWRIPLQHRMGNGHVFASAFVDREAAERVLRDSVDGKPLAEPKLLRFTPGRRSRAWSGNVVAIGLAAGFLEPLESTSIHLVQSAITRLLALWPDRALAPPDIAYFNRATASEYERIRDFLILHYHATQRDDSAFWNHVRTTAIPDTLASRLELYRSRGRFFPEAFDLFMEPSWIAVLDGQGIRPERPDPLATGAIDTLADVLPRMRAAITRAVAAMPRHGDFVAGLRDDPADGV

SEQ ID NO: 84455 - protein, 500 aa, Caulobacter sp.
  REGION 1..500: note = tr|A0A0Q8FKY2|A0A0Q8FKY2_9CAUL Tryptophan halogenase; OS = Caulobacter sp. Root655 OX=1736578 GN=ASD79_17820 PE=4; SV = 1
MTDRAIKSIAIVGGGTAGWMAASLLAQTLRGTGCAITLIESPDIGIVGVGEATIPPILDFLKLIEVDLDAFLQATQATFKLGIKFQDWSRVGESYWHPFGSFGVSIDRRPFHHVWHKARTEGLDMAVPDFSLAAALGEAGRFAPPDPRAGGPLAGLRHALHFDAALVAKFLRDHAERRGVRRLEREVARAVLRDDGFIDALTLTDGEQVKADFYIDCSGLRGLLIEQALETGYEDWTRWLPCDRAIAAPTAHAGPPAPYTLAVAQDAGWRWKIPLRHRVGNGYVYASQAIDDETALSELLAAIGEPLAEPRKLRFTTGRRKAFWNRNCVALGLASGFLEPLESTSIHLVCSGLYKLLDHFPDRDFAPSNIAAYNRALVAEYETFRDFIVLHYCATARDDTPFWRDRAEASIPDSLAERMELYRACGRIDTRPGELFTDLSWFYVLEGMGLRPRAHDPLVDASDFRQVRAILPRLAQQVATVVAQSPTHQAALGAGRSVAA

SEQ ID NO: 84456 - protein, 521 aa, Xanthomonas arboricola
  REGION 1..521: note = tr|A0A2S7CF60|A0A2S7CF60_9XANT Tryptophan halogenase; OS = Xanthomonas arboricola pv. corylina OX=487821; GN = XacyCFBP1159_12450 PE=4 SV=1
MTDTAPSDPQQRPVRRVVIAGGGTAGWMAAAALSKVLGRHLQIVLVESDEIGTVGVGEATIPSLVTFHRLLEIDEAAFMAATQATIKLGIGFEHWRDVDRHYIHSFGHTGTDHWSAGFQHFWLKGRQRGLARDFGDYCLELRAAQEGRFAHLPNGGMNYAYHLDAGLYARFLRRFSEGFGVQRIEGRIGNVETHAHSGYLTALTLDNGTRVEGDLFLDCTGFAGLLIGKTLGVGTDDWSQWLFADSALAVQTESVGAPVPYTRSRADQAGWMWRIPLQHRVGNGIVYSSRYMDQDSAAQVLQRNLSGRALTQPRALRFTPNQRHRVWEKNCVALGLASGFLEPLESTNIHLIQRGIIRLMQTFPQVINDVDIAEYNRQAAAEITHIRDFVILHYHATDRRDTPFWRDCAAMDIPDTLRHRVELFRQSGRVFHQANELFAENSWVQVMLGQGITPKQHHPVADLMGDAELRHFLETIRTRVDAALARLPAHADFLRRYCPAPPLPEPATRLPADAALATGAR

SEQ ID NO: 84457 - protein, 532 aa, Caulobacter sp.
  REGION 1..532: note = tr|A0A0Q8GDN1|A0A0Q8GDN1_9CAUL Tryptophan halogenase; OS = Caulobacter sp. Root655 OX=1736578 GN=ASD79_02200 PE=4; SV = 1
MDVTQPINDILIVGGGTAGWITAAYLARRLGSMRPDGVRITLIESSEIGIIGVGEGTFPTIQNTMRTIGVDEARFMREAGAAFKQGIRFVDWKTAPQDGVHSHYYHPFAQPRLLNGGLDLAPYWLMGEAGNIPFSDAVTLQDKVCDAMRGPKRVDDPQYGGPMAYAYHFDAGKLAGLLRDVGKATGVKHLLGNVLSVNKTDDGSIASVTTREHGDLTADLYVDCTGFAGALIGDAMGSGWIDKSDVLFVDRALALQVPYGRPDAPVATTTISTAHEAGWTWDIGLPERRGTGYVYSSRHTTDDRAEQILRGYVGKAGDGLTPRLLKLKVGHRDRHWVKNCVAVGLSGGFLEPLESTGIVLIEAAAYMLARNLPRRGGMEAAARQFNTAMTDRYLRAIDFIKLHYCLSQRTDNSFWTDNADPASIPETLRDHLAMWRHRPPNVFDFPNLHESFKYFNYQFILYGMGFATQVDPAAHLHGELARADFMRVQEAGVRAAASLPDHRALLTQIYAHGFSTKVPDAAMAEAAESLRR

SEQ ID NO: 84458 - protein, 521 aa, Caulobacter sp.
  REGION 1..521: note = tr|A0A4R3GXF4|A0A4R3GXF4_9CAUL Glycine/D-amino acid oxidase-like deaminating enzyme OS=Caulobacter sp. BK020; OX = 2512117 GN=EV278_1185 PE=4 SV=1
MTKHIVIVGGGTAGWMTACYLARMLAGPDAQAVKITLVESEDIGIIGVGEGTFPSIRKTLKRIGLDEAALVREANATFKQGIRFANWRHAPSVDPSDHYYHPFQIAEQHTDLDLLPYWLLGEAGEAPWARASTVQQAVIEARRAPKLIDHPDYAGPLSYAYHFDAVAFGQVLRRHAIGQGVVRIADTIGEVRLAQDGAIAALVGAASGELRADLYIDCTGFRAQLIGQALKSEFTSYRDQLFCDRALAVQLPYEQPDAPIASCTISTAQENGWTWDIGLQERRGVGYVYSSQHTDDERAAQVLSAYAGLAPDRLEPRLLKFEAGFRKTQWRKNCVAIGLSAGFIEPLEATGIGFSEIAALILANLFPWSGEYEQAARQFNAQMQRRYAHVIDFIKLHYCLSQREDTAFWRDNRAASSISETLKEKLQIWRHRPPSFLDVDLNHDIFVEQNWQYILYGMGFATDLTGRAPALRFSAAAREEFASIAEQARFALTVMPDHRALIDEVRRSGFQRPAPARRASR

SEQ ID NO: 84459 - protein, 510 aa, Caulobacter sp.
  REGION 1..510: note = tr|A0A4V2UFD4|A0A4V2UFD4_9CAUL Tryptophan halogenase; OS = Caulobacter sp. BK020 OX=2512117 GN=EV278_11841 PE=4; SV = 1
MPAPLRVVIVGGGTAGWMCAAALVGAVRPGVCEVRLVESDEIGIVGVGEATLPQIKEFNEYIGVIEADFMRKTNATFKLGIEFVDWGFKGSSYIHPFGVHGKPMGGVPFYQYWTKARQGGRTDDIEDFCLPIVASRLNRFDFPTTDEGGINSTFAYAYHFDANLYAGFLREFSEARGLRRTEGKVIDVTLRAQDGHIAAITLNSGEVIEGDLFIDCSGFRSLLMGKALEVGYEDWTPWLPCDRALAVPCERTGPLTPYTRSTAREAGWQWRIPLQHRTGNGYVYSSRFISDDEAAATLLANLDGAALDDPRPLRFQAGRREKSWHRNCVAVGLASGFLEPLESTSIYLIQVAITNLLKLMPARTIDPALVEEFNRLVDVEYERVRDFLILHYHANTRDDAPLWTYCREMDVPESLRRRMSLFQHRGHIHKYGQGLFAPPSWLSVFVGQGLRPAHYDPLVDNLPYERIVAEMDALRDSVALAARSMSDHAAFVDDYCASPAAVRLREGVAS

SEQ ID NO: 84460 - protein, 500 aa, unidentified
  source 1..500: note = Sphingomonas hengshuiensis
  REGION 1..500: note = tr|A0A2W5BD49|A0A2W5BD49_9SPHN Tryptophan halogenase; OS = Sphingomonas hengshuiensis OX=1609977 GN=DI632_05450; PE = 4 SV=1
MPHEPVRSIVIVGGGTAGWMAATYLARRLTHLDLSITVVDSAAIGTVGVGEATVPAIRDFLSAVELGEPDVLRDTGGTIKYGIRFDGWGGAGHRFFHPFGLYGVGAGGVAFHHYWLKLHAAGRAGPLSDYCLATQLARRGLFLPPADRPANDLGVFDFALHFDAAAFAAMLRRLALANRVTHVDGRIDHVATDPVRGHVTGVTLADGRGIAGDLWIDASGFRSLLLGGALDVPYVDWRHWLPCDRAVAIPCRAAPGDPVPYTVATARAAGWQWRIPLRRRIGNGSVYCSDFQSDGDAETALLASLEGAPLADPNRLRFTTGHRERFWSGNVVGLGLASGFLEPLESTSISLIQSGLERFVALFPDRDCDPRLAATYNRQSVLEFERLRDFLFLHYLANGRDEPFWRAIRAVEPPESLRIKLDAWRSGGEFVRNEWDTFHDPSWLSLYAGFGDLPARHSPLADAIADDALADSFARMRDAIAGTLALAEPHGAFLARVAGG

SEQ ID NO: 84461 - protein, 506 aa, Xanthomonas arboricola
  REGION 1..506: note = tr|A0A2S7AWK4|A0A2S7AWK4_9XANT Tryptophan halogenase; OS = Xanthomonas arboricola pv. populi OX=487823; GN = XaplCFBP3123_20270 PE=4 SV=1
MIPAPLRNIVIVGGGTAGWMAAAAFARVLGPGFKVQLIESEQLGTVGVGEATVPHIKAFNNLLGIDEAEFVRQTQGSFKLGIEFVDWQRPGTAYIHGFGTQIGHPLGLLPFHQYWIKQHLRGKAQPLGAYTLNTVAAVRGKFMTSAGDVPANSPLANIAYAYHFDATRYARFLRGYAQQRGVTRIEGLVEQVQLHADTGHVQSLQLASGQVVSGDLFIDCSGFRGLLIEQALHTGYHDFTHWLPCDRALAVPSEKVGPPTPYTRSTARAAGWQWRIPLQHRTGNGYVYSSAHISDDEAAATLLANLDGEALADPRPLRFTTGRRKQFWNRNVVALGLASGFLEPLESTSIHLIQAGISRLLELFPREGISPVLVQRYNDRLAFEFDRIRDFLLLHYHATERDDSAFWRHCRTMPITPELQTTLDLFRDSGRFYRNAEEMFAEISWVQVMVGQGILPQGYHPLVDQVPDHDAERFLASVAQTIGHCVDAMPTHQQFIDRYCKATAPR

SEQ ID NO: 84462 - protein, 505 aa, Pseudoxanthomonas sp.
  REGION 1..505: note = tr|A0A4V2HFB9|A0A4V2HFB9_9GAMM Tryptophan 7-halogenase OS=Pseudoxanthomonas sp. NML130969 OX=2480811; GN = EA655_17170 PE=4 SV=1
MGDNRIGSVVVVGGGSAGWMAAAALATYLGRQARVRLVESEQIGIVGVGEASVPHMRTFNAQVLGLDEREFAQRTQATAKLGIAFEDWGRIGERYVHGFGTIGQSRGPLPFHQFWLKQFLAGRAEPIGAYSLQTVMAPLERFVPGVANAPAGSPLADIAYAYHFDAGLYAQYLRQVSEARGVERIEGRIVQVHQHPETGHVTSLTLDGGQQVEGELFVDCSGFVGLLIEQTLQAGYIDWSQWLRCDRALAVPCARSGPIAPYTRATARGAGWQWRIPLQHRTGNGYVYSSAYVDDDQAAATLLGHLDGAPQGQPRQLRFTTGMRRRFWQGNVVALGLAAGFLEPLESTSLYLAQSGISRLLALFPTRDFDPLLAQRYNRESAFEYERVRDFLILHYHATTREDTPFWRDCRTMQVPESLREAMELFAADGRYFRNGEDFFALPSWVQVMLGQGIVPRGYHPIVDDMPQEALARYVEGTRERLAEAVAAMPTHQQFLDRYWKAEAP

SEQ ID NO: 84463 - protein, 500 aa, Pseudoalteromonas luteoviolacea
  REGION 1..500: note = tr|A0A541BG33|A0A541BG33_9GAMM Tryptophan 7-halogenase OS=Pseudoalteromonas luteoviolacea OX=43657; GN = FLM44_09385 PE=4 SV=1
MNSRKIVILGGGTAGWMAANLIAKSWGDKNIQISVVESPDIGIIGVGEGSTPQFKAFMDFIEVPESEWMPKCNATYKNGIRFVNWSTRPSFEQYFHPFPAQPDDYSAPAFFHNSFVRRKGIDLEGHPDPFFLATYLAEHAKAPIAAESFPFEINYGYHFDSGKLGMLLAEKAREFGVEHIQACVQDVRKNTDGTIAALICDKSREVCGDIFIDCSGFSSLLMQQHLQVGFESFENNLFNDSAVVLPTEQGESIASETVSVARKYGWSWHIPLINRIGNGYVYSSKYCNKDQAETELRAALGLLDSEVEARHLSMKVGQVKEHWHKNCVAIGLSQGFIEPLEATALHIVQETVQSFIECYQEGEFTCQKQGKHNQMMSQRYQAIRDYIVAHYRVNSRTDTNYWRDNANNNSISRSLFNVLNVWVQGKNLSDELDRQDIDKYYPSVSWHCLLAGYGIYPEQHQLVAGNESANVHDINKIREYIRRCGLNFPDHSVQLAHSSA

SEQ ID NO: 84464 - protein, 509 aa, unidentified
  source 1..509: note = Novosphingobium malaysiense
  REGION 1..509: note = tr|A0A0B1ZUQ7|A0A0B1ZUQ7_9SPHN Tryptophan halogenase; OS = Novosphingobium malaysiense OX=1348853 GN=LK12_00410; PE = 4 SV=1
MTGPIERVVIAGGGSAGWMSAAALAHTLRGTNIAIDLVESDKIGTVGVGEATIPPIRIFNQMLGIDETEFVRATQGTFKLGIEFVGWGNREGRYFHPFGRHGDDFGPVPFHQQWLAARAAGEDSPLAAYSLATVAARQGRFAPPLMHAGRATVWSTFSHAYHFDASLYASFLRQRAEAQGVRRHEGQIADVRRDSQSGHVREIVLRDGRRLKGDLFLDCTGFRALLIGKVLQTPFEDWSHWLPCDRALAVPTNSTSPPVPYTRSTARRAGWQWRIPLQHRVGNGLVWCSAFLDEDAAREELSANLDAPMLAEPRLLRFTTGRRTDAWASNVVAIGLASGFLEPLESTSLHLVQTAITRLLSWFPGKDFNPLVRAEYNRLTAREWEAVRDLLIFHYTAARRTDTPFWQHCRTISLPDALANRIDLYRSSGRIMDRDGDVFGRDSWLAVMAGQGIDPLDRDRLADAVPAAERLKVLAAMREVIHTTAASMPSHAETLRGAFRSNGAAEPSS

SEQ ID NO: 84465 - protein, 522 aa, Microbulbifer sp.
  REGION 1..522: note = tr|A0A0X3U656|A0A0X3U656_9GAMM Tryptophan halogenase; OS = Microbulbifer sp. ZGT114 OX=1685377 GN=AVO43_05295 PE=4; SV = 1
MASAATSGHIQHVLVVGGGTAGWLTASHLAKKLRARSPDGVRVTLLESDNIPTIGVGEGTVPAIRQTLQYLGISETEFIRECDASFKQSIKFVDWVHNPVAGRSDYYHHVFDYPDTRRGDLTPYWLKQAGTGRSFVDAVSVQGLVCDRGLGPKNMTLPEYQGLTSYAYHLDAAKFARLLTRHAVEELGVRHLLGTVEQVRRSDDGDIAAVVTDRHGALEADLFVDCTGFASLLLGQSLDVPFIDRTDVLFADHALAAQVPYGQMDAPIPSYTISTAQESGWIWDIGLPERRGTGYVYSSAHTDHERAETVFRNYLGAAGENAEVRRIPMKIGYRDRFWERNCVAIGLSQGFVEPLEATGILVYDATAKMLADTFPANREVMSTVAAQFNRHVRYAWERVIEFIKLHYCISQRTDSDFWLDNRAAESIPEALREKLALWRCQPPSDYDFPSKMEIFNLPNYLYVLYGMDFVTSAAHISNRFADDDNALARFVEIEAGARQLCEQLPAHRELIRKIKQFGLQKI

SEQ ID NO: 84466 - protein, 503 aa, Caulobacter sp.
  REGION 1..503: note = tr|A0A4R3H592|A0A4R3H592_9CAUL Tryptophan halogenase; OS = Caulobacter sp. BK020 OX=2512117 GN=EV278_10961 PE=4; SV = 1
MTGQSPFKFVIVGGGTAGWMAAAALAHAVKGKVAEIELVESEEIGTVGVGEATIPPIQFLNSMLGIDEIDFVKKTQATFKLGIEFRDWKKLDHSYLHPFGPIGTPIDGVGFHHYWHRLREHGDATDLYDYSMSAVAARKGKFVIAPRELPPGVPPLAYAYHFDAGLYARFLREYAEARGVKRTEGKIVEVKQRAADGFIEAVELEGGRRVEGDFFVDCSGFRGLLIEQTLKTGYEDWTHWLPCDRALAVPCDSVTPLTPYTRSTARAAGWQWRIPLQHRTGNGYVYSSPFISDDEAAATLMANLDGAPRAEPRLLRFTTGRRKQAWNKNVVALGLASGFMEPLESTSIHLIQTGVMRLLSLLPTRTYDAAAVAEYNRLSKVEYEQIRDFIILHYCATERDDSELWRYCANMALPEALTHKIELFRERGKVARYDDQLFAEPSWIAVFLGQGIEPRDHDRLADVPPIADVERTLFNIRDKMVHIADRLITHDEFIARHCKADPI

SEQ ID NO: 84467 - protein, 478 aa, Microbulbifer sp.
  REGION 1..478: note = tr|A0A0X3UBA0|A0A0X3UBA0_9GAMM Tryptophan halogenase; OS = Microbulbifer sp. ZGT114 OX=1685377 GN=AVO43_07125 PE=4; SV = 1
MTASLMVKVLGKSLNITLVESDKIGTVGVGEATIPPIINFNQALGINERDFLKATRGTIKLGIQFENWLRQGDSYMHAFGSIGKNFPFCDFHHFWRRSRASGDESSLWDYSLNYQAAIHNKFAHLAQIKGTNLPGISYAYHFDAGLYAQYLRNYSESKGVGRIEGTVKSVQVRPQDGFVESLLLEDGQSVSGDLFVDCTGLAALLIEKTLGVGFEGWSQWLPCDRAMAVPSAGSKPIVPYTRSIAHAAGWQWRIPLQHRTGNGIVYSSRHWSDDEAREVLMKNLDGEALAEPRVIPFRTGRREKQWDRNVVSIGLSSGFLEPLESTSIHLIQSAATRLIKSFPHQGIKPEEVSEFNRQSQVEIERIRDFIILHYKLNERRDSEFWRECESMSIPQTLEHKIELFRRTGKVFRDYDDLFTEVAWQQVMIGQGIFPQDHHTIADNLSEEQLRDLMGSLRTLIDGTVKSLPDHEKFLASLN

SEQ ID NO: 84468 - protein, 503 aa, Massilia sp.
  REGION 1..503: note = tr|A0A5C7FQY0|A0A5C7FQY0_9BURK Tryptophan 7-halogenase OS=Massilia sp. GEM5 OX=2603288; GN = FVD38_17540 PE=4 SV=1
MEHQAIKDIVIVGGGTAGWMTAAALSSMLNGRYNIRLVESDEIGIVGVGEATIPMIQRFNRVVGIDEAEFMRETMGTFKLGVEFVNWGKLGERYMHGFGRMGQDLATVPFEQYWHKMRALGKAAPLEEYSITRMAAKAGKFMPARTDVPNSPLGDIAYAYHFDASLYAKYLRKLCQARGVTRIEGKIARAIQREPDGFIEAVELEGGQRIEGELFVDCSGFRGLLIEQTLETGYEDWNHWLPADRALAVPCESVPTMTPFTRATAHKSGWQWRIPLQHRTGNGHVYCSRFISDDEATATLLSNLDGRALAEPRMIKFRTGMRKQAWNRNVVAIGLAGGFLEPIESTSIHLIQSAIARLVEFFPDRRFSETDRIEFNRQSRFEYERVRDFIILHYHLNQRTDSAYWTECAHMAIPETLRQKMDLYRSRGKIVRVDNELFSEVGWLQVFEGQNMPIDGYHPLADTQSEADIADYMGSVRDVIRKCVDVMPSHEEYIAKHCAAKKS

SEQ ID NO: 84469 - protein, 506 aa, Pseudoalteromonas luteoviolacea
  REGION 1..506: note = tr|A0A0C1Q9I1|A0A0C1Q9I1_9GAMM Uncharacterized protein OS=Pseudoalteromonas luteoviolacea OX=43657; GN = JF50_08895 PE=4 SV=1
MIKKIVIVGGGTAGWLAANHLGKRFFGSGTEVKLIESANIPTIGVGEGTVPMMRQTLEYFGIDEGEFIKECNVAFKQGISFENWMAPNNGNMHQYYHPFDFFSSELGLVTSWLNEHSDTSFADFVGFQSTLCNHNLSPKLITQPQYDGAASYAYHLDAGAFSELLKRHAVSQLGVIHQYSDLEEVVIRDDGEIGHLVTDTGIEEADLYIDCTGFKSLLLGEALQVPFIPKGDVLFADKALAVQVPYSENEHIPSYTRSTAQSAGWIWDIGLYTRKGIGHVYSSHHTTQEQAYVELENYIGTDLDKLNVRSIDMNVGYRSKAWSKNCVALGLSQGFVEPLEATGLLVFDVTAKMLADTLPTNKIAFNTVSTHFNETVTNMWNKVIDFIKLHYCISDREDSAFWLDNRSLDSIPDSLKDKLQLWLHKVPTHYDFGGKFDVFDIDNYLYVLYGMSYPTNIESNLITSYEAKRVSDIVKTIQYQQKQARELALNNKALLDKIHQFGLAKQ

SEQ ID NO: 84470 - protein, 518 aa, Microbulbifer sp.
  REGION 1..518: note = tr|A0A0X3UA64|A0A0X3UA64_9GAMM Uncharacterized protein OS=Microbulbifer sp. ZGT114 OX=1685377; GN = AVO43_11765 PE=4 SV=1
MDTIRNIVIVGGGTAGWLVAASLAKQLNILADPETTITLVESPDTPTIGVGEGTWPTMRNTLKRIGIDETDFIRECDVSFKQGTQFVNWHKLNRDGSDAAYYHSFELPHTQWRTAPGPYWHYLQSEIGLPYADAISVQPEACRGNFAPKTMATPTYEGLLNYAYHLDAGKFARMLQRVATSDLGVQHVSAHIERANLSKDGYIASLSTREAGDIDGDFFVDCSGFTALLIDGTYDIPFRSVSDKLFVNSAIAIQMPYQSAAEPIASPTISTAQQAGWIWDIGLHSRRGTGHVYSDDFISDDEAEDQLRRYLGPGSEQLDAKRIKMRLGYREKVFHKNCVAVGLSAAFLEPLEASAIFLIEASCNMLGELFPRNRAMLELLEKRYNASFISRWNSVVDFIKLHYFLSGRTDSEFWIENTRPETAPDSLKEYLEFWRYYPPSRFDLSSSLEPFVRESYEFILFGMGYGHYQQSNPARLPHLEYARENFARIAQMRSEVPSQLVTNRRLLDQLKDFRFQSI

SEQ ID NO: 84471 - protein, 502 aa, Caulobacter sp.
  REGION 1..502: note = tr|A0A0Q8FN09|A0A0Q8FN09_9CAUL Tryptophan halogenase; OS = Caulobacter sp. Root655 OX=1736578 GN=ASD79_06190 PE=4; SV = 1
MNSGPQQDIVILGGGAAGWIAAALLAKKTDRHRTRITLVESEEIGIIGVGEATVPVLAQCNALLGIDEFDFIRRTQGTFKLGIEFCDWGVAGNRHFHAFSDYGHQVEGVATHHYWLRLRQSGDDHPIDDYSFAYAVAKNNKFDLSDPQNSRYHHAYHFDAALYARYLRDVATELGVQRIEGKMTHVDLDGETGNIAAIHLANGVTVPGDLFLDCTGFASALLGKALETPFVDWSRWLLCDRAMAAPSKRPDAPTPFTRSTAHAGGWRWTIPLQHRSGNGMVYSSDFWSDDEAREALLGNIDGEPLAEPRLFRFTSGHRKQFWNRNCVGIGFASSFLEPLESTGLQLIVMGVLKLLRYFPERTIDPVLRDEYNQLSTREIERIRDFIIAHYYLSRRPEPLWAACRDIEIPDSLRHKLDVWNASGQIALGDSESYMEPSWLAILLGNGAVPARHNVSADLYPLEQIRKGMELRRQEIMRSAQAVTSHQDFIDRYCKAPQAAPAD

SEQ ID NO: 84472 - protein, 503 aa, Caulobacter sp.
  REGION 1..503: note = tr|A0A0Q8G7K2|A0A0Q8G7K2_9CAUL Tryptophan halogenase; OS = Caulobacter sp. Root655 OX=1736578 GN=ASD79_21040 PE=4; SV = 1
MDRVRRLVILGGGTAGWMAATALAKTFGPQLKIELLESEAIGTVGVGEATIPTIQWFNDLIGLDEAEFVRATKATYKLGIEFVDWARPGSRYFHPFGRYGVDLGPVPFHQRWLKARADGLESPLSAFSLTTQLAAANRFAKPVSEARSILSTLGYAYQFDATLYAKYLRGLSEAEGVTRHEGKLEAVERAPDTGFVTALTTDRGERIEGELFLDCSGFRALLIDGVMGAKFEDWSHWLPCDRAVAVPCARVAETTPYTRATLRTAGWQWRIPLQHRTGNGYVYASAFISDDEAAATLLGGLDGAALDEPRFLRFKAGFRRETWQKNVVAIGLSAGFLEPLESTSIHLIQSGIAKLITLFPDRDCDPGLARRFNTLFGRDMDGIKDFLILHYHATEGHEAPLWRHTRHMPLPDSLADKEEQYRRAGRLMLTSDELFREASWLAVLEGQGVRAEGYSPLADTLDQALNLQQLEQIEAVIARATPTLPRHDDAISALIGEPASVLA

SEQ ID NO: 84473 - protein, 509 aa, Microbulbifer sp.
  REGION 1..509: note = tr|A0A0X3U5P9|A0A0X3U5P9_9GAMM Tryptophan halogenase; OS = Microbulbifer sp. ZGT114 OX=1685377 GN=AVO43_11770 PE=4; SV = 1
MKKPFSILIVGGGTAGWMAANLMAHKWGDRKVSITLLESDAIGTIGVGEGSTPYLKGFFKTLGIAESEWMPACNATYKCGIRFPHWSTVPGYESYYHPFFSPLDREIGQVFFNNASLRRSGLDAPANPTDFFHAPFLSSNAYAPLPEQPLPFELDYGYHFDAGLLGRFLRDRAKSAGVRHIVDTISSVERKGETIEAVTAEDTGRHPADFFVDCSGFRALLLGSAPGYQFRPFHETLFNNAAVTVQIPRDDHAPLLSETISEGLSSGWMWRIPLQNRTGCGYVYSDRFLSADGAESELRKTLALPDSAQVNHLRMKVGRVEEHWQGNCLGVGLSQGFIEPLEATALMLVQFTIEHFLEAFSPGRPEVDHASREKVFNQRINRLFDGVLDYVAGHYKLNSRDDTPYWRAAREEIVISDRLRALIDCWDKNSDVDHMLDQAGEELVYSRASWYSLLAGMGRFPKNLRRADTGLQQESEEVRRFCTGNLNRFRSHQAQLDQLSLARQEAEPA

SEQ ID NO: 84474 - protein, 499 aa, unidentified
  source 1..499: note = Novosphingobium ginsenosidimutans
  REGION 1..499: note = tr|A0A5B8S1T7|A0A5B8S1T7_9SPHN Tryptophan 7-halogenase OS=Novosphingobium ginsenosidimutans; OX = 1176536 GN=FRF71_02040 PE=4 SV=1
MNPTKKLRVVVAGGGTAGWMTAAALAGTLGDCIELTLVESDAIGTIGVGESTIPPIVLFNRLLGIGEAEFMAATQATFKLGIKFENWKDVGETYFHSFGTTGKDHWSAGFQHFWLHGLSQGIEHSYDDYCLELKAALEGKFAHLPDDKMNYAYQLDSGLYAAFLRKRAEGDGAVRIEGKIAEVELDGESGNIAALRLDCDRRIAGDLFIDCTGFRALLIEGALHAGFDDWTHYLPCDSAIAVQTASVRPPVPYTRAIAHDAGWQWRIPLQHRQGNGIVYCSRYLDKDAALERLLGTVEGQVLTQPNFIRYTTGARRKQWHRNCVAIGLSGGFMEPLESTSIHLIQRAVLRLIRMLPGGPVSERDIAEFNDQQLTDMDQIRDFLILHYKVTERRDSPFWRHCAALPMPDSLAQKIELFRETGRVFRKNEELFVENSWVQVMMGQGIMPESYHPIATKLRADELDKFLAMLRDSVAKTVAGLPDHQTYIARYCAAQDARAA

SEQ ID NO: 84475 - protein, 521 aa, Xanthomonas codiaei
  REGION 1..521: note = tr|A0A2S7CS34|A0A2S7CS34_9XANT Tryptophan halogenase; OS = Xanthomonas codiaei OX=56463 GN=XcodCFBP4690_09615 PE=4; SV = 1
MDPSPASDPRQRPVRRVVIAGGGTAGWMAAAALSKLLGRHLQITLVESDEIGTVGVGEATIPSLVTFHRLLEIDEAAFMAATQATFKLGIAFEHWRDVDRHYIHSFGHTGTDHWSAGFHHFWLKGQQRGVARDFGDYCLELRAAQQGRFAHLPSGGMNYAYHLDAGLYARFLRRFSEGFGVRRIEGRIGQVETDPESGFLTALTLQDGTRVDGDLFVDCTGFAGLLIGKTLGVGSEDWSQWLFADSALAVQTESVGPPVTYTRARADQAGWMWRIPLQHRVGNGIVYSSRYTDQDSARAVLERNLQGHALTEPRALRFTPNQRHRVWEKNCVALGLASGFLEPIESTNIHLIQRGIVRLLQTFPQVIHPVDIAEYNRQAADEIAHIRDFVILHYHATDRRDTPFWRDCAAMDIPDSLRHRIALFRESGRVFHRANELFAENSWVQVMLGQGITPRQHHPVADLMGDAELSHFLEGIRQRVDATVARLPPHADFLCHHCPAAPLPAPPARVPADAALASPAR

SEQ ID NO: 84476 - protein, 390 aa, unidentified
  source 1..390: note = Myxococcus macrosporus
  REGION 1..390: note = tr|A0A250JP86|A0A250JP86_9DELT Tryptophan halogenase; OS = Myxococcus macrosporus DSM 14697 OX=1189310; GN = MYMAC_001015 PE=4 SV=1
MSESSCDVAIIGGGPAGAAMAVALRDKAPFLSVTVVERTAYDAPRLGETLPPDVRLPLSRLGVWGSFLRDGHLASRGTSACWGQAEPGFHDTLMSPWGSAWHLDRARFDERLSLEAVRQGARVLRTTTLLSAEALGRDGYLLHLARAKSGPSTLRARFVVDASGWKAPFASARGARRLVSDRCFAVYGAFTLPDDATFPTYALVEACPEGWWYSALLPNRRVVVALIGDGDSLRGLRWATPEPWLALLKQAPVTHARLDVCDFTSEPLVAVPVLVGQLDRMQGEQWLAVGDAACTYDPLSSQGITKALDSALLAADALERYLRGDLEALQTYEATLNERFQEHQRTRGAYYRQEQRWPQAPFWRNRWESLPGPPALPAPPRRPQPLEVTS

SEQ ID NO: 84477 - protein, 535 aa, Verrucosispora sediminis
  REGION 1..535: note = tr|A0A1I1Q3H6|A0A1I1Q3H6_9ACTN Tryptophan halogenase; OS = Verrucosispora sediminis OX=547162; GN = SAMN05216284_11244 PE=4 SV=1
MTVSGAAAKSTRDPGRTQRVVIVGGGTAGWMTASYLAAAFGDRIDVTVVESATVGTIGVGEATFSDIRHFFEFLRLEESEWMPACNATYKLAVRFENWREPGHHFYHPFEQMASVDGFPLSDWWLRYPTTSRFDKDCFVMASLCDAERSPRYLDGSLVDQGFVEQTRDETSARSTIAEYQGAQIPYAYHFEAHLLAKFLTGYSTQRGVKHVVDNVVDVALDDQGFISHVRTAEHGEIAGDLFVDCTGFRALLLNKALGEPFVSYQDTLPNDSAVALQVPLDMESKPLRPCTTATAQDAGWIWTIPLISRIGTGYVYASDYATPEEAERVLREFVGPETADVPANHIRMRIGRSQRSWVKNCVAVGLSSGFVEPLESTGIFFIHHAIEQMVKYFPSGLGDDLLREQYNRSITHVMDGVREFLCLHYRGAKRVDNQYWKDTKTRVIPDALAERIEIWQHKVPDSESIYPYYHGLPPYSYNCILLGTGGIDVRHSPAVELADERAALAEFERIRVKAEKLVQELPTQNEYFAAMRANQ

SEQ ID NO: 84478 - protein, 372 aa, unidentified
  source 1..372: note = Caballeronia calidae
  REGION 1..372: note = tr|A0A158EFY9|A0A158EFY9_9BURK Tryptophan halogenase; OS = Caballeronia calidae OX=1777139 GN=AWB78_07697 PE=4 SV=1
MNETGATQLKFTSRDRMDVVVIGGGPAGCATAIALARRGLRVAMFEQSSYDRVRVGETLPPESRVHLAALDALRDVENDAHLPSSGIASVWGNEGLHQNDFIFNPYGHGWHLDRCRFDAMLARRAADVGVQVFLASTARWCEADSNGFEVEAKRTRAMSMRLRSRFVVDATGRGASPLPGQQRRIVYDKLVGLVGFVAQTYEEGDSRTLLEAVRDGWWYTAPLPAKRRVVVYMTDGDQLKHSRRDLDRFFLARLSEAPHTGKRVGMPSDVQSLHVLPASTYRHVSIHGERWVKVGDSACSYDPLSSSGVSKGLQSGLDAAAAVEASLDGDPFALANYTARVEQRFAQYLGSRALYYGREMRWPESAFWQRRH

SEQ ID NO: 84479 - protein, 502 aa, unidentified
  source 1..502: note = Erythrobacter aquimixticola
  REGION 1..502: note = tr|A0A419RX56|A0A419RX56_9SPHN Tryptophan 7-halogenase OS=Erythrobacter aquimixticola OX=1958945; GN = D6201_11330 PE=4 SV=1
MAIEKIVIVGGGTAGWMAAAALSGLSKARHVAITLVESEAIGTVGVGEATIPPFVDFQRLLEIDEAEMLSAVQGSFKLGIQFENWGKLGDSYIHPFGNYGYEIGGLTFHHIWHHQKSQGDNRPIQVFNPETMAAYFGKFAKTDDMRRDDLPPINYAYHINATAYAGFLRRYAEKRGVVRQEGRVDDVRLDGESGHVASITLESGQEIAGDLFVDCSGFRGLLIEQALETGYEEWTHWLPCNRAVAMPCNRDDGSPPPPFTRATAHSAGWQWQVPLQHRNGNGHVYCDSFMDADEATDILIRHMAGKPTADPNHLRFVTGRRKKFWNKNVVSLGLAAGFMEPLESTSIHLINTGINKLIALLSLDGVTEAQAASFNRLTAKEYERIRDFLILHYSATTRDDSEFWNYCRTMSVPDSLTEKIELFKANGQIFREDDELFTETSWAAVMMGQGIAMNGHNAMAATLDQAETRKEFDEIEKSIRFMVQHMPGHGEYLARYCPMQPA

SEQ ID NO: 84480 - protein, 538 aa, Burkholderia sp.
  REGION 1..538: note = tr|A0A2U9T6S1|A0A2U9T6S1_9BURK Tryptophan 7-halogenase OS=Burkholderia sp. JP2-270 OX=2217913; GN = DM992_38835 PE=4 SV=1
MSNPIKNIVIVGGGTAGWMAASYLVRALQQHTNITLIESAAIPRIGVGEATIPSLQKVFFDFLGIPEREWMPQVNGAFKAAIKFVNWRKSPERSRDDHFYHLFGNVPNCDGVPLTHYWLRKREQGFQQPMEYACYPQPGALDGKLAPCLSDGTRQMSHAWHFDAHLVADFLKRWAVERGVKRVVDEVVEVRLNDRGYISSLSTKEGRTLEADLFIDCSGMRGLLINQALKEPFIDMSDYLLCDSAVASAVPNADARVGVEPYTSAIAMNSGWTWKIPMLGRFGSGYVFSSKFTSRDQATADFLNLWGLSDKQPLNQIKFRVGRNGRAWVNNCVAIGLSSCFLEPLESTGIYFIYAALYQLVKHFPDTSFDPRLTDAFNAEIVYMFDDCRDFVQAHYFTTSRDDTPFWLANRHDLRLSDAIKEKVQRYKAGLPLTTTSFDDSTYYETFDYEFRNFWLNGNYYCIFAGLGMLPDRSLPLLRHRPESIDKAEAMFASIRREAERLRTSLPTNYDYLRSLRDGDTGLSRSQPGSTLAAPEIL

SEQ ID NO: 84481 - protein, 509 aa, unidentified
  source 1..509: note = Sphingomonas ginsenosidivorax
  REGION 1..509: note = tr|A0A5C6UDP0|A0A5C6UDP0_9SPHN Tryptophan 7-halogenase OS=Sphingomonas ginsenosidivorax OX=862135; GN = FSB78_04835 PE=4 SV=1
MDRTETAIRSVAIIGGGTAGWMTAAALAHALGTRCPITLVESDDIGTVGVGEATIPPIKLFNDTLGIAEADFLRETRGTFKLGIEFVDWAKIGHRYFHPFGTFGKPFDLVAVHQHWLAARDAGSSIPLDDLSMAWGAASRGRFAAPMADQRSVASTFDYAYHFDAGLYARFLRNYAEARGVVRIEGKVGDVALHGDTGHVAGVTLQDGRRIEADLFVDCSGFRGLLIEGALATGYEDWTHWLPCDRAVAVPCVTGGDGLTPYTRSTARAAGWQWRIPLQHRTGNGYVYCSRHISDDEATATVLANLDGEALAEPRLLRFTTGRRRLFWNRNVVAIGLSSGFMEPLESTSIHLIQTGIAKLLAYFPTRDFDPLIIDEYNRVAITEYERIRDFLILHYKLTRRDDAPLWRECAAMPIPETLALKIAHFQRGGRLIARDMDLFGPASWLAVHIGQLNDPGFGDPLLDTATGGRTSTVFVDRLADAIAKMAESMPSHSDYLTRIGASAIPRQK

SEQ ID NO: 84482 - protein, 503 aa, Caulobacter vibrioides; identical to SEQ ID NO: 83068
  REGION 1..503: note = tr|A0A0H3C8H6|A0A0H3C8H6_CAUVN Pyridine nucleotide-disulfide oxidoreductase OS=Caulobacter vibrioides (strain NA1000 / CB15N) OX=565050 GN=CCNA_01598; PE = 4 SV=1

SEQ ID NO: 84483 - protein, 504 aa, Caulobacter vibrioides
  REGION 1..504: note = tr|A0A0H3C4P5|A0A0H3C4P5_CAUVN Tryptophan halogenase; OS = Caulobacter vibrioides (strain NA1000 / CB15N); OX = 565050 GN=CCNA_00828 PE=4 SV=1
MDGKPYRKFVVVGGGTSGWIAAATLIHALKGKLAQVELVESDEIGTVGVGEATIPPIQFLNSILGIDEFNFIRKTQATFKLGIQFRNWGRQGHEYFHPFGPYGQSIEGVSFHNYWMRLRANGEGGELDAYALATVAAKAGKFAVPPKDLPPGVPGLGYAYHFDAGLYARYLRAYAEARGVQRTEGKIAKVELRPEDGFVSGLTLSDGRRIEGDFFIDCSGFRGLLIEEALQAGFEDWSHWLPCDRALAVPCENAEPLTPYTRSTAHAAGWQWRIPLQHRTGNGYVYCSAHISDDEAAATLLANLDGKPLADPRPLRFTAGRRKKSWSKNVVALGLAGGFMEPLESTSIHLVQSGAMRLLSLLPLGGYDPAAEAEYNRLTQIEYEQIRDFIILHYCATERDDAPLWNHCRTMAIPDSLTHKIELFRNRAKIARFDEQLFAEPSWLAVFLGQGIEPKDYDRLADAPAYDEVVAAVRRIGQTNANLVARLPTHEAFIAATCKAEALG

SEQ ID NO: 84484 - protein, 499 aa, unidentified
  source 1..499: note = Pseudoalteromonas piratica
  REGION 1..499: note = tr|A0A0A7EFM4|A0A0A7EFM4_9GAMM Tryptophan halogenase; OS = Pseudoalteromonas piratica OX=1348114 GN=OM33_09825; PE = 4 SV=1
MMTNKINNVVIVGGGTAGWLSASLLAKVLGKHLSITLVESEQIGTVGVGEATIPPIIPFNAAIGVDEKAFIKATNATIKLGIQFENWGQQGEQYMHAFGGFGKDFPFCNFLNYWLRAKELGDTSSFWDYSINYQAAKRNRFNKLNTIPNTQLPGITYAYHFDATLYAQFLRSHAEKLGVKRVEGTVETVNTDEETGFVNEIVLDNKEQISGDLFIDCSGLHGLLLDKTLNVGFEDWSHWLPCDSALAVPCEHGEQAIKPYTRSIAHNSGWQWQIPLTNRIGNGLVYASKHLSDEDAKQLLLDNLPGKALAEPRLIRFRTGRRLKQWHKNVVAIGLSSGFLEPLESTSIHLIQTAATRLVKHFPLHGISDSLVAEYNRQSQIEFERIRDFIILHYKQTARDDSPFWRQCQQMEIPESLAHKMKLFEQQGLFCRQDDELFSEIAWQQVMLGQGALPQQYHPLAHNLTDEQLTEMLQNLKVLITHTSEQLPTHNEFLQRFGN

SEQ ID NO: 84485 - protein, 512 aa, Pelomonas sp.
  REGION 1..512: note = tr|A0A0Q7B758|A0A0Q7B758_9BURK Tryptophan halogenase; OS = Pelomonas sp. Root405 OX=1736529 GN=ASC81_20080 PE=4; SV = 1
MNTSTKPPRRVVIAGGGTAGWMMATLMGKLLGKQLDIKLIESEEIGTVGVGEATIPALLTYHNLLGITEAEFMAATNATFKLGIKFEGWKDISQDYFHSFGSTGNDHWSAGFQHFWLKGRAAGIARDYTDYNPETLAAYADRFGHVPRNGLNYAYHLDAGRYAKYLRAMSEGYGVQRIEGKIAAVLMDGPEGRDGDITALQMQDGSRIDGDLFIDCTGFRAMLIGEALGVGYEDWSHWLPCDRAVAVQTASVREAWPYTRSIAHPFGWQWRIPLQHRVGNGLVYSSKELSDADAPEMLKKNVEGEVLIQPRVIKFLPGQRHKVWHRNCIAVGLASGFIEPLESTSIHLIQRSAIRLMQLFPTQGINPADVNEFNLQCERELTHIRDFIILHYHVTHRSDSALWNHVRTMEVPATLRHRIDLFTESARVFRPSDELFAENSWIQVMMGQGITPHSYHPVADLMGPSELNQFLGDIHTKAARIAGGLHGHQAYVEQLCAPYRNATTAQLVPKQA

SEQ ID NO: 84486 - protein, 522 aa, Pelomonas sp.
  REGION 1..522: note = tr|A0A0Q7BB47|A0A0Q7BB47_9BURK Tryptophan halogenase; OS = Pelomonas sp. Root405 OX=1736529 GN=ASC81_25130 PE=4; SV = 1
MNSELTTAVRRIVVLGGGSAGWLTAATLAAELGGTAPDALEITLIESPDVPSIGVGEGTWPTMRATLHRIGLREVDLIRECDAAFKQGSCFDGWLHGGEGDRYYHPFTLPHGHGHGQVDLAGAWLQAGSEQAFAESVGAQPHVCDARLAPKQTTTPDFGGVMNYGYHFDAVKLGHLLRRHATTVLGVRHVVDHFTAVRSQENGDIAALATREHGDIEGDLFVDCSGLASLLLGQHYGVAFRSEEGVLFNDSALAVQVPHADAQAPLASATISTAHAEGWTWDIGLPTRRGIGLVYSSGHTDDAAAERALLAYLQRSGLAHADVSPRRLRFSPGYREHFWHRNCVAVGLSAGFIEPLEASALALVELSAAMIRDEMPANRADMDLVAKRFNEAFAYRWSRIIEFLKLHYALSRRDDADYWREHRNAATQPESLRELLQLWAHRAPSRNDFYRNEEVFPAASYQYVLYGMRFKPVLRALRADQRAAADAGLKDVATITRRLLSALPRHRNLIQHIREHGMPPAA

SEQ ID NO: 84487 - protein, 513 aa, Rubellimicrobium sp.
  REGION 1..513: note = tr|A0A5C4N0E3|A0A5C4N0E3_9RHOB Tryptophan 7-halogenase OS=Rubellimicrobium sp. YIM 131921 OX=2585369; GN = FHG66_10180 PE=4 SV=1
MGSSRAAPEGLVMTAAGWPRRIVVVGGGTAGWLAAMMLSDVAAKTSPGTSVTVIESSRIGVIGVGEGSTAVFRQMLRRFGLDEEEFLRETGATIKFGIRHRDWRRLGHHYDGPIDDPHLVAPGVPLDAYAVAAGKPVQEAHLFQHLIWKKRGPFAEVNGKRVPAGPFHYAFHFDQALVGAWLRKKAKGIRHVNDQVTGVETGGEGVVAVHLEGGERVEGDLFIDASGFRRRLVSELPFEWVSFADMLPNNRALPFWLDLKDGEEIDPVTGAWAQGHGWMWNIPTQGRYGCGYVYCDQYITPEEAQAEIERALGHPIEPRSDIRINPGRQRDVWVGNVVALGLASSFLEPLEATSIHGTIGQLICLTEWIGTPSGKERYNATAARQVDDFRDFVRLHYVSERRDTAYWRDVTASHPPVVTERLEKWSRKFPSREDFEPFPLGLAHVQEQLYVPVLNGLGLLSQDLARAEMARDPKLRQRARETHASLVAEYSRAAEKCLPHRAWLESLHKEMAA

SEQ ID NO: 84488 - protein, 509 aa, unidentified
  source 1..509: note = Aliikangiella sp.
  REGION 1..509: note = tr|A0A545UIC8|A0A545UIC8_9GAMM Tryptophan 7-halogenase OS=Aliikangiella sp. M105 OX=2592383; GN = FLL46_03560 PE=4 SV=1
MIKSIVIVGGGTAGWISAGIIAARHRADNNQSIEVTLVESPDIPTIGVGEGTWPSMVNTIKTMGISEREFVRECDVSFKQGIKFERWISGRNDDVYYHPFSYPHRSQQGGLIARWLRNSNSKSYAESITTQCYLDELSLAPKQLNSPEFNALENYAYHLDAAKFSTFLKKHCTRKLKVRHIVDNVQGVNTNEQGNITSLKTQQNNEIEGDLFIDCSGISSILLRQHFGIPFKSCKDTLFVDRALAVQVPYQKPSSPIASMTRSVAQQAGWIWDIGLPSRRGIGHVFSSNHISVENAAKQLEDYLRPNVNNINDFQFREIRFEPGHAQKFWVKNCIAVGLSAGFVEPLEASALGMIELSARMIAEHLPVSHSSMDVVAENFNQIFLQRWQLIIDFLKLHYCLSKRNDSEFWIDNRKSQSMSDTLKNLLRLWENQPPLDNGFMNPYDMFPVASYQYILYGMNFLTQPSHLNSSKFETQEAIKNLQIMASRTEKLAALVPTNRELIKSMTAR

SEQ ID NO: 84489 - protein, 496 aa, unidentified
  source 1..496: note = Cellvibrionales bacterium
  REGION 1..496: note = tr|A0A1Z8TSL5|A0A1Z8TSL5_9GAMM Tryptophan halogenase; OS = Cellvibrionales bacterium TMED49 OX=1986842; GN = CBC09_06740 PE=4 SV=1
MKNKPVKKVVVVGGGTAGWLAAASIAKLLGDNLQITLIESDEIGTIGVGEATIPTMLVLHHLLKINEQEFMSAVHGSFKLGISFENWGALGDKYIHSFGVTGKGCWAAGFHHFWLKARKLGLSGDYGNYCTELMAAKSDRFAVSVNNEKLNYAYHFDAGLYANFMRKIAEESNVRRLEGKIINVVTDEVSGFISAVRLDSGQRIEGDLFVDCSGFASLIIDKTLNTEYDDWSNWLPCDRAIAIQTSATSEPVPYTRSIAKDAGWQWRIPLQSRVGNGLVYCSSYITDADAESVLLSSVDGNALTKPRLIKFRTGQRKLHWNKNCIALGLAAGFVEPLESTSIHMVQKGIIRLLQMFPFDGIKVADKDEFNHQMREEFLFIRDFIVLHYHLTKRTDTNFWNHCRSMAIPETLRHRLELFRESGRIFEKDRDLFAENSWAQVMLGQGLMPAHYHPIVNMMADAELTFFLNNIESQAINRVTQLPKHQHFIDKYCKAIA

SEQ ID NO: 84490 - protein, 507 aa, unidentified
  source 1..507: note = Pseudoalteromonas piratica
  REGION 1..507: note = tr|A0A0A7ELH0|A0A0A7ELH0_9GAMM Tryptophan halogenase; OS = Pseudoalteromonas piratica OX=1348114 GN=OM33_20360; PE = 4 SV=1
MQLTHNPIEKFVIVGGGTAGWLAAATLGNIFKDSNTQVELIESDEVNIIGVGEATIPPLIDTLESLGIDLVEFIKATQASFKWGIQFENWYQESHSYFHPFGEVGQKIDGHDFYQCWLKQKAEGDNTPLMAYSPEAVLSEKNRFFVPHQAMNTPLAGARFALHLDAVLAGQYLRKFSENIGVKRTVGHVESISKTIDGNISSVTLKSGETISGDFFIDCTGFKGLLIANALNTEYQDWSEHLPCNRAVAVQTKLTGNTKPYTVSRGQKAGWSWHIPLQHRTGNGYVFCDKYITDEEAIQTLLDNVDGEPLTEPRVIPFVTGVRDKVWNKNCLSLGLAQGFLEPLESTAIHLVSKSLALFVRMFPTKKPNAVLQNEFNRRIIGDYQEIRDFLVLHYCTTKRDDSAFWRDWQQKQVPASLSERIEFFRQSGGLIPGVEELFQPTSWYAVFDGMGVIPNGYNPTLDALNSETLAKSLAAGRSALEKCAEAQPSHDEFLQQYCPADEAIFN

SEQ ID NO: 84491 - protein, 497 aa, unidentified
  source 1..497: note = Paraglaciecola mesophila
  REGION 1..497: note = tr|K6XQE1|K6XQE1_9ALTE FADH2 O2-dependent halogenase I OS=Paraglaciecola mesophila KMM 241 OX=1128912 GN=prnA; PE = 4 SV=1
MDKQPIKRVVISGGGTAGWMAAAAFSKLLGKNLTVSLIESDDIPTVGVGEATIPTLHIFHRLLGINEQEFMAATNATFKLGIKFENWKAQGEDYIHSFGFLGQGCWAAGFQHFWLKGKQKGLVTQIGDYVPEHLACREGRFAVLANQEQNHAYHLDAGLYAQFLRKMAEQHGCKRIEGNIQAVNLNEESGDISSLSLASGELVEGDLFIDCTGFRALLIEQALHTGFEDWSHWLPCDSAVAVQTTAKPNPVPYTRSIARDAGWQWRIPLQNRTGNGLVFCSKYMSDEQAKAALLANVEGETLNEPRVIKYKTGTRRKHWNKNCIAVGLSSGFIEPLESTGIHLFQRAIVRLMLMFPSNGIEQADVDEFNTQSRADVEDIKDFIILHYHQTERTDTPFWRYCKSMPIPDTLTHRMELFAGTGKVFKKAEELFGETSWIQVMLGQGIMPKQYHPIVDMMSDDELQRFLENIKNNVKRKVSNWPDVNDFIRHYCQTKIAN

SEQ ID NO: 84492 - protein, 61 aa, unidentified
  source 1..61: note = Cribrihabitans marinus
  REGION 1..61: note = tr|A0A1H7A024|A0A1H7A024_9RHOB Tryptophan halogenase; OS = Cribrihabitans marinus OX=1227549; GN = SAMN05444007_105317 PE=4 SV=1
MPDHKTLLRDIRGELEQPAFGMAAAMQPTVPMPGAARPPVVIQNMPSHAEIQRGEKDLQLF

SEQ ID NO: 84493 - protein, 500 aa, Sphingobium sp.
  REGION 1..500: note = tr|A0A2E3BJS8|A0A2E3BJS8_9SPHN Tryptophan halogenase; OS = Sphingobium sp. OX=1912891 GN=CMN60_16065 PE=4 SV=1
MTQPSLPRRIIVAGGGTAGWMTAAALARTLGPVAQVTLIESEQIGTIGVGESTIPPLVAYNRILGIDEADFMRATQATFKLGIQFENWRVPGEGYFHSFGGTGKDHWSAGFQHFWMHGAAQGHDAPYDEYCLELKAAMAGRFAHLPDDRMNYAYHLDSGLYAKFLRAMAEGDGATRIEGRIVAVDLDGASGDIAALRLDGDRRLEGDLFIDCTGFRALLIEGALHAGYDDWTHWLPCDGAVAVQTASVRAPVPYTRAIAHDAGWQWRIPLQHRQGNGIVYCSAFMEPQAAQDQLLATVEGDRLVQPNPIRFRTGARRRQWHRNCVAVGLSGGFMEPLESTSIHLIQRAVLRILRMLPAGAISPRDITEFNDQQMADMEQIRDFLILHYKATDRRDTPFWRHCAAMAVPDSLTHKMELFRETGRVFRKNEELFAENSWVQVMMGQGITPQSYHPVAAKLRPQELEHLLTTLRDQVSRTVSALPDHEAYVARYCGAQDVAAA

SEQ ID NO: 84494 - protein, 496 aa, unidentified
  source 1..496: note = Pseudoalteromonas neustonica
  REGION 1..496: note = tr|A0A558IYE9|A0A558IYE9_9GAMM Tryptophan 7-halogenase OS=Pseudoalteromonas neustonica OX=1840331; GN = FQP85_00245 PE=4 SV=1
MTHNKPIKNVVIAGGGTAGWMAAAALSKLVGKNINVTLIESDDIATVGVGEATIPPIRTFHKLLGINEQAFMKATQASFKLGISFENWGEKNTDYIHSFGMTGKECWAGEFHHFWLHSLTLGLESEFGDYCYELQAAKQGKCAFNQQNPINYAFHMDASRYALFLREFSEQLGVKRLEGKIIHVNKCATSGFINSLTLADESIINGDFFIDCTGFNGLLIEQALHTGYEDWSHLLPCDSAIAVQTRAISDDIVPYTRSIAHDAGWQWQIPLQQRVGNGLVYCSRYLNDTDAKQLLLSNIQGETLTEPRVIKFKTGRRRKGWNKNCLALGLASGFVEPLESTSIHLIMSGIIRFIRLFPFDGITEQAIHEYNKQLKSEIENIRDFIVLHYKVTDRTDSEFWRHCKNMEVPDTLVHKISLFKETGRVFLDDGDIFRVDSWVQVMLGQGIKPKQYHLIASLMSDDELSHFLNSIKQQITQRVAQLPTHKAFLQQYCSAE

SEQ ID NO: 84495 - protein, 512 aa, Pelomonas sp.
  REGION 1..512: note = tr|A0A0Q7BB66|A0A0Q7BB66_9BURK Tryptophan halogenase; OS = Pelomonas sp. Root405 OX=1736529 GN=ASC81_15155 PE=4; SV = 1
MPDGGPLRRIVIVGGGTAGWMTAAPLGQLMGGGDHAATCEVVLIESPEIGTVGVGEATLPTIRYYNNSLKLDNAEFMRKTQASFKLGIEFKDWGHLGNRFFHGFGEFGPAILNRSSVSHWLRVHGQAGGMGYEDLSTATVMAMRNRFVPPDGDVASAANAYSFAFHFDAGLYAAFLRDYAMARGVKREEGTIVDVSLRPGDGFVTAVTLADGRRIEGDLFIDCSGFRALLIEGVCKAGYEDWSHWLPCDSAQAVPCARVEPLTPYTTSTARSAGWQWRIPLQHRTGNGHVYCSGYVSDEEAGEVLMRNLDGAAQGNPRQLRFKTGMRKKAWDRNVVAIGLSSGFLEPLESTSIQLIMDGIGRLIELLPDRRCDAHLAAEYNRRMTRQYESIRDFIVLHYKLTKRDDSEFWRYCAAMPIPDDLTHQIEVFRRSGRVAILDPDSFAEPSWVSLFLGLGLSPERHDPLLGQVDEHALRGHFERLRTAIAKTVEGMPDHGAFINKHVKAPAMEMTK

SEQ ID NO: 84496 - protein, 501 aa, Pelomonas sp.
  REGION 1..501: note = tr|A0A0Q7BK98|A0A0Q7BK98_9BURK Uncharacterized protein OS=Pelomonas sp. Root405 OX=1736529 GN=ASC81_25040; PE = 4 SV=1
MSQAFQRIVIVGGGTAGWMAATAVATALRGRSSVEVVESEEIAIVGVGEATFPSIRNYHRLVGIDEADFLRATHGTYKLGIEFRDWRVQGEGYFHTFGDFGALTGPRALWGQHRRLADPALGALGEQCLPTVMAQQGRFVVPAADDGHEPYKYAYHFDATLYAAFLRELALKRGARRTEGRIVDVTRRADGGVQSLKLADGREVTGDLFIDCSGFGSLLLGKVLAEPFVDFSRWLPVDSAWACPCERSGSELTPYTRSTALEGGWAWRIPLQNRTGHGHVFSSRHIDADRAREQLLQQLDGKPLAEPRLLRFTTGHRERFWVHNVVALGLSSGFLEPLESTSIFLIQSGLGHLMERLTSGQPVDDASVDDYNSRAVREFSRIRDFIVLHYCLTARRDSALWRDMAALELPDTLAFKLEAWRRLGLLHLQGDEGFDEHSWLAVLTGLQHWPERTDPVLEELAPEQARQALLQRRQAIAQSVARLPSHDAFLAQVLQEPRRTT

SEQ ID NO: 84497 - protein, 511 aa, Pelomonas sp.
  REGION 1..511: note = tr|A0A0Q7B613|A0A0Q7B613_9BURK Tryptophan halogenase; OS = Pelomonas sp. Root405 OX=1736529 GN=ASC81_20065 PE=4; SV = 1
MDDRLREVVVLGGGSAGWLVAGLLAAEHPDLRITLIESSDVPTIGVGEGTWPSMRDTLRRIGLSEPEFIRRCQVSFKQGSRFDGWARGAAGSEGDRYYHPFMLPVGYGDADLVQTWLATQGQRPFADVVSPSVQVCEAGRAPKQVQTPGFGAVANYAYHFDAGLFGQMLREHAIAKLGVHHVIDHVDAVLSHENGDIAALQTRSHGELKADLFIDCSGLTSRLIGTHFGIPLKSERDVLFNNAALPVQVAYAQAEAPLAPVTIATAWAKGWIWDIGLPTRRGVGCVYSRAHASDDEAQAALQAYLDATGAPTDRPEPRSIRFDPGYREQFWVRNCVAIGLSSGFIEPLEASALALVELSAQRLCDELPMTRASMDAVARRFNDDFSYRWARVIDFLKLHYALSSRDDSDYWRAHRDPASWPERLRELLPMWKLRAPARHDFGRIDEVFPSASYQYVLYGMGFRPDAQSLSAAKLQAAQACFDEAARQARRFVGALPGHRSLIDHIKNHIET

SEQ ID NO: 84498 - protein, 505 aa, unidentified
  source 1..505: note = Sandarakinorhabdus cyanobacteriorum
  REGION 1..505: note = tr|A0A255YJB9|A0A255YJB9_9SPHN Tryptophan halogenase; OS = Sandarakinorhabdus cyanobacteriorum OX=1981098; GN = CHU93_07985 PE=4 SV=1
MRDDNIRSVCIVGGGSAGWMAAAALARNLPHGVAIHLVESEEIGTVGVGEATIPPIKLFNQMLGLNEADFVRATQGSFKLGIEFVGWGKAGHRYFHPFGTFGADFDSVAMHHWWNRQRLAGDPTPLDDYSMAWVAAKSNRFAPPAQDRRLVQSTFDYAYHFDAGLYARALRALAENLGVTRHEGRITGVARDGETGQVTAITLADGRQIDAEFWIDCSGFRGLLIAETLETPFIDWTHWLPCDRALAVPCAHANGTDGAGFTPYTRSTAHAAGWQWRIPLQHRIGNGHVFSSAFMGEDEAAAILMANLDGPALADPRLLRFTTGRRAQSWAHNVVAIGLAAGFMEPLESTSLHLVQSGLMRLLALWPTRAMDAHVRDEFNRMSATEWERIRDFLILHYHLNSRDEPMWRHCAAMPIPDTLANKIAHFASHGRLVSDGPELFLNASWLAVHVGQFNLPRRHDPLADARATNVDAPRLLSGLARVMREAAAEMPTHAAFIARHCAAN

SEQ ID NO: 84499 - protein, 495 aa, unidentified
  source 1..495: note = Pseudoalteromonas neustonica
  REGION 1..495: note = tr|A0A558IWR7|A0A558IWR7_9GAMM Tryptophan 7-halogenase OS=Pseudoalteromonas neustonica OX=1840331; GN = FQP85_01595 PE=4 SV=1
MNIIIVGGGTAGWMAANLLNHSLTNTHVTLIESPTIAPIGVGEGSTPQLKQFFDTLNISESEWMPQCNATYKLGIEFKNWSTHPGHEQYFHSFYGQTDLHTQQQFIKSCLLKRQGIAIDAHPDSYFLAAYLAKQQRGPHTQADFPFQQSYGYHFDSGLLGLFLANRATSKGVKHLKSTIAQVELDSAGNIKQLVLDENSDGQQCIAADFFIDCSGFKGLLIQQALAVPWLSFKENLFNDSAIVLPTTSNQLQAPQTTSTALKYGWQWAIPLTNRIGNGYVYSQDFCSADEAETELRTKLGLLNCDVPARKLTMKVGRVKQHWYKNCLAVGLSQGFIEPLEATALHLVQQTIESFIACFEHNQPSEAKRDSFNTQINNRIEGIRDYIVCHYRASNRRDTEYWQANGQNEMLSASLKNIFQCWLSRNDLTGEIAHQGIENYYSSLSWHTLLSGYGVFPPSVAKPSYTQQQQIKELYNFNHQCASHFRALTPIIPQQK

SEQ ID NO: 84500 - protein, 496 aa, Colwellia psychrerythraea
  REGION 1..496: note = tr|Q487M4|Q487M4_COLP3 Putative tryptophan halogenase OS=Colwellia psychrerythraea (strain 34H / ATCC BAA-681) OX=167879 GN=CPS_0992 PE=4 SV=1
MNSPVKKVVVLGGGTSGWISAALLKKILGSAIQLELVESDAIGTIGVGEATIPPIKHLNNVLGINEAEFLRETKATIKLGINFENWKSQGHSYLHSFGAAGKSLAFCHFHHLLKRANQLEDDSHLWQYDLNYLCAKAGKFAQIKSKDPIIELPYAYHFDAGLYAKFLRKFSEKIGVIRTEGLVEHVEQCPNSGHITSLKLKSGQTVTGDLFIDCSGFKGVLIQEKLRTGYEDWSHLLQCDRAIAVPSERLEKTLPYTRSIAHAAGWQWRIPLQHRNGNGLVYSSSHCSEQQAMDTIMGNLDSKAIADPKVIKFQTGRRYQQWNKNVIAIGLSSGFLEPLESTSIHLVQSAVVRLAHLFPHQGINSSLVDEFNKQSATEFEQIRDFLVLHYHATERTDSDFWQDMRHMKIPDSLAHKIEIFKQSGRLFREQNDLFTDSSWLQVMLGQGIVPQDYHPIANIMSDEKLAEMLRKVKEIKQAPIDKLPSHDEFLRIFCQQ

SEQ ID NO: 84501 - protein, 431 aa, Sphingobium sp.
  REGION 1..431: note = tr|A0A2D8TB22|A0A2D8TB22_9SPHN Tryptophan halogenase (Fragment) OS=Sphingobium sp. OX=1912891 GN=CMN63_04340; PE = 4 SV=1
  VARIANT 12: note = Xaa can be any naturally occurring amino acid
  VARIANT 47: note = Xaa can be any naturally occurring amino acid
  VARIANT 140: note = Xaa can be any naturally occurring amino acid
  VARIANT 161: note = Xaa can be any naturally occurring amino acid
  VARIANT 175: note = Xaa can be any naturally occurring amino acid
  VARIANT 196: note = Xaa can be any naturally occurring amino acid
  VARIANT 265: note = Xaa can be any naturally occurring amino acid
  VARIANT 288: note = Xaa can be any naturally occurring amino acid
MKQPSLPRRIVXAGGGTAGWMTAAALARTLGPVAQVTLVESEQIGTXGVGESTIPPLVAYNRILGIDEADFMRATQATFKLGINFEHWRVPGESYFHSFGGTGKDHWSAGFQHFWMHGRAQGHDAPYGDYCLELQAAQAXRFSHLPDDRMNYAYQLDSGLXAKFLRAMAEGDGAXRIEGRIVAVDLDGTSGDIAAXRLDGDRRIEGDLFIDCTGFRALLIEGALHAGYDDWTHWLPCDGAVAVQTASVRPPVPYTRAIAHDAGWXWRIPLQHRQGNGIVYCSAFMTPXAALQMLLDSVEGETLVQPNPIRFRTGARRRQWHRNCVAVGLSGGFMEPLESTSIHLIQRAVLRILRMLPAGAISPRDIAEFNDQQMADMEQIRDFLILHYKATDRRDTPFWRHCASMSVPDSLTHRIELFRETGRIFRKNEEL

SEQ ID NO: 84502 - protein, 517 aa, Sphingobium sp.
  REGION 1..517: note = tr|A0A2G1YID6|A0A2G1YID6_9SPHN Tryptophan halogenase; OS = Sphingobium sp. OX=1912891 GN=COC10_07035 PE=4 SV=1
MAKSILIVGGGTAGWLTAGYLARRLGSDLPGGVSIRVVESAEIGILGVGEGTFPTIRRTLATIGIDEAEMIRRCGASFKQGAKFVHWRHAPGQAGPDHYSHPFQVAESPDGMELLPYWLLGQGGTDNWDEVCGPQKKAADAHRAPKLPDHPDYVAPLNYAYHFDAVALAEMLRDKAVENGVAHLSDRVTEVLVGGDGAIDGVRTAQYGLLKADLYIDCTGFRAELIGKALDMPYRSCRDVLFCDSAVAMQVPYATIDDPIASCTIATAQDAGWIWDIGLEKRRGIGHVYSSAHMDDASAEARLRAYVGPASDRLEFRKLRFEAGYRETNWHKNCVAVGLSSGFFEPLEATGIVFSEIAAGMIANLFPWGGDFESSARQYNANMRKRYERALDFIKLHYCISERRDTDFWRDNVAQSSIPDSLLELLDRWRFRPPNEMDFDLQVDIFSEMSWQYVLYGMGWRTDLTAKAGIYRYHDEARRAFAEVRRQASFAIANLPSNRELISNAHRRGFGTRPAAA

SEQ ID NO: 84503 - protein, 528 aa, Sphingobium sp.
  REGION 1..528: note = tr|A0A2G1YGQ2|A0A2G1YGQ2_9SPHN Tryptophan halogenase; OS = Sphingobium sp. OX=1912891 GN=COC10_10150 PE=4 SV=1
MSVDIPSLLMVLFPMVQPVRNIVIVGGGTAGWLTAGIIAARHRSRIGSGFTVTLIESPNTPIIGVGEGTWPTLRTTLSRMGVSETDFFRECDAAFKQGARFARWTSGAADDGYYHPLMLPQNFGQVNLAPHWLAQDDPDSFCDAVCAQGRICDDGLAPKTMATAEYDALANYAYHLDAGKFAPFLQRHCCEKLGVRHILADVEQVLMHDNGDIRAVRTTQAGEVEGDLFVDCTGFKALLIEGAMGVPFRDCNDILFCDTALAMQVSYAAPDCPIASHTISTAQSAGWIWDIGTQARRGVGHVFSSSHISDDHAERELRAYIGPAADGLNARRIKIRSGHRETFWKGNCVAVGLSAGFLEPLEASAIVLIELSAKIIAEQMPACREVMDIVAARFNATAHYRWGRIIDFLKLHYVLTKRTDSDFWRDNVRIESIPDRLQELLLLWRYQSPWFHDEFDRAEEVFPAASYQYVLYGMGFRTEVDPPALARDAHLADRARRENAAATAKLCAGLPRHRELIDRIVAHGLQPV

SEQ ID NO: 84504 - protein, 517 aa, unidentified
  source 1..517: note = Paraglaciecola mesophila
  REGION 1..517: note = tr|K6Z056|K6Z056_9ALTE Uncharacterized protein; OS = Paraglaciecola mesophila KMM 241 OX=1128912; GN = GMES_0063 PE=4 SV=1
MAQAIKSIVIVGGGTAGWITAGTIAAKLQSEHADGFNITLVESPDVKPIGVGEGTWPTMRRTLKAMGVRETDFIRQCNVSFKQGAKFAKWVTGAEDDFYYHPLVLPQDFDSTNLARHWMERPFEQSFSQAVSPQEAVCEVGLAPKSIATAEYTSIINYAYHLDAGRFSVFLQQHCTEKLNVRHVLDNVTAINAAENGDIASVSTTTNGDISGDLFIDCTGFKSLLLGEHFKVGFKSCKDVLFVDQALAIHVPYESEDAPIASHTISTGQSAGWVWDIGLQNRRGVGHVYSSAHTTEEQASEELLNYIAQTGGHVNEADIRRIPLNPGHRVKFWHQNCVAIGLSAGFLEPLEASSLLLVEISASMIADQFPATRDAMEIVAQRFNSTFLYRWDRIIDFLKLHYMLSKRNDSAFWIDNRDSASIPQSLQDQLTLWQYQPPWHNDFEHAIEVFPAASYQYVLYGMGFDTQASALGMSEVYKQKASSLRQKNTQQIQQMLKTLPSNRALINKIHQYGLQKV

SEQ ID NO: 84505 - protein, 495 aa, Pseudoalteromonas sp.
  REGION 1..495: note = tr|A0A2K9K222|A0A2K9K222_9GAMM Flavin-dependent tryptophan halogenase RebH OS=Pseudoalteromonas sp. NC201; OX = 1514074 GN=rebH3 PE=4 SV=1
MKTIQSLTILGGGTAGWMCAAYLAKHQPNLSVTVIESSSIGRIGVGEGSTPHLQLFMQSLGVKERDWMPACQASYKTGIYFDNWNGDNGSYFHPFFSEMDAKTAEVYFVNANARRRGSEYIDKPEHYFLAAVLADKQQAPQPQRPLPRALEYGYHFDAQKLADWLRAYSLARGVKHIQSTVSSVQHHAKEIIALTLESGEQVKSDFYVDASGFNALLIEKTLEVPFISFADQLLNDSAVAIAGAKINPLPSSTSAIAMPCGWRWQIPLQGRTGHGYVYSSAHTTPEEAEAQLRQAAQLDKGQAKHLTMKVGMMARSVEGNVFAIGLAQSFIEPLEATALMVTGYSIELLNRLLSQQLEAQAINQQLSELVLGIKEYVLAHYATSKRADSPYWQDAKVAALSLNELDELLTHWRSGGDFDAWLNQHRKHSPYIRPSWYCLLGGMDHRDSTCQMPFDQAPQHIEQAAKAYLTKLSDEHFTAHTTVLEQLQRAQAFRA

SEQ ID NO: 84506 - protein, 500 aa, Sphingobium sp.
  REGION 1..500: note = tr|A0A2D8TF47|A0A2D8TF47_9SPHN Tryptophan halogenase; OS = Sphingobium sp. OX=1912891 GN=CMN63_11490 PE=4 SV=1
  VARIANT 424: note = Xaa can be any naturally occurring amino acid
  VARIANT 449: note = Xaa can be any naturally occurring amino acid
  VARIANT 473: note = Xaa can be any naturally occurring amino acid
  VARIANT 488: note = Xaa can be any naturally occurring amino acid
MKQPSLPRRIVIAGGGTAGWMTAAALARTLGPVAQVTLVESEQIGTIGVGESTIPPLVAYNRILGIDEADFMRATQATFKLGINFEHWRVPGESYFHSFGGTGKDHWSAGFQHFWMHGRAQGHDAPYGDYCLELQAAQAGRFSHLPDDRMNYAYQLDSGLYAKFLRAMAEGDGASRIEGRIVAVDLDGTSGDIAALRLDGDRRIEGDLFIDCTGFRALLIEGALHAGYDDWTHWLPCDGAVAVQTASVRPPVPYTRAIAHDAGWQWRIPLQHRQGNGIVYCSAFMTPGAALQMLLDSVEGETLVQPNPIRFRTGARRRQWHRNCVAVGLSGGFMEPLESTSIHLIQRAVLRILRMLPAGAISPRDIAEFNDQQMADMEQIRDFLILHYKATDRRDTPFWRHCASMSVPDSLTHRIELFRETGRXFRKNEELFAENSWVQVMMGQGVTPXSYHPVAAKLRPQELEHLLATLREXVSRTVAALPDHGAYXARYCGAQDVAAA

SEQ ID NO: 84507 - protein, 478 aa, unidentified
  source 1..478: note = Cribrihabitans marinus
  REGION 1..478: note = tr|A0A1H7A278|A0A1H7A278_9RHOB Tryptophan halogenase; OS = Cribrihabitans marinus OX=1227549; GN = SAMN05444007_105316 PE=4 SV=1
MNNRLRKITIVGGGTAGWMTALILDTEFSRTSATKDRPHICLIESPNIATVGVGEATVPRMPKTLREAGISERAFFRETNASFKLGVKFCNWNTDAKGKRIDYVNPFAHGQMLGGLEAAEYFLRFGNGDRDFTQSISPHDDLGRLCKGARPLGQPEFEQRFGYAYHLDAVKFAGMLTDVCTKRGVEHIRDEVKSVELDEQGNVSHLMLEHKGRHDIEMVIDCTGFRGLIINKALGEPFKDYSDYLPNDRALALQIEHPDPEKIESLTRSTALGAGWTWRVPLYNRVGTGYVFSSAHRTDDQAADEYLEWLGDSGKGATPRVIPMRIGRVRNAWVKNCVAIGLSGGFIEPLESTAIHMIDHAVRWFAEHLPTRDIAPSLRSRYNRQMNKLYDEVLEFICLHYRLGNRTDDQYWIDARTEMKIPDRLAENLELWQHRLPMAHDVEFATLFDFRVFFRRFCWASRSMTRAMVPASGIACVR

SEQ ID NO: 84508 - protein, 504 aa, unidentified
  source 1..504: note = Erythrobacter aquimixticola
  REGION 1..504: note = tr|A0A419RQQ2|A0A419RQQ2_9SPHN Tryptophan 7-halogenase OS=Erythrobacter aquimixticola OX=1958945; GN = D6201_00995 PE=4 SV=1
MTESSPTRYVIAGGGTAGWMSAAALARFAPPGTSITLVESDAIGTVGVGEATIPQIHLFNRALGLDEGDFLRATKGSFKLGIEFDGWLREGEAYMHAFGSVGRGHGLMPFHQYWLRAQALGIAKPTAAYALNEQAARAIRMHRGPTQNGPPMPYAFHFDAGLYADFLRAFAEGRGVRRVEGKIANVAQHGESGDIAALELDGGERIEGDFFIDCTGFRGLLIEGALAAGFDDWSEYLPCDRAVAVPCENGGEFTPYTRATARAAGWQWRIPLQHRIGNGLVYCSRFMEDDAASEMLLANLDGKPLGDPRPIRFTTGTRRAHWKGNCLAVGLSAGFMEPMESTSIHLIQSAISRFLSVLPNGRGGAATRDWFNAQSRFEWERIRDFLVLHYTANAREGQPFWDHMRAIELPDTLQAKIEAWRANGHIHREHEELFTEVAWFQVFAGQGVEAQGRNPIADALPEPQLRQLLEQTETAIAAEVRPMAHHIDVIKSTIGTRTPQELPA

SEQ ID NO: 84509 - protein, 518 aa, Colwellia psychrerythraea
  REGION 1..518: note = tr|Q487J3|Q487J3_COLP3 Putative tryptophan halogenase OS=Colwellia psychrerythraea (strain 34H / ATCC BAA-681) OX=167879 GN=CPS_1023 PE=4 SV=1
MNEQVKQVVVVGGGTAGWLTAANLAQKFNSVESGAIQVTLVESPDIPTIGVGEGTWPTMRKTLAKLGISEADFLSKCNASFKQATKFVNWQQAPKNGINSHYYHLFTSINDPLDFNLAPYWKLGMIGDNNSYAETISMQAAICESGLAPKLITNREFEGVQNYAYHLDAGLFTDLLREHATTKLGVKHVSANVTDVNLDDDGYIINIHCDSVGVVLGEFFVDCTGFKSLLIGKALGIPFKSIDDTLLCDHALAIQVPYENEESSIASCTISTAQEAGWTWDIGLSNRRGTGYVYSSAHTSHERAEQVLRNYIGPQADQLESRLIKMNVGYREKFWHKNCFAIGLSAAFVEPLEASAIFLIEASANMLSELFPRDRHAMLAVEEKVNKSFKFRWDKTIDFIKMHYFLSKRTEPFWQDNKVLSTVPDTLLASLDSWKHQLITGYDFDNVYEPFPLDSYQYVLYGMGFDQTLTFNENSYTKQGFAQQQYNTVQDLTQKMQQQLPENRELLNKIAQYGFQKI

SEQ ID NO: 84510 - protein, 516 aa, unidentified
  source 1..516: note = Streptomyces natalensis
  REGION 1..516: note = tr|A0A0D7CM60|A0A0D7CM60_9ACTN Tryptophan halogenase; OS = Streptomyces natalensis ATCC 27448 OX=1240678; GN = SNA_15345 PE=4 SV=1
MIKSVVIVGGGTAGWMSASYLKAAFGDRVDVTLVESDRVSTIGVGEATFSTVRHFFDYLGLDEREWLPECAGSYKLGIRFENWRKPGHHFYHPFERLRTAEGFTLADWWLLEGDRSEPFDRSCFITPALCEAQRSPRMLDGSLFAGDLDGSLGRSTLEDQRDQFPYAYHFDASLLAKFLTKYGTDRGVRHVVDDVVDVARDQRGWIDHVTTREHGEISGDLFIDCTGFRGLLINQTLEEPFESFQDVLPNNRAVALRVPQPDQATKGMRPYTTATAMDAGWIWTIPLFGRNGNGYVYSDEFCTPEEAERTLREFAAPGQDDLEANHIRMRIGRNRRSWVNNCVAIGLSSAFVEPLESTGIFFIQHGIEQLVKNFPDQHWDPALMKDYNDRVANVLDGVKEFLVLHYRAAERDDNAYWKEAKVRPIPDGLAARLETASSHILDEHTIYPAYHGFEQYSWITMLMGLGHEPVRPRPTLAHLDPAAARAELAALKADTERLVNSLPSCYEYLASINKAG

SEQ ID NO: 84511 - protein, 499 aa, Caulobacter vibrioides
  REGION 1..499: note = tr|A0A0H3C8I7|A0A0H3C8I7_CAUVN Tryptophan halogenase; OS = Caulobacter vibrioides (strain NA1000 / CB15N); OX = 565050 GN=CCNA_01054 PE=4 SV=1
MQPQTIRKVVIAGGGTAGWMAAAALGRQLGSLLDITLVESEDIGTVGVGESTIPTARTFNALLGIDEAEFMRATQATFKLGISFENWGEVDDRYIHSFGQVGKSTWMGGFHHFWLQALAHGFGGDLGDYCLELKAAEAQRFYTGENGPLNYAYHLDAGLYGQFLRRMAEADGVRRVEGKIASVRQRETDGFVDALVMESGQVVEGDLFIDCTGFRGLLIEQTLKAGYEDWSHWLPTNSALAVQTRSTEPAVPYTRAIAHRAGWRWKIPLQHRVGNGLVYCSDHMSDDEAMTMLTSEIEGETLIPPRLIRYRTGRRRRTWDKNVVALGLSSGFVEPLESTSIHLIMIGVSRLMQLFPFGGISQATIDRYNRQADDELEKIRDFIILHYKVTERTDSTFWDQVRTMDIPDSLAHRIALFQESGHVFQAPGELFQVDSWLQVMLGQRIMPRTYHHMGRMMPPQQLKQALDDLKRNIAGTVSRLPQHQAFLDHYCAPAVSKSA

SEQ ID NO: 84512 - protein, 436 aa, Rhodopirellula baltica
  REGION 1..436: note = tr|L7CEA1|L7CEA1_RHOBT Tryptophan halogenase; OS = Rhodopirellula baltica SWK14 OX=993516 GN=RBSWK_04092; PE = 4 SV=1
MSTPKMKDFYDCVVIGGGPAGGAAASIVADSGVSTLLIERDPVPRFHVGESLMPECYWPLERLGLIDQVKRSGWQTKKSVQFVTHTGKESAPFFFREHDERECSTTWQVERSEFDKMLYDRASELGADCFDQTRLIDVQTEPGETADQPIARAVVVRTADGTEKTIGCKVVVDATGQQAFLAGKMGLKEINPDLKKAAIWTYYRDAVRGEGDNDGATIILNTKSRDSWFWFIPQSRGITSVGCVGDNDYLLKGRGTPEEIFEEELANCPGLQPRLANSTRVGKITTAKEFSYMTRRHSGPGWVLIGDALGFIDPVYSSGVYFALEMGVRAGDAIVEGLKKDDLSAEQLGKWTDDFKEGASKVRQLVHAFYNKDFSIGRFMKEHPEYRGNVTDLLIGRVFHEDAGKMFPALDRSIEMARANAMSKADSMAETKPMST

SEQ ID NO: 84513 - protein, 439 aa, unidentified
  source 1..439: note = Massilia namucuonensis
  REGION 1..439: note = tr|A0A1I7M6T0|A0A1I7M6T0_9BURK Tryptophan halogenase (Fragment) OS=Massilia namucuonensis OX=1035707; GN = SAMN05216552_10691 PE=4 SV=1
MSDKAIRTIVIVGGGTAGWMTAAPLALKLPKTCEVVLVESAEIGTVGVGEATLPTIRHFNLALGIDEADFVRKTQATFKLGIEFKDWGHVGNRFFHGFGDFGPAIENRPAYMYWLRLSRVFKDMPSYEQWSMATMMARGNRFMPPQDELPSITDAYSSAYHFDAGLYAAYLRDYATRRGVKRIEGMIEHVEQHPETGFITALKLRDGRRVEGDLFVDCSGFRGLLIEGVYQAGYEDWSAMLPCNSALALPCAKTLPLTPYTTSTAKAAGWTWRIPLQHRTGNGHVYCDGYTSDAEAERVLLEGLDGEAQGEPRQLRFTTGRRRKSWVKNCIAIGLSGGFLEPLESTSINFIENAVGWLLQYFPNRECRPELADEFNRLVAQRYEYVRDFIIMHYKLTDRTDSEFWRYCANMPIPDTLRHQIETFRETGRVVVYDKEGFN

SEQ ID NO: 84514 - protein, 510 aa, Pelomonas sp.
  REGION 1..510: note = tr|A0A0Q7BGK0|A0A0Q7BGK0_9BURK Tryptophan halogenase; OS = Pelomonas sp. Root405 OX=1736529 GN=ASC81_09340 PE=4; SV = 1
MTQKRRILIVGGGTAGWLTAAYLAKALRLPERSQLEVTVLESPDISSVGVGEGTFPTIRSTLQFLGIDEARFIRETSATMKQGIRFVDWARAPVGGSRHEFFHPFEAPFYAEDLNLVPYWLLQDEADRAPFAQAMTIQHRVAEGQRAPKRAGEAPYAAPLNYAYHFDAIKLAKLLAERARELGVRHVQATVTGVALDAAGAIAHLDTDRQGRFESDLYIDCSGFRAELIGRALGSPLKSARGHLFADRALACKIPLGAEAVMESATIATAHEAGWLWEIGLNGARGVGCVYSSDHLSDDRAADILRNYCGAGSEDLAMRSIPFAPGYREQQWMKNCVAVGLSAGFLEPLEATGLVLIEAAVGMIAEMLPHSGPIQAPARRFNELMTARFENIINFLKLHYCLSQREEPFWRDNAAPASIPDRLAGLLEEWKLRPPGRFDFLLDTETFAFFNYQYILYGMGFRTDLSAGRDDFTQVEDAQKLFAKIQRFADRAVADLPSHRTLIQQINAGR

SEQ ID NO: 84515 - protein, 487 aa, Pelomonas sp.
  REGION 1..487: note = tr|A0A0Q7AZQ8|A0A0Q7AZQ8_9BURK Uncharacterized protein OS=Pelomonas sp. Root405 OX=1736529 GN=ASC81_13160; PE = 4 SV=1
MTALALTKRARPGRPLAVTLVDSAAIGSIGVGEATVPAILDYLTSVQADVPALIRDSRATLKAGIAFQDWRAIGQRYFHGFGLYGASAGGVGFHQVLAWLQAQDGGQDLRLEDFNLCAQMALRGRFAAPPAQPEADHDIYRWALHLDAGLFAQHLRRQALGSGVQHLDGVFEHADIGPDSGAITAITLTDGRRLEADLFIDCSGFRGLLIRQALRQPWVSWRHWLPCDRAVAQPTAGSGPATPYTLAQALPAGWRWRIPLQHRIGNGHVYASAFMSDEQALQLLQAHQDGEALAEPNWIRFDPGHIAQPWVRNVVAIGLSAGFLEPLESTGITLIHSAIDKLLALWPDDPQAPALAAEFNRASLLEMERIRDFLVLHYALSERRDSEFWRHITAAPLPDTLVHKLAVYRANGHFVRHEWETFQDHSWLAVYDGLGVRPQQLDARLARFQAADVRQGCEAMQAAILRRAEQAPLSDAEVLARALQVAP

SEQ ID NO: 84516 - protein, 517 aa, Erythrobacter sp.
  REGION 1..517: note = tr|A0A165R9C4|A0A165R9C4_9SPHN Tryptophan halogenase; OS = Erythrobacter sp. HI00D59 OX=1822215 GN=A3711_03240; PE = 4 SV=1
MADHTQPNRGRRPRPGRRIVIVGGGTAGWMTAAALSRFCGRDWGITLVESDAIGTVGVGEATIPMIRNFNAALGIDEAEFIAATNGTYKLGIEFVGWGAPDSRYLHAFGLVGRGLGLLPFQHYWLRARAEGFGGPIGDYVLNAIACREERFAHVERQPGSALPPMPFAYHFDAGLYAAFLRRYAETRGVLREEGRIDHVETRAEGGDITSVRIDGGRVIEGDLFIDCSGFRGLLIEDTLQTGWTDWSHWLPCDRAIAVPCEPSEPWHPYTRSTAREAGWQWRIPLQNRIGNGHVFSSAHMSEDTAQEALLANLDGEPTAEPRLLRFTTGMRKQAWNRNVVAIGLSSGFLEPLESTSIHLIQTGINRLLDYLPVSGFGPCDRENFNRRTAYEMERIRDFIILHYHANGREGQPFWDMLRTMAVPDTLAEKIEMFRAGGKIVRDQDELFDVPGWVQVMLGQGVEPQGWHPLADELPRDQLEQFLATVKSAYERDVARMPSHQDYVRRLARQGRSKLETA

SEQ ID NO: 84517 - protein, 507 aa, Caulobacter vibrioides
  REGION 1..507: note = tr|A0A0H3C7I5|A0A0H3C7I5_CAUVN Tryptophan halogenase superfamily protein OS=Caulobacter vibrioides (strain NA1000 / CB15N) OX=565050 GN=CCNA_01831 PE=4 SV=1
MQPLKKILIAGGGSAGWMTAALCSRLFQGLYEIVLVESEEIGTVGVGEATIPAIKKFNELLGLEEDDFLRKTQGSFKLGIQFKNWWRRGESYLHGFGVIGQDLGWLRCHQYWLRMRDLGRAGDFDNLSINNAMALSNKFMRARPDMAESPIGHIAHAFHFDAGLYAKHLSTFAQARGVTRREGKIVDVTLRAEDGFVQSVTMDDGEVLTADLFVDCSGFRGLIIEQALKTGYEDWTHWLPCDRAVAVPCDRSEHFTPYTRSTAHTAGWQWRIPLQHRTGNGHVYSSQYIDDDEAERVLLANLDGAQRADPLRIRFKTGKRKKIWNKNCVSIGLASGFLEPLESTSLHLIQSAVIRMVRLLPDAGFDQATIDEFNRQTDFEYERIRDFIILHYKATERDDSPFWRYCRDMEIPATLQRKMDLFRANGRVFREDDELFTEESWIQVFLGQGVIPRAYDPLVHVQSDDEIARFLGNIETVIGKCLNVMPSHAEFVAHACPAPPLAPVPTS

SEQ ID NO: 84518 - protein, 503 aa, unidentified
  source 1..503: note = Sphingomonas ginsenosidivorax
  REGION 1..503: note = tr|A0A5C6UHC1|A0A5C6UHC1_9SPHN Tryptophan 7-halogenase OS=Sphingomonas ginsenosidivorax OX=862135; GN = FSB78_10770 PE=4 SV=1
MTEPRASHVVILGGGTAGWIAACLIAQRWRDARVTMIESPEIGIVGVGEGSTPQLKHLFDTLGIAEAEWMPACDATYKLGIGFEGWSDRAGYERYFHPFPSALDVHTAGQFFYHARARRTGRDVDAHPDRFLLPARLAAAARGPHPDPSFPFEVSYGYHFDAHKIGAFLARHATETLGVVHLQRRIAEIERSADGDVAGLVDADGERITGDLFVDSSGFRSMIHSALEVPFVSYADALFNDRAVVMPTPRAAGEAVPSQTRATALSAGWAWHIPLTTRDGNGYVYSSRHLSEGEAEAELRAHLGAEAGDARHLKFRIGRVRDSWSHNALAVGLAQGFLEPLEATALHLVIATVEAFLDMVDASGATPETRTAFNTRIAARYDGVRDYIVAHYRLNQRHDDPTGYWAQARAIDALSDDVKALMSAWFTGADLTAVIDRAGLSRYYSAISWHCLMAGYGTFPDDARLVPPGPDIDPVDMPRIDDFLNRCALNFRPHAPYSPEDAA

SEQ ID NO: 84519 - protein, 544 aa, unidentified
  source 1..544: note = Aliikangiella sp.
  REGION 1..544: note = tr|A0A545UK09|A0A545UK09_9GAMM Tryptophan 7-halogenase OS=Aliikangiella sp. M105 OX=2592383; GN = FLL46_02650 PE=4 SV=1
MYTRRILIVGGGSSGWMTAAYLNGALNFQGNQKNVEIKLIESPDIPRISVGEATIPSIRHILSVIGVNEIDFMKATDASFKQSIKYVNWVNNNNTFYHHPFSRFRTQPIDRSGMNWLRSSRNIPFMETCSAQPIICEMGLSAQMLGQWELGPPLSYAYHFNAQLFADYLRDFSVARGVEHILANVTDIDMDESGDIKSVATDTGNHLEADLFIDCTGFKAKLIEEKMDVTFEDCSQWLLCDRAVTMHVPYDNFYPGMIRPYTTATALSNGWIWDIPMRSRRSVGYVHSSQFISEQDAEAEMRAYQGAGCEDLPARFVHFKVGRRQQNWKGNCIAIGLSGGFIEPLESTGLYLADLGAVMLAEHFPYRREHMKEMAFRYNRILSNRFYEILDFINMHYCMTRRTDTEFWREVQKPERITERLKAKLEYWKMKPPSATDFEDQCFPGMQQVGISTGGQCFDGRAAVDTAGLWNHESYECILYGMGFLDKEFDELFGTNRPPSQVHPHVLHRLQAAKQKIPPHAVWLKQKLGMEDYTIAQKPAGWVC

SEQ ID NO: 84520 - protein, 514 aa, unidentified
  source 1..514: note = Pseudoalteromonas piratica
  REGION 1..514: note = tr|A0A0A7EFB5|A0A0A7EFB5_9GAMM Uncharacterized protein OS=Pseudoalteromonas piratica OX=1348114; GN = OM33_09560 PE=4 SV=1
MQTKSIQSIIILGGGTAGWLAANHLAINLKPKEQHGIKITVIESPDTPTIGVGEGTVPLMRNTLKEFGISEEKFIKECDVSFKQGIQFDNWMKPVDGKMHSYYHPFDYPILDNDSVAAWLQNPVMPFAHAMSRQALLCDNHKSPKAITDPEFSGQAAYGYHLDAYKFSDLLKHHAIDNLGVEHLMAHIEDVTLSSDGTIDTLISLQGDVFKSDFYIDCSGFCSRLIGHALNVPFIGKSDVLFVDKALAIQVPHDNEMPELPSSTIATACDAGWIWDIALPTRRGIGHVFSSKHCSVDEAKATLANYLNKPVEEIQPRLIDMKIGHREKFWHKNCVAIGLSQGFVEPLEATGLLAFDATAKLLAKSFPTNTAQLAQAEKRYNNYVSGLWQGVINFIKMHYAVSDRDDTAFWRDNRDTASWPLELQEKLAHWRTHIPSLYDFERGFDAFRLENYLYVLYGMNFPTDIGDIAYRYQAPDIAQKQFGLIQRQAIQVADYLEDNLTVINKIKQFGLSKV

SEQ ID NO: 84521 - protein, 514 aa, Sphingobium sp.
  REGION 1..514: note = tr|A0A2E8ZF42|A0A2E8ZF42_9SPHN Tryptophan halogenase; OS = Sphingobium sp. OX=1912891 GN=CMN60_15750 PE=4 SV=1
MVRPVRNIVIVGGGTAGWLTAGVIAARHRTRIGQDLSVTLVESPNTPIIGVGEGTWPTLRTTLSRMGISETDLFRQCDAAFKQGAWFARWTDGTASDGYYHPLMLPQNFGQVNLVPHWLAQDGDESFCDAVCAQGRICDDGLAPKTMATAEYDALANYAYHLDAGKFAPFLQRHCCEKLGVRHVLADVEQVVLHDDGDIAAVRTTQAGLVEGDLFVDCTGFKALLIEGAMGVPFRDYNDVLFCDTALAMQVPYAAPDSSIASHTISTAQSAGWIWDIGIQTRRGVGHVFSSSHISDEQAERELRAYVGPASDGLNVRKIKIRSGHRETFWKGNCVAVGLAAGFLEPLEASAIVLIELSAKIIAEQMPACREVMDIIASRFNATTHYRWGRIIDFLKLHYVLTQRTDSDFWRDNVRAETMPDRLRELLHLWRYQSPWFHDEFDRAEEVFPAASYQYVLYGMGFRTQVPTAALARDAHLAGRAMRENAAATARLRAGLPRHRDLIDRIVAQGLQPV

SEQ ID NO: 84522 - protein, 518 aa, unidentified
  source 1..518: note = Pseudoalteromonas neustonica
  REGION 1..518: note = tr|A0A558IJ47|A0A558IJ47_9GAMM Tryptophan 7-halogenase OS=Pseudoalteromonas neustonica OX=1840331; GN = FQP85_16230 PE=4 SV=1
MKQQEKSINTVIVVGGGIAGWLTAGRLAAEHKSNTDVGVKVTLVESPNVPIIGVGEGTWPTMRSTLIALGISETDFIRECDASFKQGAKFAQWVDGGEDDYYYHPLVLPQGFTKTDMAGYWLNDGEQSSSFSNAVCFQEALCEQGLAPKTIRTPEYGAVANYAYHLDSAKFAVFLQKHCIENLGVTHILADVTKVNSIENGDIGSLTTKQAGNISGDLFVDCSGFSSLLLGGHYQVPFKSYRDVLFIDTALAVQVPYENDSSPIASHTISTAQEAGWIWDIGLQHRRGVGYVYSSKHSTESQARARLADYIGDKIDSLTIRKIPIESGHRSHFWQNNCVAVGLSAGFLEPLEASALVLVEMSAQMISEQLPPTREVMDITAKRFNDTFLYRWGKIIDFLKLHYILSKRTDNAFWIDNRDPQTIPQSLQDLMQLWQYRAPADYDFASNNEVFPAASYQYVLYGMGFKSDYSNSPHLLNDKTFAQSQFAKNKHMIQQAVSTLPSNRELLDKIKLHGLSAI

SEQ ID NO: 84523 - protein, 516 aa, Caulobacter vibrioides
  REGION 1..516: note = tr|A0A0H3C756|A0A0H3C756_CAUVN Tryptophan halogenase superfamily protein OS=Caulobacter vibrioides (strain NA1000 / CB15N) OX=565050 GN=CCNA_01023 PE=4 SV=1
MTTTHPNALRKIVIVGGGSAGWISAAMLSHYFQNGGCAVELIESEEIGTIGVGESTIPPFLQLLASLGVDEREFIQATQASFKLGIRFEDWKQKGQRYYHPFGAIGGPIGPHEFYQCWLRAKANGHPSNLQDFAPGTVMADQWKFIPPIKAQRTLIAGASYALHVDARLVAKFLRDYAEARGVKRTEGIVTDVVTHPDGSVAKVIMKDGREVEGDLFIDCTGFRSLLIGKTLDVPFNDWSDMLLCDRAVVVQTENVGAPHPYTVSKAEDAGWRWRIPLQHRAGNGYVFSSRHLSDDAARATLVQNVEGQMLMNPMFIAFKTGMRRRLWHKNVVAVGLAGGFIEPLESTALHLIYRGMDFLLRFFPDRDFDPALAAEYNRRMTADYEEIRDFIVLHYCTTQRDDTPFWRDVRNAPIPDSLKERMALFQAQGVLREGVDDMFRNPSWQSVMEGMGVRPRRYQQLVDTAPYDVIAQTLDQSAPILAAQVAGLPSHGEFLEKHCPAPKPEAVVAPFGAVA

SEQ ID NO: 84524 - protein, 496 aa, unidentified
  source 1..496: note = Erythrobacter aquimixticola
  REGION 1..496: note = tr|A0A419RQS8|A0A419RQS8_9SPHN Tryptophan 7-halogenase OS=Erythrobacter aquimixticola OX=1958945; GN = D6201_01020 PE=4 SV=1
MTEATPPHIVVLGGGSAGWITACLLHHRWRARGGRVTVVESPDIGIIGVGEGSTPQLKAMFDHLGIAEAEWMAACDATYKLGIRFTGWSEREGFDSYFHPFPGPVDLHSEPSFTHNCMLARRGFTVPAHPDDWFLATTLAETGRAPHPGENFPFAPSYGYHFDAYKLGAFLRDWAVARGVEHLSLKVEQVELAGVGEVAALLCEGGKRVNGDLFVDCSGFRALIAGEALGGEFLSFAANLFADRAVVAPTPRVETFRPQTEAVAMSNGWRWRIPLTTRTGNGYVYSSRYISDEDAAAELFAAVGLSPDEVAPRFLQMKVGRMANSWRGNCLAAGLAQGFIEPLEATALHIVIATALEFAEAFEQGGYTPQHRDTFNRNIAARYEAIRDYIVGHYRLNQRSDTQFWRDNAANQNLSDGLKAMFTAWFTHQDIADANAKNYKVQAYAPMSWHALFAGYGTFPPPTKMQPLPPGGSAADPAITQQMLAACATNFPKVDW

SEQ ID NO: 84525 - protein, 533 aa, Bdellovibrio bacteriovorus
  REGION 1..533: note = tr|K7YTV9|K7YTV9_BDEBC Tryptophan halogenase; OS = Bdellovibrio bacteriovorus str. Tiberius OX=1069642; GN = prnA PE=4 SV=1
MNTLSDHIDNAFDLSYLNFPKCPPTDIKTIGILGGGTAGYLAALALKKYHPEVEVTVIESSKIPVIGVGESTTTEIVPFLHRGLEIDPADFFREVQPTLKFGIRFDWGCPGDYKFNFSFFAGHQYESYYYENDIKNSNWPSVLMNENKIPIIRNKNGTLTSFLASIPFSYHIDNKNLIRFLNKEVKSRGIDILDAEVHEVKLDDRGYVASLESKEGHSLSYDLYIDCSGFRSKILGQALKTEFTPFTDTLVTDRALTFDLPNKDVVDCYTSVITMNNGWCWKIPMRTEDHYGYVFSSKFCDEETALAEARARFGHFEKYKMVEFRSGRHTQAWVKNVFSLGNSYGFIEPLESTAIQTAVHSINVLCRLMPKTLDDQISISGINNEIAVTWDTFRWFVGMHYKFNKKLDTPFWKHCREKTNIGHAQTIMDLFNQRPPLSAGNFGSNSQFTATEALVFNSYSYDTLIFGQKEVHKPLAAPEMSKEEYFGKLKSYQELTSRSLSLFELFKGDHLFEDEILEQLFNDTDTWIMEADV

SEQ ID NO: 84526 - protein, 517 aa, Novosphingobium sp.
  REGION 1..517: note = tr|A0A1W1Y567|A0A1W1Y567_9SPHN Tryptophan halogenase; OS = Novosphingobium sp. B1 OX=1938756; GN = SAMN06272759_101379 PE=4 SV=1
MRIRCGRDTLPALHQRRIVIAGGGTAGWMTAAALGRLAAPHWQVTLVESEEIGTVGVGEATIPMVRLFNQMLGIDEAQFLRETHGTWKLGIAFEGWGGFDERYIHGFGLTGRSLGVLPFHHYWLRGRAEGMAGPLGDYVLNAVACEADKFAHIERPQGSALPPMPYAYHFDASLYAAFLRRYAEGCGVRRVEGRIVGFDRDPQNGDLAALRLDRGDVVEGDLFVDCSGFRSLLLGQEMGVDYVDWSQWLQCDRAVAVPCTRAEPLVPYTRSIAQPAGWCWRIPLQHRTGNGHVFCSDLMSEDEATARLIARLDGEQLAEPRTIRFKAGRRERFWERNVVAVGLSSGFIEPLESTSIHLIQTAISRLIDFLPNGPVQDADRDGYNRLATFEIERIRDFVILHYVANGRHGEPFWDGLRSMVGAGEVPAGLAQRLAMFRASGRIVREHDELFDVPGWVQVMIGQGIMPERWHPMADQVSPESLSAFLETVRSAYAKDVARMPSHAEYVAHVCGKVTANA

SEQ ID NO: 84527 - protein, 506 aa, unidentified
  source 1..506: note = Unknown
  REGION 1..506: note = tr|A0A2A5W8A7|A0A2A5W8A7_9GAMM Tryptophan halogenase; OS = OM182 bacterium MED-G28 OX=1986256 GN=CNF02_12040 PE=4; SV = 1
MDDSNLKNIVVLGGGTAGWMTASLLQKQWQHLGIKITVVESPDIGIIGVGEGSTPLLKVFFDSLEISESEWMPECNATYKNGISFNNWSTVSGYESYFHPFPCSLDFATFGLLYKYAALRRKGLDVLAHPNRFSLMAGLTEKKLAPIPSENFPFHFQYGYHFDSVLIGNFLRRRAKEIGVEHIEATVQDVEQNSNGDIKSLKLNNNQTLSGDFFIDCSGFASVLLQKTLKVPFLNFAENLFNDSAIAMPTEIEPNIPSETVSTALTNGWAWKIPLTNRFGNGYVYSSKYCSPDEAETELRAHLGVLDSDIEARHLKMKVGRAEESWRNNCVAVGLSQGFIEPLEATALQFVYATVDEFAKAFEQGEFTPQYRQEFNNRMNKNFEGIRDYIVLHYKTNSRSDSQYWIDNRENQNLSNNLKEMLNCWYGVEDIEAALTRLDIGTYYSQRSWACLLAGVGTFPREENLISADLENAQSLQDDLKYVDNFIEGCSLNFEPHENMLTSKTP

SEQ ID NO: 84528 - protein, 504 aa, Novosphingobium sp.
  REGION 1..504: note = tr|A0A5D0WQD6|A0A5D0WQD6_9SPHN Tryptophan 7-halogenase OS=Novosphingobium sp. BW1 OX=2592621; GN = FMM79_15135 PE=4 SV=1
MAEPQPVHFVIAGGGSAGWIAAAVLARFLPPPAARISLVESEDIGIIGVGEATVPLIGELNRFLGIHEPDFVAATNGTFKLGIEFADWGEIGNRHFHGFGDYGADIAGLPVHQHWLRLAREGKAPPLGALSIAEVLASQDRFVPHEALSGEAAQFRHAFHFDAALYAAYLRHLAEGMGVTRIEGRIEHVARDAQNGHVRALHLDGDRRIEGDVFLDCTGFASLLLGQAQGVGFEDWSQWLPCDRAAAVPCARASRFTPFTRSTAKSAGWQWRIPLQNRTGNGHVYSSAHISDDEAVAQLLDGLDGEALADPRLLRFTPGRRTRFWDGNVIAIGLAAGFLEPLESTAIQLIQTGVTRLVEFLPGKAPDPALAAEYNRQTALEYERIRDFIIAHYCRTRRTEPLWCQVAAMDLPDTLRAKLDAWDACGRVPMYDMESHQEPSWVAILLGQGVLPHAVNPRTQLLAEKDLRALLDQRRTRLARATERLPDHATFIAKTCAAKPAPAA

SEQ ID NO: 84529 - protein, 505 aa, unidentified
  source 1..505: note = Paraglaciecola hydrolytica
  REGION 1..505: note = tr|A0A136A4Z5|A0A136A4Z5_9ALTE Tryptophan halogenase; OS = Paraglaciecola hydrolytica OX=1799789 GN=AX660_09930; PE = 4 SV=1
MQNTLKSLCIVGGGTAGWMAATLLSSILRGSKIQITVIESPDIATIGVGESTVPSILEFIQASQINLKEFIQATSATFKLGIRFDDWHAPNQSYFHPFGKVGKDINGFDFYQAWLKSQADGQTIPWLAYSPAAVMAEHERFMLRPQQSQDWVLASYAHAFHLDAVLVARYLRELCQQRGVTRIEATVKNVIVDKKAFIRSVKLDNGATVESEFFIDCTGYSGLLIEKSLKVGFEDWSDYLPCDRAVALQTTNTANPVPYTVATAREAGWTWKIPLQNRTGNGYVYASRFCSDEEAINTLLKSVSGTLLNEPRIIPFTTGKRKKIWHNNCLTLGLASGFLEPLESTAIHLVYKTLVHFIKHFPDRDFDTDNEQRFNQLIDADYLEIRDFIILHYSTAGRDDTEFWRWCQTMPVPESLSEKIRLFKQRGLLDHTQGQFFSSDSWCSILEGMKIRPQKYHPLLDAFDSQSLATTLNKNVQDIQTAVLKMPNHHDYIQAHCSANSNMKT

SEQ ID NO: 84530 - protein, 502 aa, Caulobacter vibrioides; identical to SEQ ID NO: 83070
  REGION 1..502: note = tr|A0A0H3CBS9|A0A0H3CBS9_CAUVN Tryptophan halogenase; OS = Caulobacter vibrioides (strain NA1000 / CB15N); OX = 565050 GN=CCNA_02896 PE=4 SV=1

SEQ ID NO: 84531 - protein, 524 aa, Erythrobacter sp.
  REGION 1..524: note = tr|A0A165QDU5|A0A165QDU5_9SPHN Uncharacterized protein OS=Erythrobacter sp. HI00D59 OX=1822215; GN = A3711_06730 PE=4 SV=1
MTQVQGEGSGADPLRSICIVGGGTAGWSAAALLARVLRGSGCRITLVESSAIPTVGVGEATIPPIFDFLRNIGADEVEFIRRCQATFKLGIQFRDWLHRDHAYWHPFGNLGVTINQRPFHHYYCRNLAQGHGESLADLCPSVALAEDGKFAFPSPDGNWPGGAVAYALHFDAGLVAAFLREHAEAAGVERLDRRIVGATRGEGERIAAVQFDDGETLAADFYIDCSGFRGLLVEETLNAGFEDWKRWLPCDSAIAAPTAAQQQRAPYTVATARSAGWQWRIPLQHRTGNGLVYASDFVSDADAHEELLSGLDGEPLADARVLRFTAGLRKRAWVGNCLAIGLSAGFLEPLESTSIHLIHTGLNRLLDLFPDRGFDPALADAYNRDVWREYAHIRDFLLLHYVPNRREGEAFWDHMRGLDLPDTLAEKIELFTRTGRIMSKQRELFSDISWFYVMHGMGLEPAAIDPLVDVAPSAEVRKVIDQLSGAMKAFRSAAPTHDAILERLLDPSETRRPHFGTGGGWATR

SEQ ID NO: 84532 - protein, 561 aa, Phaeobacter sp.
  REGION 1..561: note = tr|A0A384GHA0|A0A384GHA0_9RHOB Tryptophan halogenase; OS = Phaeobacter sp. S60 OX=1569353 GN=OO25_08725 PE=4 SV=1
MNNRLRKITIVGGGTAGWMTALILETELSRTSAPKDRPKICLIESPNIATVGVGEATVPRMPKTLRQAGISERAFFRETNASFKLGVKFCNWNTDAKGNRIDYVNPFAHGQLLEGLEPAEYFLRFGNGDRDYTQSISPHDDLGRLCKGARPLGQPEFEQRFGYAYHLDAVKFAGMLTKVCTKHGVEHIQDEVTSVELDEQGNVSHLMLEQRGRHDVEMVIDCTGFRGLIINQALGEPFMDYSDYLPNDRAMALQIDHPDPEKIESLTRSTALGAGWTWRVPLYNRVGTGYVFSSAHRTDDQAADEYLEWLGDSGKGATPRIIPMRIGRVRNAWVKNCVAIGLAGGFIEPLESTAIHMIDHAVRWLTEHMPTRDIAPSLRSRYNRQMDKLYDEVLEFICLHYRLGNRTDDQYWIDARTEMKIPDRLAENLELWQHRLPMPHDIEFATLFDYRVYQTVLLGKQVYDTGYGPGIRDRLRPLKKPIWFQWWKGAKVDLAQILKSMPDHKTLLRDIRGELDQPGFGMAAAMKPTVPMPCAEAVPCMIQNMPSFSEIENGQKDLQLF

SEQ ID NO: 84533 - protein, 498 aa, Shewanella sp.
  REGION 1..498: note = tr|A0A0Q0G224|A0A0Q0G224_9GAMM Flavin-dependent tryptophan halogenase PrnA OS=Shewanella sp. P1-14-1; OX = 1723761 GN=prnA_2 PE=4 SV=1
MNKNKIKDIVIVGGGTSGWMTAAMLIKLFKAQLNITLIESESIGTIGVGEATIPPLQIFNSVLGINEADFIKQTQASFKLGIQFENWGKDKDSYMHAFGNFGKDIGYTQFHHYWLKSSPQNAHSFWDYSLNYQAAAENKFAPIDTIKGSPLAGITHAYHFDASLYAQLLRQYSENLSVKRLEGFISSVQLKQEGDIRSVTLKDGQVINGDLFIDCSGFAALLIAQQLNVSYENWQHWLPCDSAYAVPCERSEPLVPYTRSIAHKAGWQWRIPLQHRTGNGVVYSSQHITDDEAKSLLLNNLDGKPLAEPKKISFTTGRREKQWHKNCVAIGLSSGFLEPLESTSLHLVQSAIIRLTKFFPHQGIQQSSVDEYNRQSKLEFEQIRDFIILHYHVNQRSSSSNKTDLWQQCRDMPIPASLQQKIDCFRTTGTVTRYQDELFTEAAWIQVLLGQGVTPKDYNPLANNINQSDLTEFLSNVKQIISGAVTNMPTHNDYIQRL

SEQ ID NO: 84534 - protein, 520 aa, unidentified
  source 1..520: note = Paraglaciecola mesophila
  REGION 1..520: note = tr|K6Z3Y0|K6Z3Y0_9ALTE ATPase OS=Paraglaciecola mesophila KMM 241 OX=1128912 GN=GMES_2797 PE=4 SV=1
MSNRSIKNIVIVGGGSAGWLTAGIIAAEHQCGLQQSKVNVTLIESPDVNIIGVGEGTWPSMRNSLQRMGISETEFIRHCGAAFKQGSKFVGWKNGTDNDFYYHPFVIPSGYGKANQYSAWKTYASEHPFADVVCAQSHICQAGLAPKQNATPEYAGVLNYGYHLDAGKFGQLIQQHCVAKLGVRHIQDHVEGVISQDNGDIKALQTRQNGELAGDLFIDCTGARSLLLGQHFNVPFIDKSDVLFNNSAMALHVPYTNDDEPIVSATVSTAQEAGWVWDIGLQDRRGVGYTYSSKHADDEQAQRTLKAYVAQSIGPERANALEARKINFEPGHRSHFWHKNCVAVGLSAGFLEPLEASALALVELSATAIAENMPVTTEHMHIIRDNFNQRFLLHWENIVEFLKLHYVLSERNEPYWQQMRAPESISPRLKALLTQWRFQPPNRSDFVQNEIMFPSASYQYVLYGMGFETLNDVSSREFDTPQSAVKHLQENQQHVRKLMAGLKSNRLLLEHVKHYGFQKV

SEQ ID NO: 84535 - protein, 295 aa, Sphingomonas sp.
  REGION 1..295: note = tr|A0A520FSZ1|A0A520FSZ1_SPHSX Tryptophan 7-halogenase (Fragment) OS=Sphingomonas sp. OX=28214; GN = EOP66_01975 PE=4 SV=1
MAATLLARKLDRQSVTITVVESSDIRTVGVGEATVPGIRDFFREIGVTEQEVMATAQGTVKLGIEFVDWNRDGERFFHPFGLYGMRSRGVAFHHYWRKLNAAGQTTPLSDFCLATALAERNLFMQPTDSPVHDLLFFDWAVHFDAGLFAKFLAKKAGEWGVAHVDATITDVLVDQATGFISSVDTQCGKTIAGDLFIDCSGFRSLLLGDALGVPYEDWTNLLPCDRAVAMPSERAGPLTPYTRSTALTAGWQWRIPLQHRVGNGYVYASRHISDDEAVATLKGRLEGEALAEPNM

SEQ ID NO: 84536 - protein, 500 aa, Sphingomonas sp.
  REGION 1..500: note = tr|A0A326GFD3|A0A326GFD3_SPHSX Tryptophan 7-halogenase OS=Sphingomonas sp. OX=28214 GN=DI625_16465; PE = 4 SV=1
MPHEPVRSIVIVGGGTAGWMAATYLARRLAHLNLSITVVDSAAIGTVGVGEATVPAIRDFLSAIELGEADVLRETGGTIKYGIRFDGWGGEGHRFFHPFGLYGVGAEGVAFHQYWLRLNALGKAGPLADYCLATQLARNGLFLPPVDRPANDIGVFNFALHFDAAAFAALLRRLALANRVAHVDGRIVSVATDQPRGLVTQVTLEDGRTIAGDLWIDASGFRSLLLGEALGVPYVDWRHWLPCDRAVAIPCRAAPGDPTPYTVATARKAGWQWRIPLRHRIGNGSVYCSSFQSDADAEDALLATLEGAPLADPNRLRFVTGHRARFWSGNVVGLGLASGFLEPLESTSISLIQSGLERFVALFPDRDCDPRLAATYNRQSVLEFERLRDFLFLHYLANGRDEPFWQAIRAVEPPAPLQIKLDAWRSGGEFVRNEWDTFQDPSWLSLYAGFGDLPDRHSPLADAIGEDALLESFGRMRAAIARTLSHAEPHGAFLARVAGA

SEQ ID NO: 84537 - protein, 511 aa, Sphingomonas sp.
  REGION 1..511: note = tr|A0A2E2ZPG0|A0A2E2ZPG0_SPHSX Tryptophan halogenase; OS = Sphingomonas sp. OX=28214 GN=CMN73_00530 PE=4 SV=1
MTAAPAPIHTLVIVGGGTAGWMTAAAVSRLCQAGVSVTLVESDAIGTVGVGEATIPSLHDFNAAIGINEQQFVAATQGTFKLGIEFVDWGKAGDRYIHPFGKYGRQMFGIGFHQIWLRQHLLNDPASDPGPIDDYAIAAAAARRGRFARPSTNPEAVLSSLSYAYHLDAGLYAGYLRNYAEAQGVRRVEGRIGSVEQDGETGDITAVVLEDGRRIAGEFFVDCSGFRSLLLGETLGVPYRSWQHWLPCDSAIAIPTQHAGPPIPYTRSSAEASGWRWRIPLQHRVGNGHVFSSAHVDDETALERLLAGLDAKPIADPRTLRFTAGRRERLWEKNCVAIGLSGGFIEPLESTSIHLIQSGIFRLMSLFPDTGFSLREIDEYNHWLVEEYEHIRDFIILHYHATARDDSDFWNHCRTMEIPDSLAEKLALWREKGRLFPAHNSLFTAESWIAVLLGQNIVPQGSDPLVAALPVDETNRFMAHLRGVIAQTAEAMPAHQDFIAQHCAAQQAQPA

SEQ ID NO: 84538 - protein, 508 aa, unidentified
  source 1..508: note = Paraglaciecola hydrolytica
  REGION 1..508: note = tr|A0A136A3P7|A0A136A3P7_9ALTE Tryptophan halogenase; OS = Paraglaciecola hydrolytica OX=1799789 GN=AX660_07520; PE = 4 SV=1
MQPTQDPIKKIVIVGGGTAGWIAAATLGNIFKNSDLKIELVESEEIGIIGVGEATIPPFLAAIKSLGIDEVDFIQATQASFKWGIKFEDWRQKGEAFFHPFGSIGRSIDGHDFYQCWLKTQAEGDTTPLMAHSPEAMLSENGRFFLPFNAMNTPLANAQYALHLDSALVGQYLRRFAENLGVTRIEGKVERVECKPCGDINSVSLVSGHVLTGDFFIDCSGFQGLLIEQTLKSGYENWSEYLPCNRAVTVQTENVGPPPPYTVATARDAGWTWRIPLQHRTGNGYVYCDKYCTDQEAIDTLLSAVEGPTLTEPRVIPFVTGIRKKPWNRNCLALGLAQGFLEPLESTAIHLVSKTLALFVRMFPDNQQDPIQIDEFNRRVLLDYQEIRDFLVLHYCTTQRSDTPFWRHCASMPIPTNLQQKLAFFSVAGGLIPGVEELFQPNSWYSIFTGMGVQPQRYNPTLDALDYGKLHVSLQRGHQAIMQCVQQQPTHQAFLQQYCPAPKPSNKL

SEQ ID NO: 84539 - protein, 505 aa, unidentified
  source 1..505: note = Paraglaciecola mesophila
  REGION 1..505: note = tr|K6Z7X1|K6Z7X1_9ALTE FADH2 O2-dependent halogenase I OS=Paraglaciecola mesophila KMM 241 OX=1128912 GN=prnA; PE = 4 SV=1
MNSEKKQSTQNGRKLQKVQKVVIAGGGTAGWMAAASLSKLLGKSLDVTLVESDEIGTVGVGEATIPPIRTLHKLLNIDEQAFMRATNSTFKLGIEFNNWGQKGDSYIHSFGVTGKECWAGEFHHFWLRGKELGIDIPFGDYCYELQASKQGKFAFSANAPMNFAYHLDATLYAKFLRVFCTDSVTRIEGKIQQVNKHQESGFIQSLTLESGQIVEGDFFIDCTGFKGLLIEEALHTGYEDWSHWLPCDSAVAVQTQANSDPLPYTRATAHEFGWQWRIPLQSRVGNGMVFCSRYTSDDQAKATLLANLDGVPINEPRVIKFKTGRRRKGWNKNCVALGLASGFVEPLESTSIHLIMTGIVRLMRLFPFDGVRQSTIDEYNEKLTSELHSIRDFIVLHYKVTTRDDSPFWQHCQSMEVPASLAHKIRLFKETGRVFLDDGDIFRVDSWTQVMLGQGLEPEQYHRIVNEMNKDELTRFLAGMRSAIEQRVAQLPSHQQFIQRYCKAS

SEQ ID NO: 84540 - protein, 509 aa, Caulobacter vibrioides
  REGION 1..509: note = tr|A0A0H3CA91|A0A0H3CA91_CAUVN Tryptophan halogenase; OS = Caulobacter vibrioides (strain NA1000 / CB15N); OX = 565050 GN=CCNA_02898 PE=4 SV=1
MTSAPIRDVLIVGGGTAGWMTAAALAKALPKTIAVTLVESEQIGTVGVGEATIPPINTFNQVLGLDEAAFMRATKGSFKLAIEFVDWMGPGHRYLHPFGGFGLDIEALKFHQVWLRAHHEGWAPPIDAFNLSAQAAHLNRFAPPSKDPGQVLSSLKYAFHFDAGLYAKFLRDYAEPRGVTRVEGKVAGVQQHGETGFVTGVTLEDGRVLEADLFVDCSGFRGLLIEQTLQAGYDDWSHWLPNDRAVAMPCVTGGDGLTPYTRATADAAGWRWRIPLQHRTGNGYVYSSRDISDEDAVARLRATLDGEPLAEPNFLRFQAGRRKAAWVKNVVAIGLSSGFLEPLESTSIHLIQAGITKLLALFPDRGFDPVEIAEYNRLTALQVELIRDFIILHFKANARSEPYWVRARQMDIPETLQRKIDLFAASGRLFPSDLDLFAEPSWIAVLLGQGITPRRHDPLVDAFDEAFLKSQLSRLAGLIRQTAQALPTHEQFIARYCAAPHASRPEFKP

SEQ ID NO: 84541 - protein, 524 aa, Sphingobium sp.
  REGION 1..524: note = tr|A0A2E9CV61|A0A2E9CV61_9SPHN Tryptophan halogenase; OS = Sphingobium sp. OX=1912891 GN=CMN64_25115 PE=4 SV=1
MRDEKNTLNPNAVRKVVIAGGGTAGWMTAAALSVDLADAGVEIELIESPEIGAIGVGEATVPFIHLFNKMLGIDQADFMKQCNATFKLGIEFINWGNLNESYFHSFAHFGPNFKDVSFYHMYLRQAELMAAKGVETVLEDSNVGAVAARNNRFRHPQTVEKSGLPSHFYAFHFDATLYASYLRDFATQRGVRHVSGRIIDVEQNPENGFIRSVRLQDGREFEADLFVDCTGLYGLLIEKVLKSPYEEWSHWLPCDRAVAVPSARVEAPVPYTKSTAEKSGWRWRIPLQHRTGNGMVYSGAFAESDDAVEAKLLDVLDGKALASPRRLRFTPGRRREVWVKNCVSIGLASGFLEPLESTNIHLVQSSILKLLSYFPDKNFAQAEIDAFNADMQKEIEQIRDFIILHYKVTGREDTPFWKYCKYMAVPDTLQRRIDMFKPHGRLFVKPDEFFNYNSWLSVMHGQGLRANGLVPQLDRLTDQEVLAYFEAFNGRVRSVVGAMPLHGDYLHAFAGASEQTPVPAFGEL

SEQ ID NO: 84542 - protein, 545 aa, Sphingobium sp.
  REGION 1..545: note = tr|A0A2W6WFY9|A0A2W6WFY9_9SPHN Tryptophan halogenase; OS = Sphingobium sp. OX=1912891 GN=DI547_01995 PE=4 SV=1
MSGARSILIVGGGTAGWLTAAYLARFFGTGRPVRITLLESPDIGTIGVGEGAFPTIRATLRFLDIDESQFIRAVSGTFKQGIRFDDWLHAPAEGRRHRYLHPFEPPFHADGVDLVAHWLAQDPARRPPFAQAVTIQHRVAEAGRAPKQAGEGAFDGPLSYAYHFDAQRLGQVLGERARELGVRHLAGRLGHVALGPDGAIDHVLTDTHGALSADLYIDCTGFRAELIGGALGARFASARDRLFTNRALACKLPYARPDAPLQTMTIAAAHDAGWTWDIGLADARGIGTVYSDDHMDDDAALAVLARYTGVAPDRLEPRLLSFDPGHRPQQWVRNCVAVGLSGGFLEPLESTGLVLIEAAIAMIAELFPHRGPLDAPAARFNGLMAARYEAIADFLKLHYCLSRREEPFWRDNVAPGSVSGRLRDLLDQWRHRPPNRFDFTLDVESFAFFNYQYILYGMDFACDARDPAGTASATEPDRLFRRIAAFGEQAVAELPQHRALIDSSPDNRLPYRSPRRIGWAERARVTPMDRKQETDGCRSGTSRRS

SEQ ID NO: 84543 - protein, 506 aa, Erythrobacter sp.
  REGION 1..506: note = tr|A0A166GS08|A0A166GS08_9SPHN Tryptophan halogenase; OS = Erythrobacter sp. HI00D59 OX=1822215 GN=A3711_03365; PE = 4 SV=1
MTERAQAIRNVVIVGGGTAGWMTAAALARLLGGTGLAITLVESAVIGTVGVGEATLPQIRRFNSLLGIDEREMMARTAATIKLGIEFRDWGRVGDSYIHPFGRFGEEIGPVAFIDCWARMHARGKAAPIGEYCLPIVAAMKGRFEPPHGDGTRQPYDYAFQFDAGLYAAWLSELAQSAGVVRREGRIVDVARNSESGAISAVSLEDGAAIRGDLFIDCSGFRALLIGETLETPFEDWSHWLPCNRAFAVPCANGGDYGPYTRATARAAGWQWRIPLQHRVGNGLVYCDAFWDDADAAEALMANLEGEPGAEPRQLRFTTGRRSALWRSNCVAIGLAGGFLEPLESTSIDLIQSGILNLVELFPHTAIEETDRREYNRLMDLEFERIRDFLVLHYVANQREEEFWQAMRAMPLPDSLSARIEDFRERAILPDYADGLFQPVSWISVFLGQNVVPRRWDPRADAMNADELGKRLTAIHGKIADDAAAMPLHLDFLERAGARYGYGAGQ

SEQ ID NO: 84544 - protein, 503 aa, Sphingobium sp.
  REGION 1..503: note = tr|A0A2W6X2S0|A0A2W6X2S0_9SPHN Tryptophan 7-halogenase OS=Sphingobium sp. OX=1912891 GN=DI540_07090; PE = 4 SV=1
MHADFPTSDRVVKRVVVAGGGTAGWVTATALVRHLGPLIDIILIESDAIGTIGVGESTVPTFRGFHQLMKIREDRFMAEAQATVKLGIEFKNWGRVGDRYIHPFGTIGLQWSWMADFHHFWLHARAQGFGGELGEYCLEWVAGEANRMSLSSSVAPSYAYHIDAARYARFLRSLAEPAGVKRVEGKIRNVELAPERGHIAALVLESGTRIEGDLFIDCTGFRSLLLGEALGVGFEDWGQWIRTDRAVAVQSTSDGPAQPYTSAIAHEAGWRWRIPLQHRDGNGFVFASDFMSDDEAHARLLAEIEGEPIVDPWLVRFKTGTRTKAWHKNCVGLGLAGGFIEPLESTSIHLMMAAVTRLIEDFPFNGFDDALLDHFNRKSRLEFENIRDFIILHYHVTQRDDSPFWDHCRTMEIPDSLKERLALWQENGRAYQLGHELFRVDSWSSVLLGQGMHPRGYHHVAAMMPEPQLREELARMRKDIAGVVAEMPSHREFLRRYCPAELV

SEQ ID NO: 84545 - protein, 503 aa, unidentified
  source 1..503: note = Pseudoalteromonas neustonica
  REGION 1..503: note = tr|A0A558IWW6|A0A558IWW6_9GAMM Tryptophan 7-halogenase OS=Pseudoalteromonas neustonica OX=1840331; GN = FQP85_01590 PE=4 SV=1
MKAIEKIVILGGGSAGWMTAAMLAKVFSKQLSITLIESPDIPTVGVGEATIPAIQTFNNVLGLDEHVFLKRTQGTYKLGIQFENWGQQGDSYQHAFGDIGRGLGITPFHHFWLKSNQSKTTQTLWDFSVNAIAANHNKFHPNPQIGKTPLAGLTYAYHFDAGKYAKLLQEFAIAQGVEYLSGTMESVKLDDNGLIKTLELSDEQTIKGDFFIDCSGSSARLIEQALGVKYQSYQHWLFCDRAIAVQTKPLKNTPPFTRSIAKDAGWQWQIPLQNRVGNGLVYSSQFMSAEQAEQQLLNSLETETITAPKHIKFTPGRREQQWFKNCLSIGLSSGFLEPLESTSLHLIQTSIARFIKLFPAHPDCELSAHAYNLQAKNEFEKIRDFIILHYAVNQKQSPFWQRCGAMTLPDSLQQRIALFKRTGTLSIQADELFSEVAWLQVLIGQGIRPQSYHPLARAISDSELDEFLSNIATIQQQYVTHLPTHEQYLQRFCRCSELAKGQI

SEQ ID NO: 84546 - protein, 500 aa, unidentified
  source 1..500: note = Paraglaciecola mesophila
  REGION 1..500: note = tr|K6YKA3|K6YKA3_9ALTE Tryptophan halogenase; OS = Paraglaciecola mesophila KMM 241 OX=1128912; GN = GMES_2120 PE=4 SV=1
MAQPFKIVILGGGTAGWMAANLFAHKWAGKLNDKSLRVTLVESPDIGIVGVGEGSTPTLKRFFSMLGIADGDWMPQCNATYKMNIAFEDFSPASGIKRYSHPFISQLDTFTQRAFMVNARTRRLGLDTHTNPDDFLLNGVLAKQNKGPQTPDNFPFNIEYGYHFDSHLLGAFLQQHAIGLSVEHVQANVESIKQHPNGDIAELHCKEGMVINGDLFVDCSGFSSALMQKTLGVKFNSYKDNLFNDSAVVVPTPISEHIPVETTSTALSAGWCWKIPLTNRFGNGYVYSSDFIDSSQAERELKQHLNLSEDSDCRHLSMKVGALAQQWQNNCLGIGLSAGFIEPLEATALHLTQISIEQFILEFEEGGFTNRLQGQYNAKMQHRTERTRDYIVAHYKLNTRNDSEYWRANRNNMHLSESLLQILDVWYKRGDLEAEIKRQDLSTHFNAVSWNCLLAGYGAFPPLATKQPGSGDLYLEQKIESFLHGCALNFEDHRTNLHNH

SEQ ID NO: 84547 - protein, 502 aa, unidentified
  source 1..502: note = Pseudoalteromonas neustonica
  REGION 1..502: note = tr|A0A558IG90|A0A558IG90_9GAMM Tryptophan 7-halogenase OS=Pseudoalteromonas neustonica OX=1840331; GN = FQP85_19920 PE=4 SV=1
MAIINKLVILGGGSAGWMCAAYLSKQHPELAISVIESSKIGSIGVGEGSTPHLKNFMDSLGISEQQWMPKCDASYKAGIYFNNWNGDERCYFHPFYSDMDEKTAEVYFVNANARRRGNGDWQAPDEYFLTGHIAKQNLSPKVHTPMLKEQTYGYHFDAIKLAGVLKAYAQENGVEHIDGEFSHAHINNNGNIADITLVDGRQINGDMFIDASGFNALLIEQTLGTPFNSFADELLNDRAVAVATPISSDAVMPCATQSTALSAGWCWQIPLTSRIGNGYVYSSKHITDEQAQYELALQLNINPQNSAFRHLKMKVGCMQSAWQSNVMAIGLAQSFIEPIEATSLMVTQHSIKLFSQALTKLKNNEQSLKVAEHVNQQLHQLVYGIKDYVVAHYATSLRTDSEYWLTAKQLNHSSSALKSLLKAWLNGDDFDAYLSKLTQQQVYFRPSWYCLLGGMDYQSSRCQQSFEPACAAICNGAKMYLHELCNKHCKPHAEQLRAMKTA

SEQ ID NO: 84548 - protein, 419 aa, unidentified
  source 1..419: note = Caballeronia telluris
  REGION 1..419: note = tr|A0A158F360|A0A158F360_9BURK Tryptophan halogenase; OS = Caballeronia telluris OX=326475 GN=AWB66_00462 PE=4 SV=1
MNTSTLDHRNVDVDVDVAIIGAGPSGAVAAAMLRKAGRSVRVLERQQFPRFSIGESLLPQSMAYLEEAGMLRAVVEAGFQYKNGARFVRRDETSAYDFRDKHSPGWGTTYQVERATFDDLLIRCAAAQGADVRFGHTVHAIETGERPALDVTDENGTPYRLQARFVLDASGFGRVLPRLLNLETPTGLPTRAALFTHVRDDMPLCAIDREKISVVVHPEHGDVWYWMIPLAGGRASVGCVAEGDFLQCAEDERESRLRSLIRQEPTLGAWFGDAPFLMPVRTIGGYSANVERLHGPGYALLGNAGEFLDPVFSSGVTIALRSAHLAARVLVRQLSGETVDWQVQYDDELRRGIDVFRAFVERWYSGELQAILFYPEQTPQIRRMVSAVLAGYAWDETNPFVRDAARRLDALYEVCKTNG

SEQ ID NO: 84549 - protein, 521 aa, unidentified
  source 1..521: note = Sandarakinorhabdus cyanobacteriorum
  REGION 1..521: note = tr|A0A255YDB0|A0A255YDB0_9SPHN Tryptophan halogenase; OS = Sandarakinorhabdus cyanobacteriorum OX=1981098; GN = CHU93_10610 PE=4 SV=1
MGVTEDGAFRIVIAGGGTAGWLTACVLAARHPQLDITLVESPDIPTIGVGEGTWPTMRETLASIGRGEAEFMAACDASFKQGSRFDGWVTGAEDDICLHPFTLPPPGNMAALLHAWASTAPARRFAEVMTAQAAACAQDLAPRQRGMPDYAGALNYGYHFDAGKFAKLLTRHATGRLGVKHVPAEIVGTIAADNGDVAALVLADGRQLAADLFIDCTGQAARLIAGHCGVAWIDRSHVSFNDRALAVQGPVAQGSPIASQTIGTAHRAGWIWDIDLPTRRGIGCVYASRFMSDDEAHAVLCAHVAAKVPGADVTALAPRRLAFATGHRARFWQGNVVAVGLSAGFIEPLEASAIVLIELSARALADALPASRAAMDIHARRFDDMFHTRWDRIVDFLKLHYVLSRQSEPYWQAQRDPASLSPRLAEDLVLWREQPPSARDFPLHDEMFPPASQHYILYGMGHALPPAPPAPAIAAAAARLAEVQARSRQLGAALPENRIYLAAGAAQAACGPHASWPIIRS

SEQ ID NO: 84550 - protein, 507 aa, unidentified
  source 1..507: note = Pseudoalteromonas piratica
  REGION 1..507: note = tr|A0A0A7EKQ9|A0A0A7EKQ9_9GAMM Tryptophan halogenase; OS = Pseudoalteromonas piratica OX=1348114 GN=OM33_16010; PE = 4 SV=1
MNVADPIKRIVIVGGGTTGWMAAASLSRYVQDKDMTLTLIESPDINTVGVGEATIPNFVDFNRNLGINDAELIKATQATFKLGIEFEEWSQKGERFFHPFAAYGAPIENLDFHQYINKLNAEGKQLDIEDYSFPIQLAKKGGFAQPNPNQNNPLAQYSYAYHIDAVLYAKFLTEFSVKRGVDHILANVSEVKLNAENGFIQALTLDNGKHIEGDLFIDCSGFKGVLIEGAMGIGLDDLSHLLPCDSAVAVQTELVGEPTPYTRAIAKEAGWQWCIPLQHRMGNGYIYSSKFTSDEEAKQSLLNSVKGRTITDVKTFKFPLGRRKVSWHKNCFALGLAAGFLEPLESLGISLIQTALAKLMTFFPDMSFNQADIDEVNRLHNDELDRIVDFLLVHYKLTQRTDTAFWRYCQEMPIPKTLEHKIAMYKNRGHVVMYDNESFQQASWLSMFYGFNVSPSRYDVRLDHFNSSAIAESLAKMKAQITMAANNCLSHQAFIDKHCKANNDVKN

SEQ ID NO: 84551 - protein, 520 aa, unidentified
  source 1..520: note = Aliikangiella sp.
  REGION 1..520: note = tr|A0A545UHJ1|A0A545UHJ1_9GAMM Tryptophan 7-halogenase OS=Aliikangiella sp. M105 OX=2592383; GN = FLL46_05180 PE=4 SV=1
MTESIDRVLVVGGGTAGWLSAAILARSFNSHLPGAVKVTLVESPDIPILGVGEGTWPTIRATLKKIGVDESEFMKECDATFKQGSEFVNWMATDDYTTHRYFHPLSAVFHSAYDFSLAPYWLSGSANDLPYDIAVASQTAICKMGLAPKKITTPAYEAIQNYSYHLNANKFAAFLTRHCVEKLGVEHLVANVTDVELDEAGFIRAVNTDNHTIESISADFFVDCTGGRSILLGGALGVPWKKIDDVIFNDTALAMQVPYQTSDAPIATHTIATAHDAGWTWDIGLSNRRGVGYVYSSQHTTDEKAEETLRRYVGESADQLEARKIKLNLGYRTQFWKSNCLALGMSAAFIEPLEASAIFLIDAGATMLAAQFPRTKNEIAFVEKQYNKTFSLRWNKTLDFIKLHYCITNRRDTEFWVDNCREETIPDSLKEKLSFWKKHPPGKYEFDNAFEPFVLDSYLFVLYGMNFETDIKSIKAVYDRHAEARKRFEEVTKLTQFLSRELPKQRELVEKVYQYGFPAI

SEQ ID NO: 84552 - protein, 447 aa, unidentified
  source 1..447: note = Caballeronia calidae
  REGION 1..447: note = tr|A0A158D0B5|A0A158D0B5_9BURK Tryptophan halogenase; OS = Caballeronia calidae OX=1777139 GN=AWB78_04584 PE=4 SV=1
MSEATQTQAQQTWDVVVIGGGPAGATAATLLADRGYRVRVLEKARHPRFHIGESLLPANLRLFDKLGVADEVRAIGMVKLAAEFVSPQHDNRTQRFFFADAWDKSMPSAYQVRRSELDDILLRNAAKHGAHVSEGCRARDVAFAPDGSNATINAEHDDGRTEQVRARFVVDASGRDTLLANHFKTKRRNERHNSSALYGHFRNAQRNEGANEGNITVFWFEHGWFWFIPLADGATSVGAVVWPAYLKQRPKGTSVEAFFRETIALCAPLAGRLKDAELISDVHATGNYSYTGDMTHERNFLLLGDAFAFIDPVFSSGVMLAMQSAFAGAEAIDKALANPAHAQAALAKFDRDMRHGPREFSWFIYRMTSPTMRNLFMGPKNPLRMKEALLSLLAGDIFGTTPIWHSLRAFKSVYYIAAALDWRNSLRAYRQRRRNLSDAERAEPSAN

SEQ ID NO: 84553 - protein, 498 aa, Pseudoalteromonas translucida
  REGION 1..498: note = tr|A0A0U2V4I5|A0A0U2V4I5_9GAMM FADH2 O2-dependent halogenase I OS=Pseudoalteromonas translucida KMM 520; OX = 1315283 GN=prnA PE=4 SV=1
MNNKITNVVIAGGGTAGWITAALLNKVLGNVINITLVESDQIGTIGVGEASIPPILHLNGALGINEQEFINATQATIKLGIEFENWREQNHKYMHAFGSIGKDFPFCEFHHFWLKAKQQNRAPDLWDFSVNYQAAKAGKFAHLRNLPNTQLLGLHYAYHFDATLYAKLLKKLAQQRGVKRVEGKIKSVQQCQQSGDIQALTLESGSVIKGDLFIDCTGLSALLIEKTLNTGFEDWSHWLPCDRAVAVQSESANEPVPYTRSIAQNAGWQWQIPLQHRVGNGLVFSSRHLTDDEAKQQLLANLPGKAITEPRVIRFKTGRRRLQWHKNVVAIGLSSGFLEPLESTSIHLIQTAAIRLIKMFPHNGIKHSQVTTYNLQSKTEIERIRDFIILHYKLTTRTDSAFWRQCQQMSIPETLQQKITLFKQTGKIIREDDELFAEPAWQQVMIGQGLAADDYHPLANALTDEQLLALFSDLKALINHTVEQLPSHSEFLSRMKNN

SEQ ID NO: 84554 - protein, 503 aa, unidentified
  source 1..503: note = Sandarakinorhabdus cyanobacteriorum
  REGION 1..503: note = tr|A0A255YJF4|A0A255YJF4_9SPHN Tryptophan halogenase; OS = Sandarakinorhabdus cyanobacteriorum OX=1981098; GN = CHU93_08000 PE=4 SV=1
MPDQPFQRLVIAGGGTAGWMTAAALARFCGPAWQIHLVESDAIGTVGVGEATIPQVRLFNAGLGIDEADFLGATQGTLKLGIEFVDWWQPGHRYMHNFGEVGRGLGVVPFQHWWAAARAAGVAADYGHYSLNERAARMGRFAPFAGDNTLPPLVWAYHFDAGLYAAYLRRYAQQRGVTRHEGRIARVETQGETILALHMDDGRRLAGDLFIDCSGFRSLLLGETLASGWHDWSHWLPCDRAVAVPCAHAPGGPLAPYTRSTARAAGWQWRIPLQHRIGNGHVFSSAHLSEDEATAVLLANLDGPALAEPRSLRFQAGRRDRVWIGNCMAIGLSAGFLEPLESTSIHLIQSAIARLLALLPGDAGELPVLAAEANRQAAREMEWIRDFIILHYKATARADTPFWAKMQAMDVPPDLADRIALFQATGRIRRDHDELFTELAWAQVLIGQGLPPARPHPLTGGIGRDDLAGFMTSLDRAIAAGAAALPGHEDWLAKHAPAREVRS

SEQ ID NO: 84555 - protein, 504 aa, Pelomonas sp.
  REGION 1..504: note = tr|A0A0Q7BF65|A0A0Q7BF65_9BURK Tryptophan halogenase; OS = Pelomonas sp. Root405 OX=1736529 GN=ASC81_13155 PE=4; SV = 1
MNPTPAQPIQRIVILGGGSAGWMAAAALSHAFHSKRSIHVVESEAIGTVGVGEATIPQMRAFNHALGLDESEFLRRTQGTFKLGIEFVDWGQRGERYMHTFGGVGRDLGLASFHHFWVRMRNEGKALPLDAYALNSLMGEANRFSREARPVQGDGPGSPVSYAYHFDAGLYAATLRQISEARGVRRTEGKVVRALQRPADGFVTALLMENGEQIEGDLFIDCSGFRGMLIEDTLHTGYEDWTHWLPCDRAVAVPCGSVAPLTPFTRATARTAGWQWRIPLQHRIGNGHVFSSAHISEDEATAQLLANLDGPALADARTLRFRTGKRKKMWHKNVVAMGLASGFLEPLESTSLYLIQSSLSRLIQFFPDTDFHQPDIDEHNAQADEEFERIRDFIILHYHLTRREDSAFWRQVRTMAIPESLSRKVQAFAHAGRLHPAQRDLFSDPSWLQVMVGQGLVPQRNHPLADHLSGAECEFFLQHVGRQLQAIAMKLPDHADYVRNYCTA

SEQ ID NO: 84556 - protein, 520 aa, unidentified; identical to SEQ ID NO: 83680
  source 1..520: note = Cellvibrionales bacterium
  REGION 1..520: note = tr|A0A1Z8TSU4|A0A1Z8TSU4_9GAMM Tryptophan halogenase; OS = Cellvibrionales bacterium TMED49 OX=1986842; GN = CBC09_06725 PE=4 SV=1

SEQ ID NO: 84557 - protein, 410 aa, unidentified
  source 1..410: note = Caballeronia calidae
  REGION 1..410: note = tr|A0A158CY84|A0A158CY84_9BURK Tryptophan halogenase; OS = Caballeronia calidae OX=1777139 GN=AWB78_04444 PE=4 SV=1
MNATVDVAIIGAGPSGAVAAALLRRAGRSVLVLERQHFPRFSIGESLLPQSMAYLEEAGMLRAVVEAGFQYKNGAHFVYRDQASAYDFRDKHSEGWGTTYQVERAVFDDLLIRCAAEQGAEVRFGHSVLAMNPGDAPTLEVADEAGTRYRVNARFVLDASGFGRVLPRLLNLEAPTRMPTRAAIFTHVRDGIPAGVHDRNKITVAVHPDHRDVWFWMIPLANGRSSVGCVAEAAFLDVPEAAREDKLRSLIRSEPTLNRLIGDAPFLMPVRHIGGYAANVERLHGAGYALLGNAGEFLDPVFSSGVTIALRSAHLAVETLERQLEGESVDWNAQYDVPLRKGIDTFRAFVEGWYTGKLQDIIFSREQTPVIRRMISALLAGYAWDETNPYVVEPVRRLNALRQACVQREC

SEQ ID NO: 84558 - protein, 502 aa, Sphingomonas sp.
  REGION 1..502: note = tr|A0A2E1YVQ6|A0A2E1YVQ6_SPHSX Tryptophan halogenase; OS = Sphingomonas sp. OX=28214 GN=CMN72_03115 PE=4 SV=1
MTDHAIRDVVIVGGGTAGWMTAAALSRFLGGGGTRIRLIESEQIGTVGVGEATIPTIATFNQMLGIDENDFLRHTQGTFKLGIEFVEWRQIGERYFHPFGQFGRDIEGANFHQLFLKLASRGLAADIWHYAPCAMAAAAGRFNRTVDPTFGPMPYAFHFDASLYARYLRGYAEARGVERIEGRISDVALRGEDGFVDTLTLDDGRSVTGELFIDCSGFRGLLIEEALESGYEDWRHWLPCNRAVAVPTANIGDPPPYTRATARSCGWQWRIPLQHRTGNGYVYTNEYLSDEDACAALLNSVEGEPLGEPRFLSFVTGRRNRFWNRNVVAIGLSGGFLEPLESTSIHLIQTGIAKLLALFPDTRFLEVEAGEYNRLMRAAYDGVRDFIILHYHATTRDDSPFWNHVRTMDVPETLARKIDLFRAKGRFFRYDDELFSLASWVAVLLGQGIIPKGHDPLVGAMDENSLAHRVEELRQSVRRSVAAMPSHAEFLRAHCAAAPLQR

SEQ ID NO: 84559 - protein, 515 aa, Novosphingobium sp.
  REGION 1..515: note = tr|A0A1W2ASI6|A0A1W2ASI6_9SPHN Tryptophan halogenase; OS = Novosphingobium sp. B1 OX=1938756 GN=SAMN06272759_10563; PE = 4 SV=1
MIGSVEQVVIVGGGTAGWLSACLLAARRPELAITLAEAPDIPTIGVGEGTWPTMRETLATIGIAEAEFLSECDASFKQGSRFDGWVDGSAQDSYLHPFTPPPPGDMAAMLQAWRTEAPGLPFARAMTPQALVCDENLSPRQRAMPDYAGALNYGYHLDAGKFAALLKRHATTRLGVTHVSAQVTAIADDEQGKIASLCLHDGRELAGDFFIDCSGLASILIGRHCAVPWVDRSDVSFNDSALAVQVPVEHGTAIASQTIGTAHEAGWIWDIALPTRRGIGCVFSSRFMDDARAEEVLRSYIAVKVPGADIAALRPRKLTFSTGHRERFWQGNCLAVGLSAGFIEPLEASAIVTIELSIKALAENFPRRAETMGLLADRFNQLFRYRWDRIVEFLKLHYVLSRRTEPYWQAQRDPATVPARLAEVLELWRDQPPSVWDFPRMDELFCAASQQYVLYGMGFPVPAGAADPAAAQAFADVRQRSRALAAALPSNRTYLDALRPVADADPIAMHGAAAK

SEQ ID NO: 84560 - protein, 494 aa, unidentified
  source 1..494: note = Paraglaciecola hydrolytica
  REGION 1..494: note = tr|A0A136A6M3|A0A136A6M3_9ALTE Tryptophan halogenase; OS = Paraglaciecola hydrolytica OX=1799789 GN=AX660_04725; PE = 4 SV=1
MQNNEVKKVVIAGGGTAGWVAAAALSKKLGQFVEVILVESDQIGTVGVGEATIPPMKVFHSLLGIDEQEFMAATEATFKLGISFKNWGQIGDHYIHPFGTTGQSSFLADFQHFWLHGKSKGINAEFGEYSFEIQAAKAGKFATSKNSSINYAYHLDATRYAQYLRQFSEKLGTKRIEGKIQLVQQHANGDIKALQLESGQVIDADLFIDCTGFAGLLIDKTLKTEYEDWSHWLPCNSAIAIQTESVGAAAPYVTCTAHHAGWQWHIPLQHRVGNGNVFCDKFMSDVEAKKHLLDNVQGAVLTEPRVIKYKTGRRKVFWNRNCVALGLSSGFVEPLESTSIYMFMNGIVRLMKIFPFNGVTKSSIDEYNQQSIAELENVRDFIILHYHATSREDSEFWRYCKNMQVPDSLSHRMELFRENALAFQGERELFRLESWTHVMLGQGIMPKHYHSIFKTMTDQELMGHLSNTRNTINTAVAKLPSHQDFVNHYCKAPR

SEQ ID NO: 84561 - protein, 504 aa, Pseudoalteromonas sp.
  REGION 1..504: note = tr|A0A2K9JWK0|A0A2K9JWK0_9GAMM Flavin-dependent tryptophan halogenase RebH OS=Pseudoalteromonas sp. NC201; OX = 1514074 GN=rebH2 PE=4 SV=1
MKNQKIVILGGGTAGWMAANMMAKSWADKAIEITVVESSSIGTIGVGEGSTPQFKGFMDYLGISEAEWMPACNATYKNGIRFIDWSTKPGFSSYFHPFPAQPDDYSAPAFFHNSFVRRKAIDVEGHPDHFFLATHLADLNKSPIAAESFPFEINYGYHFDSALLGQLLARKAAEFNVKHIDATITDVRKHVDGDIAALITSDGTEIAGDIFIDCSGFKSLLLQHTLGVGFESFESNLFNDAAVVIPTKQLDTIRSETQSVARQFGWSWHIPLTNRIGNGYVYSQRYCNADQAETELRAALGLLDSEVEARHIKMKVGQVKAHWSKNCIAIGLSQGFIEPLEATALHIVQETVQSFIECYQDADFTDGNRDKHNRALSERYQAIRDYIVAHYRVNSRTDTNYWLDNANNNHLSRSLYQILQTWVSGNNLSDELVRQNVDQYYPSVSWHCLLAGYGIYPEQAQLKSGNALANQHSIEKVNDFIRRCGLNFKDHRMELESFAANVHK

SEQ ID NO: 84562 - protein, 561 aa, Shewanella sp.
  REGION 1..561: note = tr|A0A0Q0IY40|A0A0Q0IY40_9GAMM Flavin-dependent tryptophan halogenase RebH OS=Shewanella sp. P1-14-1; OX = 1723761 GN=rebH_3 PE=4 SV=1
MTSTAIKNIVIVGGGTAGWLTAAILASKITHDAVTITLIESPDIATIGVGEGTWPSMRQTLQDIGISEAEFLTECDASFKQASKFINWNVSDTSCSDNSVTHSYYHPFSLISFPFTDAFKQYQTIKNNLPFDIKFADAMGYQTQLCQQNLAPKQISTPEYQFVCNYGYHLDAAKFANLLKQHCVNRLKVSHIAANVVGINNVNQGVDVQISDTEYSENNSVTCRHGHIESVTIKDSSNRDRKIQGDLFIDCSGQHSLLLGQHYKIPLACQKSILFNDSAIAVQIPNDTAASINSSTLSTAVSAGWIWDIGLQTRRGVGHVYSSSHQTKDEALTEIKRYIATSTPNLSEQQLETLSFKHLGFSPGFRRQFWHKNCVAVGMSAGFIEPLEASAIALVEQSAIEIAQQFPTDLAILPIVTERFNKRMKLHWQQIIEFLKLHYVLSKRRDSQYWCEHQTLSSVPDSLKTLLNLWQHQLPSAADITHVNPLFPSASYQYVYMGMKETTTANTPDPKVNLLSPNLGITPRYIAFLEDVMSKRQTLSQRMKSNRELLDLVRQQGFSAI

SEQ ID NO: 84563 - protein, 504 aa, Novosphingobium sp.
  REGION 1..504: note = tr|A0A0N0KD49|A0A0N0KD49_9SPHN Tryptophan halogenase; OS = Novosphingobium sp. AAP93 OX=1523427 GN=IP83_00525 PE=4; SV = 1
MTAARRFVILGGGTAGWMAAALIAHRCRDHPISVTLVESPEIGIIGVGEGSTPQLKVFFDELGIAEREWMPACHATYKTGIRFAGWSDAPGFESYFHPFQSALDGHTAPAFYFHTRARRTGRDVVAHPDRFFLGARLAEARLGPVPGENFPFDLGYGYHFDATLVGQFLAAHATTKLGVRHVPRRVAGVRRGASGAIAALVLEGGEEEIAGDFFIDASGFRASLIGEALGEPFESFAGNLFNNAAVALPGARDEGATSCETVSTALSCGWAWRIPLTGRTGNGYVYSSDFISADAAETELRRHLGLLDADVEARHLAMRVGQVRRSWVANCLAIGLAQGFIEPLEATALHIVHATLSGWIEALLADGFGPAHRDQFNAAIHARYEGIRDYIVCHYRMNRRDGDYWRANAEHDVLSDNLKAVMTCWFRGGELDAEVARLGIDRYYAPLSWHCLLAGYGQFPEAARLQPPEPDLPLADMAKIDRFIAGCALNFPAHDDLLAQLEEA

SEQ ID NO: 84564 - protein, 501 aa, unidentified
  source 1..501: note = Paraglaciecola hydrolytica
  REGION 1..501: note = tr|A0A136A0N5|A0A136A0N5_9ALTE Tryptophan halogenase; OS = Paraglaciecola hydrolytica OX=1799789 GN=AX660_11405; PE = 4 SV=1
MNKPYQLVIVGGGTAGWMFATAASHLYSAKQLQIILIESEQIGSVGVGEATLPQLQEFNKFVGIDEQDMMQKTNATVKLGIKFDDWGSIGNSYVHPFGQYGNKAKGNNIYQQWALANQDSAFLSLPQLSYAIQLCLNNKFELPAQDPNQIKSTYSYAYHFDATLYAQYLRSISEQFGVTRIEGMIQTVSNHVQSGDIKSVTLKDGQVISGDFFIDCSGFRSLLLGDNLQTEFEDWSKWLICDRAIAAPTEKLKTIPNYTLSTAKEAGWQWKIPLQHRTGNGYVYCSDMINEQAAMDSLLTNIEGKPLSDPKVLKFKAGRYAKTWNKNCVGIGLASGFLEPLESTSIYLIQTAITSFLRLFPLNNKEVIANEFNRNIDNEYDRIRDFLILHYHQNQRNDSELWRYCQNMSVPDSLKEKMTLFEQRGYIDTYKYGLFNHGSWLSVLHGQGLRPKEIDPFTRGMSALEIQKQLEEFAAEIEESVYKVPRHNIFLQNYCPAKVKE

SEQ ID NO: 84565 - protein, 514 aa, Saccharomonospora sp.
  REGION 1..514: note = tr|A0A1V9AC30|A0A1V9AC30_9PSEU Tryptophan halogenase; OS = Saccharomonospora sp. LRS4.154 OX=1962155; GN = B1813_00870 PE=4 SV=1
MVRNVVILGGGTAGWMTATYLQAAFGDRVSITLVESRRVATIGVGEATFSTIRHFFDYLGLAEEEWMPSCNASYKLAIRFENWRGPGHVFYHPFERPRLVDGYPLTEWWLKLGRDPFDRECLVLPALCENLRAPKHFDGDLFERSLHDGGDTKRRSTMAQQETQFPYAYHFDAALLAEFLAEFGTQRGIRRVLDDVREVTQDERGWISHLVTAEHGEIAGDLFVDCTGFRGMLINDLLGEPFESYQDFLPNNRAVALRVPADMERDGIKPYTTATAQDSGWIWTIPLFHRIGTGYVYADDYCSPEEAERTLREFVGSAAEEAEANHIRMRIGRNRNSWVRNCVAIGLSSGFVEPLESTGIFFIQHGVEQLVRHFPDENWDPTRITAYNTAVARCLDGVRDFLTLHYRGTARADTPYWKATKERVLPDTLAERLDLWSAQLPDPGTVYPYYHGFEPYSYHLMLLGLGGQAPRRHRPALDLVPDGAARQELRRVRAQSEELVNALPSQHDYLARLH

SEQ ID NO: 84566 - protein, 500 aa, Sphingomonas sp.
  REGION 1..500: note = tr|A0A430DVR9|A0A430DVR9_9SPHN Tryptophan 7-halogenase OS=Sphingomonas sp. ABOLF OX=1985879; GN = CA235_01200 PE=4 SV=1
MIGGKRMRRIVVAGGGTAGWMAAAAIARTMGRAVEVTLVESDAIGTVGVGESTIPPLINFNRLLGIDEAAFMAATQATFKLGIQFENWKLPGHRYFHSFGFTGKDHWSAGFQHFWLYGRTRGHDAPYDAYCVELIAALEGKFGHLPGDRANYAYQLDATLYARFLRTMAEGDGARRVEGKIAQVELDGESGDIAALVLESGTRVEGDLFLDCTGFRALLIEQTLHTGYDDWTHWLPCDSAIAMQTDNVGPPVPYTRAMAHDAGWQWRIPLQHRTGNGLVYCSRYLGREAALDRLLANLEGAVRTEPNHLRFTTGVRRRQWVRNCVAIGLAGGFAEPLESTSIHLIQRAVLRLIRMLPLSEVSPRDVAEFNEQQLQDMTQVRDFLILHYKATERRDSAFWRHCADMEIPDSLTQKIELFRETGRVFRKNEELFAENSWVQVMMGQGIEPRAWHPIAEKLRDEELARLLTTLRENVARTVAAMPRHADYVASYCGAAREQAA

SEQ ID NO: 84567 - protein, 504 aa, unidentified
  source 1..504: note = Paraglaciecola arctica
  REGION 1..504: note = tr|K6YZN6|K6YZN6_9ALTE Tryptophan halogenase, putative OS=Paraglaciecola arctica BSs20135 OX=493475; GN = GARC_5283 PE=4 SV=1
MNTTLTANKHIVILGGGTAGWMAANLMAAKWQKIGIQITLVESPAIGTIGVGEGSTPQLKSFFDQIGVEEHEWMPACNATYKNGIRFNGWSSRPGFESYFHPFASRIDAFSAPALFYNSIHRRKGINVDCHPDRFYLSAKLAEQHKTPIPDHNFPFPIGYGYHFDANLLGQFLANKGIAKGVKHIQGKVLNVGMQTNGDIANLQLDDGNTIIGDIFVDCSGFNGVLIQKALKVPFVSFKDNLFNDSAVAIPSPTSQPLRSQTISTTMKYGWAWDIPLTNRVGNGYVYSSQHCTAEQAEIELRTKLNLLDSEVAARHLKMKVGRVEKHWYRNCLAVGLSQGFIEPLEATALHFVQETIEGFIEANEKSNFSNTHQDEFNQQINQRFEGIRDYIVAHYRLSSRDDTDYWRENSANPHISNQLKRIVKGWMAAEDITQTIQQAKIQSYYPPFSWLCILSGYGIFPEQLSDVPQDNVAHKYDLDYVDDFIQRSSLNFNDHKTFLDLHY

SEQ ID NO: 84568 - protein, 497 aa, Sphingomonas melonis
  REGION 1..497: note = tr|A0A175XZ98|A0A175XZ98_9SPHN Tryptophan halogenase; OS = Sphingomonas melonis TY OX=621456 GN=AVM11_10350 PE=4; SV = 1
MNAVTPRRIVIAGGGTAGWMAAAALTRTLGRTATVTLVESDAIGTVGVGESTIPPLITFNRLLGINEAEFMAATQATFKLGIQFDGWKGPDDSYFHAFGLTGKDHWAAGFQHFWLDGQARGHTESYDDYCLELVAAREGKFAHLPDDRMSYAYQLDSTLYGRFLRRMAEGDGATRIEGKIARVELDGESGDIAALVLDGGTQVEGDLFLDCTGFRALLIEQALHVGYDDWTHWLPCDAAIAVQTESVRPPVPFTRAMAHDAGWQWRIPLQHRVGNGIVYCSRYLSQDAALDRLLGNVEGAVLTEPNRLRFVTGARRKQWHRNCIAIGLAGGFMEPLESTSIHLIQRAILRLIRLLPPAGAISAHDIAEFNDQQLTDMDQIRDFLILHYKVTERRDSPFWRQCAAMDIPDSLAQKIGLFRETGRVFRRNDELFAENSWIQVMLGQGIVPQTHHPIAAKLPDDELARFLGGLRQGVATTVRGLPAHADYVARYCGAAPA

SEQ ID NO: 84569 - protein, 501 aa, Sphingomonas sp.
  REGION 1..501: note = tr|A0A430DUH7|A0A430DUH7_9SPHN Tryptophan 7-halogenase OS=Sphingomonas sp. ABOLF OX=1985879; GN = CA235_02240 PE=4 SV=1
MTPTDVPQRRRVVIAGGGTSGWLAAAALAQQLGALLDVTLVESEEIGTIGVGESTIPTARAFHRLIGLDEQRFMSETGATFKLGIAFEDWAQKGDRYIHAFGETGQSTWMGAFHHFWLQARDEGFGGDFGEYCLELQAADAGRFGIGAKLPELSYAYHLDAGRYARHLRGIAEQAGVRRIEGMIERVEQQGDGADITALVLHSGQRIEGDLFLDCTGFRALLIGQTLGSPLEDWGHWLPTDRAVAVQTRAVEPARPYTRAIAHGAGWRWRIPLQHRVGNGFVYDSRHLSDDEARAQLLREVEGEIVAEPRLIRFRAGRRAEAWRGNCVALGLAGGFVEPLESTAIHLVMIAITRLLQLFPFAGDCAAAARRFNAQAAAELDGIRDFIILHYVLTEREDTPFWRDMRAMEIPESLRDRIALFRDGGIAYQDGADLFRVDSWAQVMIGQRLLPHQHHRMAEIMGAPRLRQVLADMKARVAQQVSLLPTHAAFLRDYCPAKDAA

SEQ ID NO: 84570 - protein, 409 aa, Cupriavidus sp.
  REGION 1..409: note = tr|L2ED66|L2ED66_9BURK Tryptophan halogenase; OS = Cupriavidus sp. HMR-1 OX=1249621 GN=D769_20024 PE=4 SV=1
MKKETVDVLIVGAGPAGSVAAGLLRKRGIGVLVIEKETFPRFSIGESLLPQSMAYIEEAGMLQAVVEAGFQYKNGAAFARGDRYTDFDFREKFSPGWGTTYQVQRAHFDDVLIREAQKQGAEVRFRHVVEAVDVSGAAPVVTVRDPDGNVYQVESRFLLDASGFGRVLPRLLDLESPSNFPVRAAIFTHVADRIPGGSFDRNKIRVSVHPEHVDVWYWTIPFSNGRCSQGVVAEKSFLDQYEGDEMTRLRQLVAEEPGLAKLLKDAEWDTPARQIVGYSANVRSLWGNGYALLGNAGEFLDPVFSSGVTIAFKSASLATACVARALAGETVDWETEYARPLKAGVDCFRAFVEAWYEGSFQKLIFHPNAPTDIRDMISSILAGYAWDLNNPFVTESRRRLSVLEQFCDD

SEQ ID NO: 84571 - protein, 492 aa, Sphingomonas melonis
  REGION 1..492: note = tr|A0A175Y024|A0A175Y024_9SPHN Tryptophan halogenase; OS = Sphingomonas melonis TY OX=621456 GN=AVM11_10315 PE=4; SV = 1
MSDTRIRRIVILGGGTAGWMTAAALSRALAGQGVAITLVESDAIGTIGVGEATIPTIHWFNQIIGLDERQFMAETKATVKLGIEFVGWNGEGSRYFHPFGTFGPPGDGAMFLHRLIRARADGDTASTEAYSLTAQAARAGRFTRPVPDRRSLLSTLGYAYHFDAGLYARYLRGLAERAGVTRIEGMVASVERHDDSGHVRSLTLADGQVVAGDLFIDCSGLRGLLIGETLGVGYDDWSHWLPCDRAWAAPSAAEVGRTPFTRATAAEAGWRWRIPLQHRVGNGYVFASRFQDEEAARASLIAGMDGPPLADPRLIRFTPGMRREAWRANVVAIGLSSGFLEPLESTSIHLIQSGIAKLLSLFPAADCSPLLARQFNRVFGQEMLDVRDFLILHYHATTGRTEPMWQERQAMAIPDTLAEKIAHFRASGRIVLSSDELFRDASWFAVLDGQGVRPGDHNPLIEAVGRDDNLRQLAALRADIAKVTATLLPLPA

SEQ ID NO: 84572 - protein, 505 aa, Streptomyces rimosus
  REGION 1..505: note = tr|A0A0N0S727|A0A0N0S727_STRRM Tryptophan halogenase; OS = Streptomyces rimosus subsp. rimosus OX=132474; GN = ADK43_29785 PE=4 SV=1
MSASYLKAAFGDRLSVTVLESKRIKTIGVGEATFSTVRHFIDYLGLPEHVWMPKCNATYKLGIRFENWHRKGSYFYHPFERLRVVDGFPLTDWWLHRKPGDSERFDQDVFLMSAICDAERSPRYMDGTLFEQDFKEQADPKGRKPERSTLTEQDTQFPYAYQFDASLLADYLCAYSTERGVRHIEDDVVEVARDDRGWISHLRTREHGEVTADLFIDCTGFKGLLLNEALEEPVISFQDTLPNDRAVALRVPVDMEKRGLRPCTTATAQDAGWIWTIPLFGRIGTGYVYASDYTTPEEAERTLREFVGPDAKDVEANHIRMRIGRSRNAWVNNCVAVGLSSGFVEPLESTGIFFIQQGIEQLVKHFPGADWNPQLRDSYNRAIGNTIDGVREFLVLHYRGAGRNDNQYWKDAKTRALPDGLAERLDMWRSKLPTTESIFPNYHGFEPYSYHSMLLGLGGVDLKAPPALALMDDSAAQAEFKLLRAQSQELAKRLPSQYEYLAQMH

SEQ ID NO: 84573 - protein, 516 aa, unidentified
  source 1..516: note = Massilia eurypsychrophila
  REGION 1..516: note = tr|A0A2G8TBY1|A0A2G8TBY1_9BURK Tryptophan halogenase; OS = Massilia eurypsychrophila OX=1485217 GN=CR105_18780; PE = 4 SV=1
MDHRTLNKPQRIVIVGGGSAGWLSAAIIAADHQRGGVQVTVIESPDVAPIGVGEGTWPSMRDTLRRIGVRESDFLTACDAAFKQGSRFDGWVDGGPGDSYYHPFVLPQGFGETDLVAHWQSRHGEVPFADLVSFQPHLCAQGKAPKQASTPQFAAVANYGYHLDAGKFGAFLKTHCVEKLGVRFIADHVDGVRSDAAGDIASLSTREHGELAGDLFIDCTGVRSLLLGQHFGVPLVKQKHVLFNDTALAVQLPYPDADSPIASQTTATAQRAGWIWDIGLPTRRGVGHVYSSAHCSDADAETALRAYIDATSGGVDVRQPRKISFTPGYRERFWQRNCVAVGLSSGFIEPLEASALALVEMAAIAISDDLPADRATMDIIARRFNDSFTYRWERVIEFLKLHYVLSRRNDSDFWRDHREAASIPERLRELLQLWRHRAPSRSDFPRTGEVFPAASYQYILYGMRFDGAATLRGSDSADLADQYFREAATLTRRMLPALPDNRSLLAHIARHGLPSI

SEQ ID NO: 84574 - protein, 517 aa, Sphingobium fuliginis
  REGION 1..517: note = tr|A0A4Q4IUA8|A0A4Q4IUA8_SPHSA Tryptophan 7-halogenase OS=Sphingobium fuliginis (strain ATCC 27551); OX = 336203 GN=EWH10_14690 PE=4 SV=1
MTADIPSPGRIVIVGGGTAGWLSAATFSRTLGMRDVTLVESSEIGIIGVGEGTFPTIRSTLAGLGVGEGEFLRSADATFKQGVLFDGWATGADSYFHPFNMPIGGEDEALLPHWLAMEGQRASWADSVTVQERVIRAGRAPKRVQDPDFSGPMNYAYHFDAARFADYLRTISLAAGVRRIEGMVAHVEQREDGDIAALTLRDGRRVEGDIFIDCSGFRALLIGKTLGSGFVGCGDTLFNDRALAMQVPHDRPDAPIRPYTLATAHEAGWTWDIGLPERRGIGYVYSSRHCSDDEAETVLRRYVRPGGEALTPRQLRFATGYRERQWIGNCIAIGLSAGFFEPLESTGIMLIEAALRMVGDFLLPAGSASDTAARNAAARRFNRLMTARFERIVRFLKLHYCITRRTDTAYWRDNADPASIPADLQDLLAQWRHRPPSRFDFTVDLETFLPPSYHYILYGMGFETRLAGGIGRYPGGQEARAAFARVAGASGAAVSHLPDHRALLDHLRGRQPSARVS

SEQ ID NO: 84575 - protein, 421 aa, Amycolatopsis sp.
  REGION 1..421: note = tr|A0A428Y5E7|A0A428Y5E7_9PSEU Tryptophan halogenase; OS = Amycolatopsis sp. WAC 01376 OX=2203195 GN=DMH03_12170; PE = 4 SV=1
MSATLHGMPERFDVIVIGGGPAGATCAALLAKEGRTVLVLERERFPRYHIGESLIPVGMRPLQELDLLERMEARGFERKYGGSLVWGNRDVPWNFSFMKAAEGTYAYHTRRADLDTLILDRARELGAYVVEETTVKDVLQSDTGRVTGVRFTLRGSAGDYEASASLVVDASGQSRVIGRKFSDITWHNELRNVAVWTYYDNCDRLPGDEWTNILIEGTADGWFWGIPIDKGTMSVGYVTKSDLANADDQSLEQLFLSERDKTTRLKGLLANARQHAGYRTARDWSYTNETFYGDGWVLVGDAAAFVDPLFSTGVALATLAGSSLSKVVHQILEHPAIEEKALDRYAGNYRAFFDEIRNFVERFYDRTKYKEYYYDLAQEVVDPEQLHAPSVDFVTLVSGLSGKHPLLKISLDDLIANVTEP

SEQ ID NO: 84576 - protein, 510 aa, Pseudoalteromonas atlantica
  REGION 1..510: note = tr|Q15QQ5|Q15QQ5_PSEA6 Tryptophan halogenase; OS = Pseudoalteromonas atlantica (strain T6c / ATCC BAA-1087) OX=342610 GN=Patl_3277 PE=4 SV=1
MARLVLNNEKTQSTQNGQKRQRVQKVVIAGGGTAGWMAAASLSKLLGKSLDVTLVESDEIGTVGVGEATIPPIRTLHKLLNIDEQAFMRATNSTFKLGIEFNNWGQKDDSYIHSFGVTGKECWAGEFHHFWLRGKELGIDVPFGDYCYELQASKQGKFAFSANAPMNFAYHLDATLYAKFLRNFCADSVTRIEGKIQQVNKHQESGFIQSLTLESGQVVEGDFFIDCTGFKGLLIEEALHTGYEDWSHWLPCDSAVAVQTQANSDPLPYTRATAHESGWQWRIPLQHRVGNGMVFCSRYTSDDQAKTTLLANLDGVPINEPRVIKFKTGRRRKGWNKNCVALGLASGFVEPLESTSIHLIMTGIVRLMRLFPFDGVCQSTIDEYNEKLTSELHSIRDFIVLHYKVTTRDDSPFWQHCQSMEVPASLAHKIRLFKGTGRVFLDDGDIFRVDSWTQVMLGQGLAPEQYHHIVNEMNKDELTRFLAGMRSAIEQRVAQLPSHQQFIQRYCKAS

SEQ ID NO: 84577 - protein, 582 aa, Xanthomonas translucens
  REGION 1..582: note = tr|A0A0K2ZYI2|A0A0K2ZYI2_XANCT Tryptophan halogenase; OS = Xanthomonas translucens pv. phlei OX=487906; GN = XTPLMG730_2961 PE=4 SV=1
MAQIRKVVIAGGGTAGWIAACALAHQFRDLLDITLIESEQIGTVGVGESTVPPIRSFHRFLQIDEQEFLRAVAGTFKLSISFENWRRPGERYLHPFGLTGQSTLACAFHHFWLEAQRRGMLSELGDYCLETVASRVDRFALQQSPPVNYAYHLDAGLYARLLRRHAERYGLKRVEGKIQQVRQHAESGFVEALLLEDGTLVEGDLFIDCTGFRGLLIEQTLHTGYEDWKQWLPCDRAVAVQTEAVAAPVPYTRAIAHAAGWRWHIPLQHRVGCGLVFSSAHLSDDEARAKLLHDAAAAPIKEPWLVPFRTGRRRKAWNKNVVALGLASGFIEPLESTSIHLTIAAVMRLITLFPSEGIAPSMVDLYNAVSCAEMEHVRDFIILHYHANQRDEPMWQACREMALPDSLQQRLRAWRERAHAWQGADELFRVDSWIHVLLGQGIVPAQHPRWRARCRTSSCSSSSTRSASPSTARWRRCRRSRTSSRAIARPGRRSGRGGLLSRHPHEGQCDGSPPCRQEPCCSARCSRHAAWIWLTGIARSSPDRSKRTASATRMRAPTRRAGSRRAWHGYDRTTPLFEDCCA

SEQ ID NO: 84578 - protein, 501 aa, Pseudoxanthomonas sp.
  REGION 1..501: note = tr|A0A1H7TMM1|A0A1H7TMM1_9GAMM Tryptophan halogenase; OS = Pseudoxanthomonas sp. GM95 OX=1881043; GN = SAMN05428989_2701 PE=4 SV=1
MTHSQIRDIVIVGGGTAGWMTAAALSKVLGGYAKITLVESEEIGIVGVGEATIPMIKLYNQALDLDEDDFIRQTRGSFKLGIEFVDWGRKGESYIHGFGKIGRDLGIVSFHHYWLKMFAQGKAAPLEQYSINTAACHDNRFMRATLDRPNSPLADIAYAYHFDAALYARFLRQYAERRGVVRVEGRVVHAQQRGEDGFITAVQLDNGQSLEGQLFIDCSGFRGLLIEQTLKAGYEDWTHWLPCDRALAVPCASAGPLTPYTRSTAREAGWQWRIPLQHRTGNGYVYSSAHISDDEAAATLLANLDGEALADPKPLRFVTGKRRKFWDKNVIAIGLSSGFMEPLESTSIHLIQSSIARLTAFFPHAGFDPVDIATFNAHADFEFDRIRDFLILHYHATDRDDTPFWNQCRTMAIPDSLQQRMDLFRSSGRIFRDANEMFAEVSWLQVMHGQGMRPASYHPLVDVYPEAKIGPYLDNIRGVIHACVQSMPTHEQFIAANCAIG

SEQ ID NO: 84579 - protein, 506 aa, Xanthomonas arboricola
  REGION 1..506: note = tr|A0A2S6ZV06|A0A2S6ZV06_9XANT Tryptophan halogenase; OS = Xanthomonas arboricola pv. guizotiae OX=487867; GN = XarbCFBP7409_16300 PE=4 SV=1
MIPAPLRNIVIVGGGTAGWMAAAAFARVLGPTFTVQLIESEQLGTVGVGEATVPHIKAFNNLLGIDEAEFVRQTQGSFKLGIEFVDWQRPGSTYVHGFGTQIGHPLGLLPFHQYWIKQHARGKAQPLGAYTLNTVAATRGKFMTSAGDVPPTSPLANIAYAYHFDATQYARFLRSYSEQRGVTRIEGMVERVRLHPETGHVQSLQLASGQVVHGDLFVDCSGFRGLLIEEALHTGYHDFTHWLPCDRALAVPCEKVGPPTPYTRSTARAAGWQWRIPLQYRTGNGYVYCSAHISDDEAAATLLANLDGKPLADPRPLHFTTGRRKQCWNRNVVALGLASGFLEPLESTSIHLIQSGISKLLELFPREGISPMLVQRYNDRLAFEFDRIRDFLLLHYHATERDDSAFWRHCRNMPITPELRTTLDLFRDSGRFYRNAEEMFAEISWVQVMVGQGILPQGYHPLVDQVPDRDAEGFLASVAQTIGHCVDVMPTHQQFIDRYCKAAAPR

SEQ ID NO: 84580 - protein, 544 aa, Melittangium boletus
  REGION 1..544: note = tr|A0A250IS48|A0A250IS48_9DELT Uncharacterized protein OS=Melittangium boletus DSM 14713 OX=1294270; GN = MEBOL_008074 PE=4 SV=1
MNTNQIPDDNDGRVRNLIIVGGGSSGWIAAAYLSKALNFNVNITLIESANIGRIGVGEATIPTIKEELFDFLGVPEEEWMTECKASYKLGIRFQNWKKPASEGGDHYYHNFGEMPVVKGVPLSHVWMYKHQQQGFAKTLDYSCYSASPICDAMKSPRYMDGTKALHYAYHFDALLVSEFLKKWSIARGLTHITDDIIGTDLSETGDIQALRGASGRKYEADLYIDCTGFAGLLIEKALGEPKVTFHDCLLTDRAVAINIPSDSAAEGIRPFTTASAFSSGWTWEIPLNNRSGNGYVYSSAFQTAEDAEREVRAWFGKKADKVDVRHIKFISGRRRRSWVKNCVSIGLSSSFLEPLESTGLYFVYAALYQLMACFPNKDIDPALRNKFNERVSYMVDDVRDFIVLHFCTSPRTDTPYWRANQNELKLPDTLKEALELQKAGIPIRKSYHSNNSLYDSFEAGFDRFWTNSNFQSIFAGVNYLPKQPMPLLRHRPDILLEAERVFDDIQKKTDQMMAQLPSQYDYLASLYTKGKTGEQAVRSVQQAG

SEQ ID NO: 84581 - protein, 503 aa, Xanthomonas melonis
  REGION 1..503: note = tr|A0A2S7DF99|A0A2S7DF99_9XANT Tryptophan halogenase; OS = Xanthomonas melonis OX=56456 GN=XmelCFBP4644_10655 PE=4; SV = 1
MNRIRKVVIAGGGTAGWIAACALSHQFRELLEITLVESEQIGTVGVGESTVPPIRTFHRFLQIDEQEFLRAVAGTFKLSISFEHWLRQGDRYIHPFGITGQSTLVCAFHHLWLESQRRGMPGSFGDYCLETVASRVDRFGIPREPAVNYAYHLDAALYARFLRARSEACGVRRIEGRIQRVVLQPESGDVASLVLEDGQVLEGELFIDCSGFRGLLIEQALQTGYEDWSHWLPCDRAVAVQTEALGPPVPYTRAIAHEAGWRWHIPLQHRVGNGLVFSSKHLSDDEAHAKLLREVAAPAVKEPWMVPFRTGRRLKAWNRNVVSLGLASGFIEPLESTSIHLTISAVVRLLTLFPADGIAPSQVQLFNDVSRAEMEHVRDFVTLHYHATRRDEPLWRQCREMELPESLALRLRAWRERAHAWQGTDELFRVDSWTHVLMGQGLMPEQHHPLTRAFSDHDLQRLLDGIAVPIRQAVDQLPSQQAFIERYCKAGAQVWGARAPVPA

SEQ ID NO: 84582 - protein, 512 aa, unidentified
  source 1..512: note = Rhodobacter lobularis
  REGION 1..512: note = tr|A0A0J9H433|A0A0J9H433_9RHOB Tryptophan halogenase; OS = Candidatus Rhodobacter lobularis OX=1675527; GN = AIOL_000614 PE=4 SV=1
MGKPIKSVTIVGGGTAGWLTAALLQAFGRAQSKDAKPLQINVIESPDIPTVGVGEATTPGIVRTLQNAGLSEKEFFKRCNASFKLGVSFDGWNVDAKGKPISYINPFVKAPNIRGIEIANYFAKFGAGDQDYVGSYAITNDLVRGLKGPRTLGSKEYDQSTGFAYHLDAGRFAGLLTEHCKARGVRHIAENVLEVKQDESGNISELILDKTGSHAVELVIDCTGFRGLIINQVLKEPFIDYSKYLANDRAMAVQIKHKDQTKIEPVTRSTALGAGWSWRVPLYNRIGTGYVYSSAHRTDDEARDEFLAHLGNPEGAEPRIIPMRIGRNRNAWVKNCVAIGLSGGFIEPLESTAIYMIDLAVRWLLTYFPEADYADPLRDRYNKLVDNLYNEVRDFICVHYRLGNRTDSQYWIDAREELELPDGLAENLELWRYNLPSYYDVPFNTIFDAQVYAAVLMGKQVYKTGYAKGNIGAGLNLDQKLWREAHKQIRQNNLARAQRAADHRTLLAELRG

SEQ ID NO: 84583 - protein, 514 aa, Sphingobium fuliginis; identical to SEQ ID NO: 82987
  REGION 1..514: note = tr|A0A4V1W8T1|A0A4V1W8T1_SPHSA Tryptophan 7-halogenase OS=Sphingobium fuliginis (strain ATCC 27551); OX = 336203 GN=EWH10_14915 PE=4 SV=1

SEQ ID NO: 84584 - protein, 538 aa, Burkholderia sp.
  REGION 1..538: note = tr|A0A4S5D5F5|A0A4S5D5F5_9BURK Tryptophan 7-halogenase OS=Burkholderia sp. LS-044 OX=1459967; GN = E9536_23165 PE=4 SV=1
MSNPIKNIVIVGGGTAGWMAASYLVRALQQHTSITLVESAAIPRIGVGEATIPSLQKVFFDFLGIPEREWMPQVNGAFKAAIKFVNWRKSPERSRDDHFYHLFGTVPNCDGVPLTHYWMRKREQGFQQPMEYACYPQPGALDAKLAPCLSDGTRQMSHAWHFDAHLVADFLKRWAIERGVKQVIDEVEQVHLNERGYIASLSTKEGRTLEADLFIDCSGMRGLLINQALKEPFIDMSDYLLCDSAVASAVPNADARVGVEPYTSAIAMNAGWTWKIPMLGRFGSGYVFSSKFTSRDQATADFLNLWGLSDKQPLNQIKFRVGRNGRAWVNNCVAIGLSSCFLEPLESTGIYFIYAALYQLVKHFPDTSFDPRLADAFNAEIVHMFDDCRDFVQAHYFTSSRDDTPFWLANRYDLRLSDAIKEKVQRYKAGLPLTTTSFDDSTYYETFDYEFRNFWLNGNYYCIFAGLGLLPDRSLPLLQHRPESIDKAEAMFARIRREAERLRTSLPTNYDYLRSLRDGGAGLSRSQPGPTLAAPEIL

SEQ ID NO: 84585 - protein, 491 aa, Sphingomonas melonis
  REGION 1..491: note = tr|A0A154NDP4|A0A154NDP4_9SPHN Tryptophan halogenase; OS = Sphingomonas melonis TY OX=621456 GN=AVM11_01840 PE=4; SV = 1
MTPPPSSIAILGGGTAGWMAACLMAKAWPQARITVIESPDIGIVGVGEGSTPQLKALFDALGLAEADWMPAADATYKAGIAFHGWSDDTPAYFHPFAGQIDLHTQGAFFASTRARRHGADVPAHPDRFFLNARLAEAGRAPIAPAHFPFRIGYGYHFDAHKVGHVLRDAAVARGVVHLPRRVHDVVVDTAGQVVALTLDEGDALHAELFVDASGFASAIAQQALGVPFRSFANTLFADRAVVMPTPRQAALPVQTKATALSAGWAWGIPLTSRTGNGYVYASRYLSSDAAETELRRHLGLLDADVAARHLSMKVGRVETSWTANCLAIGLAQGFIEPLEATALHIVQATIEGFIGAYQAGSRDAFNAAIARRYDGIRDYIVAHYRLNRRSGPFWRDVAANDDLSDDLKAIMTAWFTGGDVAAVVEGRGLAGYYAPMSWEVLLAGYGTFPDATRLRTAPPVADLAAIDTLLSGCLLNFPDHQAALDGHRRMP

SEQ ID NO: 84586 - protein, 491 aa, Amycolatopsis sp.
  REGION 1..491: note = tr|A0A428XIX0|A0A428XIX0_9PSEU Tryptophan halogenase; OS = Amycolatopsis sp. WAC 01376 OX=2203195 GN=DMH03_34415; PE = 4 SV=1
MSVEEFDVVVAGGGPGGSTVASLVAMQGHRVLLLEKEAFPRYQIGESLLPSTVHGICRMLGVTDELAAAGFPVKRGGTFRWGARPEPWTFHFSVSPRITGPTSFAYQVERARFDEILLNNARRKGVVVREECTVTGVLEEGERVTGLRYTDPDGDQREVSATFVIDASGNKSRLYSQVGGTRNYSEFFRSLALFGYFEGGKRLPAPYSGNILSVAFDSGWFWYIPLSDTLTSVGAVVRREDAEKIQGDQEKALKALIAECPLISEYLSDARRVTSGKYGELRVRKDYSYHQTSFWRPGMILVGDAACFVDPVFSSGVHLATYSGLLAARSINSVLGGDIDEKTALTEFEARYRREYGVFYEFLTSFYQMNVNEDSYFWQAKKVTNNQHTEIESFVDLVGGVSSGEAALTPADRIVERSAEFSAAVDQMAGGDEDSMVPLYKSQVVKQVMQEAGQEQMRAVLGEDAEPELPLFPGGLVTSPDGMKWLPYHPA

SEQ ID NO: 84587 - protein, 509 aa, unidentified
  source 1..509: note = Planctomycetes bacterium
  REGION 1..509: note = tr|A0A517SXQ5|A0A517SXQ5_9BACT Tryptophan halogenase; OS = Planctomycetes bacterium SV_7m_r OX=2528025; GN = SV7mr_34590 PE=4 SV=1
MSEAVNKAAKPAGKGNHPTRSQVAIIGGSFSASILARILSLKGYSVVLIDAGQHPRFAIGESSTPIADLLLRRLGEEYGLPDLVAMSSYGAWQTSHQRLACGLKRGFSYFDHRGTAQGDAMVESKKGQRSLLVAASPTDQRSDTHWFRSDVDAFLFDQAKRSGVRCLPGSSVVAIDTSPAGRHMLMLQNKASVQADFVIDASGRSAVTAQLLGGQSLLPRLQTNSVSAFSHFTSVASFGDHFNDLHQDQRASHPFHADAAAQHHLLDRGWVWMLRFNNGVTSVGVTAPCDDQPASQVALGEILAAELQGRFSRYPALRPCMRHAKLAEVPGQVLVTGRLQRLNDPVVSDSIVMMPTTAVTIDPLHSTGIAHALSGVQRMAHLLDAGVSTQSLETYRQAVLDEAALIDQMVSLAYHCMSDFPRFCMASMLYFAAAIQCEEQLLAGQWPNAYWMAQDQPFLDAMQICYQLLRSTEEPARILSQMQSVLAPWNQAGLLDPAALNRYAYTATK

SEQ ID NO: 84588 - protein, 517 aa, Pseudoalteromonas atlantica
  REGION 1..517: note = tr|Q15UI1|Q15UI1_PSEA6 Tryptophan halogenase; OS = Pseudoalteromonas atlantica (strain T6c / ATCC BAA-1087) OX=342610 GN=Patl_1939 PE=4 SV=1
MCESGLRLQIPCFNLVRRSMSQPFNIVILGGGSAGWMAANLFAHKWADKLVDKSLTITLVESPDIGIVGVGEGSTPTLKRFFSMLGIGDSDWMPQCNATYKMNIAFENFSPASGNTRYSHPFISQIDTFTQRAFMVNARTRRLGLDTHTNPGDFLLNGVLAKQNKGPHTPANFPFSIEYGYHFDSHLLGAFLQQHAIGLGVDHVQANVESIKQHPNGDIAALHCKEGIEISGDLFVDCSGFSSVLMQKTLGVKFNSYKDNLFNDSAVVVPTPISEHIPVETTSTALSAGWCWKIPLTNRFGNGYVYSSDFVSKHDAERELKNHLQLNENTECRHLSMKVGALEKQWHNNCLGIGLSAGFIEPLEATALHLTQISIEQFILEFEEGDFSNRLQGQFNAKMQFRTERTRDYIVAHYKLNTRNDSEYWRANRNNMHLSESLLQILDVWYKRGDLEAEITRQDLSTHFNAVSWNCLLAGYGAFPALAAKQPGTGDLYKEQNIETFLQGCALNFTSHAGQLF

SEQ ID NO: 84589 - protein, 495 aa, Sphingomonas melonis
  REGION 1..495: note = tr|A0A154NB56|A0A154NB56_9SPHN Tryptophan halogenase; OS = Sphingomonas melonis TY OX=621456 GN=AVM11_01815 PE=4; SV = 1
MTTIVIAGGGTAGWMAAAAFGGLLESGYRIRLVESEEIGTVGVGEATIPQIRLFNQALGLDEDAFLRATGGTFKLGIAFDGWREPGHSYMHAFGDVGRDVGLIAFQHYWLRARQLGLAKPLDAYALNEVAARAGRMHRGGPITAQTLPTMPYAFHFDAGLYAAYLRRFAVNRGVERTEGTIDRVERNGGTGDIAALVLASGERVAGDLFLDCTGFRGLLIEGALETGYDDWTHWLPCDRAVAVPSANVGAPLPYTRAIAREAGWQWRIPLQHRTGNGYVYCSRHLSDDAAAAALLANIEGEAQAEPRHLRFVTGRRKRAWNRNVVALGLASGFLEPLESTSIHMIQSAIARLVKLLPALPIADALRDEYNRQTDFEIERIRDFLILHYWANGRSEPFWKERREADLPDTLRAKIGLWQQAGTITREHEELFTEDGWLQVLAGQGVQAAAYHPLADQIGVEDLGEYMETLELLYRREAQAMPSHADLIARHCAVRA

SEQ ID NO: 84590 - protein, 489 aa, unidentified
  source 1..489: note = Streptomyces toyocaensis
  REGION 1..489: note = tr|A0A081XYT8|A0A081XYT8_STRTO Tryptophan halogenase; OS = Streptomyces toyocaensis OX=55952 GN=BU52_01290 PE=4; SV = 1
MSVETFDVVVAGGGPGGSTVAALVAMQGHRVLLLEKEVFPRYQIGESLLPSTVHGVCRLLGVTDELAAAKFPVKRGGTFRWGARPEPWTFSFAVSPRMTGPTSFAYQVERARFDEILLNNAKSKGVTVREGCSVTAVVEEGDRVTGLRYTDSDGGEHEVGARFVIDASGNKSRLHASVGGTREYSEFFRSLALFGYFENGKRLPEPYSGNILSVAFDSGWFWYIPLSDTLTSVGVVVRREMAEKIQGDREKAYNALIAECPLIAEYLSDARRVTTGNYGELRVRKDYSYHQTKFWRPGMILVGDAACFVDPVFSSGVHLATYSALLAARSINSVLAGDLDEKTAFDEFEGRYRREYGVFYEFLVSFYQMNVNEESYFWHAKKVTNNEHTEFESFVDLVGGVASGETALAASRLAERSAEFAGAVDQMAGGDDGDMVPLFKSHVVKQVMQEGGQVQMKAVLGEDAAPEEPVFPGGLVSSPDGMKWLPYRG

SEQ ID NO: 84591 - protein, 492 aa, Sphingomonas melonis
  REGION 1..492: note = tr|A0A175Y297|A0A175Y297_9SPHN Tryptophan halogenase; OS = Sphingomonas melonis TY OX=621456 GN=AVM11_07150 PE=4; SV = 1
MSGEPIGRVVIVGGGTAGWMAAAAAARFLDDGRRTITLIESEAIGTVGVGEATIPPIRGFNARLGLDEATFLRATGGTPKLGIEFVGWTDGADRYFHPFGTHGRDIEGLNFHQLWLKLRHREGIGGIDDYAMSAVAARAGRFVPPSPDPRSPLSGLEYAYHFDAGLYAALLRRHAEAQGAIRVEGRIVGAERDLRGHVAAVRLEGDRRIEGDLFIDCSGFRSLLLGDTMGVAFEDWSHWLPCDRAIAVPTERTSPLRPFTRATAHGAGWQWRIPLQHRTGNGHVYASAFTGDYEAERVLIANLDATPTADPRGLSFTAGRRRQLWAGNVVALGLAGGFLEPLESTSIHLIQAGISKLFGLFPDMRFTDVERDEYNRLMADQYAAIRDFIILHYAATRRDDTPFWRYVRTMALPDTLARKIALFREKGRIFRYDDELFGIPSWVAVMLGQGIVPDGYDPVVDALDEDRTADALRRMRASNLAMAQQMPMAGSG

SEQ ID NO: 84592 - protein, 511 aa, Sphingopyxis bauzanensis
  REGION 1..511: note = tr|A0A246JVS9|A0A246JVS9_9SPHN Tryptophan halogenase; OS = Sphingopyxis bauzanensis OX=651663 GN=CDQ92_08875 PE=4; SV = 1
MNEAIERIVIVGGGTAGWLAASRLASSPRATAGHLSVTLIEAPDIPTIGVGEGTWPTMRATLAAIGIGEAEFLAACDGSFKQGSRFDGWVTGEAGDRYLHPFTSPPTAPIGGLLAAWQTSAPDLPFAAAMTAQAQVCDLDLAPRQRAMPEYQGAANYAYHLDAGKFAALLASHAVRKLGVRHISDHVVGVARGVDGGIASVATRQHGDVAGDLFIDCSGHASLLIGGELGVEWIDRSDILFNDRALAAQVPVAPGSPIASQTVSTAHAAGWIWDIGLPGRRGIGCVYASRFMDDDAAEAALRAYIARVLPGAPEVSARRLSFPTGHRARFWQGNCLAIGLSAGFIEPLEASAIVLIELSLNALIDNFPASRAAMPIHADRFNELFRYRWDRIVEFLKLHYALSRRPEAYWLEQRNPAHIPPRLAGMLELWRDQPPSIWDFPRVDEIFSAESHQYILYGMGYPVPANMTANDRATGLLAETRQRGRSLAAALPANRDYLDALHPAVSTAAAR

SEQ ID NO: 84593 - protein, 508 aa, unidentified
  source 1..508: note = Paraglaciecola arctica
  REGION 1..508: note = tr|K6XK41|K6XK41_9ALTE Tryptophan halogenase, putative OS=Paraglaciecola arctica BSs20135 OX=493475; GN = GARC_4087 PE=4 SV=1
MNHEKLKIVILGGGTAGWMTANLMAARWKDRNIHFTLIESPDVGIVGVGEGSTPSMQNFFHEIGVEESEWMPECNATYKNGITFEGWTSIPGFEKYCHPFPSQMDIHTFPKFDNNCQLRRHNFDVEAHPDRFFLGSYLSQNQRSPKANHNFPFDHPNGYHFDSNLLGSFLRKKAKQRGVEHLQRHVSGVIQKENGDISSLKFREGEIIEADFFVDCTGFAGLLLQKTLKVPFINLDKVLFNDTAVVVATPVNKDDLNSQTKSTALKYGWAWDIPLTNRTGNGYVFSSRYCSVNDAETEFRTHLGLLDADVNVRTVKWKQGRLEKSWSKNCLAIGLSQGFIEPIEAMALHLVYNSIGHFITEFESGNFSNQNQQQYNSINDRAFDGVVDYILAHYRMNSRRDTDYWRDNAENQNITPSFLAIVQSWLGASQNNLADEIKKYDTGSFFPLASWQILFAGYGVFPPPENVKPQNIGNQSVNMDELDNFIQRCGSNYSSHLESLNTLKQLAK

SEQ ID NO: 84594 - protein, 506 aa, Sphingomonas melonis
  REGION 1..506: note = tr|A0A154NDA2|A0A154NDA2_9SPHN Tryptophan halogenase; OS = Sphingomonas melonis TY OX=621456 GN=AVM11_02220 PE=4; SV = 1
MAGERQRTTRVVIVGGGTAGWMTAAAIARLLPHRAEVHLIESEAIGVVGVGEATLPHIRAFNERLGIPEAEFMARTRATFKLGIEFRDWGAIGDSYIHPFGTFGTGSGAVDFHHYYTRLLREGAELPPLDRLSYACALAREGRFAMPEMDRRSLAGTFGYAYQFDALLFAPYLRGLAEEMGARRSEGIVVDVERDGESGDIVAVTLADGTRIEGDLFVDCSGFRSLLLGEALGEPFEDWSRWLPADRAVAMPCRTETAVTPYTSAIAMPAGWRWRIPLQHRTGNGYVYASDFLSDDAAAAALRGVVEGEALADPRPLRFKAGRRRQSWSHNCVGIGLASGFLEPLESTSIYLVQQAITLLIELFPDGRTSAADRDEFNRVIDLEYDRIRDFLILHYHATTRSDSPFWDYVRTMPIPDSLSEKLELWRRRGRVVKYREGVFLDASWIAVYMGQGIVPQGWDPRADAAPGGDLRRGIGNLAEQIAAEVGRRPGHRAFIDGYCPMADAA

SEQ ID NO: 84595 - protein, 491 aa, unidentified
  source 1..491: note = Amycolatopsis bartoniae
  REGION 1..491: note = tr|A0A557Z6T4|A0A557Z6T4_9PSEU Tryptophan 7-halogenase OS=Amycolatopsis bartoniae OX=941986; GN = FNH07_15130 PE=4 SV=1
MSVEEFDVVVAGGGPGGSTVAALVALQGHRVLVLEKEVFPRYQIGESLLPSTVHGVCRLLGVADELANAGFPVKRGGTFRWGARPEPWTFSFAVSPRITGSTSFAYQVERSRFDEILLNNAKRKGAVVREGCTVTGVLEAEGRVTGVHYTDPGGDRHEVSAKFVIDASGNKSRLYSTVGGTRNYSEFFRSLALFGYFSGGKRLPAPYSGNILSVAFDSGWFWYIPLSDTLTSVGAVVRREDAEKIQGDQEKALNALIAECPMISDYLSGAQRITAGKYGEIRVRKDYSYHQTVFWRPGMILVGDAACFVDPVFSSGVHLATYSGLLAARSINSVLAGDVDEKTALTEFEARYRREYGVFYEFLTSFYQMNVNEESYFWQAKKVTNNQHTEIESFVDLVGGVSSGEAALTPSDRILERSAEFAEAVDRMAGADDGSMVPLYKSHVIRQAMQEGGQVQMTAALGEDAEPETPLFPGGLVTSPDGMKWLPHHPA

SEQ ID NO: 84596 - protein, 501 aa, Alteromonas sp.
  REGION 1..501: note = tr|A0A4P6AK61|A0A4P6AK61_9ALTE Tryptophan 7-halogenase OS=Alteromonas sp. KUL17 OX=2480796; GN = KUL49_10185 PE=4 SV=1
MTVSGLDSSKNQTPVKNVVIAGGGTAGWMAATALSRLLGKSIKVTLVESRDIGIVGVGEATIPPIRTFHKLLGIDEKAFMRATQATFKLGIKFENWREQGHSYIHSFGITGRECWAGEFHHFWLRAKEYGFGGEFGDYCPELIAAKQSKFATSEVMPLNFAYHFDAVAYGRFLKSLACDAGVTHKEGDIEKVLVCPQSGNIQSLRLASNEVIDGDFFIDCTGFKGLLIEQALHTGYDDWRHYLFCDSAVAMQTELTAPPVPYTKSVAHKAGWRWQIPLQERMGNGLVFCSRFMSDEDAIDTLKSQVTGAAINEPRVIRFTPGKRRRGWNKNCVALGLSSGFIEPLESTSIHLIMTGLIRLMRLFPFDGITQSAMDEYNNKFDSEMSAILDFIVMHYKVTQREDSPFWQQCQRMEIPPSLEHKLALFAESGRVFLDDGDIFRVDSWTQVLMGQGMTPSQYHRVADEMSEQSLKQFMAGLKQQVDNHVAKLPSHEAFLTQYLR

SEQ ID NO: 84597 - protein, 505 aa, Xanthomonas arboricola
  REGION 1..505: note = tr|A0A2S6ZWK3|A0A2S6ZWK3_9XANT Tryptophan halogenase; OS = Xanthomonas arboricola pv. guizotiae OX=487867; GN = XarbCFBP7409_14815 PE=4 SV=1
MSRAPIRKVVIAGGGTAGWIAACALSHQFRELLEITLVESEQIGTVGVGESTVPPIRSFHRFLQIDEQEFLRAVAGTFKLSISFEHWRRPGERYLHPFGIAGQSTLVCAFHHLWLESQRRGMPGSFGDYCLETVASRVDRFALLREPAVNYAYHLDAALYARFLRTRSEACGVRRIEGRIQQVTLQPDSGDVASLLLEDGQVLEGDLFIDCSGFRGLLIEQALHTGYEDWSQWLPCDRAVAVQTEALGPPVPYTRAIAHEAGWRWHIPLQHRVGNGLVFSSKHLSDDEAHTKLLRDVAAPALKDPWLVPFRTGRRLKAWNKNVVSLGLASGFIEPLESTSIHLAIAAVVRLISLFPADGIAPSQVQLFNDISRAEMEHVRDFIILHYHATQREEPLWRQCRAMELPDSLALRLRAWRERAHAWQAADELFRVDSWTHVLMGQGMLPEQHHPLARALSDRDLRRLLDGIAQPIRHAVEQMPSQQAFIDAYCKAGASVWGLGSPVVA

SEQ ID NO: 84598 - protein, 521 aa, Xanthomonas melonis
  REGION 1..521: note = tr|A0A2S7DDY4|A0A2S7DDY4_9XANT Tryptophan halogenase; OS = Xanthomonas melonis OX=56456 GN=XmelCFBP4644_13460 PE=4; SV = 1
MDHAPLFDPRQRPVRRVVIAGGGTAGWMAAAALSKLLGRHLQITLVESDEIGTVGVGEATIPSLVTFHRLLEIDEAAFMAATQATFKLGIAFEHWRDVDRHYIHSFGHTGTDHWSAGFHHFWLKGCQRGVARAFGDYCLELRAAEEGRFAHLPNGGMNYAYHLDAGLYARFLRRFSEGFGVRRIEGRIGEVDTDPESGFLTALTLRDGTRVEGDLFVDCTGFAGLLIGKTLGVGSEDWSQWLFADSALAVQTESVGPPVTYTRARADQSGWMWRIPLQHRVGNGIVYSSRYTDQDSARAVLERNLQGRALTEPRALRFTPNQRHRVWEKNCVALGLASGFLEPIESTNIHLIQRGIVRLLQTFPQVIHPVDVAEYNRQAAEEIAHIRDFVILHYHATDRRDTPFWRDCAAMDIPDSLRHRMQLFRESGRVFHRGNELFAENSWVQVMLGQGITPRQHHPVADLMGDTELSQFLQGIRGRVEAALVRLPAHADFLHRYCPAAPPQGTATPLPSPAALGSPAG

SEQ ID NO: 84599 - protein, 498 aa, Sphingomonas melonis
  REGION 1..498: note = tr|A0A175Y3J6|A0A175Y3J6_9SPHN Tryptophan halogenase; OS = Sphingomonas melonis TY OX=621456 GN=AVM11_07160 PE=4; SV = 1
MHGDKRIDVVVVGGGTAGWMTAAALATLVPAAASVHLVESAEIGIVGVGEATLPHLRAFITRLGINEAAFMAETHATFKLGIEFRDFAAIGDRYIHPFGTYGRPLAGVGFHHYWLRRHHAGAARPIGDYATGVMAAEALRFAPPGADPDDLANAYGYAYQFDATRFAPFLRAHAESRGARRTEGKVVAVDRDPETGDVAAVTLDDGSRIAGDLFIDCSGFRALLIGGAMGEDWEDWSHWLPCDRAVAAPCASPPGGIEPYTRATAMAAGWRWRIPLTHRVGNGYVYASDYLSDDAATDALLTALEGLPLAEPRHLRFRAGRRRRSWVGNVLSVGLASGFLEPLESTSIYLAQMAVTQLIEHFPDTRVTDADRDGFNRLVDAEYDRIRDFLILHYHATTRDDSPFWNHVRTMTIPDSLADKMALWRRTAQVSRYSHGLFLEPSWIAVYLGQGIVPDGWDPRADLPDAAALDRALAGLHRGIAAAVAAMPDHKTYLAGAA

SEQ ID NO: 84600 - protein, 514 aa, Streptomyces sp.
  REGION 1..514: note = tr|A0A255PEY5|A0A255PEY5_9ACTN Tryptophan 7-halogenase OS=Streptomyces sp. FBKL.4005 OX=2015515; GN = CFC35_09880 PE=4 SV=1
MLGSVVIVGGGTSGWMTAAYLRRALGDKVSVTLVESKRIKTIGVGEATFSTVRHFFDYLGMAEHEWMPRCNATYKLGIRFENWREKGHYFYHPFERLPVVDGFPLTDWWLAKQPGPRFDQDVFLMSSIVDNERSPRFLDGTLFEQEFVERAGDPARTTLSEQSTQFPYAYQFDASLLADYLCEYATERGARHIEDDVLDVVRDERGWISHVVTKEHGDLTGDLFIDCTGFRGLLINQALEEPFVSYQDTLPNDSAVALRVPVDMEKRGLRPCTTATAQDAGWIWTIPLYGRIGTGYVYASDYCGPEEAERTLREFVGPEAGDLEANHIRMRIGRTRQSWVNNCVAIGLSSGFVEPLESTGIFFIQHGIEQLVKHFPDAGWDPGLRSSYNTAVARVMDGVREFLVLHYHCAARADNAYWRDAKTRALPDGLAERLEQWRSKLPSTDTIYPHYHGFEPYSYLSMLLGLGGLELKPANAVSLMDDSRAADEFRRIKDLSHDLVKRLPSQYEYLSQMR

SEQ ID NO: 84601 - protein, 507 aa, Shewanella xiamenensis
  REGION 1..507: note = tr|A0A073KJV2|A0A073KJV2_9GAMM Tryptophan halogenase; OS = Shewanella xiamenensis OX=332186 GN=SXM_2904 PE=4 SV=1
MTIRKIAIIGGGTSGWLAANHLGRALKGRSGLSISVIESPDIPIIGVGEGTVPSIRKSLQSFGISESEFIRTCDVTFKQSIKFVNWLDQTRHGKHNFYHHLFDIINLHQGDAVSTWLAEKSGHFADFISPQHLACEAAKAPKLITTPEYVGILGYAYHLNAAKFAKLLAKNAIEKFNVEHILTTVHDVCLGVDGAIESLQTERGNLSFDLYIDCSGFESILLAKALKVPFISKAQQLFIDTALVAQIPTQPADVIPPYTKATAHQAGWIWDIALTQRRGTGFVYSSVHMNQTEAEQKFDRYLGGKLADIPHRKIPMKVGYRQQFWVKNCVALGLAQGFLEPIEATSILLTDFSARFLAERFPANKDEVDYLSMRFNRTVNHAWERVVEFAKLHYCLSDRTDSAFWLDNQREETIPEPLKERLNMWKSFSPIAEDFPSKFEVFNLDNYLYVLYGMKYPTQPHDRGLVAKANLNAYMSNMSNVKRQMFEGLPEHRELIDKICTYGLQAI

SEQ ID NO: 84602 - protein, 506 aa, Pseudoalteromonas atlantica
  REGION 1..506: note = tr|Q15XQ7|Q15XQ7_PSEA6 Tryptophan halogenase; OS = Pseudoalteromonas atlantica (strain T6c / ATCC BAA-1087) OX=342610 GN=Patl_0803 PE=4 SV=1
MRTSLPFKKIIIIGGGTAGWMSACYLAKMWHQHDVEIKIIESDAIGTIGVGEGTTPSIKGFFEQLGIAAKEWMPACNATYKTGIRFVNWSSDPNYKSYFHPFYSQLDEYFQHEFFQNIQLKHRGFDVHAHPDQYLLASELATQRKAPIEPEHYPFDMAYAYHFDATLLAQFLKKKALEWNVTHQVATISEVKQKDDGSIASVATEAGEEFEADFFVDCSGFRSLLLGKTLNVPYNSFADSLLNDSAVTIVTDREDTTPSMTLSTALSSGWAWRIPLTNRFGNGYVFSSRFQSPEEAEEEFRQHLGLPEGTQFNHLKMRVGHFAKGWDKNVLAVGLSQGFIEPLEATALHFATQSVVDFVSAIDNSTDHDGCSNQAAYNNKLMDRFSCVRDYIELHYLANSRNDTAYWKAARSHTPSPRLQRILQTWHQGQSVPRVLDEESVSLQLFGHESWLCLLAGKGVFPKSEQPLEALPAPMRIDMQKIKHFVETSAKHYPPHDDALAELTLG

SEQ ID NO: 84603 - protein, 538 aa, Pseudomonas sp.
  REGION 1..538: note = tr|A0A3G7A308|A0A3G7A308_9PSED Thioredoxin reductase; OS = Pseudomonas sp. CMR5c OX=658630 GN=C4K40_3865 PE=4 SV=1
MNKPIKNIVIVGGGTAGWMAASYLVRALQQQVDITLIESAAIPRIGVGEATIPSLQKVFFDFLGIPEREWIPQVNGAFKAAIKFVNWRKSPDPSRDDHFYHLFGNVPNCDGVPLTHYWLRKREQGFQQPMEYACYPQPGALDGKLAPCLPDGTRQMSHAWHFDAHLVADFLKRWAVERGVNRVVDEVVEVQLNDRGYISTLLTKGGRKLEADLFIDCSGMRGLLINQTLKEPFIDMSDYLLCDSAVASAVPNDDARDGVEPYTSAIAMNSGWTWKIPMLGRFGSGYVFSSKFTSRDQATADFLKLWDLSDNQSLNQIKFRVGRNKRAWVNNCVSIGLSSCFLEPLESTGIYFIYASLYQLVKHFPDTSFDSRLRDAFNAEIVYMFDDCRDFVQAHYFTTSREDTPFWLANRHELRLSDAIQEKVQRYKAGLPLTTTSFDDSTYYETFDYEFKNFWLNGNYYCIFAGLGMLPDRSLPLLQHRPESIEKAEAMFASIRREAERLRSSLPTNYDYLRSLRDGDAQVSGNQRGPTLATREGR

SEQ ID NO: 84604 - protein, 513 aa, Pelagibacterium sp.
  REGION 1..513: note = tr|A0A1E4DZJ0|A0A1E4DZJ0_9RHIZ Uncharacterized protein OS=Pelagibacterium sp. SCN 63-126 OX=1660123; GN = ABS74_07055 PE=4 SV=1
MDIPAHFVIVGGGTAGWIAAFIIQDEARRRGLNFRISVVESSRIPTVGVGEATTAAFRVLLKHFGIDEFEFFRKTDASFKLGIRHEDWRRKGFTYYGPIDDPHQVVQSPPGAPSDYLNVYAVAAGRAVQDMHLFQPLLEQKKAPYGRKADGSLIPLGPFHHAFHFDQALVGKFFASKSKGVDKVDAQVEGVERDGETGDITALVLDDNARLEGDFFIDATGFRKQIIVKALEAPWVSYAHELPVNRALPFWVDVKPGEELANYTRAWAQSSGWMWQIPTRTRYGCGYVYSDEFSTPEQAKDEVERVLGHEIEVRGDIRFQIGRLEKAWIGNCVAVGLSSSFLEPLESTSIHGTIVQMMLFAQRYMDHPNRISPAARDDYNARVGRQVDDFRTFVNTHYVTERDDTPFWREVRANRIHPETRERLARWSREMPRNDHFPNYLGGLPHIETQLHYPVLNGLGLLDQNLARREMEADPKLRRFAQQTFDGLVKEYRAAAKQALGHAEFLRIVQEMG

SEQ ID NO: 84605 - protein, 494 aa, Acinetobacter sp.
  REGION 1..494: note = tr|R9ATW4|R9ATW4_9GAMM Uncharacterized protein; OS = Acinetobacter sp. CIP 110321 OX=1217699 GN=F896_03054; PE = 4 SV=1
MLNLRGIQRVCIVGGGTTGWFSALRLRQIFNQSVEVVVISAPEIPIVGVGEGGVVNLLDILAKLEINIKDFIDNTGSTLKLGFRYEQWNTGKKEDYYYHLFPNIDTPEMWDENGYYPFLSLLLNNGLNINSYMEALELCENKVPFNKVIDLLISGNHNFTASLHFDTFKVGQYLKEIALQRSIIHVEDKVEDFCLDAEKGSVTSIQCQNRKIDCDFVIDASGFSRLLIGGKFKTDWISFADTLIMNRALPFHLSHKKEIELVTRATALSSGWVWQIPLQERIGAGYVFNDQFLSDDQAHDEVEKWLGEKIDPIRVIKFEAGYFQKVWVKNVVALDLASGFVEPLEATSIGQMVTQLETLSNFILHNHGVISEQNINYFNKQNGQYWRGIGDFIRMHYDTPREDTPFWKEMKNVPISPEYKELKECWKHRTPRLIDFAEYSLSGTLMFGVPNWFAVGVGTGVIKPESTAAELYALSIDQKRKLAQHLHKMKQKLS

SEQ ID NO: 84606 - protein, 503 aa, Massilia timonae
  REGION 1..503: note = tr|K9DI63|K9DI63_9BURK Uncharacterized protein; OS = Massilia timonae CCUG 45783 OX=883126; GN = HMPREF9710_01720 PE=4 SV=1
MENQAIKDIVIVGGGTAGWMTAAALSSMLNGRYHIRLVESDEIGIVGVGEATIPMIQRFNRVVGIDENEFMRETMGSFKLGIEFVNWGRIGERYMHGFGRMGQDLATVPFEQYWHKMRGLGKAAPLEEYSITRMAAKAGKFMPARQDVPNSPLRDIAYAYHFDASLYAKYLRKLSEARGVVRIEGKIARATRREPDGFVDAVELDNGQRIEGELFIDCSGFRGLLIEQALETGYEDWTGWLPADRALAVPCESAPAITPFTRATAHKSGWQWRIPLQHRTGNGHVYCSRFISDDEAAATLLANLDGRALAEPRLIKFQTGMRKRAWNRNVVAIGLSSGFLEPLESTSIHLIQSSIARLVELFPDRRFSDVDRDEFNRQSRFEYERVRDFIILHYHLNQRTDSAYWTECANMAIPDTLRQKMDLYRSRGKVVRVDNELFSEVGWLQVFEGQNMPLDGYHPLADTQSEADIAEYMESVREVIRKCVDVMPSHDEYIARHCAARKA

SEQ ID NO: 84607 - protein, 515 aa, Sphingomonas melonis
  REGION 1..515: note = tr|A0A175Y043|A0A175Y043_9SPHN Tryptophan halogenase; OS = Sphingomonas melonis TY OX=621456 GN=AVM11_10420 PE=4; SV = 1
MLSEPSMTDAHPNPPLKTITIVGGGTAGWMAAALLSRLTLGAYTIRLIESEEIGTIGVGEATIPAIRTFNGLAGIDEFEMVRATQATFKLGIEFRNWGAPGDSYIHGFGKIGQDLYWLHCHQFWLKERAAGRAKHLDHYALNTLAARMNRFAMPDPSNPQSPIADIDYAYHFDASLFARFLRGRAEAAGVERIEGRIVAANRRGSDGFLDHVVLADGSRVDGDLFVDCSGMRGLLIGDAMGVGYEDWSEWLLCDRALAVPSARGTGPLTPYTRATAHGAGWQWRIPLQHRTGNGHVYASRFVSDEAAAATLLEHLDTPALGDPRPVRFRPGKRHRAWEKNVVALGLAGGFLEPLESTSIHLIQTGILRLIALFPGRGFNAADTDEYNRQTDFEYRDVRDFIIAHYKVTAREDTEFWRYLKHMPVPDSLTERLELFRSSGRFFMHAKAELFREESWVQVLLGQGLQAHHDPMVDMIPAEHTTAFLKDVEDVVADVAAGLPTHEAFIARHCQAPKVG

SEQ ID NO: 84608 - protein, 516 aa, Streptomyces noursei
  REGION 1..516: note = tr|A0A1B2GPI1|A0A1B2GPI1_STRNR Tryptophan halogenase; OS = Streptomyces noursei ATCC 11455 OX=316284; GN = SNOUR_12610 PE=4 SV=1
MLSSVVIVGGGTSGWMTAAYLRAALGTSVNVTVIESKRIKTIGVGEATFSTVRHFFDYLGLSENDWMPKCNATYKLGIRFENWRAKGHYFYHPFERLRVVDGFPLTEWWLNKKPSDRFDQDVFLMSEICDTMRSPRYLDGTLFEQDFVEHGGSMDPERSTLSEQATQFPYAYQFDASLLADFLTEYATTRGARHIEDDVVEVVRDERGWISHLKTREHGELAGDLFVDCTGFAGLLLNKTLGEPFVSYQNTLPNDSAVALRVPHDAERTRLRPCTTATAQEAGWIWTIPLFERIGTGYVYASDYTTPEEAERTLREFVGPQAADVEANHIRMRIGRSRHSWVNNCVAIGLSSGFVEPLESTGIFFIQQGIEELVKHFPDAKWDPKLRDSYNRVVANTMDGVREFLVLHYRTAARNDNAYWRDAKTRELPDGLAARLEAWQSKLPTEETVFPHYHGFEPYSYHAMLLGLGGLDVKPAPVLAHMDDSRAAQEIQRLKDQARDIAKRLPSQYEYLAQMH

SEQ ID NO: 84609 - protein, 261 aa, Streptomyces sp.
  REGION 1..261: note = tr|A0A3R9W7B3|A0A3R9W7B3_9ACTN Tryptophan 7-halogenase (Fragment) OS=Streptomyces sp. WAC06614; OX = 2487416 GN=EF918_34710 PE=4 SV=1
MEESTPPAVVVIGGTLTAWIAATRLATAFDGTVPITVLDTAHRPSSQVTILRPGLQRALFDPLGVPEATWMRACDASFSAAVKYTARPGSETPVYLPHHPEIPSCEGFPLFDAWALDRACGRTVEPLDRACFREPPLMDAKKSPRWLDGRAAIPYGWHADTTMLVHFLRRKAVRDRGVRLVGGDLLGGLRAPDGTLTAVHTTRGTLPGTLFLDCTGEDRLLIDGLLAEPFLDDSCRVPTDSSVTLTSPHDTTHAIAPYTTV

SEQ ID NO: 84610 - protein, 494 aa, Sphingomonas melonis
  REGION 1..494: note = tr|A0A154NBI6|A0A154NBI6_9SPHN Tryptophan halogenase; OS = Sphingomonas melonis TY OX=621456 GN=AVM11_02215 PE=4; SV = 1
MPDGGRGVTQDRAIRSILVAGGGIVGWLAAAALKRRAPFLAVTLLDAAPSPNALADRIAYTLPSLAGFHADLGIGDEDAVVRTGAGYRLGTRFVGWGRDDADYVHAYDHYGQAFGATAFHLHWLRAEREGAVPRYDAFAPAAALGRAGRYAPPTPGTIFARHQPGLTLDLPRYTRMIRAFAAHVGVDVVAGEIGDIARDGRRGIAAVALADGRQLAADLYVDATGPEARLRDAIDTARDDWGAWLPCDRVMLADGPPAEPPLLTPVTAHAAGWSWNGGTQRGIVYAADRLADDDAVAMLGTAGAAPVIIRPGTRREPWRGNCVAIGDAATAIDPLEWCNLHLALSAIDRLIAMLPDRDMAPVEAADFNRQTLAEAERVRDMLALHYRATARPEPMWRAVAFAAPPDSLAHTLRQFEERGRLPFYGEETFTRDGWAAVLIGQGIRPRRIDPLADAVPLADAHAAMHGITDAIAAALPHAPTHAAWLAAQARRLAR

SEQ ID NO: 84611 - protein, 497 aa, Pseudoalteromonas atlantica
  REGION 1..497: note = tr|Q15P71|Q15P71_PSEA6 Tryptophan halogenase; OS = Pseudoalteromonas atlantica (strain T6c / ATCC BAA-1087) OX=342610 GN=Patl_3817 PE=4 SV=1
MAAPIRKVVIAGGGTAGWMTAAMLSKVLKEQVEVVLVESEEIGIIGVGEATIPPIHTFNTYLGLDEKEFLRETKATIKLAIKFENWRVKDESYYHTFGAPGTNMGFCSFQHYWLRAKQAGMTTPLWDFDLNYLCCEQQKFNKINTQNPVYEMQYAYHFDSGLYGQYLRKLSEKAGITRIEGKIEHVQRDEPSGFITGLQLHSGQQIEGDLFIDCTGQRGLLIKGAMGVEFESWKDYLPADTALAVPSERFERTLPYTRSIAHASGWQWRIPLTHRNGNGIVYSSSYLSDEDAHQTLMSNLDSKPLDEARKIQFQTGRTTQQWHKNVVSVGLSSGFLEPLESTSIHLIQSAIVRLLKMFPNETIEQSVIDAYNEESKAEFATIADFIILHYHVNERNDSDFWKDRREMPIPERLKQKIALFKSSGAIFNEPLDIFRDASWLQVMLGQGIEPQGYHPAANVPSKKELLAVMQKIQTAKQQPLGQMLSHDEFLARYTKQG

SEQ ID NO: 84612 - protein, 503 aa, unidentified
  source 1..503: note = Massilia eurypsychrophila
  REGION 1..503: note = tr|A0A2G8TD14|A0A2G8TD14_9BURK Tryptophan halogenase; OS = Massilia eurypsychrophila OX=1485217 GN=CR105_18765; PE = 4 SV=1
MTTNRNAIVPKPIRRVVIAGGGTAGWMAAAGISKVLGKRLDIKLIESDEIGTVGVGEATIPTLLNFHGLLEINEQEFMAATQATFKLGISFENWRAAGEDYIHSFGSTGIDHWTAGFQHFWHKGRERGLAGDYGDYCLELKAAQANRFAHLPKSGMNYAYHMDASRYAKYLRKFAEGFGVERIEAKIARALRDPASGDITALLLDSGTLVEGDLFIDCTGFRALLIGQAMGQPYQDWSHWLYCDSAIAVQTEAVREAVPYTRSIARESGWQWQIPLQHRVGNGIVFSSRYIDDDAAQASLMANIDGAVLTQPRVIKFQPGQRQQTWTGNCVALGLASGFLEPIESTSIHLIQRGIVRLMQMFPTDGIFQSDIDEYNRQTTTEIEHIRDFIILHYHVTNRRDTPFWRDCAGMEVPPALRRRIDLFADSGRVFRVPNELFAENSWVQVMLGQGIHPRQHHQSADLMGDDELHGFLAGIKGSVDRTVAQLPGHEAYVARYGSSNPT

SEQ ID NO: 84613 - protein, 514 aa, Sphingobium sp.
  REGION 1..514: note = tr|A0A013VSN8|A0A013VSN8_9SPHN Tryptophan halogenase; OS = Sphingobium sp. Ant17 OX=1461752 GN=BF95_05485 PE=4 SV=1
MVHPVRNIVIVGGGTAGWLTAGIIAARHRTRIGQGFSVTLVESPNTPIIGVGEGTWPTLRTTLSRMGVSESDFFRECDAAFKQGARFDRWTTGAVDDGYYHPLMLPQNFGQVNLAPHWLASNQGESFCDSVSAQGRICDDGLAPKTIATAEYDALANYAYHLDAGKFAPFIQRHCCEKLGVRHVLADVEQVLMHENGDIRAIQTAQAGEIEGDLFVDCTGFKALLIEGAMHVPFKDCNDILFCDTALAMQVPYERPDSPMASHTISTAQTSGWIWDIGIQTRRGVGHVFSSSHISDEEAERELRAYIGPAADGLNARKIKIRSGHRETFWKGNCVAVGLAAGFLEPLEASAIVLIELSAKIIAEQMPACREVMDIISSRFNATTHYRWGRIIDFLKLHYVLTKRTDSDFWRDNVRDETIPDRLKELLLLWRYQSPWFHDEFDRAEEVFPAASYQYVLYGMGYHTEVDPASLSRDHRLADRARRENAALTDKLCAGLPRHRDLINKIVAHGLPPV

SEQ ID NO: 84614 - protein, 508 aa, Shewanella loihica
  REGION 1..508: note = tr|A3QBY6|A3QBY6_SHELP Tryptophan halogenase; OS = Shewanella loihica (strain ATCC BAA-1088 / PV-4); OX = 323850 GN=Shew_1113 PE=4 SV=1
MDIKRILILGGGTAGWLAANHLGKALEHRQDVTITLVESPDIPIIGVGEGTVPAIRQSLKRFGISESEFIRRCDVTFKQSIKFVNWMDKDRHGAGNFYHHLFDMPSPLGEDLTQHWLDNTNTAYGDMVSPQHKVCEAGRAPKRITHSEYEGALGYAYHLNAAKFAKLLAENAIRRFNVEHIMANVQEVTLRENGEIASLETDCRGSIGADFFIDCSGFESLLIDKTLKVPFVDKSHQLFADKAIAVQVPIDENEAIPPYTLATAHQAGWIWDIALTHRRGVGFVYSSKYMDDDTALNKLSRYLGQDIAQYQYRVLPMKLGYRREFLHKNCLSLGLAQGFLEPLEATSILLTDFAAGFVANRMPKDSEALALLSEQFNQVMTYAWERVVEFIKMHYCLSDRSDAPFWVDNRDSETIPSELATRLKLWQNHYPIRQDFFSKFEVFDLENYLYVLYGMHYPTAPQVAAKDRREAWQAQARQIASVGEHLMKELPEHRELLEKIAVYGLQKC

SEQ ID NO: 84615 - protein, 510 aa, Alteromonas sp.
  REGION 1..510: note = tr|A0A4P6A4U4|A0A4P6A4U4_9ALTE Tryptophan 7-halogenase OS=Alteromonas sp. KUL17 OX=2480796; GN = KUL49_12605 PE=4 SV=1
MNHSSHTSQKQRIVIIGGGTAGWLTAAIVAAKHKVAVGECGLDITLVESSDIPTVGVGEGTWPTMRNTLKDIGLSEKEVFRRCSAAFKQGGKFVNWVNGDGDFYYHPFTVPLGYGRVEMAPYVGDIANFANATNFQQHVCERNMAPRTLSEQEYSSAQSNYAYHLDAGAFADMLRDFSKTELGVKHIVATVESVAATSNEHIESVTLNNGMVLHADLFVDCSGFRSLLLGETLGESVISTDDVLFNNSALALHVPHEEDFEIKPYTQATAQEAGWIWDIGLSSRRGVGHVYSTDFTTDERAEEVLRQYVGDKHGDLKARTIRFNSGYKKRIWKGNCIGVGLSAGFVEPLEATALMLIEISARYIAEQMPLPESAMPIVSQRFNKQMNYRWQRIIDFLKLHYIFNQRSEPYWVANRDAASIPDSLKEDLEIWKYRGPQIADFSAAIELFPAASYQYVLYGMGFSPDFSLQSHFYNERDLADKVIQQNQLITQQKLSSLPNHRDYIEQWLAS

SEQ ID NO: 84616 - protein, 491 aa, Alteromonas sp.
  REGION 1..491: note = tr|A0A4P6AG01|A0A4P6AG01_9ALTE Tryptophan 7-halogenase OS=Alteromonas sp. KUL17 OX=2480796; GN = KUL49_02315 PE=4 SV=1
MDTSVMKVTILGGGTAGWMAAALLSKTFRSIEITLVESEDIGTIGVGEATIPSLHFFNDIMHIRSTEFAKATAGTFKLGIQFENWKAKGEHYFHGFGTTGAGMWAAGFHEYWKRGLSLGISQPFGAYNLEGVAAKQGKFAHVQGGPNFAYHLDAGLFAQKLRIEAQKLGVRRIEGKVSSVAKSEENGYLTHLVLETGELISGDLFIDCSGFAGLLIKGALDTPYVDWSHYLPMNRAIPLQTSLTSPPAPYTRAIAHEAGWQWRIPLQQRMGNGIVYCDDYLSDDEALKRLINDVEGEILTEPRVIKFVTGHREKLWTKNCIALGLAGGFIEPLESTAIHLIQQGLMQLIKYFPANGINPLEVDLYNDYMLNDYRDIRDFIVLHYCQTERDDSDFWRYCKNLTLPESLSHRMKLFSETGRFVQRKEEIFSDSWLQVMIGQGLIPLQHHPLADEMSEQDLAQFLKATESTIIEQVNKLPSHEEYIRRFCLSQY

SEQ ID NO: 84617 - protein, 519 aa, Pseudoxanthomonas sp.
  REGION 1..519: note = tr|A0A1H7W704|A0A1H7W704_9GAMM Tryptophan halogenase; OS = Pseudoxanthomonas sp. GM95 OX=1881043; GN = SAMN05428989_3268 PE=4 SV=1
MLDKVVRHVVIVGGGSAGWLTAAVLAAEHRNADGPTLQVTLLESPDVPTIGVGEGTWPTMRDTLRKIGVRESDFVRECDATFKQGSRFARWTHDEASDAYDHPFVLPTGYGETNLVAGWLPHAGQVGFAECVSFQPHLCAAGRAPKQLATPEYAAVANYAYHLDAAKLGVFLRRHCIEVLGVRHVSDHMLGVNAHDNGDIASLQTRDHGALEADLFVDCTGMRALLIGEHYGVPRVSCSEVLFNDRALAVQVPYATPDAAIACQTLSTAQRAGWIWDIGLSARRGVGHVYSSAHTSDDEAEATLRRYIEASGGPRAEQVGSPARLMIQPGYRQTAWHRNCVAIGLSSGFVEPLEASSLVLVELAATMLSEQLPATRAAMEPLARRFNDSFAYRWQRVIDFLKLHYVLSQREDSDYWRDHRRDDTLTDSLRTLLALWKQQPPSRYDLPRIEEVFPSASYQYILYGMGFRPEPRAARRDDDPARAEGYFREAAELARRMLPALPTHRALVDHIKAHGLSTL

SEQ ID NO: 84618 - protein, 516 aa, Sphingomonas sp.
  REGION 1..516: note = tr|A0A4R2RXY2|A0A4R2RXY2_9SPHN Tryptophan halogenase; OS = Sphingomonas sp. PP-CE-1G-424 OX=2135658; GN = C8J43_103543 PE=4 SV=1
MRKRILIVGGGTAGWLTAGYLAKRLGADLAGGVSITLVESRDIGILGVGEGTFPTIRRTLATIGIDEAELVRRCGATFKQGAKFVHWRHEPGKGRTDHYLHPFQIADASDGLDLLPYWLLGYGGPDNWDEVSNPQKKAADQMRAPKLATNPDYVGPLNYAFHFDAVALAGLLREQGVKNGVRHLTDTVTEVLLDTDGAIGGVRTEQNGLLDADLYIDCTGFRAELIGKAMKIPYRSCRDVLFCNRAITAQLPYARRDEPIASFTISTAQEAGWIWDIGLDRRRGIGHVYSSDHSDDETAERVLRGYLGDGGDEADVRHFKFDAGYREVNWYKNCVAVGLSSGFFEPLEATGIAFAEVSAGMIANLFPWGGDYETSARQFNANMLRRYERALDFIKLHYCISERRDTAFWRDNVADSSVPDSLLELLDRWRFRPPNELDIDGQVDIFTDASWQYVLYGMGWKTDLSAKAGALRYPDDARRAFAEVQRQAQYAIANLPSNRTLVDYAQTHRFGARAPA

SEQ ID NO: 84619 - protein, 518 aa, Pseudoalteromonas elyakovii
  REGION 1..518: note = tr|A0A558I2H8|A0A558I2H8_9GAMM Tryptophan 7-halogenase OS=Pseudoalteromonas elyakovii OX=81037; GN = FQP81_09265 PE=4 SV=1
MNQQNKEIKTVVVVGGGIAGWLTAGRLAADHKSNTPDGLNVVLVESPNVPIIGVGEGTWPTMRSTLIALGISETDFIRECEASFKQGAKFAKWVDGSDDDFYYHPLVLPQGFSKTDMAGHWLNNTAESTSFSNAVCYQEAICEQGLAPKTIRTPEYAAIANYAYHLDSAKFAVFLQKHCTQQLGVKHILADVTQVNSAKNGDIASVTTKQQGEISGDLFIDCTGFSSLLLGEHYKVPFQPCDDVLFIDTALAVQVPYEDENDSIASHTISTAQEAGWIWDIGLQHRRGVGYVYSSKYSTESQAREKLREYVGDKIESLTIRKIPIKSGHRSHFWQNNCVAVGLSAGFLEPLEASALVLVEMSAQMISEQLPHTRDIMDITAKRFNETFTYRWGKIIDFLKLHYILSTRDDNAFWSDNRDPKTIPQSLQDLMKLWQYRAPADHDFTSNNEVFPAASYQYVLYGMGFRSDYSTTAYMLEDTVFAKSQFDKNKSMINQAVTNLPSNRELLNKVKNHGFSTI

SEQ ID NO: 84620 - protein, 514 aa, Pseudoalteromonas luteoviolacea
  REGION 1..514: note = tr|A0A167B2N0|A0A167B2N0_9GAMM Uncharacterized protein OS=Pseudoalteromonas luteoviolacea NCIMB 1942; OX = 1365253 GN=N482_02290 PE=4 SV=1
MIKKIVIVGGGTAGWLAANHLAKKLKPYNTSQVEITLIESPDIPTIGVGEGTVPMMRSTLQYFGISETQFIRECDVTFKQGIKFVNWLNNPEVRQHAYYHPFDYPFLEKFDLSAYYLLGAFEDFGSYSELVGFQSHVCNASLAPKSITHTEFQGVSNYAYHLDAGKFSSMLQKHATEVLGVNYISATMKHANLGVNGEITSIETLEAGEIEGDFFLDCTGFSAKLSSDVLNVPFVDKKDTLFVDRALAIQVPYDKENDSIPSYTVSTAQKNGWIWDIGLTSRRGIGHVYSSSHTSDEQALLDLSKYLKMPAEQVDARKISMRIGYRQEAWTKNCVAMGLAQGFVEPLEATGLLVFDITARMLAEQFTFEHKAMEANAKAFNRRVCHMWDKVIDFIKLHYCISKRSDSQFWLDNRSTSSIPESLQEKLTLWRYQIPKAYDFSSTLEVFNLENYLYVLYGMEFDTDISALSCIYQQKELARKEVAEISRYAQSLDKQLEPNRALLEKINQFGLSKV

SEQ ID NO: 84621 - protein, 405 aa, Sinorhizobium sp.
  REGION 1..405: note = tr|A0A249P538|A0A249P538_9RHIZ Tryptophan halogenase; OS = Sinorhizobium sp. CCBAU 05631 OX=794846; GN = SS05631_a45620 PE=4 SV=1
MFGGSGIPEIECRVGGFFPLLSARIAAGENLHTCIPGFELITKKASQVEIDELLATGESGLYPSFHFNHAGFERYLRRVGLARGITSRRAVVHGMRLDDRGHVNAFQLGGEELEVDFAVDASGFARLGLGKVFNTRWCSFANVLPTDRAIIFELEPRASSPVTRATAMKAGWMWEAPLNRSISAGYAFSSRYADAAMAIAEVENHYGFRVEAKHELSLDQGYFSTAWVNNFVALGTASGCVEPLEAALAAYTFEALRNLERILANGSGIVPARAIEGYNSANARCWTGVRDFLRLHYDSKRIDTPFWRDLAAAELPEGYANLRACFQKRTPRFIDIQPYVGSGWQSLFHEIDWISVAVPLGVVPQAAACAELRRLSTESRSEVQAYVDRLKGTIAKISSTRGCMH

SEQ ID NO: 84622 - protein, 409 aa, Cupriavidus pinatubonensis
  REGION 1..409: note = tr|Q46PG8|Q46PG8_CUPPJ Monooxygenase, FAD-binding:FAD dependent oxidoreductase:Tryptophan halogenase OS=Cupriavidus pinatubonensis (strain JMP 134 / LMG 1197) OX=264 198 GN=Reut_B5621 PE=4 SV=1
MEDQFADVLIIGAGPAGSVAAGLLRRRGIGVLVLEKETFPRFSIGESLLPQSMEYIEAAGMLRAVVEAGFQYKNGAAFARGDRYVDFDFRDKFSAGWGTTYQVQRADFDHVLIREAEKQGAEVRFRHLVTGVDVSGARPVVTVLDPDGNSYRVTSRFLLDASGFGRILPRLLQLESPSGFPVRSAIFTHVEDRVMPGTFDRNKIRIGIHPQHVDVWYWTIPFSNGRCSLGVVAEKAFLDGYAGNDTERLQALVNEDPALAGLLAHAVWDTPARHIAGYAANVKSLWGNGYALLGNAGEFLDPVFSSGVTIAFKSASLAADCIAREFAGESVNWEADYAQILKSGVDCFRAFVDAWYAGGFQKLVFHPNATPEIRRMISAILAGYAWDRSNPFVRDPQRGLNVLEQYCDD

SEQ ID NO: 84623 - protein, 503 aa, Sphingomonas sp.
  REGION 1..503: note = tr|A0A0Q4QAV4|A0A0Q4QAV4_9SPHN Tryptophan halogenase; OS = Sphingomonas sp. Leaf67 OX=1736230 GN=ASE90_02510 PE=4; SV = 1
MSEANIRGIVIVGGGTAGWMAAAALSHMLAGSGMAIRVVESEAIGTVGVGEATIPHIQYFNRLLGIDEDEFVRRTCATFKLGIEFVDWGQIGERYIHPFGTYGQEMEGIHFHHFWYRHAQAGGTLPLDRFSIGVGAARAGKFMRPDPSRRGSPLAGISYAFQFDAALYAKYLRERAEAAGVVRTEGRIVDVTLNGANGHVDHVVLDDGSSVAGDMFIDCSGFRGLLIEGALNAGYDDWREWLPCDRAVARPCARVGDPTPYTRATATSVGWRWRIPLQSRTGNGHVYCSDYVDDDTALAMLNDGLDGAPLSDPNFLRFTAGVRRKAWDRNVVALGLAAGFLEPLESTSIHLIQTGIARLLTNFPDRSFNQPDIDYYNRRTRLEYEQVRDFLILHYKATARNDSPLWRRCRDMAIPASLEERIAIFRENARLYRHDNELFSETSWLAVLHGQNVHPKRHHPIADILSAEELDRRMTHIAGAMDAGVRAMPDHMAFIDRFCRSPS

SEQ ID NO: 84624 - protein, 604 aa, Hapalosiphon sp.
  REGION 1..604: note = tr|A0A0M0SFK2|A0A0M0SFK2_9CYAN Tryptophan halogenase; OS = Hapalosiphon sp. MRB220 OX=1704290 GN=AMR41_28365 PE=4; SV = 1
MNNTQSQVYDVVIMGAGMAGICQARHLLLNIPNIKIALVDPRPEERAEKDMKVGESTVEISTLMICKELGLYDYMIENHPPKFGLNFHWPKDPAKTKNTDDYFHLWATRQPPLASVLINRPKFERDVLKMNKEMGVEFYNGRVVDVDLTSGDELNTVQVKLGDQQLELKTKHIVDAAGRKFIIGRKTDNLVFGSENLYGVNNGSAWMRVRNVDRTIFHSGYDPANATCSHYYATNHWMGHGHWVWMIPTDTESMELSIGLVHHHEVIPAQSVNTKEKFSAFLEANHNVVYQLLKSGEEVDFHYLPRLAHKSKQMYSRDNWYVIGDAAAMFDPFYSMGMTMMSFQIENVTEIIRAKFAGEADVEKKRIVYNNFAVNMIARNNHLVSHHEKQLGNASVMSWRIFLENMWWFGVLIPMYIGKWHLDLPFLHKFGKQGRGAVVAETLEEAYELFDKLLEKKQNLGFMYTHRTDELPFGYSITKDVSKYIGLSKYEPQHCNIYAEMRNTYFFVALWYLKLLWKGFGLPGLLAPKNFKRVLTLLKISAQSYVDELIFDYQTRRIPTNSTVAKQREEFKTYQPQTELQSWQNLATVDANDTKLPELVEVGS

SEQ ID NO: 84625 - protein, 521 aa, unidentified
  source 1..521: note = Kutzneria buriramensis
  REGION 1..521: note = tr|A0A3E0HLK9|A0A3E0HLK9_9PSEU Tryptophan halogenase; OS = Kutzneria buriramensis OX=1045776 GN=BCF44_10679 PE=4; SV = 1
MGAQGPDQVVIVGGGTAGWMTASYLKAAFEDRISITLVESGKIGTIGVGEATFSDIRHFFEFLNLREEDWMPACNATYKLAVRFQDWRRPGHHFYHPFEQLRSVNGFPLTDWWLNGGPGERFDQDCFVMASLCDAGRSPRYLDGTLLDQEARAVTDEPSGLTMSEHQGKTQFPYAYHFEAALLAKYLAAYAVDRGVRHIVDEVQDVRLDSRGWIDHIVTKEHGEIRGDLYIDCTGFRGVLLNKALEVPFMSYQDTLPNDSAVALQVPLDMKKLGVRPYTTATAQRAGWIWTIPLFGRIGTGYVYAKDYCTPEEAERTLREFVGPEAESVEANHIRMRIGRSAQSWKNNCVAVGLSSGFVEPLESTGIFFIHHAIEQLVKYFPAADWNPKTRDMYNAAVAHVMDGVREFLAVHYRSAARDDTQYWKDAKTRPVPDALEERLERWKAQLPDSENIFPYYHGLPPYSYMCILLGMGGIPLRSSPAVGLSDDTAAQKEFQAIRGKAQHLVDALPTHYDYFAEMRS

SEQ ID NO: 84626 - protein, 506 aa, Xanthomonas citri
  REGION 1..506: note = tr|A0A2D2RJU0|A0A2D2RJU0_XANCI Tryptophan halogenase; OS = Xanthomonas citri pv. phaseoli var. fuscans OX=473423; GN = XcfCFBP6989P_18870 PE=4 SV=1
MIPAPLRNIVIVGGGTAGWMAAAAFARVLGPTFKVQLIESEQLGTVGVGEATVPHIKAFNNLLGIDEAEFVRQTQGSFKLGIEFVDWQRPGSTYMHGFGTQIGHPLGLLPFHQYWIKQHARGKAQPLGAYTLNTVAATRGKFMTSAGDVPANSPLANIAYAYHFDATQYAHFLRRYSQQRGVSRIEGLVEQVQLHPESGHVQSLQLASGQVVHGDLFIDCSGFGGLLIEQALHTGYHDFTHWLPCDRALAVPCEKVGPPTPYTRSTARAAGWQWRIPLQHRTGNGYVYCSAHISDDEAAATLLANLDGKPLADPRPLRFTTGRRKQCWNRNVVALGLASGFLEPLESTSIHLIQSGISKLLELFPREGISPVLVQRYNDRLAFEFDRIRDFLLLHYHATERDDSAFWRHCRHMPITPELQATLDLFRDSGRFYRNAEEMFAEISWVQVLVGQGILPQGYHPLVDQVPDRDAEGFLASVAQTISHCVDVMPSHQQFIDRYCKAATLP

SEQ ID NO: 84627 - protein, 505 aa, Xanthomonas pisi
  REGION 1..505: note = tr|A0A2S7CTM2|A0A2S7CTM2_9XANT Tryptophan 7-halogenase OS=Xanthomonas pisi OX=56457; GN = XpiCFBP4643_21570 PE=4 SV=1
MTQARIRKVVIAGGGTAGWIAACALSHQFRDLLDITLVESDQIATVGVGESTVPPIRTFHRFLQIDEQEFLRAVAGTFKLSISFEHWRRQGERYIHPFGITGQSTLVCAFHHLWLESQRRGMSGAFGDYCLETVASRVDRFALPREPAVNYAYHLDAALYARFLRTRSEAHGVTRVEGRIQQVTLQPDSGDVAALVLEDGQVIEGDLFIDCTGFRGLLIEQTLHTGYEDWSHWLPCDRAVAVQTEAVGPPVPYTRAIAHEAGWRWHIPLQHRVGNGLVFSSQHMSDDQAHAKLLRDTAATPVKDPWMVPFRTGRRLKAWNRNVVSLGLASGFIEPLESTSIHLTIAAVVRLITLFPADGIAPSQVEVFNDISRAEMEHVRDFVILHYHATQRDEPLWQQCRDMELPESLRLRLRAWRERAHAWQGTDELFRVDSWTHVLLGQGIVPQQHHPLAAAVSDADLRRLLDGIAQPIQRVVEHMPSQQAFIERYCQAGEQVWGGRSRVAM

SEQ ID NO: 84628 - protein, 505 aa, Pseudoalteromonas luteoviolacea
  REGION 1..505: note = tr|A0A167B2M3|A0A167B2M3_9GAMM Uncharacterized protein OS=Pseudoalteromonas luteoviolacea NCIMB 1942; OX = 1365253 GN=N482_02280 PE=4 SV=1
MSEQSIKSITIVGGGSSGWMTAAYLNQLYNSKSHKIDITLIESKDIGILGVGEATVHSIRYFFAAMGINEQELMRETQATYKSGIMFKNWMKPSESGETHEYFHPFEQQQLGSNIDIATAWLLSDRNKQERYDEGVCLSSHTIKHALSPKLPNSTGYKAPTPYGYHLDATQMARFLKAKCTSAGVRHVEATVTDISVVDGNIDTVHTEKGNFSADVFIDCTGFKGLLINKVSSDNWESFEEALPCNKAVAIQRKLPANKTPTPYTVATALSNGWVWQIDLANRQGTGYVYDGNRLTKKEAEEELKSFLGEESEIIKTTHIDMQIGRRKEFWVGNCICIGLSGGFIEPLESTGLHLINLGARLLSTHLTGTQVPLSVKDSYNRLMRHAYDDLKQFIVLHYCLTDRDDSEFWVQARKSVEHCPELTEKLALWRNKPCEFADIGSAGTSCFTDENYRYILYGMGYAPKLNIEYDYSEHEAVFEELQNRVNRLISSVMTHEEALQRINS

SEQ ID NO: 84629 - protein, 514 aa, Asticcacaulis sp.
  REGION 1..514: note = tr|V4NN15|V4NN15_9CAUL Tryptophan halogenase; OS = Asticcacaulis sp. AC402 OX=1282361 GN=ABAC402_12580; PE = 4 SV=1
MQDMRIRKVVIVGGGTAGWMAAAGMSKLLPANQVAFQVVESEAIGTVGVGEATIPHILYFNRLLGLDENEFVRKTNATFKTGIEFVNWGRLGQSYIHPFGPYGAPMDGIHFHHFWLRYAAMGKAPPLERYSLMIQAARAAKFQRPDLSKANSALSLIAYAFHFDASLYARLMRECAEARGVTRTEGRITNVVQDPHSGNVQSVVLETGEVIEGDLFIDCSGFRGLLIEQTLKAGYDDWSHYLPCDRAVARACERVADPIPYTRATAKSSGWQWRIPLQSRTGNGHVYSSAYISDEAALDSLNADLDGAPLTEPNFLRFTAGIRRTPWKNNVVSLGLASGFLEPLESTSIHLIQTAIARLMTNFPDKTFNQPDIDYYNRRTRLEYEQVRDFIILHYNATARDDSPFWNYCRTMAIPQTLADRLAIFRENARQYRHDNELFNEVSWLAVMHGQNIEPKRYHPIADMISEEELVRRMTHFEDDVTRSLAMMPGHQAYINRHCSSSSAINHDKHPLKL

SEQ ID NO: 84630 - protein, 497 aa, Pseudoalteromonas elyakovii
  REGION 1..497: note = tr|A0A558I7P2|A0A558I7P2_9GAMM Tryptophan 7-halogenase OS=Pseudoalteromonas elyakovii OX=81037; GN = FQP81_04860 PE=4 SV=1
MKPIKHVVIAGGGTAGWITAALLNKVLGKVIKITLIESSTIGTIGVGEATIPPIMQLNNALGINEQEFINATNASIKLGIEFENWKTTSHSYMHAFGSFGKDFPFCDFYNFWVKGHISGTEESLWDFSLNYQAAKQHKFAPLNTIPNTQLPGLSYAYHFDATLYAEFLKKLAMSRGVDHIDAKIEQVEQCPLSGNIKSLTLDNTQQINGDLFIDATGQRALLIEQTLNTGFVDWSHYLPCDSAVAVQSQGTSELKPYTRSIAHSAGWQWQIPLQSRIGNGLVYRSRYLSDDAATQLLLNNLPAEPITAPRVIKFKTGRRLKQWHKNVVSVGLASGFLEPLESTSIHLIQSAVTRLIKLFPHNGISETLVTEFNKQSVIEIEHIRDFIILHYKLTEREDSAFWRQCKQMDIPHSLAHKLKLFKETGKVVRENDELFAEVAWQQVFIGQGLIPDDYNSIVDSLSSEQLNDLFSTLKTLITSTLDQLPTHKDFLAKIKKA

SEQ ID NO: 84631 - protein, 505 aa, unidentified
  source 1..505: note = Vulcaniibacterium tengchongense
  REGION 1..505: note = tr|A0A3N4VJI5|A0A3N4VJI5_9GAMM Tryptophan halogenase; OS = Vulcaniibacterium tengchongense OX=1273429; GN = EDC50_1065 PE=4 SV=1
MSEGRIRKVVIAGGGTAGWVAGAALAHQFRDLLDITLVESEQIGTVGVGESTVPPIRNFHRLLQIDEQEFLRAVAGTFKLSISFEDWRRPGDRYFHPFGITGQSTLVCAFHHFWLDSLRRGMRSELGDYCLETVASRADRFALLPQPQVNYAYHLDAGLYARFLRRRAEAHGLRRVEGRIREVRQHPENGHVAALVLEDGQAIEGDLFIDCTGFRGLLIEQTLQTGYEDWNRWLPCDRAVAVQTESIGPPVPYTRAIAHEAGWRWHIPLQHRVGCGLVFSSRHMSDDEARAKLLRDVGAPPIREPWLVPFRTGRRLKAWNKNVVALGLASGFIEPLESTSIHLAMTAMVRLLELFPLDGIAPALVERYNELGRVEMEHVRDFIILHYHANRRDEPMWRQCRETAPPESLAIRLRAWRERAHAWQGANELFRVDSWTHVMLGQGIVPEQHHPLARGLADEDLRRLLDGLRRSAARPVETMPSQQAFLEGYCRADAAVWGAARALPA

SEQ ID NO: 84632 - protein, 431 aa, Streptomyces sp.
  REGION 1..431: note = tr|A0A0N0B353|A0A0N0B353_9ACTN Tryptophan halogenase; OS = Streptomyces sp. NRRL F-7442 OX=1519498 GN=ADL09_11020; PE = 4 SV=1
MPSSLTGIPTEFDVIVIGGGPAGATTAGLLAKRGHQVLILDRERFPRYHVGESLIPVVMAPMKEMGLTERLEQRGFERKYGGTFVWGNEQAAWDFSFVDGGDYPFAYHTRRADLDSVILDRARELGAYVVEDATVKEPVEEDGRVTGVRFTVRGGKETYEARSAMVVDASGQARVLTRKYSEIDWHDKLRNVAVWTYFDNCERLPGDQYSNILVEGIENGWFWGIPLDKGTISVGFVTPSTVAGESDQGLEQLYRDEIEKTTKLKHMLRDARQSAGFRSARDWSYTNQTVYGKGWAAVGDAAAFVDPLISTGVALATTAGSILSRVIDKVLQYPEIEETALKRYATAYLSFFNEVRSFVERFYDRSLMKEDYHKLAQSVIDPEQKNTPANDFVTLLAGLRGKHLALDITVDDLVPETPASAAASASASAEN

SEQ ID NO: 84633 - protein, 513 aa, Sphingomonas sp.
  REGION 1..513: note = tr|A0A4R2RS20|A0A4R2RS20_9SPHN Tryptophan halogenase; OS = Sphingomonas sp. PP-CE-1G-424 OX=2135658; GN = C8J43_104462 PE=4 SV=1
MHQIRNIVIVGGGTAGWLTAGVIAARHKGQREHGFTVTLVESPNIPTIGVGEGTWPTLRATLRKMGVSETELFRHCNAAFKQGARFNRWTTGAVDDGYYHPLMLPQQFGSLNLAPHWLAENGDDSFCDAVTPQGRICDEGLAPKTMATPEFDGVANYAYHLDAGKFSHFLQRHCCDTLGVRHVLADVTEVILDETGDIARVETAQGVSIEGDLFVDCTGFAARLIGDAMDVPFRSCTDTLFCDTALAVQLPYERPDDPIASHTISTAQSAGWIWDIGLPHRRGVGHVFSSSHIDVDAAERELRAYIGPAGKDLPVRKLSIRAGHRETFWKGNCVAVGLAAGFLEPLEASAIVLIELSAKMIAEQMPVCREVMDVVANRFNATTTYRWGRIIDFLKLHYTLTKRTDTDFWRDNVRPESIPDRLRGLMELWQYQSPWIHDEFDRAEEVFPSASYQYVLYGMGARTAVMPGTIEADAELARRARRENNVQTQRMMSSLPGHRDLIDRIVKHGLHPI

SEQ ID NO: 84634 - protein, 514 aa, Asticcacaulis sp.
  REGION 1..514: note = tr|V4QCQ6|V4QCQ6_9CAUL Tryptophan halogenase; OS = Asticcacaulis sp. AC402 OX=1282361 GN=ABAC402_02585; PE = 4 SV=1
MIQDARPMPNPLEHIVIVGGGTAGWMAAAMLAKLIVAKAPKPPRVTLIESDDISTVGVGEATIPAIKKYMALLGLNEADFMKYTQGTFKLGIEFVDWDRLGESYIHGFGKIGQDLGWMRPHQYWLKMRNSGKVSPRFDDYAVNPTACRNNKFAKARGDGRKSPVNDIGYAYHFDAGLMARYLRRIAVPLGVKRVEGTIVDVRLKPDNGHVESVVLKDGQVVSGDFFFDCSGFRSLLVGGALGVAYESWSHWLPCDRALAVPCAGVTPMTPYTRSTARTAGWQWRIPLQHRIGNGHVYSSRFTSDDEAARVLMDNLDGKALADPRPIRFETGKRKKLWEKNVLAVGLSGGFIEPLESTSIHLIQTTVLRLLNLFPDKDFDPATAAEYNAQADSEIEHIRDFVIAHYKMTSRDDSEMWRYCRNMAVPDTLARKLDGFSASGRVFKANDELFSEDSWIQVLMGQGLMPRGYDPIVDNYPEETIVAYLNNISSVVAKSVAAMPTHDQFVAAYCAAESL

SEQ ID NO: 84635 - protein, 507 aa, Sphingomonas sp.
  REGION 1..507: note = tr|A0A4R2RX71|A0A4R2RX71_9SPHN Tryptophan halogenase; OS = Sphingomonas sp. PP-CE-1G-424 OX=2135658; GN = C8J43_103269 PE=4 SV=1
MSDRALRSIAIIGGGTAGWMAAAALARVLGTHNVAITLVESEEIGTVGVGEATIPPIQAFNALLGIDEDAFVKATMGSFKLGIEFVDWLRPGTRYFHPFGVYGTDIGAVPFEGLWHRLRTQGLADPLEAYSICAQAAKDGRFMRPLADGGNTPLHRIGYAFHFDASLYARFLRTHAEAAGVVRREGRVVDVSLRAADGFVEAVTLASGARIEADLFVDCSGFRSLLLGETLGTGFEDWSHWLPNDRAIAVPTASNGPPTPFTRSTARAAGWQWRIPLQHRTGNGYVFSSAHLSEDEATATLFANLDGEPLADPRTLRFRTGRRDAFWVKNCVGLGLSSGFLEPLESTSIHLIQAGIARLLEMLPNRDFEAADIRRYNRLMTAEYDSIRDFIILHFHATERADTPYWDHVRTMAVPETLAERIRIYQATGRVFRESDDLFSKTSWLAVMDGQGLRAEGCDPLAASLSVDDAQARLARIAAVTAAAAARMPPHAEFIARHCAGAIASRT

SEQ ID NO: 84636 - protein, 223 aa, unidentified
  source 1..223: note = Rhizorhabdus sp.
  REGION 1..223: note = tr|A0A521TCM6|A0A521TCM6_9SPHN Tryptophan halogenase (Fragment) OS=Rhizorhabdus sp. OX=1968843 GN=EPO38_00775; PE = 4 SV=1
NGYVYCSAHIGDDAALDTLLANLDGAAQAEPNQLRFVSGKRRRMWNRNVVALGLASGFMEPLESTSIHLVQAGISRLVKMLPSGASDPAVAAEFNRQSDFEWERIRDFIILHFKATERRDTPYWRDRAEMDIPDTLAAKIDLFRAQGLIFREHEELFTESGWLQVLVGQAVEPRRWHPLADSLEPAELAQFMAGISLTIEREVAQMENYDAFLAAARPAGVAA

SEQ ID NO: 84637 - protein, 505 aa, Xanthomonas citri
  REGION 1..505: note = tr|A0A2D2RXE5|A0A2D2RXE5_XANCI Tryptophan halogenase; OS = Xanthomonas citri pv. phaseoli var. fuscans OX=473423; GN = XcfCFBP6989P_02510 PE=4 SV=1
MTQAQIRKVVIAGGGTAGWIAACALSHQFRNLLDITLVESEQIGTVGVGESTVPPIRTFHRFLQIDEQEFLRAVAGTFKLSISFEHWRRQGERYIHPFGITGQSTLVCAFHHLWLESQRRGMPGSFGDYCLETVASRVDRFALHGEPAVNYAYHLDAALYARFLRARSEACGVKRVEGRIQQVIVQPHSGDVASLVLEDGQTIEGDLFIDCSGFRGLLIEQTLHTGYEDWSHWLPCDRAVAVQTEALGPPVPYTRAIAHEAGWRWHIPLQHRVGNGLVFSSKHLSDDEAHAKLLRDVAAPAVKEPWMVPFRTGRRLKAWNKNVVSLGLASGFIEPLESTSIHLTISAVVRLLALFPAGGIAPSQVQLFNDISRAEMEHVRDFVILHYHATQREEPLWQQCRQMELPESLALRLRAWRERAHAWQGADELFRVDSWTHVLMGQGIAPEQHHPLTRAFSDHDLRRLLDGIAQPIQHAVQQMPSQQDFIERYCKAGEQVWGMRSPVPA

SEQ ID NO: 84638 - protein, 500 aa, Pseudoalteromonas luteoviolacea
  REGION 1..500: note = tr|A0A166Z787|A0A166Z787_9GAMM Tryptophan halogenase; OS = Pseudoalteromonas luteoviolacea NCIMB 1942 OX=1365253; GN = N482_17850 PE=4 SV=1
MNSRKIVILGGGTAGWIAANLIAKSWCDKDIHVGVVESPDIGIIGVGEGSTPQFKAFMDFIEVPESQWMPKCNATYKNGIRFVNWSTRPGFEQYFHPFPAQPDDYSAPAFFHNSFVRRKGIDLEGHPDLFFLSTYLAEHAKAPIAAENFPFEINYGYHFDSGKLGQLLAEKAREFGVEHIQARVTDVRKNTDGTIAALVCEEGQEICGDIFIDCSGFSGLLMQQHMQVGFESFENNLFNDSAVVLATEQGNVIASETTSVARKFGWSWHIPLTNRIGNGYVYSSKYCGKDQAETELRAALGLLDSDVEARHLNMKVGQVKEHWHKNCVAIGLSQGFIEPLEATALHIVQETVQSFIECYQEQNFSCKGQDKHNQMMSQRYQAIRDYIVAHYRVNSRTDTAYWRDNANNNQLSKSLFDVLNTWVQGKNLSDELDRQDIDKYYPSASWHCLLAGYGIYPEQRQLVAASQSTNKHDLSQIRDYIRRCGLNFADHRAQLARFID

SEQ ID NO: 84639 - protein, 528 aa, unidentified
  source 1..528: note = Parvularculaceae bacterium
  REGION 1..528: note = tr|A0A520R6N0|A0A520R6N0_9PROT Tryptophan 7-halogenase OS=Parvularculaceae bacterium OX=2510335; GN = EVA70_07075 PE=4 SV=1
MADRIDSIIIVGGGTSGWLTAAYLARRLGTHRPDGVKITLIEASDIPVIGVGEGSFPSLRTTMATIGVDEAEFMRESSCAFKQGIKFVNWEHAPEDGRDRHYYHLFNFPRMMGGAIDLSPYWLMGCAGEGVSFADAVTLQEEVCEASLGPKRLDDKPYSSPMNHAYHFDAGHFGKLLKKTAIRYGVKHVIGRVESVNVAANGAIESLDVDSIGKLSAGLYIDCSGFFGAMISKTLNAPRRDLSDILFVDRALAIQVPCESDTDQIASATISAAQEAGWIWDIGLDTRRGVGHVFSSRHTDENRAEEIIRNYIGDASDGLNVRMLKMPTGYCETPWVKNCVAVGLAGGFLEPLEATGIAMAEAAIRLIADYFPRDGETEPVAKLFNRAMNERYENAVEFIKMHYYLTKRTDTEFWRDNARPETAPASLLEKLHLWRTRAPTMTDFSSVHDMFKRESYQYVLFGMGFRPDLTGRESEFPYVKEAKLEFQRIRAAAKKATAAMPDHRALLTDVYKNGFTPQHRAAEIGRVS

SEQ ID NO: 84640 - protein, 521 aa, Xanthomonas citri
  REGION 1..521: note = tr|A0A2R2WPM3|A0A2R2WPM3_XANCI Tryptophan halogenase; OS = Xanthomonas citri pv. aurantifolii OX=76802; GN = TP45_19300 PE=4 SV=1
MPDTTPSDPHQHPVRRVVIAGGGTAGWMAAAALSKLLGRHLHITLVESDEIGTVGVGEATIPSLVTFHRLLEIDEAAFMAATQATIKLGIAFEHWRDVDQHYIHSFGHAGTDHWSAGFQHFWLKGRQRGVARDFGDYCLELRAAQEGRFAHLPNGGMNYAYHLDAGLYARFLRRFSEGFGVTRVEGRIGQVETDAQSGFLTALTLQDGMRVEGDLFLDCTGFAGLLIGKTLGVGSDDWSRWLFADSALAVQTESVGPPVTYTRSRADQAGWMWRIPLQHRVGNGIVYSSRYMDQDGARAVLERHLAGRALTEPRPLRFTPNQRHRVWEKNCVALGLASGFLEPLESTNIHLIQRGIIRLLQTFPQVINAVDIAEYNRQAAQEITHIRDFVILHYHATDRRDTPFWRDCAAMDIPDSLRHRVELFRQSGRVFHQANELFAENSWVQVMLGQGVVPQQHHPVADLMGDAELSRFLETIRTRVEAALVRLPAHADFLQRYCPAPPLPEPAARVPAPPVMATPAG

SEQ ID NO: 84641 - protein, 505 aa, Xanthomonas citri
  REGION 1..505: note = tr|A0A2R2WMT8|A0A2R2WMT8_XANCI Tryptophan halogenase; OS = Xanthomonas citri pv. aurantifolii OX=76802; GN = TP45_15610 PE=4 SV=1
MTQAQIRKVVIAGGGTAGWIAACALSHQFRNLLDITLVESEQIGTVGVGESTVPPIRTFHRFLQIDEQEFLRAVAGTFKLSISFEHWRRQGERYIHPFGITGQSTLVCAFHHLWLESQRRGMPGSFGDYCLETVASRVDRFALHGEPAVNYAYHLDAALYARFLRARSEACGVKRVEGRIQQVTVQPHSGDVASLVLEDGQTIEGDLFIDCSGFRGLLIEQTLHTGYEDWSHWLPCDRAVAVQTEALGPPVPYTRAIAHEAGWRWHIPLQHRVGNGLVFSSKHLSDDEAHAKLLRDVAAPAVKEPWMVPFRTGRRLKAWNKNVVSLGLASGFIEPLESTSIHLTISAVVRLLALFPAGGIAPSQVQLFNDVGRAEMEHVRDFVILHYHATQREEPLWQQCRQMELPESLALRLRAWRERAHAWQCADELFRVDSWTHVLMGQGIAPEQHHPLTRAFSDHDLRRLLDGIAQPIQHAVQQMPSQQDFIERYCKAGEQVWGMRSPVPA

SEQ ID NO: 84642 - protein, 504 aa, unidentified
  source 1..504: note = Oleiagrimonas sp.
  REGION 1..504: note = tr|A0A328T7C7|A0A328T7C7_9GAMM Tryptophan halogenase; OS = Oleiagrimonas sp. MCCC 1A03011 OX=1926883; GN = BTJ49_03105 PE=4 SV=1
MSASPIRTVVILGGGTAGWITAALLGRAFGPNLAIRLVESDAIGTVGVGEATIPQIQHINRFLGLDEREVLKASQGTYKLGIQFNDWGRVGDSYLHAFGDIGLPLGLIPFQHYWLRDRRRDGAPDLWAYSINAHACQAGRMAQMERVGDSPLTGLRHAYHLDAGLYARYLRKQCDPAVVQRVEGKVVDVSLRDTDGFIESVRLENGDVIEGDLFVDCSGFRGLLIEQTLHAGYDDWNHWLPCNRATAVASSRMAPLRPYTQANARAAGWQWRIPLQHRNGNGHVYASDFISDDEAAATLLANLEGKALTEPRLLRFNTGCRRRFWHRNCIAIGLSAGFMEPLESTGIHLIQSAVSRLLSMFPDRSFDPALIDEYNRQTRFEYERIRDFLILHYRATERRDTPFWRHCSHIEIPDSLQRKLDVFRASGQIYRDSEELFTDVGWLQVLIGQHIEPQRYHALADAVSPQQLDEFLAHIRTLLNRATDQMPTHEAFIERHCKAPPPPR

SEQ ID NO: 84643 - protein, 483 aa, Asticcacaulis sp.
  REGION 1..483: note = tr|V4Q667|V4Q667_9CAUL Tryptophan halogenase; OS = Asticcacaulis sp. AC402 OX=1282361 GN=ABAC402_12570; PE = 4 SV=1
MVCGSGLAAQQVCAALAPYLCDSLGVTWIAGISSADSDFLYGNLAPPTAYDFNLSLGVSEPELILNSDTTFSYGTHVTNWGALKLNWVQAFHQPLPVLEGATFQHYLTQQGQAALEPFLVSAVAARRGVFAHPPEDPAHPLSRAEYGYHFDATAYGALFELAAANGGVRKVAADVSAIDAVDGAIKAIHLSNGQTLTADLWIDATGPQATLLSQIGGVRHSADLRQKRRLCVSLTRMEAETPGPAVTTVNGTSYGWQAKTALRTSTLMLTTSDPDSDLEAQAVPETAPVRSATVDIGFRDIAWVGNCVGIGHAACVAEPLTIAPILLLQRDIERLLPLLPVSDDLSVERREYNRQALADYVHADLFMRALFETQPVEGSLYWRDATRTPADERLARKIEQFESRGLHVAYDLEPFGPEDWLILHYGMGRRPLRYDRIVDGADNARIRQYFESLRSNIDSVIRSMPPHGTYLNGLTNYLRQTQG

SEQ ID NO: 84644 - protein, 513 aa, Devosia sp.
  REGION 1..513: note = tr|A0A024KFU0|A0A024KFU0_9RHIZ Tryptophan halogenase; OS = Devosia sp. DBB001 OX=1380412 PE=4 SV=1
MAQPSHFVIVGGGTAGWLAAFIIQDSARRMKLDAKISVVESSRIRTVGVGEATTAAFRVFLQHFKIDEFEFFRETEATFKLGIRHQDWRRKGYTYYGPIDDPHQVVAPPPGAPSDYLNVYAVSAGKKVQGMHLFGPLLERKKAPYARKADGSLLRLGPFHHAFHFDQSLVGQFLKRKSRGVEIVDAVVEGVERDGQTGDIRALKLDSGELLAADFFIDATGFRKRLIVQELQAPWISYARELPVNRALPFWLDIKEGDEINNYTLAWAQENGWMWQIPTQTRYGCGYVYSDEFTTPEQAKREVERAIGREIEVRDDIRFSIGRLEKAWIGNCVAVGLSSSFLEPLESTSIHGTIVQMMLFAGHYLKEPGKMTQVERDDYNRRVGRQVDDFRTFVNTHYVTERDDTPFWRNVRAERLHPETKERLARWRREMPRTEHFPNYLAGLPHIETQLHYPVLDGLGLLDPAVAKAEMARDPKLRAFAKKTHDALVKEYKQAATQAMGHAEFLEAVREMG

SEQ ID NO: 84645 - protein, 511 aa, Chondromyces crocatus
  REGION 1..511: note = tr|A0A0K1EKT7|A0A0K1EKT7_CHOCO Tryptophan halogenase; OS = Chondromyces crocatus OX=52 GN=CMC5_053840 PE=4 SV=1
MSGGSMDEAFDVIVLGGGPAGSTVASFVAMAGHRVLLLEKERFPRHQIGESLLPATIHGICSLLGVKEEIERSGFPRKNGGTFRWGKSADPWTFRFTKQANDPYGHAYQVERAKFDDILLRNARRKGVDVREGHETLGMLYEGERVVGVRFRDAEGKERTASARYVADTSGHKSHVAPTVGQRVFSKFFQNVALYGYYEHGKRLPAPNSGNILCAAFPSGWFWYIPLSDTLTSVGAVVAKDAAGRIRESADEAMRSYIDECPIIRDYLSTATRVTEGIYGEYRIRKDYSYCNTRFWAPGVVLVGDAACFIDPVFSSGVHLATYSAMLAARSINTSLLDDELMTEEECFEEYEFRYRREFGKFYQFLIAFYDMNQDESSYFWSARKILNTEERDNDAFVRLVAGISEADEPLFEGGADRFFADRQGFGAYFADVVAGPGAEEKASAAPRPAAAHRPDPVKFDADKFMQGFTSEVAQLQLLALMGERRPKERPLVPNGLVASGDGLHWAVAPE

SEQ ID NO: 84646 - protein, 512 aa, unidentified
  source 1..512: note = Solemya pervernicosa
  REGION 1..512: note = tr|A0A1T2L3V7|A0A1T2L3V7_9GAMM Uncharacterized protein OS=Solemya pervernicosa gill symbiont OX=642797; GN = BOW53_10590 PE=4 SV=1
MIDMNERIDDITIVGGGAAGWLMALSLVTMLNKGESKVKVTLIESPNIPTIGVGEGTVTGFPRLLRQLGIKERDFLRRSDATYKCAGKFVGWSVDKQGNDRSFYNPFNNGGYINGFESSYYYHKFGPHGDAKSYVDNVLPTQMMVENALGPKEIGQGDYDSVMPYTYHLHAHAFSKQMAHIAQKRGVVHILDDFVDADLDEKGWITALNLKEKGKVPVKLVIDCTGFKGLILQQIMKEPYQEFGNHLLCDRAIPVPHPHRDIEKMRPCTTATAKSAGWIFDVPIYSRMGSGYVYSSQFKSEDEALHELLTHINDPELKDVTPQVIKMKVGRVRNTWVKNCIATGLAAGFVEPLEASAIYTIEMTARMLITYFPEKGITDPIINRFNQVMNRMYDEILNFIVMTYYTSNRPEPFWQAARNDIDIPPLLQENLELWKEFMPSAHDVEGKFLFDHWDYISLLNGQGYFEGVQFPTEKYLAKPDWVKYSQKMAETKRQLRRHLPSHYELLKHMHGG

SEQ ID NO: 84647 - protein, 501 aa, Asticcacaulis sp.
  REGION 1..501: note = tr|V4NHQ3|V4NHQ3_9CAUL Tryptophan halogenase; OS = Asticcacaulis sp. AC402 OX=1282361 GN=ABAC402_12575; PE = 4 SV=1
MTSYIKKIVILGGGSAGWMTAAALSSQLDPKFVSITLVESDQIGTIGVGEATIPEIINFNRHLGIREDEFMKATHATFKLGIEFVDWGRKGDAYIHPFGGHGVDMNGYEFHQYWLRSRADGNAYPIDAYSMSAVASRQNRFDLPGTTNSPRSHIRYAYHFDATLYARYLRTYAEARGVRRVEGKVEEVLQAPESGDITALRLDTGETINGELFFDCTGFSALLIGKTLGVGYHDWSHWLPCDSAQAVPCAHAGPLLPYTRSTARTAGWQWRIPTQTRTGNGHIYSSAFMEDDEATAILLTNLDGEAMASPRQIRFKAGHRHAFWKNNCVAIGLSAGFLEPLESTSIYLIQEGISRFIALFPDASLPEVVRKEYNQHMRTEFEQVRDFIILHYSATERDDTPFWNYCRTMSIPDSLSHKIELFRTAGRTYAYREELFGRPSWIAVFLGQGIMPRSFDPVIAMLPSDTVMDSLDSMRRAMHAEAGRMPTHAAFLQSYCPAARA

SEQ ID NO: 84648 - protein, 520 aa, Asticcacaulis sp.
  REGION 1..520: note = tr|V4NJX3|V4NJX3_9CAUL Tryptophan halogenase; OS = Asticcacaulis sp. AC402 OX=1282361 GN=ABAC402_18305; PE = 4 SV=1
MTTPRKVLIAGGGTAGWLTAAYLARVLGHGKPNSPEITLIESPEIGTIGVGEGSFATIRTTLQTLGLDEETFLREATATFKQGIRFADWEKTGDWYFHPFDAPYPVEGAGLLPYWLLQDQATRVPFAQAVALQKKVAENRRAPKRLYENRFGGALNYAYHFDAGKFAKLLSRHSVSMGVTHLQGRITDVRLATDGSIAGVTSDSHGELSADLYIDCTGFAAVLIGKALGSPYRSVRKHLLTDRAIACQVPYATPDAPIESYTVSTGHEAGWTWDIGLDVRRGVGYVYSSDHTRDDRAEEVLRAHVGPTATEFSTRVIKFDTGYREQQWIKNCVAIGLSGGFFEPLEATGIMLIEVAIGMLTDYFPHAGPIDANAAIFNRLMTLRNEKLVNFLKLHYCVSKRPESFWRENCDPATIPDELNELLEMWKYRMPSRFDVLDDIDTFAFFNYQYILYGMGFKTNLSAQRDSHPKGAEARAIFDKVALIGDQAARDLPTHRALIDQVYNHGYAEPPAQRFMSVKR

SEQ ID NO: 84649 - protein, 512 aa, Asticcacaulis sp.
  REGION 1..512: note = tr|V4N1R3|V4N1R3_9CAUL Tryptophan halogenase; OS = Asticcacaulis sp. AC402 OX=1282361 GN=ABAC402_06990; PE = 4 SV=1
MHTNSLIKSVTIVGGGTAGWMTAALLSKLLLGRFDITLIESEEIGTIGVGEATIPAIKVFNQFLDLNETEFIQATQGTFKLGIEFVNWREAPSKNGGHSYIHGFGKIGSDLMWLHTHQFWLKMHEKGEVKDFDHYALNTLAARKNRFRPRQPNEGPPMADLDYAYHFDASLYARFLRKQAEGRGVKRIEGRITNVVLRPEDGYIEKVVLESGQAVGGDLFIDCSGMRGLLIGDALSVGYEDWSHWLLNDRAWAVPCESAPVLTPYTRSTAQGSGWQWRIPLQHRTGNGHVFSSSHIGDDEAAAILLANLDGKALADPRLVKFRPGKRHRAFEKNCVAIGLAGGFLEPLESTSIHLIQTGILRLLALFPGQSFDARDIREYNDQTDFEYRDVRDFIIAHYKVTDREDTPYWAYVKHMSVPDSLTQRLDLCRSSARFFKHSAAELFHEESWVQVLLGQGIRARYDPMVDMIPEEQIRGYLKDIEEVIEDYANALPTHGDYIEQNCKAPPLMEMA

SEQ ID NO: 84650 - protein, 503 aa, unidentified
  source 1..503: note = Oleiagrimonas sp.
  REGION 1..503: note = tr|A0A328SUB4|A0A328SUB4_9GAMM Tryptophan halogenase; OS = Oleiagrimonas sp. MCCC 1A03011 OX=1926883; GN = BTJ49_11610 PE=4 SV=1
MSDRHIQNIVIVGGGTAGWMAAAAFAKVLGSQVSVRLVESEAIGTVGVGEATVPHLKLFNDLLGVGDVEFVRNTSGTFKLGIQFNDWGRLGDSYIHGFGSLGHKVGLLPFHQYWIKARQKGIAADLGAYAIHTAAAPRGKFMTSAQDAPAHSPLADIPYAYHFDAGSYARFLRGYAEKRGVQRTEGRVAEVRQHPESGFVESVVLESGETIAGDLFIDCSGFRGLLIEQALKTGYIDYTHWLPCDRAVAVGCESAGDPPPFTRATARKAGWQWRIPLQHRIGNGYVYASPHLSDDEAAATLLAHLDGKPLGDPRVLRFVTGMRRKFWNKNVVALGLSSGFMEPLESTSIFLIQSGIARLLNLFPRAGFSPVLVDEYNAQAQFEFERIRDFLILHYKLTERDDSAFWNDCRTMSIPDTLREKIELFRDSGRFFRTAEEMFAEVSWVQVMIGQGLMPRSYHPLVDQLPEADLRQFMDGAAKVIDSCVDLMPPHQAFIDRHCAVGA

SEQ ID NO: 84651 - protein, 496 aa, Sphingomonas sp.
  REGION 1..496: note = tr|A0A4R2S6R6|A0A4R2S6R6_9SPHN Tryptophan halogenase; OS = Sphingomonas sp. PP-CE-1G-424 OX=2135658; GN = C8J43_102868 PE=4 SV=1
MTSPTAPVSLKTIVIVGGGTAGWIAAAMLARFVPRTTKIRLIESDAIGTVGVGEATIPQIRLLTAALGIDENAMLAATQGTFKLGIEFVDWTGPGSRYMHAFGAVGRGLGVVPFHHHWLRARASGTAAPLGEYIASAQAAADARFDRHPDLAYAYHFDATMLARWLRGLAEASGVERIEGRIVTAQRDGETGDLTGVTLDDGRAVEGDFFLDCSGFRSLLLGEAQGVAFEDWSHWLPCDRAMAVACETTAPLLPYTRATARPVGWQWRIPLQHRTGNGLVYAAAHLSDDEATARLLANLDGAAIGDPRPLRFATGKRATFWKRNVVALGLASGFMEPLESTSIHMVQSAVARLLSLFPSAGDNAAARTAYNHQTHVEYDTVRDFLILHYHANRRPEPFWQRCRDMPLPDRLAEKIAQFRAAAILTQDVADLFTEPAWLQVMIGQGINPVTWSPLAEALSPDQLAGFLADIRDRHAATARALPAHADTVARHCMARR

SEQ ID NO: 84652 - protein, 508 aa, Pseudoalteromonas elyakovii
  REGION 1..508: note = tr|A0A558HWD3|A0A558HWD3_9GAMM Tryptophan 7-halogenase OS=Pseudoalteromonas elyakovii OX=81037; GN = FQP81_13655 PE=4 SV=1
MNKTIKTIAVIGGGTAGWLSAAIIASYHQGKNGDGLKVMLVESSDIPTIGVGEGTWPTMKNTLQQIGLREVDVFKACNATFKQGGKFVNWTHGNNDFYYHPFTVPLGYGRIDLAPYLDNVEDFAQQTNFQHDICEASLAPRGIAQGEYQGNCNYAYHLDAGAFAEMLKQHCKSKLGVEHIIGTVDQVKLDDDGAINELTLKDQTRIISADLFIDCTGFSSLLLGQALNVPFKKMDHVLFNDSALAMQVPYDENDDSLASHTIATAQNAGWIWDIGLTHRRGVGHVYSSKFLSDDEAEQNLRNYLGDAANGLTARKISFESGYREKFWHKNCVAVGMSAGFVEPLEATAIMLVEISARFVAEHMPADTQVMPIVAKRFNEQMDYRWQRIIDFLKLHYMLTKRPEPYWQAHVQPNTIPQTLQEDLLLWGSRGPLIQDFHGALELFPAASYQYVLYGMGFKPDFTKQAYLYSQDAQAKQIIERNSQLTQQMLQTLPPHRAYIEQWLAANPV

SEQ ID NO: 84653 - protein, 501 aa, unidentified
  source 1..501: note = Hyphomonadaceae bacterium
  REGION 1..501: note = tr|A0A3D3Z0W5|A0A3D3Z0W5_9RHOB Tryptophan halogenase; OS = Hyphomonadaceae bacterium OX=2026748 GN=DIU09_03415; PE = 4 SV=1
MAIETIVIVGGGTAGWMAAAALSRLRAGKPVNVIVIESEQIGTVGVGEATIPPFLDFNRLLEIDEREMLSAVQGSFKLGIQFVNWGKIGDSYIHPFGNYGYQVDGISFHHIWHKYKVAGDKRPIQIFNIETMAAHYGRFARTEDYQRDDLPPINYAYHLDAGRYAKYLRAYAEKRGAIRIEGKVNDVALDGETGFVTSVTMDNGVVIEGDLFVDCSGFRGLLIEQTLKTGYDDWSNFLPCNRAVALPCKRDDGSPPPPYTRATAHRAGWQWQVPLQHRNGNGHVYCSEFMSDDEALDILVNNIAGKPQAEPNFLRFVTGRRKKFWNKNVVALGLAAGFMEPLESTSIHLINTGINKLIALLSLDGVTQAQEDAFNRLTGKEYARIRDFLILHYNATTRDDSPFWNYCRNMAVPESLTEKTDLFRLNGQIFREDDELFTETSWAAVMMGQGITMQGHNAMADALMEPKTGDELRGIEQSIQFVVQHMPTHSDYLKRYCPAPM

SEQ ID NO: 84654 - protein, 516 aa, Pseudoalteromonas elyakovii
  REGION 1..516: note = tr|A0A558HVK6|A0A558HVK6_9GAMM Tryptophan 7-halogenase OS=Pseudoalteromonas elyakovii OX=81037; GN = FQP81_14095 PE=4 SV=1
MTKPITKIVVLGGGTAGWLSAGLLAAEHPHLNVTLVESANVPILGVGEGTWPSMRNTLQRIGIKEIDFITQCDASFKQGSKFINWRNLSEGENYYHPFMNPQGYEQTNLHASWQRIAPDQKFADVVNMQSFVCQAALAPKQLQTPEYAAVTNYGYHLDAGKFAEFLKNHCVKNLNVTHIIDDVTEVINDEHGYIASLKTNNNGDITGDLFIDCSGSRARLIDEHFNNEFIAQDHILFNNSAVAAQIPNAHINQPIASATLSTAQSNGWIWDIALPTRRGTGYVFSSKYQSDESATNTLKSYIAKTTSEQQAEQLNYRVLKFSPGYRQKFWIKNCVAVGMSAGFLEPLEASALAMVELSISMISEQLPQNRTHMSQLETRFNERFSTRWQRVIEFLKLHYVLSERDDTPYWQDISNLNTAPERLQNLLKLWQFQPPSRFDFIENEEVFSSSSYQYVLYGMGFDTQTVSAQNTFNDPRAGDYYYQQNREKIAQCLNGLPSNRALLNHLLSNNGQPHND

SEQ ID NO: 84655 - protein, 523 aa, Asticcacaulis sp.
  REGION 1..523: note = tr|V4Q9L8|V4Q9L8_9CAUL Tryptophan halogenase; OS = Asticcacaulis sp. AC402 OX=1282361 GN=ABAC402_08085; PE = 4 SV=1
MLIVGGGAAGWLTACYLATHLGTERAGGPRITLLESPDIGIIGVGEGTFPTTRNILRTLGIEEAEFMRESQAAFKQGIRFDDWETSPEGGVHNHFFHPFEAPYLGKEELDLLPYWLIQDPATRPPYAEAVTFQKRIADARLAPKRTYQGHYCGPLNYAYHFDAARFANVLARRAKVLGVHHLQGILREAVLDETGAIDHVISQEYGRMTADLYIDCTGFRAELLGKAMQVPFKSASDTLFADRAVTCQVAYPNPNAPLESYTIAAAHEAGWTWDIALANRRGVGYVFSSRHTTDVRAEEVLQAYLARSGGNAKALDLRHIRFEAGFRTSQWVRNCVAIGLSAGFLEPLESTGMVLIEAAVNKVAEFFPHNGPVDASAGLFNDLMVKRYEAIINFIKLHYCLSRRQEPFWRDNSAPESVPERLRMLLDIWQYRPPSRYDFVIDHETFAHFNYQYILYGMNFQTDYQAAGRALPMQDRAEQIFARIHTFGEQAAKDLSAHRATLKAIYDNGFVERGPTAPPALVR

SEQ ID NO: 84656 - protein, 538 aa, Burkholderia sp.
  REGION 1..538: note = tr|A0A1B4FMA6|A0A1B4FMA6_9BURK Tryptophan halogenase; OS = Burkholderia sp. BDU6 OX=1385591 GN=WS70_23855 PE=4 SV=1
MSNPIKNIVIVGGGTAGWMAASYLVRALQQQANITLIESAAIPRIGVGEATIPSLQKVFFDFLGIPEREWMPQVNGAFKAAIKFVNWRKSPGRSRDDCFYHLFGSVPNCDGVPLTHYWLRKREQGFQQPMEYACYPQPEALDGKLAPCLPDGTRQMSHAWHFDAHLVADFLKRWAIERGVNRVVDEVVEVHLNDRGYISSLSTKEGRTLEADLFIDCSGMRGLLINQALKEPFIDMSDYLLCDSAVASAVPNADARVGIEPYTSSIAMNSGWTWKIPMLGRFGSGYVFSSKFTSRDQATADFLDLWGLSDKQPLNQIKFRVGRNGRAWVNNCVAIGLSSCFLEPLESTGIYFIYAALYQLVKHFPDTSFDPRLTDAFNAEIVHMFDDCRDFVQAHYFATSREDTPFWLANRHDLRLSDAIKEKVQRYKAGLPLTTTSFDDSTYYETFDYEFKNFWLNGNYYCIFAGLGMLPDRSLPLLRHRPESIDKAEAMFARIRREAERLRTSLPTNYDYLRSLREGDAGLSRSQPGPTLAAPEIL

SEQ ID NO: 84657 - protein, 511 aa, Asticcacaulis sp.
  REGION 1..511: note = tr|V4NQZ4|V4NQZ4_9CAUL Uncharacterized protein; OS = Asticcacaulis sp. AC402 OX=1282361 GN=ABAC402_01265; PE = 4 SV=1
MKIVILGGGTAGWMTAATLSKAFKPEFCTVRLIESDEIGIVGVGEATLPQIHDFNKFLEIDEPEFMRATNATFKLGIDFRNWARIGDSYIHPFGIHGQAINGVPLFQYWLRALQNGHVSDLQDYSFAISACRHLKFDFPVEDDNSVRSTFAYAYHFDAVLYARFLRKWATARGLERTEGKVVDVTLRPEDGFIQSLTLASGEVVEGDLFIDCSGFRGVLISQALKMGWEDWTQWLPCDRALAVPCDRAGDFTPYTRATSREAGWTWRIPLQHRTGNGYVFSSQFSTQDRAAEVLLGGLDGAAQAEPRLLKFQAGRRQQSWHKNCLAIGLASGFLEPLESTSIYLAQIASNFLMRLFPGKNIDPKLVAEFNRLVDIEYERVRDFLILHYHANEKPAEEDPTGLWRYVREMPVPDSLTAKMETFRHRGHIHRYKDGLFAPPSWIAVYVGQRVLPNHYDRQVDNMDLATILEQMADVRQRVLVNVAALPTHEQFLNDYCFDPTAKVMLEDAVHG

SEQ ID NO: 84658 - protein, 503 aa, Litorimonas taeanensis
  REGION 1..503: note = tr|A0A420WJT6|A0A420WJT6_9RHOB Tryptophan halogenase; OS = Litorimonas taeanensis OX=568099 GN=DES40_0476 PE=4 SV=1
MTFNCDDIRKIVIAGGGTAGWMSAAALARLVCPLGIEVTLIESEQIGTVGVGEATLPHLRFFNQTLGIDEKELIKATQATIKLGIEFCNWGQIGDHYIHPFGDYGREIQNIDFHHFWTHLRRSGFDSRACNYSLPVIMAEQNKFGLPSQDPTQLMSSFSYAYQFNATDYALFLRRFAEKLGVKRVEGKIEKVNLAPETGDILSLQLETGHIEEGDFFIDCTGFRALLLKEALGVGYDDWTQYLPCDRAVAVPCEGDSAPEPYTRATAQKAGWTWRIPLQHRVGNGHVYCSEYMSDEQAAEILLNGLEGKPTNNPLFLKFDTGWRKKSWEKNCVAIGLSSGFLEPLESTSIYLIQAAITHFIELLPNRRNSPKDRTEFNRVMALEVERIRDFLILHYHATKRDDSPFWNYVRTMQVPDSLKEKMDLFKQTGTIQDYKTGLFLYASWLSVYLGQGIIPDSSHPIVKTFNAKQIMGFMETLQSNIQSTVAALPPHREFLNQYVRPS

SEQ ID NO: 84659 - protein, 497 aa, Sphingomonas sp.
  REGION 1..497: note = tr|A0A4P6X9K3|A0A4P6X9K3_9SPHN Tryptophan 7-halogenase OS=Sphingomonas sp. AAP5 OX=1523415; GN = E2E30_16765 PE=4 SV=1
MTAAPSPDQTIKRVVVAGGGTAGWIAAAALAKHLGPLLEIVLVESDEIGTVGVGEATIPTIRTFHRLLELDERDFLRATQATFKLGIAFENWARDGDRYIHSFGRVGQSIWMGDFQHMWLRGRAAGIADELGAYCFELAAAEAGKFATADDAKINYAYHFDAGLYAHYLRDFSEKRGVTRIEGKIGGVVQNAESGFIEALELDDGRRIDGDLFVDCSGFRGLLIEQTLNAGYEDWSHWLPTNRALAVQTKAVAPPRPYTRAIAHEAGWQWQIPLQHRVGNGLVYCSDYLSDDAAREKLLAQVDGETITEPRAIRYVTGRRKRVWDKNCVALGLASGFVEPLESTSIHLIMIGITRLIQSFPFAGIKDSVVRRYNDLAETELERVRDFIILHYHLNERREPFWQRCATMEIPDTLAQRIALFAESALTPQTADDLFQADSWLQVMLGQRLEPGGYHHMGHVLSDAHLARAFADLKCNIAGAVGRMPTHQAFLDGYCAR

SEQ ID NO: 84660 - protein, 194 aa, Parvularcula sp.
  REGION 1..194: note = tr|A0A357LD85|A0A357LD85_9PROT Tryptophan halogenase (Fragment) OS=Parvularcula sp. OX=1979207 GN=DEA50_08540; PE = 4 SV=1
MGPAIKPGFRIVILGGGAAGWMTACLMAKRWAPSGVSISVVESPEIGIIGVGEGSTPQLKAFFRDLGVSENEWMPRCNATYKNGISFHGWSQRPGCERYFHPFPSPIDAHTAPAFHFNSFGRRRGIDLVAAPGRFFLSAKLAEKRLAPIAAHNFPFEIAYGYHFDAHLAGAFLRRHAEGRGVRHIEGKVTGIAL

SEQ ID NO: 84661 - protein, 501 aa, Streptomyces curacoi
  REGION 1..501: note = tr|A0A124H6L1|A0A124H6L1_9ACTN Tryptophan halogenase; OS = Streptomyces curacoi OX=146536 GN=AQI70_05465 PE=4 SV=1
MTAAYLRAALGDSIDVTLVESRRIKTIGVGEATFSTVRHFFDYLGLPETEWMPKCNATYKLGIRFENWRHKGHYFYHPFERLRVVDGFPLTDWWLQKKPSDRFDQDVFLMSAICDAERSPRYLDGRLFEQDFVEQREVSELERTTLAEQNTQFPYAYQFDASLLADFLTEYATERGARHIEDDVLEVVRDERGWISHLRTREHGDIAGDLFIDCTGFRGMLLNQALEEPFISYQDTLPNDSAVALRVPVDMEVKGLRPCTTATAQEAGWIWTIPLFGRIGTGYVYAGDYITPDEAERTLREFVGPEADELEANHIRMRVGRSRNSWVNNCVAIGLSSGFVEPLESTGIFFIQHGIEELVKHFPDATWDPRLRDAYNQAVANVMDGVREFLVLHYRCAARSDNAYWRDAKTRAIPDGLAARLEAWQAKLPTQETVFPHYHGFESYSYLSMLLGLGGLDLKPAGALALMDDTRVTKEFQLIKDQARELVQRLPSQYEYLAQMH

SEQ ID NO: 84662 - protein, 498 aa, Pseudoalteromonas aliena
  REGION 1..498: note = tr|A0A1Q2H1D4|A0A1Q2H1D4_9GAMM Tryptophan halogenase; OS = Pseudoalteromonas aliena OX=247523 GN=B0W48_16180 PE=4; SV = 1
MKPIKYVVIAGGGTAGWITAALLNKVLGKVINITLIESSSIGILGVGEATIPPIIQLNNALGINEQEFINETNATIKLGIEFENWKTPTHRYMHAFGSIGKDFPFCDFYNFWLKGHITGCEDELWDFSLNYQAAKQHKFAPLNTIPNTQLPGLSYAYHFDATLYAEYLKKLAISRGVKHIDAKISDVTQCLTTGNVKTLILDDNKQINGDLFIDCTGLRALLIEKTLNTGFVDWSHYLPCDSAIAVQTKSNDELKPYTRSIAHSAGWQWQIPLQSRIGNGLVYCSRYLSDEDAKQLLLDNLPAEPITEPRFIKFKTGRRVKQWHKNVVAVGLSSGFLEPLESTSIHLIQSAVTRLIKLFPHHGISDALASEFNKQSVIEIEHIRDFIILHYKLTEREDSAFWRQCMQMDIPDSLNHKLNLFKQTGKVMREDDELFAEIAWQQVMIGQGLMPDDYSTIVDSLTNEQLSDLFISLKTLVNSTVEKLPTHKEFLASIKRAS

SEQ ID NO: 84663 - protein, 505 aa, Parvularcula sp.
  REGION 1..505: note = tr|A0A357LCX7|A0A357LCX7_9PROT Tryptophan halogenase; OS = Parvularcula sp. OX=1979207 GN=DEA50_05240 PE=4 SV=1
MTFSPPPNRDPLRSVVIVGGGTAGWMAASVLSKAFGPALSITLIESEEIGIVGVGEATIPQIRHINNFLEIDENAFLKATNGTFKLGIQFNDWGRLGDSYMHAFGDIGMALGLTPFHHYWLRAVAAGKGGSLWDYSVNHQIAIRDRFAIMERIGSSRLTGTRHAFHFDASLYARFLRGRAEAAGVRRVEGKIVEVRRRAADGFIEGVTLEGGARIDGEFFIDCSGFRGLLIEGALAAGYEDWTHWLPCDRAVAAPCAHGAAIRPYTQASARKSGWQWAIPLQNRVGNGHVYCSRHISDDEAAAVLKENLEGELLGEPRLLRFVTGMRKRQWVKNCVSLGLASGFLEPLESTSIHLIQSGVSRLVSMFPDRHFDAALIDEFNRQSRFEFERIRDFIILHYHANERTDSPFWIERREMAVPEVLAAKLDLFRSTGRIYREHEELFTEQGWLQVMIGQRIAPLRYHPLADGLSESQLDEFLANIRTLIDRAAAAAPGHADYVKANCAA

SEQ ID NO: 84664 - protein, 537 aa, unidentified
  source 1..537: note = Streptomyces formicae
  REGION 1..537: note = tr|A0A291QLN3|A0A291QLN3_9ACTN Tryptophan halogenase; OS = Streptomyces formicae OX=1616117 GN=KY5_7454 PE=4 SV=1
MNGPGTNGTAGHDPAANGAAAAVRDVVIVGGGTAGWMTAAYLTAAFGNRVKITLVESADVGTIGVGEATFSDIRHFFEFLGLAERDWMPACNATYKLAVRFENWREPGHHFYHPFEQLRSVKGFPLTDWWLRYPTSKRFDTDCFVMASLIDANRNPRYLDNRLLEQEFVESDDLPNTIAEYQGAQFPYAYHFEAHLLAKYLTKYATERGVRHVVDNVVDVGLDERGWLSHVTTAEHGRLTGDLFVDCTGFRGLLINKALAEPFVSYQDTLPNDSAVALQVPMDMDKDPLRPCTTATAQDAGWIWTIPLISRIGTGYVYASDYIDAEEAERTLREFVGPAAADASANHIRMRIGRSRRSWVNNCVAIGLSSGFVEPLESTGIFFIHYAIEQLVKYYPAADWDQSLRDQYNGAVMNVMDGVREFLVLHYRGAKRADNQYWRDTKIRTVPDPLAERLEQWESKVPDAGTVYPRYHGLPPYSYNCILLGTGGIDVRPSPALDLIDEKDALAEFQAVRDKARHLVRTLPTQNEYFRRMREGV

SEQ ID NO: 84665 - protein, 506 aa, Duganella sp.
  REGION 1..506: note = tr|A0A4Q7XCL0|A0A4Q7XCL0_9BURK Tryptophan halogenase; OS = Duganella sp. BK054 OX=2512136 GN=EV297_4166 PE=4 SV=1
MNLHNRIGKITIVGGGSAGWMAAAALATYLGKGASVRLIESEEIGIVGVGEASVPHIRLFNGQMLGIDESEFIKRTQGTIKLGIEFEDWSRIGDSYIHGFGTIGRSVGPLPFHQFWLKLFQSGRAAPIGEYSPQTVMAPQGKFAPGDRSAAPGSLLADIAYAYHFDATLYARFLRELGEQRGVQRIEGRIVGVNQRADDGFIESVTLESGQVVDGELFIDCSGFRGLLIEQTLKTGYVDWTHWLPCDRAMAVPCEGVAPIMPYTRSTARKAGWQWRIPLQQRTGNGYVYSSRYISDDEAATTLLANLDGKALAEPRALRFTTGMRKKFWNKNVVALGLASGFLEPLESTSIYLAQSGITRLLGLFPKRDFNPLLAERFNRESAFEYERVRDFLILHYNATERNDSPFWDYCRTMPIPDSLRETIELFRCDGRYFRNGEDFFALPSWVQVMLGQRIVPKSYHPVVDDMPEEKLLDVVESMRAMLAKAVTAMPSHQDWIERHWKASAP

SEQ ID NO: 84666 - protein, 501 aa, Sphingomonas sp.
  REGION 1..501: note = tr|A0A0Q4KF81|A0A0Q4KF81_9SPHN Tryptophan halogenase; OS = Sphingomonas sp. Leaf33 OX=1736215 GN=ASE86_13205 PE=4; SV = 1
MPDAIGSILIAGGGTAGWMTAAALAHALPRGCTITLVESEEIGTVGVGEATIPPIRLFNETLGIAEGDFLKATKGSFKLGIEFVGWGRADARYFHPFGTFGKPFDLIAVHQHWLAARAQGSTVPLDDLSMAWGAASRGRFAAPHADPRSVASTFDYAYHFDAGLYARFLRDYAEARGVVRVEGRIADVARDGESGDVAAITLADGRRLAADLFVDCSGFRGLLIEGALATGYEDWTHWLPCDRAVAVPCATGGDGLTPYTRSTARAAGWQWRIPLQHRTGNGYVFSSAHLSDDDAAATLMANLDGPALGEPRFLRFVTGRRRQFWNRNVVAIGLASGFMEPLESTSIHLIQAGIAKLLAFFPTRERDPTAVAEYNRVAIAEFERIRDFLILHYKLNAGRSERLWQDCTAMDVPDSLAVKIEHFRQRGRLVQRENDLFGPASWLAVHIGQGNVPKSGDPLLAHIADPRASRAFVDKLAGAIAGMGASMPTHSDWIARTIATA

SEQ ID NO: 84667 - protein, 507 aa, Duganella sp.
  REGION 1..507: note = tr|A0A4Q7XHN7|A0A4Q7XHN7_9BURK Tryptophan halogenase; OS = Duganella sp. BK054 OX=2512136 GN=EV297_2546 PE=4 SV=1
MRDEQSRRRPVRRVVIAGGGTAGWMVAAAISRNLGKVLDIKLVESDEIGTVGVGEATIPSLLNFHRLLEINEQEFMAATGATFKLGISFENWRNVGEDYIHSFGMTGTDHWTAGFNHFWHKGRERKVAGDYGDYCLELKAAQLNRFGHLPRDGINYAYHLDASAYARYLRKYSEGYGVQRIEGKIAKVHTDTASGHITALQLDSGALLEGDLFIDCTGFRALLIGETLGESFEDWSHWLHNDSAIAVQTSSTGAAVPYTRAIAHEWGWQWRIPLQHRVGNGIVFSSRFVDDDTARARLLSKITGEQLVQPRVIRFKPGQRRKVWVRNCVAIGLASGFLEPIESTSIHLIQRGIIRLMQMFPSAGIFQSEIDEYNRQAWSEIEHIRDFIILHYKVTHRRDAPFWRHCADMDIPPSLQHRIDLFRETGRVFRLSNELFAENSWTQVMLGQGVMPLQHHPSADLMGDAELSSFLNSIRDHVARTVAQLPPHQQYVENYCAEYMAEYFAPK

SEQ ID NO: 84668 - protein, 530 aa, unidentified
  source 1..530: note = Streptomyces agglomeratus
  REGION 1..530: note = tr|A0A1E5P4W6|A0A1E5P4W6_9ACTN Tryptophan halogenase; OS = Streptomyces agglomeratus OX=285458 GN=AS594_08815 PE=4; SV = 1
MSDNLIKKILVLGGGTAGWMTASYLGKALGSTVRITVLEAPAIPKIGVGEATIPNLQRVFFDYLGLTEEEWMPECNASYKMGIRFINWRTPGTGTARPRPYGQYGDQFDHLFGLLPNHDNLPLSHYWTYQKLNGLTDEPFDRACYPQPALFDRKLSPRFPDGRRVASYAWHFDADLVADFLRRFATARQGATHIEDKFIAAETDQRGHLVAVTTESGRRLEADLFIDCSGFRSLLINQVMKEPFLDMSDHLLNDRAVATRLEHDDEEHGVEPYTSAIAMSSGWAWKIPMLGRFGTGYVYSSRFTSQEEATREFCQMWGISPDTHPMNHVRFRVGRNRRAWVKNCVGIGLSSCFLEPLESTGIYFTYAALYQLVKHFPDKRFDPMLTKSFNSEIEAMFDDTRDFIQGHFSFAPRDDTPFWRACKELELAPEFVRKVEMYKAGLGVDLPVTDESTYYGNFEAEFRNFWSNANYYCVFAGLGMMPEHDPTPLDYRPESVKSAEAVFAQVQRRRDELLDTLPPMHTYLRRLHGK

SEQ ID NO: 84669 - protein, 515 aa, Streptomyces hygroscopicus
  REGION 1..515: note = tr|A0A0S2PCT9|A0A0S2PCT9_STRHL Tryptophan 5-halogenase OS=Streptomyces hygroscopicus subsp. limoneus; OX = 264445 GN=SHL15_7526 PE=4 SV=1
MTQSVVILGGGTAGWMTASYLRAAFADRVDITVVESRRIGTIGVGEATFSTVRHFFDYLGLSEADWMPECNGTYKLAVRLENWRAPGTYFYHPFERMRVVDGVPLTDWWQKVGGTGSFDRDCFLIPWLCDAKASPRYLDHRLFEQDFDEDPDRPLYRTTLAEQNTQFPYAYHFDASLLADFLCRYAVGRGVHRIIDDVVDVRLDERGWIDRLVTREHADLTADLYVDCSGFRSRLLGDALGEPFVSFQDSLPNDRAVALRVPVDTAVRGIRPCTTATAQDAGWIWTIPLYDRIGTGYVYAADYCEPEEAERVLRDFVGPAAADLEANHIRMRIGRSHRAWVNNCVGIGLSAGFVEPLQSTGIFLIQHAIEQLVRYFPGTDRDPVLRDTYNLSTARAIEGVREFLILHYRGAARADNDYWRDAKKRPVPEDMAVRMEQWQSKLPDNDTTYPYYHAFEPYSYVCMALGLGGIPLRHPPALDLLDTRAARAELTRVREQARKLVDTLPSQVEYLSGLR

SEQ ID NO: 84670 - protein, 514 aa, Streptomyces spectabilis
  REGION 1..514: note = tr|A0A516R376|A0A516R376_STRST Tryptophan 7-halogenase OS=Streptomyces spectabilis OX=68270; GN = FH965_05605 PE=4 SV=1
MTLPDSEEFDVVVVGGGPAGSTLAALVAMRGHRVLVLEKEHFPRHQIGESLLPSTVHGVCRLTGVADELAAAGFPRKRGGTFRWGANPEPWTFSFAVSPRMSGPTSYAYQVERSTFDHILLKNARRVGADVREGCAVLDVVADDERVRGVRYTDADGHERRALASFVVDASGNKSRVYQGVGGTRAYSEFFRSLALYGYFEGGKRLPEPNSGNILSVAFESGWFWYIPLSDTLTSVGAVVRRELADKIRGDQDKALRALIAECPLISEYLADAHRVTTGQYGKLRVRKDYSYHHTTFSRPGMVLIGDAACFVDPVFSSGVHLATYSALLAARSINSVLAGTVDEPRALREFEARYRREYGVFYEFLLSFYEMHHDEDSYFWQAKKVTEADRPELQSFVELIGGVSSGERVLTDADVVAKRFRAGSAEFADAIDEVAGSADGSMVPLFKSSVVREVMQEGGQVQMRALLGEDAEAEAPLYGDGLVPSADGMLWCEPRGTGASDPAAGDAPGRAGE

SEQ ID NO: 84671 - protein, 533 aa, Streptomyces sp.
  REGION 1..533: note = tr|A0A0M9Y993|A0A0M9Y993_9ACTN Tryptophan halogenase; OS = Streptomyces sp. WM6368 OX=1415554 GN=ADK51_04660 PE=4; SV = 1
MTSSDTRLQKVVILGGGTAGWMTAAYLGKALQGTVDITVLEAPSIPRIGVGEATVPNLQRSFFDYLGIAEDEWMRECNASFKMAVRFVNWRTDGQGESTARELPGGGPDHFYHPFGLLPDYDQTPLSHYWFKRKYEGRTTEPFDYACFREPPVMDAMKAPRWLDGRPATRYAWHFDAQLVADFLRRFSTEKQGVNHVQDEMVRVEQDGRGYVTTLHTKGGLALDADLFVDCSGFRGLLINQAMEEPFIDMSDHLLCDSAVATAVPHDDEANGVEPYTSAIAMTSGWAWKIPMLGRFGTGYVYSSKFADQDTATREFADMWGLDVEETKFNHIRFRVGRNRRAWVKNVVSIGLSSCFLEPLESTGIYFITAAIYQLAKHFPDKTFNEGLVNSFNHEIEVMFDDTRDFIQAHFFYAPRNDTPFWQANKKLVLPENIQQKISAYKAGLPINSPITDESTYYGNFEAEFRNFWTNGSYYCIFAGLGLEPDAPLPSLAHRPDSVASAEPLFDAVKRQQQNLLETLPSAYDYLRQLHGA

SEQ ID NO: 84672 - protein, 507 aa, Shewanella sp.
  REGION 1..507: note = tr|A0A2R3EQE7|A0A2R3EQE7_9GAMM Tryptophan halogenase; OS = Shewanella sp. WE21 OX=2029986 GN=CKQ84_02085 PE=4 SV=1
MTIRKVAIVGGGTSGWLAANHLGLVLKNNPELSITLIESLDIPIIGVGEGTVPSIRKSLSSFGISESDFIKSCDVTFKQSIKFVNWLDRAKHGNNNFYHHLFDMPSPLGEDLTPYWLTHPREHFADLVSPQHAVCEENKGPKFITTPEYGGVMGYAYHLNAAKFAKLLAKNAIERFNVEHIYATVNDISLEKDGSICSLLTDKGELFFDLYIDCSGFESILLAKGFDVPFIDKSHQLFINTALVAQVPTQALDQIPPFTIATAHQAGWIWDIALTQRRGTGFVYSTDYMSNAEAEDTFDQYLGGQLADLSHRKIAMKVGYRQQFWVKNCVALGLAQGFLEPIEATSILLTDFSARFLAERFPSDKDDIDYLAKRFNETVSQAWERVVEFAKLHYCLSDRSDSAFWRDNRTDETIPEGLKQRLKMWQDFIPIAEDFPSKFEVFNRENYLYVLYGMKYSTRPTYSNAEVDQRVVQHLAKMTLLKSKMISELPDHRELLDKIRLYGLQSI

SEQ ID NO: 84673 - protein, 521 aa, Xanthomonas vasicola
  REGION 1..521: note = tr|A0A2P5ZUJ0|A0A2P5ZUJ0_XANVA Tryptophan 7-halogenase OS=Xanthomonas vasicola OX=56459; GN = FQJ88_10835 PE=4 SV=1
MPHTMPSDPQQRPVRRIVIAGGGTAGWMAAAAMSKLLGRHLQITLVESDEIGTVGVGEATIPSLVTFHRLLEIDEAAFMAATQATIKLGIAFEHWRDVDRHYIHSFGHAGTDHWSAGFQHFWLKGQQRGVARDFGDYCLELRAAQEGRFAHLPNGGMNYAYHLDAGLYARFLRRFSEGFGVTRIEGRIGQVETNAESGFLTALTLQDGTRVEGDLFLDCTGFAGLLIGKTLGVGSDDWSRWLFADSALAVQTESVGPPVTYTRSRADQAGWMWRIPLQHRVGNGIVYSSRHMDQDSARVVLERNLTGRALTAPRPLRFTPNQRHRVWEKNCVALGLASGFLEPLESTNIHLIQRGIIRLLQTFPQVINAVDIAEYNRQAADEITHIRDFVILHYHATDRRDTPFWRDCAAMDIPDSLRHRVELFRQSGRVFHQANELFAENSWVQVLLGQGIVPQQHHPVADLMGDAELSRFLETIRTRVEGALVRLPAHADFLQRYCPAPPPPEPAARVPAPTVMATPAG

SEQ ID NO: 84674 - protein, 480 aa, Burkholderia pseudomallei
  REGION 1..480: note = tr|A3N9R2|A3N9R2_BURP6 Putative tryptophan halogenase OS=Burkholderia pseudomallei (strain 668); OX = 320373 GN=BURPS668_2048 PE=4 SV=1
MHLPNRTQVLVIGGGPAGATGAAFLAREGVEVTLVDKEVFPRYHIGESLLPSCLEILTLMGARDTFDRHGFQRKPGAYFNWKGETWKLDFGELGGTYRYSYQVRREEFDHLLLQHARAVGAQVHEGVSVREILFDDGRPCAALCVAQGTEEASTVEFDYLVDASGRNGLMSTRYLDNRKFHEIFRNVAAWGYWEGLSWPDDCAPGSILVSSIPDGWWWAIPLADRPTSVGVVMHRDAFVAARRTGTLEQVYAQALALSPVMANLTEHARLVTPLKTEQDYSYTCDSFAGNGYFLSGDAACFLDPLLSTGVHLAMYSGMLAAASLASILRAEVTEREAAAYYRDSYRQAYLRFLVFVQTFYEAHGKLGYYSKADELSHYMIEAGDIRRAFLNLVSGLEDIADAEQATSHLMGEMSRRIDQNLALRKDKRALSSAIGSTQVEDNARFFDAIEGLPCLSANMALDGLYVSTRPRLGLQRVAAM

SEQ ID NO: 84675 - protein, 510 aa, Sphingomonas sp.
  REGION 1..510: note = tr|A0A4V1ACH2|A0A4V1ACH2_9SPHN Tryptophan 7-halogenase OS=Sphingomonas sp. AAP5 OX=1523415; GN = E2E30_04530 PE=4 SV=1
MTGQSERIHGERAIRSIVIVGGGTAGWMAAAMLARRLEKQPVAITVVESSAIGTVGVGEATVPGIRDFFREIGVTEREVMAASHGTVKLGIEFADWKRPGHSFFHPFGLYGMRSRGVAFHHYWQKLRAAGEPVELADYCLATAMAKQNVFMLPTDRPVHDLLFFDWAVHFDAGLFAKFLATRAVSDGVTRVDATISTVRINAQTGLIDGVDTNCGKAIDGDLFIDCTGFRSLLLGAALGSGYEDWSNLLPCDRAVAMPCERAGPLTPFTRSTAFAQGWQWRIPLQHRVGNGLVYASRHLSDDEAVATLRSRIEGAPLAEPNLIRFRTGHRRDFWRGNCVGFGLAAGFMEPLESTSITLIQTGVEKLLALFPDRDFDPALASEYNRSTTLEYERIRDFLLLHYWANDRRGEPMWDQCRDTALPEALANKLRLFRARGHLVRYEWESFQDPSWLSMYAGFEIAARTYDPAADYFSIPDLQSALARMRESIGKAVALAEPHDAFLKAYAVASA

SEQ ID NO: 84676 - protein, 506 aa, Sphingomonas sp.
  REGION 1..506: note = tr|A0A4P6XCW2|A0A4P6XCW2_9SPHN Tryptophan 7-halogenase OS=Sphingomonas sp. AAP5 OX=1523415; GN = E2E30_06895 PE=4 SV=1
MSDSAKDLARDGAIVILGGGTAGWIAACLIAQRWPSARVTLVESPEIGIVGVGEGSTPQLKGFFDRLGIAEAEWMPACDATYKLGIGFAGWSDRPGFERYFHPFPTALDSHTAGAFFYNTRARRTGRDVAAHPDQFLLPARLAAAGCAPQPDESFPFEVSYGYHFDAYKVGAFLGRHAVTKLGVTHLQRRVESVERRADGGIAALLCDDGARIAGDLFLDSSGFRSLLFEGTLSVPFVRYGDSLFNDSAVVMPTPRDPAAPLASQTRATALSAGWVWNIPLTSRTGNGYVYSSRHISRDQAEAELRAHLKVGDEGTARHLSMRVGRVAESWSHNALAVGLAQGFLEPLEATALHIVIATVEAFLDAVDADGFTEKARAPFNARIAARYDGVRDYIVAHYRLNQRHADPHRYWAAARAVEPSDTLKHVMSAWFTGADLTATIDQLDITRYYNAISWHCLLAGYGTFPDDARLVPPGPDIERIDMVRIEDFLRRCAHNFRPHTDHLPR

SEQ ID NO: 84677 - protein, 503 aa, Sphingosinicella sp.
  REGION 1..503: note = tr|A0A4P6FP91|A0A4P6FP91_9SPHN Tryptophan 7-halogenase OS=Sphingosinicella sp. BN140058 OX=1892855; GN = ETR14_09110 PE=4 SV=1
MSEAALDQSAEGPIRSIVIVGGGTAGWMSAAYLARKLRHLPIAITVVDSAQIGTVGVGEATVPAIRDFLAAVELKDVDVLRETEGTVKLGIRFVDWARPGHQFLHPFGLYGVPARGVAFHHYWLKLLAAGDALPLSDYCLCTQLAENGLFLAPPDRPTSDLGIFDFALHFDASRFAAMLKRLSLANGVRHIDGVIEQVAQDPERGDVTSVALADGNRIEGDLWIDCSGFRGLLIAGALETPFLDWRHWLPCDRAVAIGCREAQPHKPVTTAAAREAGWQWHIPLQHRIGNGYVYCSDHIGDDEAEAALRSRLEGDPVSAANRLRFTAGHRAETWHRNVVAIGLSAGFLEPLESTSITLIQSGLERFVQLFPDRSCDPRLAATYNRQSTLEFERIRDFLLLHYLGNARIGEPFWDRMRGMALPDTLQAKLDAWRARGEFVRYEWESFQNPSWLSLYAGFGDLPRRYSPLADQFTEAELRDTFARMRAAIAGTVKLGVPHRSILA

SEQ ID NO: 84678 - protein, 506 aa, Xanthomonas campestris
  REGION 1..506: note = tr|A0A517GTX2|A0A517GTX2_XANCG Tryptophan 7-halogenase OS=Xanthomonas campestris pv. glycines; OX = 473421 GN=FPL04_21375 PE=4 SV=1
MIPAPLRNIVIVGGGTAGWMAAAAFARVLGPGFKVQLIESEQLGTVGVGEATVPHIKAFNNLLGIDEAEFVRQTQGSFKLGIEFVDWQRPGTSYIHGFGTQIGHPLGLLPFHQYWIKQHARGKAQPLGAYTLNTVAAVRGKFMTSAGDVPANSPLANIAYAYHFDATQYARFLRTYAEQRGVTRIEGLVEQVQLHADSGHVQSLQLASGQVVSGDLFIDCSGFRGLLIEEALHTGYHDFTHWLPCDRALAVPSENVGPPTPYTRSTARAAGWQWRIPLQHRTGNGYVYSSAHISDDEAAATLLANLEGKPLSDPRPLRFTTGRRKQFWNRNVVALGLASGFLEPLESTSIHLIQAGISRLLELFPREGISPVLVQRYNDRLAFEFDRIRDFLVLHYHATERDDSAFWRHCRTMPITPELQTTLDLFRDSGRFYRNAEEMFAEISWVQVMVGQGILPRAYHPLVDQVPDHDAERFLASVAQTIGHCVDVMPTHQQFIDRYCKAAAPR

SEQ ID NO: 84679 - protein, 514 aa, Sphingosinicella sp.
  REGION 1..514: note = tr|A0A4P6FXG8|A0A4P6FXG8_9SPHN Tryptophan 7-halogenase OS=Sphingosinicella sp. BN140058 OX=1892855; GN = ETR14_01435 PE=4 SV=1
MTKEVIVVGGGTAGWVTAAYLAKRLNAASQGGIRLTVIESPDIPVIGVGEGSFPSIRKTLSAIDIDEADLIREANATFKQGIRFADWRAPGPDGPHHYFHPFQISDQSDGLDLLPYWLMGAAGDAAWAEVNTVQKSAADACLAPKLPGHPPFAGPLTYAYHFDAVLLGRLLRKRAVALGARHVEDKVTGVELGEDGSIAALLCREGGRVAADLYVDCTGFRAQLIGEALGIPFHSRRGELFVDSAVALQVPYEQPGGPIASQTIATARSAGWIWDIGLHERRGTGYVYSSAYTDDEAALRTLRAYVGPGADAIEPRLLEFEAGYRQIQWHKNCVAIGLSSGFIEPLEATGIGFAEIAALMLVNLFPWGGDQEVSARQFNAIMVKRYDHVVDFIKLHYCLSDRADSAFWIDNRDPATWSDGLSERLERWRYRAPDFIDVDLNHDIFLAANWQYVLYGMGYKSDLGAQAGAFRYHAEARRAFADIRAQQANAQRLLPSHRALIEQARRPDFRFPKR

SEQ ID NO: 84680 - protein, 505 aa, Xanthomonas vasicola
  REGION 1..505: note = tr|A0A2P5ZT76|A0A2P5ZT76_XANVA Tryptophan 7-halogenase OS=Xanthomonas vasicola OX=56459; GN = FQJ88_01965 PE=4 SV=1
MTQAQIRKVVIAGGGTAGWIAACALSHQFRDLLDITLVESEQIGTVGVGESTVPPIRTFHRFLQIDEQEFLRAVAGTFKLSISFENWLRQGDRYIHPFGITGQSTLVCAFHHLWLESQRRGMPGSFGDYCLETVASRVDRFALHGEPAVNYAYHLDAALYAKFLRARSEACGVKRIEGKIQQVTVQPHSGDVASLVLEDGQVIEGDLFIDCSGFRGLLIEQTLHTGYEDWSHWLPCDRAVAVQTEAVGPPVPYTRAIAHEAGWRWHIPLQHRVGNGLVFSSKHLSDDEAHAKLLHDVAAPAVKDPWMVPFRTGRRLKAWNKNVVSLGLASGFIEPLESTSIHLTISAVVRLLALFPAEGIAPSQVQLFNDVSRAEMEHVRDFVTLHYHATQRDEPLWQQCREMELPDSLALRLRAWRERAHAWQGADELFRVDSWTHVLMGQGIAPEQHHPLTRAFADHDLRRLLDGIAQPIQHAVQQMPSQQAFIERYCKAGAQVWGMRRPMPA

SEQ ID NO: 84681 - protein, 492 aa, Sphingomonas sp.
  REGION 1..492: note = tr|A0A4P6XCD5|A0A4P6XCD5_9SPHN Tryptophan 7-halogenase OS=Sphingomonas sp. AAP5 OX=1523415; GN = E2E30_05245 PE=4 SV=1
MIASPRRIVVAGGGTAGWMAAAAIARTMGRTAEVTLIESDAIGTVGVGESTIPPLVTYNRLLGIGEADFMRATQATFKLGILFDGWKDGTDRYFHSFGTTGQDHWSAGFQHFWMNGRERGHDASYDAYCLELVAAMEGKFAHLPDERMNYAYQLDSSLYAQFLRRMAEGDGTRRIEGKIARVALDGETGDVAALHLESGVVVEGDLFLDCTGFRALLIEQALHAGYDDWSHFLPCDSAIAVQTENVRPPVPYTRAMAHDAGWQWRIPLQHRTGNGIVYCSRYLDRDAALERLLGNVEGTVLTEPNNIRFVTGARRRQWHRNVVAIGLSGGFMEPLESTSIHLIQRAILRLIRMMPGGAISPRDVAEFNDQQFADMEQIRDFLILHYKATNRRDSPFWRQCAAMEVPESLAQKIALFRETGRVFRRNEELFAENSWVQVMLGQGIEPAAYHPIADKLPDEELARFLGTLRENVARTVAGLPAHADYVAQYCGG

SEQ ID NO: 84682 - protein, 504 aa, Sphingomonas sp.
  REGION 1..504: note = tr|A0A0Q4KT19|A0A0Q4KT19_9SPHN Tryptophan halogenase; OS = Sphingomonas sp. Leaf33 OX=1736215 GN=ASE86_01645 PE=4; SV = 1
MTTNPPIRIVIAGGGSAGWMCAAAFGRFLGPGVIVTLVESDEIGIVGVGEATIPQIRLFNQALGIDEDAFVRATGATFKLGIEFVGWGAAGERYMHAFGDIGRDSGLTPFHHLWLRGRSEGVAGPLSAYSLNNQAALAGRMQRGKPRTAPVLPDMPYAFHFDASLYAAYLRRFAEARGVTRVEGRIVAVERDGASGDVAALMLDHDRRIEGDLFLDCTGFRALLIEGALGAGYEDWTHWLPCDRAMAVPSARATDFTPYTRASAHRAGWQWRIPLQHRTGNGVVYSSAHMSDDAARDQLLANLDSAPLAEPRPLRFTTGRRRELWKANVIAIGLASGFLEPLESTSIHMIQSAIERVLKLLPGRRIAPALRDEYNRQAVFEYERVRDFILLHYVANRRDEPFWRERRETALPDTLRAKLDLWKAAAQITRDREELFTEVGWLQVLIGQGVMPDAWHPLADAMPAAQVAEFLDILPRLTAREVAQMPGHADFIARYCAAAEGVAA

SEQ ID NO: 84683 - protein, 514 aa, Sphingobium lucknowense
  REGION 1..514: note = tr|A0A081T0H3|A0A081T0H3_9SPHN Tryptophan halogenase; OS = Sphingobium lucknowense F2 OX=1450518 GN=AL00_13725; PE = 4 SV=1
MIHPVRNIVIVGGGTAGWLTAGVIAARHRSRIGNGFTVTLVESPNTPIIGVGEGTWPTLRTTLSRMGISETDLFRECDAAFKQGARFARWTTGTPDDGYYHPLMLPQNFGQVNLAPHWLAGDGDESFCDSVCSQGRICDDGLAPKTIATAEYDALANYAYHLDAGKFAPFLQRHCTEKLGVRHVQADVEQVLMKEDGDIRAIRTTQAGEIEGDLFVDCTGFKALLIEGAMKVPFRDCNDVLFCDTALAMQVPYDRPDSPMASHTISTAQSAGWIWDIGLPTRRGIGHVYSSNHISDEEAERELRAYIGPPAEGLSARKIPIRSGHRETFWKGNCVAVGLAAGFLEPLEASAIVLIELSAKIIAEQMPACREVMDIVASRFNATTHYRWGRIIDFLKLHYVLTKRTDSDFWRDNVREETIPDRLQELMLLWRYQSPWFLDEFDRVEEVFPAASYQYVLYGMGFRTEVDRPALARDAHLADRARRENAAMTAKLRAGLPRHRDLIDKIVTHGLQPV

SEQ ID NO: 84684 - protein, 410 aa, unidentified
  source 1..410: note = Paraburkholderia graminis
  REGION 1..410: note = tr|B1G2K1|B1G2K1_PARG4 Tryptophan halogenase; OS = Paraburkholderia graminis (strain ATCC 700544 / DSM 17151 / LMG 18924 / NCIMB 13744 / C4D1M) OX=396598; GN = BgramDRAFT_ 3646 PE=4 SV=1
MKHLAADVVIIGAGPAGAVAAALLRKAGRSVLVLERQHFPRFSIGESLLPQSMAYLEEAGMLQAVVEAGFQYKNGAQFVYRDRSSSFDFRDKHSAGWGTTYQVERAAFDDILIRCAAAQGADVRFGHTVQAVHTDSVAPRVDVTDEASHAYQIEARFVFDASGFGRVLPRLLNLEAPTRMPTRAALFSHVYDGLPAGAHDRNKICVATHPERRDVWFWMIPLAGGRSSVGCVAESSFLDVPENEREAMLRALIQKEPTFNRLIGDAPFLMPVRHIGGYSANVERLHGPGYALLGNAGEFLDPVFSSGVTIALRSAHLAVQTLNRQLDGEQVDWSAQYDVPLRKGIDTFRAFVERWYTGELQDIIFYPDQTPSIRRMISSVLAGYAWDESNPYVADPVRRLNALHEVCTQR

SEQ ID NO: 84685 - protein, 496 aa, Sphingomonas sp.
  REGION 1..496: note = tr|A0A0Q4KDU5|A0A0Q4KDU5_9SPHN Tryptophan halogenase; OS = Sphingomonas sp. Leaf33 OX=1736215 GN=ASE86_01665 PE=4; SV = 1
MTEPAPTIVILGGGTAGWMTACLMAQAWPAAAITVIESPDIGIVGVGEGSTPQLRAFFRDLGIAETDWMPACSATYKAGIRFAGWSQDPGFDSYIHPFASDVDLHTEPAFHAAALARRTGHDVPAHPDAFFLNSWLIEHRRAPLPTDNFPFDAAYGYHFDAHLVGAYLRDHAVGRGVAHLPRTVTDVVVGADGDVRHLLFDDGHTLTADLFVDCSGFRSVIAQEALGVPFVSFASNLFNDRAVVMPTPSDPTGTDVHTTATALSAGWAWAIPLTSRVGNGYVFSSRYLDAHDAEAEFRAHLGVGDAGTARHLTMKVGWVATSWTGNCLAVGLSQGFIEPLEATALHIVQATVEGFIAAWDSAGFTPARRDEFNRVIARRYDGIRDYIVGHYRLNRRTDTPYWRDAATMDTLSDSLKSLFTAWFTGRDLVEEVARQDIAKYYAPLSWGCLFGGYGTYPDAARLRTGTSVDTGRIAHFLTACGRNFPAHDAVLALRRG

SEQ ID NO: 84686 - protein, 575 aa, Rhodopirellula sp.
  REGION 1..575: note = tr|M5TAB5|M5TAB5_9PLAN Tryptophan halogenase; OS = Rhodopirellula sp. SWK7 OX=595460 GN=RRSWK_06749 PE=4; SV = 1
MTAPIEFNPTTLRPLGGLNAANAGVDRDCHIVIVGGGTAGWMSAATLKRRVGCRVSVVESDRLPPIGVGEATIPAMVDWIENMGIDEDEFIRRTGATYKLAIRFDDWIESSHRYWHPFGICGCPINGSDLIHTWQRGVREGWLPSDSQYTDHSFQRELCEQGCAPREPDCPSVAQNYAFHLDAGKLAGFLKEVALDEGVRHYVGDVDGATVDERGNIACLHLDGEPALAADLYLDCSGFASVLIERELQSPWEDWSDQLICDRAITLRLPSRHGTNERCVKDHDSGQRHARLPPYTISKGMDAGWSWQIPLAASTGCGYVFSSKHITDDAARRELCELVGVDPETIQTKTVPMRVGMRRNQWIGNCVALGLAAGFVEPLESTGIFLVQRALDELVECLPPATPLAFHADHFDQETFNDRMTDVYHQVRDFVLMHYVVSRRRDTPFWTDAASVVLPESLSTLMEEYVTTGRVLLPARDPTFAEANHHFILSPAGIEPGVCPPSGQDSVSFSPQMHADSAAALLTAIRSRHQEICTRLPTHGDLIHAIHGSAPASDARVGAHRLPPQPTLHRVNVLS

SEQ ID NO: 84687 - protein, 502 aa, unidentified
  source 1..502: note = Parashewanella spongiae
  REGION 1..502: note = tr|A0A3A6UBD1|A0A3A6UBD1_9GAMM Tryptophan 7-halogenase OS=Parashewanella spongiae OX=342950; GN = D5R81_03305 PE=4 SV=1
MKMLPFGSIFFRGYNMKKKIDVKKVIIVGGGTAGWMTAAMLSKLLGTQIEITLVESTTVGTVGVGEATIPSIQLFNSTLGINETDFVKATQASFKLGIQFEGWGNEDSDYMHAFGVIGKDLGLSSFHYYWLQQAESAKKFWDHSLNYQTAKANKFSLTKTQNEELAYAYHFDANLYAQYLKKISLSQGVKCVEGFISEVRLNDESGFIQEIELETGEILSADLFIDCSGFKGLLIEQALNTGFDDWSDYLPCDHAWAVPSEKIDSIKPYTRSIARDAGWQWQIPLQHRVGNGLVFSSTYMSPDTAKKKLIASLPSKPLAEPKLIKFKTGMRKKQWNKNCVAIGLSSGFLEPLESTSIHLIQSAILRLIQLFPKTITTEIEDEFNHLSRMEFEEIRDFIILHYHLNNRRTSFWKYCREMDIPESLSRRIRLFTKHARTNIGNQELFSATAWQQVMIGQGIIPENNHPISNVANEKQTKAFMQHNKLRIREIVKGYESHESFFI

SEQ ID NO: 84688 - protein, 501 aa, Duganella sp.
  REGION 1..501: note = tr|A0A4Q7XTE7|A0A4Q7XTE7_9BURK Tryptophan halogenase; OS = Duganella sp. BK054 OX=2512136 GN=EV297_1842 PE=4 SV=1
MPAKPIRKIVIVGGGTAGWMSAAPLALRLGNACEIVLVESAEIGTVGVGEATLPTIRYFNHALGLDNADFVRKTQATFKLGIEFKDWGHIGNRFFHGFGDFGPAIENRSPVTYWLRLAREYRDMPSYEEWSTATAMARNNRFMEPYGDQPAVTNAFSYAYHFDASLYAAYLRDYAMERGVQRVEGMINEVEQHPETGFITALKLKDGRRVEGDLFIDCSGFRGLLIEGVYQAGYDDWSAMLPCNSAQAVPCEKVEPLTPYTTSTARSAGWTWRIPLQHRTGNGHVYCNGFTSDEEAGRVLLDGLDGTALDSPRQLRFTTGRRRKSWIKNCVAIGLSSGFLEPLESTSINIIENSVGWLLQFFPDLAFRPELADEFNRRVSQRYEYVRDFIILHYKVTQRSDSEFWRYCANMAIPDTLRHQIDLFRATGHVTLYDPDGFGVASHISILMGLGIVPEAYDPLVDLMDLARLREHFSRVRDSINRAVAMMPGHGQLLAQLAGGK

SEQ ID NO: 84689 - protein, 445 aa, unidentified
  source 1..445: note = Accumulibacter phosphatis
  REGION 1..445: note = tr|C7RKA4|C7RKA4_ACCPU Tryptophan halogenase; OS = Accumulibacter phosphatis (strain UW-1) OX=522306; GN = CAP2UW1_0338 PE=4 SV=1
MQDEAGGTDRRECDVLVIGGGPAGSTVAPLLVEKGYRVVLLEKARHPRFHIGESLLPANLPLFERLGVAGDVRAIGMEKWGAEFVSPQHAMPQAFHFADAWDKSMPYAYQVKRAEFDTILIRNAAKKGVEVHEGCKARAVDFPRDDKAVVRARYDDGREVEWTARFVVDASGRDTFLANRFQIKHRNPRHNSSAVYGHFSGALRNDGQAAGNITIFWFEHGWFWFIPMKDDVTSVGMVTWPYFMKTRGERSIERFLMDGIATCPALARRLAGAQLIHQVEATGNFSYVSERTHGANYLLLGDAYAFIDPVFSSGVLLAMHSGVIGSAAIDTCLKTPAEATAALKRFDQLMQHGPKQFSWFIYRVTNPIMRDFFMGPKNIFRVKEALLSVLAGDIFGKTPIWRSIHMFKLLYYIANAIQPRRAFMGWRRRRFNIRRVDDPALSSAP

SEQ ID NO: 84690 - protein, 505 aa, Xanthomonas campestris
  REGION 1..505: note = tr|A0A517GR02|A0A517GR02_XANCG Tryptophan 7-halogenase OS=Xanthomonas campestris pv. glycines; OX = 473421 GN=FPL04_15100 PE=4 SV=1
MSQAPIRKVVIAGGGTAGWIAACALSHQFRELLEITLVESEQIGTVGVGESTVPPIRSFHRFLQIDEQEFLRAVAGTFKLSISFEHWRHQGERYIHPFGITGQSTLVCAFHHLWLESQRRGMPGSFGDYCLETVASRVDRFALLREPAVNYAYHLDAALYARFLRTRSEACGVRRIEGRIQQVTLQPDSGDVASLLLEDGQVLEGDLFIDCSGFRGLLIEQALHTGYEDWSHWLPCDRAVAVQTEALGPPVPYTRAIAHEAGWRWHIPLQHRVGNGLVFSSKHLSDDEAHAKLLRDVAAPALKDPWLVPFRTGRRLKAWNKNVVSLGLASGFIEPLESTSIHLTIAAVVRLISLFPADGIAPSQVELFNDISRAEMEHVRDFIILHYHATQREEPLWRQCRAMELPESLALRLRAWRERAHAWQAADELFRVDSWTHVLMGQGIVPEQHHPLARALSDRDLRRLLDGIAQPIRHAVEQMPSQQAFIDAYCKAGAGVWGLRSPVVA

SEQ ID NO: 84691 - protein, 494 aa, Duganella sp.
  REGION 1..494: note = tr|A0A4Q7XVQ3|A0A4Q7XVQ3_9BURK Tryptophan halogenase; OS = Duganella sp. BK054 OX=2512136 GN=EV297_1838 PE=4 SV=1
MNTAYKRIVVVGGGSAGWMAAIALATALPASSVELVESEEIGIVGVGEATFPSIRTFHRLLGIDEARFLRATNGTYKLGIEFRDWRAAGEHYFHTFGDIGGLSGSRSLWGQYRRVGDAGLGALGEQCLPSVMAREGRFQLAASEEQQQFSYAYHFDAMLYADFLRTLALQRGVRRTEGRIVHVERGADGSISQLKLPDGRVVEGELFVDCSGFASLLLGRTLEEPFVDFGRWLPVDRAWACPSERSGPELAPYTRATALEAGWAWRIPLRSRTGHGHVFSSRYIDEERAREQLMQQLDGAPVAEPRLLRFATGHRQRFWVHNVVALGLSSGFLEPLESTSIFLVQSGLGRLIEVLLAGARPAPAEVAAYNTGMQRQFERVRDFIILHYCLTARRDSQLWRDMASMALPETLAFKIHAWRQSGTLHQYDEEGFDATSWLAIHAGMGHWPERADPSLHDISHEDALLALRFRRDSIAATVAAMTTHQDYLQSVLAR

SEQ ID NO: 84692 - protein, 506 aa, Pseudoxanthomonas sp.
  REGION 1..506: note = tr|A0A1H1GQG4|A0A1H1GQG4_9GAMM Tryptophan halogenase; OS = Pseudoxanthomonas sp. CF385 OX=1881042; GN = SAMN05428982_3358 PE=4 SV=1
MDGNSIREVVVVGGGSAGWMAAAALVRHLDRTCKVRLVESDEIGIIGVGEATVPHIRTFNAQALGLEEAEFVRATQGTFKLGIEFRDWARIGDRYMHGFGTVGHDPGPAAFHHYWLRLRLAGKDVGDIGAYQLQTVASREDRFLPGASDVPPTSPLASVAYAYHFDATLYARYLRGFAEGQGVERIEGKVVDVELRPEEGFVSAVVMADGRKVEGDLFIDCSGFRGLLIEQALKTGYEDWSHWLPCDRAVAVPCARVGDPTPYTRSTARTAGWQWRIPLQHRTGNGLVYCSRFLSDDEAAGTLLANLDGEAQAEPRPLRFVTGKRKQFWNRNVVAVGLASGFMEPLESTSLLLIQTAILRLLDMFPRQGIDPGLVARYNERTHFEYDHIRDFLILHYKAVERDEPFWRKCREMAIPDTLRANIDLFRNSGRFYRDGEEFFALQSWIQVMLGQRIVPKAYSPLVDRLSEAEVEAFVANVRQTIERCVQAMPKHQAFIERHCRAPAVG

SEQ ID NO: 84693 - protein, 435 aa, Rhodopirellula sp.
  REGION 1..435: note = tr|M5TF59|M5TF59_9PLAN Tryptophan halogenase; OS = Rhodopirellula sp. SWK7 OX=595460 GN=RRSWK_05025 PE=4; SV = 1
MILRTGVKTMKTSYDCVVVGGGPAGGTAASIVASAGLSTLLIEREAVPRFHVGESLMPEAYWPLERLGLIDKMKTSGWQQKKSVQFVTHTGKESEPFFFREHDERECSTTWQVERSEFDKMLFDRAAELGADCRDRTRLVEVKFDPTDSPDTPPRASGVVIRDAAGQDHTIECRVVIDATGQQSFIAGRLGLKEVNPNLKKAAIWTYYKDAIRGDGDNEGATIILNSENKNAWFWFIPQSRGITSVGCVADHEYLLKGRGTPEEIFGEELASCPGLIPRLSSATRVGKFTTAKEFSYMTRQHAGPGWALVGDAFGFIDPVYSSGVYFALEMGVRAGDAVVEGLQNNDLSGDQLGKWAPEFKAGAERIRKLVHAFYDKDFSIGRFMREFPQYRGNVTDLLIGRVFTDDAGRMFPDMQQSIENTRQQKLAAAKEMNA

SEQ ID NO: 84694 - protein, 509 aa, Pseudoxanthomonas sp.
  REGION 1..509: note = tr|A0A1H1GAL4|A0A1H1GAL4_9GAMM Tryptophan halogenase; OS = Pseudoxanthomonas sp. CF385 OX=1881042; GN = SAMN05428982_3102 PE=4 SV=1
MLTPDAPEGHIRNVVIAGGGTAGWLAACALSHQFRDRLRITLVESEQIGTVGVGESTVPPIRTFHRFLQIDEQEFLRAVAGTFKLSISFENWRRPGERYIHPFGITGQGTWAAAFHHFWLDSQRRGMSSELGDFCLETVASRGDQFSLQTQPQVNYAYHFDAGLYAKFLRRIAEGYGLLRVEGKIREVRQHVGEGSLQSLVLEDGQVIEGDLFIDCTGFRGLLIEQTLQTGYEDWNEWLPSDRAVAVQTESIGPPVPYTRAIAHEAGWRWHIPLQHRVGCGLVFSSRHMSDDEARAKLLRDVGAPAIRDPWLVPFRTGRRLKAWNKNVVALGLASGFIEPLESTSIHLAISAVVRLVQMFPFDGIAPSLVELYNDVSRAEMEHVRDFIILHYHATQRDEPMWKACREMALPESLEIRLCAWRERAHAWQDPDELFRVDSWTHVLLGQGISPGPPHPLARALADNDLRSLLSSIRQPIERAVATMPSQQAFIDRYCKAGPDVWGNRSMPR

SEQ ID NO: 84695 - protein, 520 aa, Duganella sp.
  REGION 1..520: note = tr|A0A4Q7XG15|A0A4Q7XG15_9BURK Tryptophan halogenase; OS = Duganella sp. BK054 OX=2512136 GN=EV297_2690 PE=4 SV=1
MVPIPTRRILIVGGGSAGWLCAAYLAKMFGDSKEITLVEAPEIGAIGVGEGSFPSLRATLAALGIPEAEFVRESSATFKQGITFHNWLYGGDHYFHPFSMPSQRPGAPELLPYWLQGLAGEVPFAEAVTMQKRVVDAQRAPKRAGDSDYNGPMNYAYHFDAARFAGLLARHARKLGVRHVQDHVDGVQLGHDGAIASVDTRGHGALTADLYIDCSGFRALLIGGALGSPFRSVSDVLLCDTALAVQVPHPAPDTPIASATISTAHEAGWTWDIGLQERRGIGYVYSSRHTSDERAERILRAYAGPAADGLNVRKIPMRVGYREQHWIKNCVAIGLAGGFLEPLEASGIGLVETAVHMLGALFPHNGDMAPLARHFNQFMTERYARIVDFIKLHYCLSQRREQFWIDNCDPATWTDSLRDKLAMWRCRPPQRMDFLTDFEMYPPTSWQYVLYGMGFPTAMPALPGLPPLAEAARREFANIAAVSARAVADLPDHRALVAQLCQHENAFRNDFHAIRATASH

SEQ ID NO: 84696 - protein, 521 aa, Xanthomonas campestris
  REGION 1..521: note = tr|A0A517GU67|A0A517GU67_XANCG Tryptophan 7-halogenase OS=Xanthomonas campestris pv. glycines; OX = 473421 GN=FPL04_20465 PE=4 SV=1
MTDTASSDPQQRPVRRVVIAGGGTAGWMAAAALSKVLGRHLQIVLVESDEIGTVGVGEATIPSLVTFHRLLEIDEAAFMAATQATIKLGIGFEHWRDVDRHYIHSFGHTGTDHWSAGFQHFWLKGRQRGLARDFGDYCLELRAAQEGRFAHLPNGGMNYAYHLDAGLYARFLRRFSEGFGVQRIEGRIGSVETDAHSGYLTALTLDNGTRVEGDLFLDCTGFAGLLIGKTLGVGTDDWSQWLFADSALAVQTESVGAPVAYTRSRADQAGWMWRIPLQHRVGNGIVYSSRYMDQDSAAQVLQRNLSGRALTQPRALRFTPNQRHRVWEKNCVALGLASGFLEPLESTNIHLIQRGIIRLMQTFPQVINDVDIAEYNRQAAAEITHIRDFVILHYHATDRRDTPFWRDCAAMDIPDTLRHRVELFRQSGRVFHQANELFAENSWVQVMLGQGITPKQHHPVADLMGDAELRHFLETIRTRVDAALVRLPAHADFLRRYCPAPPLPEPATRLPADAALATGVR

SEQ ID NO: 84697 - protein, 507 aa, Pseudoxanthomonas sp.
  REGION 1..507: note = tr|A0A1H1GYI9|A0A1H1GYI9_9GAMM Tryptophan halogenase; OS = Pseudoxanthomonas sp. CF385 OX=1881042; GN = SAMN05428982_3455 PE=4 SV=1
MTASHHRIRSVVVVGGGSAGWMAAAALATYLGKQASIRLVESEEIGIVGVGEASVPYMKQFNSGVLGIDEFEFVARTQGTFKLGIQFNDWGSLGESYVHGFGKIGQGVGPLPFHQFWLKLFLAGHARPIGEYSLPTLAAPRGKFMASPANAPPESPLADIAYAYHFDAALYAGFLRELSERRGVQRTEGKITGVLQRSEDGFIEAVVLDSGEQVTGDLFIDCSGFRGLLIEQTLKTGYVDWTHWLPCNRAMAVPCATVGPPTPYTRSTALAAGWQWRIPLQSRVGNGYVYSSEHISDDEAAATLLANLDGRALADPRPLRFTTGMRRKLWNKNVVALGLASGFMEPLESTSIYLVQSGIQRLLGLFPGRNFDPLLERQFNEESAFEYESTRDFLILHYCATRRSDSAFWDYCRTMRIPATLQRKIEMFREGGRYFRTGDEFFALPSWVQVMLGQGIVPTGYHPIVDDMPEQALIEHVARVHRAIAGSVEAMPLHQDFIDRHCRAPAV

SEQ ID NO: 84698 - protein, 251 aa, Parvularcula sp.
  REGION 1..251: note = tr|A0A355BXE1|A0A355BXE1_9PROT Tryptophan halogenase (Fragment) OS=Parvularcula sp. OX=1979207 GN=DDZ68_01950; PE = 4 SV=1
KDGLNSETRAIAMNAGWRWDIPLTNRSGNGYVYSSDFISADAAERELRTALGLLDADAPARHLKMKVGRVDRHWERNCLAVGLAQGFIEPLEATALHLVQATIEGFIETFEKTGFEDAGRRRFNERINARFEGVRDYIVCHYQASFRDDAEYWRANAANSKRSPSLQSMMNCWRAGSDIREEVRRQDIGKYYTDMSWTCLLGGYGDYPRELRAPAPEERRFDMGVIDDFIERASLNFPDHRAALSSLQAAE

SEQ ID NO: 84699 - protein, 512 aa, Sphingosinicella sp.
  REGION 1..512: note = tr|A0A4P6FYJ7|A0A4P6FYJ7_9SPHN Tryptophan 7-halogenase OS=Sphingosinicella sp. BN140058 OX=1892855; GN = ETR14_16025 PE=4 SV=1
MVVNEPLKIVIVGGGTAGWMAAAALSRILGPRICSVQLIESDEIGTVGVGEATLPHMKSFNDSIGLDEAEMMRATNGTFKLGIEFVDWGAMGRRYVHPFGDHGRPLAGLPFHQHWLRAAQSGAEFDIGDFSYAIVASRLNRFDFPSADPDKIEHTYSYAYHFDASLYARLLRRLSEASGVRRTEGKIQDVVLDPESGDIAALRLQSGETITGDFFIDCSGFRSLLLGEALGSQWDDWSKWLPCDRAFAVPSERATDFTPYTRSTARAAGWQWRIPLQHRTGNGHVFSSAFISEDEAADTLMRNLDAKALGEPRMLRFKAGRRLKSWTRNCVALGLASGFLEPLESTSIYLVQVAIVNLLPLLPRGPRDPVLADEFNRRTDIEYERIRDFLILHYHANTREDSELWRYCRAMEVPESLERRLALYRHSGFIEQYRDGLFTLPSWVSLYAGQDVRPTGHHPMADVLPRDRLIEQLGVLRDQVRTRVEQMPDHADFVARYASADGLQAGAGTVRS

SEQ ID NO: 84700 - protein, 513 aa, Sphingosinicella sp.
  REGION 1..513: note = tr|A0A4P6FXW6|A0A4P6FXW6_9SPHN Tryptophan 7-halogenase OS=Sphingosinicella sp. BN140058 OX=1892855; GN = ETR14_01045 PE=4 SV=1
MVVGGGTAGWLAACLVAARAERAPAGRLQVTLIESPDVPTIGVGEGTWPTMRRTLQRIGIAEAEFLLCCDAAFKQGSRFDGWVSGEPDDQYFHPFTPPVEADPDAVVQAWQALDARSFAETVSPQARACGLNLAPRQRTMADFAGALNYAYHLDAGKLVDLLRSHATQRLGVRHLRDHVVSVDAASNGDIAGVRTRSTGIVEGDLFLDCSGHSALLLGEHYGVPFVDRSDVLFNDRALAVQVPVAPESPIASQTCATAHAAGWIWDIGLPTRRGVGCVYASAHASDDAAAAALEAYLRKTAPDVSVDPGAFRRLSFRSGHRQRFWERNCLAIGLSAGFLEPLEASAIVLIELSLDALLDNFPVTRDVMDIHARRFNALFLYRWDRIVEFLKLHYVLSRRSEPYWRAHRDPASIPARLSELLQIWRHQAPSRADLPMADEIFPAASYQYVLYGMGFPAPAHAPVKADAAGTVEPLLRQAEQRGRALFASLPTNRAYLDALRAQATSSPPLVTTC

SEQ ID NO: 84701 - protein, 503 aa, Parvularcula sp.
  REGION 1..503: note = tr|A0A357LG45|A0A357LG45_9PROT Tryptophan halogenase; OS = Parvularcula sp. OX=1979207 GN=DEA50_10970 PE=4 SV=1
MTDHPRAIRKILIAGGGTAGWMTAAALSSTLSQGCEIVLVESEEIGTIGVGEATIPPIRLFNDTLGIDERDFVRETQGSFKLGIEFVNWSRKGHRYFHPFGPHGRPFDIVAVHQHWLRARAEGEQASFDDHSMAWAMAKAGRFNKPAADPRSVLSTFDYAYHFDAGLYARYLRRYSEERGVMRVEGKIGGVEQNAESGFVERILMQDGRILEAELFIDCTGFRGLLIEGALKAGYEDWTRWLPCDRAAAAPCAKSGAFTPYTRSTALDAGWQWRIPLQHRTGNGYVYSSNFISDEAALETLLGGLDGAPLAAPNQLRFVTGMRRKFWDRNVIAIGLASGFMEPLESTSIHLIQAGISKLLALFPDRDFDPLIIAEYNRIAVTEFERIRDFLILHYKLTERDDAELWRYCQSMSVPDTVQFKIDHFRRYGRHIAREMDLFGAPSWHAVHIGQFNMPERTDPVAGYRTVNSREWLAKLRAAMTAEAQRQPEHQAFIDQHCKAAAR

SEQ ID NO: 84702 - protein, 512 aa, Sphingosinicella sp.
  REGION 1..512: note = tr|A0A4P6G4K9|A0A4P6G4K9_9SPHN Tryptophan 7-halogenase OS=Sphingosinicella sp. BN140058 OX=1892855; GN = ETR14_17390 PE=4 SV=1
MRNTRARNAPLKDIVIVGGGTAGWMTAALLSKLLSRHYVIRLVESDEIGTIGVGEATIPSIRTFLQLAGIDQVEMIKATQATFKLGIEFVDWRDLGTSYIHGFGKIGQDMLWLHPHQLWLKMTAKGQARHFDHYALNCMAARKNRFCPPDPRQTGSPLADIDYAFHFDASLFAAFLRKESEKRGVERIEGHILSAERDGESGLLSRLLLADGRTIAGDLFIDCSGMRGLLIGDILGVGYEDWGHWLPCNRAFAVPSESAPVLTPYTRSTARPAGWQWRIPLQHRTGNGIVFSSDHWSDDEAAAALLANLDGKALGEPRLVRFRPGMRARSWDRNVVAIGLASGFLEPLESTSIHLIQTAILRLVALFPGTAFNPTDIAEYNRQTAFEYCDVRDFIIAHYKVTDREDTAFWRYVKHMEVPDSLAERLALFRDSARFFVHGKAELFREESWVQVLIGQGLDMHYDPMVDMIPEAEVANHLRDIEEVIADVAERMPRHEDFIARQCRAPAILATG

SEQ ID NO: 84703 - protein, 521 aa, Parvularcula sp.
  REGION 1..521: note = tr|A0A355C417|A0A355C417_9PROT Tryptophan halogenase; OS = Parvularcula sp. OX=1979207 GN=DDZ68_13565 PE=4 SV=1
MDAEASTQDAPVSSVTIVGGGTAGWMTAAALSKLLTRVKVRLIESDEIGAIGVGEATIPHIRNYMALAGVDQLRMLHASKATFKLGIQFVDWGAPEESYIHGFGRIGRDMLWLHTHQLWLAARERGVKVSHFDQYSINCRAALDNRFRFQDPRLSNTPLADLDFAYHFDASLFAAFLRGECEKRGVERIEGLVVNVTTDSETGFVRSVDLKDGRSVGGDLFVDCSGMRALLIDGAQGVGYEDWSQWLLCNRALAAPSESVSPLAPYTRSTAKKAGWQWRIPLQHRIGNGLVYCADLVSDDEAAATLLSGLDSAPLADPRPVRFRPGRRREAWRNNVVAIGLSSGFLEPLESTSIHLIQTAVHRLIALFPARGFNMADIDEFNLQTKLEYEDIRDFIIAHYKVTRRRGDPFWDHVREMTVPESLARRIALFQSSGRFFGHSKLELFAEESWVQVLLGQGLAACADPVSRFVSDADLAEFLNDIVDTIAKTAAQMPDHAAFISRLPEKEGRLDSAIIAPIKRG

SEQ ID NO: 84704 - protein, 514 aa, Shewanella sp.
  REGION 1..514: note = tr|A0A2R3EQ08|A0A2R3EQ08_9GAMM Tryptophan halogenase; OS = Shewanella sp. WE21 OX=2029986 GN=CKQ84_00720 PE=4 SV=1
MKVKQAIRKIIILGGGTAGWMAAAALANNPVFAAIELCLLESDNIGTIGVGEGSTPHLKRFMDNLGISEKDWMEQCHASYKTGIDFINWNGDGQQYFHPFYFQMDVKPAEVFFINANARRRGHGSAVKPDAFFSSGVLAKRNLSPRPNKALPYANEYGYHFDATELANYLKEYACQRGVKHLIGDVIEVSTTQNQHIDALMLANGERLNADFFIDASGFSAKLIHKTLGVPFQSFANELLNDSAVTVPALMDTTQTQQTHDLQNHALQTQAQQAKYHTRATALSAGWLWQIPLTHRLGNGYVYSSRHLSANAAAKELLHSVNLPESTQVRFLKMRVGVSDKAWHNNVLAIGLAQSFIEPLEATSIMMTQFTLEKFMSLFERYQLNKQAETLSRQTLNQAVMQLVLGIKDYIQAHYVTSQRSEPYWLAARKVTISQRLTQRLQAWYQGEDFDLLLYQYDQQLAYFRPSWYALLAGMDYRDPKLKRPFEPISAEITAQAIRYSQTLVEQYFQPKHP

SEQ ID NO: 84705 - protein, 516 aa, Sphingosinicella sp.
  REGION 1..516: note = tr|A0A4P6FJ36|A0A4P6FJ36_9SPHN Tryptophan 7-halogenase OS=Sphingosinicella sp. BN140058 OX=1892855; GN = ETR14_08605 PE=4 SV=1
MESKRRILIVGGGTAGWLAAAYLARSLGLPDNQHVEITLLESAEIGIIGVGEGTFPTIRNTLKFLGIEEARFIRETSATFKQGIRFADWARTPENGVHDHFFHPFEAPFYAEDAELVPYWLLQDPRTRRPFAEAMTIQNRVAEAKRAPKRPDESDFSGPLNYAYHFDATSLAHVLAERAGELGVGHVEDRIEGVETDDRGIARVLTRRHGAIEADLYVDCTGFRAELIGRALGEPLKSIRSVLFTNRALTCKIPYASAAAPLESYTIATAHEAGWIWDIGLRGARGIGCVYSADHVDDDRAADILRAYVGAAADDLSPRRIEFEPGYRERQWIGNCVAVGLAGGFLEPLESTGVVLIEAAIAMVAEMFPHSGPIDAPARRFNQLMAARYDNIITFLKLHYCLSQRQEPFWRDNRDPASIPERLQELLEQWRYRPPGRFDFILDLESFAFFNYQYILYGMGFRTDLSPGRGDFPNVRAADRIFARIRNFGERATQDLPAHRALIEQINAEGEPAFAL

SEQ ID NO: 84706 - protein, 488 aa, Actinoplanes missouriensis
  REGION 1..488: note = tr|I0H626|I0H626_ACTM4 Putative tryptophan halogenase OS=Actinoplanes missouriensis (strain ATCC 14538 / DSM 43046 / CBS 188.64 / JCM 3121 / NCIMB 12654 / NBRC 10236 3 / 431) OX=512565 GN=AMIS_32430 PE=4 SV=1
MNSESYDVIVIGGGPAGSTVATLTAKKGHRVLLLEKEKFPRYQIGESLLPATVHGIANLLGVADRLGEAGFMRKNGGTFRWGANPEPWTFSFAVSPRLAGPTSHAYQVERMKFDQILLDNARKNGVKVQELCTVTGIVETGGRVTGVRYADADGTPYEATAAYVVDASGNMSRTYKSVSPQRHYSPYFQNLALFGYYEGGKRLPAPNQGNILCAAFDEGWFWYIPLTDQLTSVGAVVRRDSADRVQGDPEAALRKLIDDCPLIKEYLADASRVTTGPYGEIRVRKDYSYCNAPFWRSGMVLIGDAACFVDPVFSSGVHLATYGALLAARSINSCLEGTVDETAAFTEFERRYRREYGVFHEFLASFYSMQADEDSYFWQAKKVTQQNASNLEAFVELVAGTSSGEEALATAHRTSEAIAAGAGALAAATYELDTRPSALHSSGVVAAAMSEGARIQSHALLGGDAGVESPLFDDGLIATDDSLGWTRP

SEQ ID NO: 84707 - protein, 61 aa, Parvularcula sp.
  REGION 1..61: note = tr|A0A355C0C5|A0A355C0C5_9PROT Tryptophan halogenase (Fragment) OS=Parvularcula sp. OX=1979207 GN=DDZ68_08595; PE = 4 SV=1
MTFSPPRNRDPLRSVVIVGGGTAGWMAASVLSKAFGPALSITLIESEEIGIVGVGEATIPQ

SEQ ID NO: 84708 - protein, 503 aa, Sphingosinicella sp.
  REGION 1..503: note = tr|A0A4V0YID8|A0A4V0YID8_9SPHN Tryptophan 7-halogenase OS=Sphingosinicella sp. BN140058 OX=1892855; GN = ETR14_16035 PE=4 SV=1
MTDDRRIRSIVVVGGGTAGWMAAAALARSAGTHSLSITLVESEDIGTVGVGEATIPPIQAFNKLIGIDEDAFVRETQATFKLGIEFVDWRRHGHHYLHPFGLAGADLKTGVSFSHYWLRWVKEGGNPDNILFSAEGEAARLGRFGRTPPTGGALPNINYAFQFDAARYAAFLRRFAEARGVVRCEGRVVDVRRDPENGFIADVALADGRRVAADFFIDCSGFRSLLLGETLGVAYDDWSRWLPANRAVAVPCASAGDPAPITRATAREAGWQWRIPLQHRTGNGYVFSDAFLGEDEATSLLLSRLDGAAQADPRLLRFKAGRRTSSFVGNCLAIGLSSGFLEPLESTSIHFIQVAITKLLDMFPDRDFHPAILRRFNAEMDSLYEAVRDFLIAHYRLTERDDTDFWRYCRAMEIPASLQDKFDLFRTRGQVLVEAHDVFAETNWFAVLYGQGLTPQGYHPLADAMPDDDLRLALAQIRAAIRERVDGLPSHRAFLDRIVARAN

SEQ ID NO: 84709 - protein, 506 aa, Sphingosinicella sp.
  REGION 1..506: note = tr|A0A4P6FRV8|A0A4P6FRV8_9SPHN Tryptophan 7-halogenase OS=Sphingosinicella sp. BN140058 OX=1892855; GN = ETR14_25205 PE=4 SV=1
MEPDSGRADPRTIVIAGGGTAGWMTAAALGRFLGKAMRIRLVESDEIGTIGVGESTIPQIRVFNQALGIDEDSFVRATQATFKLAIEFVGWLRPGHRYMHAFGDIGRDSGLAPFHHSWLRGRREGVARDLACYSLNNMAALGERMQRGPARTAAMLPDMPYAFQFDAGLYAAFLRRFAEERGVVRTQGRIAQVERDAQSGDVSALILADGQSIRGDMFIDCTGFGGLLIARTLGSEFEDWSHWLPCDRAMAVPSGRTDAFTPYTRATAHGAGWQWRIPLQHRTGNGIVYASGHLSDDEAASRLLANLDSEPLGDPRPLRFTTGKRKEMWKANVIAVGLSAGFLEPLESTSIHLIQTAISRLLKLLPGDRPTQAQRDRFNRESDFEYARIRDFLILHYRANARNELFWQERRAATVPEALADRIALWEADGHIVREQDELFTEVAWLQVFAGQGLVPAGNHPLADVPSRAGLAEYLDLIEKLIAREVAQMPTHAGFIAAHCAARAAA

SEQ ID NO: 84710 - protein, 504 aa, Sphingosinicella sp.
  REGION 1..504: note = tr|A0A4P6FJA2|A0A4P6FJA2_9SPHN Tryptophan 7-halogenase OS=Sphingosinicella sp. BN140058 OX=1892855; GN = ETR14_01060 PE=4 SV=1
MTIASSAEPRLRRIVVAGGGTAGWMAAAAIARTMGRAVELTLVESDAIGTIGVGESTIPPLVNYNRLLGINEAEFMRATQATFKLGIAFEGWKEVGHSYFHSFGITGKDHWSAGFQHFWLAGRERGHDAPYDEYCLELKAAMQGKFAHLPDNAMNYAYQLDSTLYARFLRAMAEADGAKRIEGKIARVELNGESGHVAALVLENGSRIEGDLFLDCTGFRALLIEDALHAGHDDWTHYLPCDSAIAIQTESVGPAFPYTKAIAHDAGWRWRIPLQHRTGNGLVYCSRYLDRDAALERLLGTVEGQTLTKPNFLKFGAGARRRQWHRNVVAIGLSGGFMEPLESTSIHLIQRAVLRLIRMMPLREISDRDIAEFNEQQHADMLQIRDFLILHYKATERRDSAFWRYCGDMEIPDTLVQKIELFRETGRVFRKNEELFAENSWVQVMMGQGIMPHAYHPIAEKLNDDELARLLETLREQVSKTVAGLPAHAAYVERYCGAARAAAA

SEQ ID NO: 84711 - protein, 506 aa, Parvularcula sp.
  REGION 1..506: note = tr|A0A357L0J3|A0A357L0J3_9PROT Tryptophan halogenase; OS = Parvularcula sp. OX=1979207 GN=DEA40_03070 PE=4 SV=1
MGPAIKPGFRIVILGGGAAGWMTACLMAKRWAPSGVSISVVESPEIGIIGVGEGSTPQLKAFFRDLGVSENEWMPRCNATYKNGISFHGWSQRPGCERYFHPFPSPIDAHTAPAFHFNSFGRRRGIDLVAAPGRFFLSAKLAEKRLAPIAAHNFPFEIAYGYHFDAHLAGAFLRRHAEGRGVRHIEGKVTGIALDARGAVASLTREDGDMIEADLFVDSTGFRSMILQERLGVPFHSYKENLFNDSAVVMPTPPGKDGLNSETRAIAMNAGWRWDIPLTNRSGNGYVYSSDFISADAAERELRTALGLLDADAPARHLKMKVGRVDRHWEKNCLAVGLAQGFIEPLEATALHLVQATIEGFIETFEKTGFEDAGRRRFNERINARFEGVRDYIVCHYQASFRDDAEYWRANAANSKRSPSLQSMMNCWRAGSDIREEVRRQDIGKYYTDMSWTCLLGGYGDYPRELRAPAPEERRFDMGVIDDFIERASLNFPDHRAALSSLQAAE

SEQ ID NO: 84712 - protein, 538 aa, Burkholderia pseudomallei; identical to SEQ ID NO: 82926
  REGION 1..538: note = tr|C4I9N1|C4I9N1_BURPE Tryptophan halogenase PrnA; OS = Burkholderia pseudomallei MSHR346 OX=536230; GN = GBP346_B2172 PE=4 SV=1

SEQ ID NO: 84713 - protein, 505 aa, Xanthomonas oryzae
  REGION 1..505: note = tr|A0A0C5V1W7|A0A0C5V1W7_9XANT Tryptophan halogenase; OS = Xanthomonas oryzae pv. oryzicola OX=129394; GN = BE73_16315 PE=4 SV=1
MIQAQIRKVVIAGGGTAGWIAACALSHQFRGLLDITLVESEQIVTVGVGESTVPPIRTFHRFLQIDEQEVLRAVAGTFKLSISFEHWRAQGERYIHPFGITGQSTLVCAFHHLWLESQRRGMPGSFGDYCLETVASRVDRFALHSEPAVNYAYHLDAALYATFLRARSEACGVKRIEGKIQQVTVQPHSGDVASVVLEDGHVIEGDLFIDCSGFRGLLIEQTLHTGYEDWSHWLPCDRAVAVQTEAVGPPVPYTRAIAHEAGWRWHIPLQHRVGNGLVFSSKHLSDDQAHAKLLHDVAAPAVKDPWMVPFRTGRRRKAWNKNVVSLGLASGFIEPLESTSIHLTISAVVRLLALFPGEGIAPSQVQLFNDVSRAEMEHVRDFVILHYHATQRNEPLWQQCRAMELPESLALRLRAWRECAHAWQGADELFRVDSWTHVLMGQGIEPEQHHPLTRAFSDHDLRRLLDGIAQPIQHAVQQMPSQHAFIERYCKAGAQVWGMRSPVPA

SEQ ID NO: 84714 - protein, 538 aa, Burkholderia pseudomallei
  REGION 1..538: note = tr|A3NNF6|A3NNF6_BURP6 Tryptophan halogenase PrnA; OS = Burkholderia pseudomallei (strain 668) OX=320373; GN = BURPS668_A2885 PE=4 SV=1
MSNPIQNIVIVGGGTAGWMAASYLVRALQQQANITLIESAAIPRIGVGEATIPSLQKVFFDFLGIPEREWMPQVNGAFKAAIKFVNWRKSPDRSRDDYFYHLFGSVPNCDGVPLTHYWLRKREQGFRQPMEYACYPQPEALDGKLAPCLPDGTRQMSHAWHFDAHLVADFLKRWAIERGVNRVVDEVVQVHLNERGHISSLSTQEGRTLEADLFIDCSGMRGLLINQALKEPFIDMSDYLLCDSAVASAVPNDDARVGVEPYTSAIAMNSGWTWKIPMLGRFGSGYVFSSKFTSRDEATADFLNLWGLSDKQPLNQIRFRVGRNRRAWVNNCVAIGLSSCFLEPLESTGIYFIYAALYQLVKHFPDTSFDPRLTDAFNAEIVYMFDDCRDFVQAHYFTTSREDTPFWRANRHDLRLSDAIKEKVQRYKAGLPLTTTSFDDSTYYETFDYEFKNFWLNGNYYCIFAGLGLLPDRSLPLLRHRSESIDKAETMFARIRREAERLRTSLPTNYDYLRSLREGDVGLSRSRPGPTLAAPEIL

SEQ ID NO: 84715 - protein, 498 aa, unidentified
  source 1..498: note = Hyphomonas atlantica
  REGION 1..498: note = tr|A0A3B9KZM8|A0A3B9KZM8_9RHOB Tryptophan halogenase; OS = Hyphomonas atlantica OX=1280948 GN=DCG65_06045 PE=4 SV=1
MVQSVLIVGGGSAGWITANLLNAHCRRTGRDTRIVLVESPDIPTIGVGEATVPTIRRTLNDIGLPEQDFLESTEATFKTLIRFKDWNLGETYDHPFDRRPRPQSDTAAIAWSAQNGLPFDRHFSVLTQLADFNTAPKSPRHPQYQASFPYAYHLDAIKLAARLSSFGQANGIEYRLGNVVDVIVSPEGLIAGVKTDRGDDLTANLYIDCTGFRSVLLGGALDVPVRSFEKHLLCDRAVTMRVPYDVYRPERILTYTKATAREAGWQWDINLQSRRGIGYVYSSQFLDETAAEAALRQYEGAHSDELEARHIRFASGKREVSWKGNCVAVGLSDGFLEPLESSGLYLIEFAGLAIANMLADFESAPQATMRYYNRITNDLYDEILGFLNLHYVISNRRDTAFWRAATSDEVIVDDLRDRLELWKHRGPGQFDFPGADRLFARDSYEFILHGMRYVKGATHSRASIPDLSQVVMKARAELPDHEAFLSLVERAAEARKLS

SEQ ID NO: 84716 - protein, 521 aa, Parvularcula sp.
  REGION 1..521: note = tr|A0A357L3V3|A0A357L3V3_9PROT Tryptophan halogenase; OS = Parvularcula sp. OX=1979207 GN=DEA40_08555 PE=4 SV=1
MDAEASTQDAPVSSVTIVGGGTAGWMTAAALSKLLTRVKVRLIESDEIGAIGVGEATIPHIRNYMALAGVDQLRMLHASKATFKLGIQFVDWGAPEESYIHGFGRIGRDMLWLHTHQLWLAARERGVKVSHFDQYSINCRAALDNRFRFQDPRLSNTPLADLDFAYHFDASLFAAFLRGECEKRGVERIEGLVVNVTTDSETGFVRSVDLKDGCSVGGDLFVDCSGMRALLIDGAQGVGYEDWSQWLLCNRALAAPSESVSPLAPYTRSTAKKAGWQWRIPLQHRIGNGLVYCADLVSDDEAAATLLSGLDSAPLADPRPVRFRPGRRREAWRNNVVAIGLSSGFLEPLESTSIHLIQTAVHRLIALFPARGFNMADIDEFNLQTKLEYEDIRDFIIAHYKVTRRRGDPFWDHVREMTVPESLARRIALFQSSGRFFGHSKLELFAEESWVQVLLGQGLAACADPVSRFVSDADLAEFLNDIVDTIAKTAAQMPDHAAFISRLPEKEGRLDSAIIAPIKRG

SEQ ID NO: 84717 - protein, 504 aa, Sphingosinicella sp.
  REGION 1..504: note = tr|A0A4P6FKZ9|A0A4P6FKZ9_9SPHN Tryptophan 7-halogenase OS=Sphingosinicella sp. BN140058 OX=1892855; GN = ETR14_01440 PE=4 SV=1
MSGPIETVIIVGGGTAGWMTAAAMARLLGRTVSIKLVESDAIGTVGVGEATIPTIRDFNRLLGIDEDDFVRRTQGSFKLGIEFVDWLRLGHRYIHPFGTIGRDTQTVRFSQLWLKLVQQEDSENADPLGAFSASTLAAEMGRFGRPETSPNHPLSTLAYAFHFDAALYARYLRGWSEDRGVERIEGRIISVERDPENGFIRTLHLEDGSMLSGDLFVDCSGFRSLLLGETLHEPFVDWSHWLPCDRAIALPCTPAGALLPYTRSTADGAGWRWRIPLQHRTGNGYVYSSAHLTDDDAHRRLLETLDGAPAGEPRRLRFLAGHRRKLWHGNVVAVGLSGGFLEPLESTSIHLIQTAISRLMLLFPDKDMDVAERDEFNRQSALEYAQIRDFLILHYHATERRDTSFWSDCAAMTLPDSLREKLDLFRSKGRVFRSGDELFSEDSWLSVLIGQGVRPRGHDPVADTIDPDALRGQMNGLREALRRAVETLPSHAEFVARCCAATQT

SEQ ID NO: 84718 - protein, 503 aa, unidentified
  source 1..503: note = Polymorphobacter sp.
  REGION 1..503: note = tr|A0A4Y9EQN3|A0A4Y9EQN3_9SPHN Tryptophan 7-halogenase OS=Polymorphobacter sp. DJ1R-1 OX=2511025; GN = EUV02_02510 PE=4 SV=1
MTDNRQSDFVIVGGGTAGWMTAAALARFAVKGTRIRLVESDAIGTVGVGEATIPQIKLFNAALGIDEADFLRATQGTYKLGIEFVDWTRPGHRYMHAFGPVGRDLGLVPFHHYWLRAGASAGPLGQYSLNEAAARAGHFGNAPPAAGSVIPPLAWAYHFDAGLYAAYLRKFAETRGVVRHEGRITQVPLRADDGHIEAVVLEDCTRIDGDLFIDCSGFRGLLIEEALGAGYDDWSHWLPANRALAVPCARANGEITPYTRSTARPAGWQWRIPLQHRTGNGYVYASDFISDDDAAATLLANLDGKALAEPRPLRFVTGKRRKQWHRNCVAIGLASGFLEPLESTSIHLVQSSISRLLALLPGKVIHDADRDEYNRQADFEFERIRDFIILHYRANGRTGEPLWDYCRNMGIPDTLAAKIELFQASGRIFREHEELFTEVGWAQVLIGQGVQAAAYHPLANAISDADLGDYLGKLRTVAARGAASMPGHADFIAGFCRAPSAEA

SEQ ID NO: 84719 - protein, 506 aa, Xanthomonas vasicola
  REGION 1..506: note = tr|A0A2P5ZM60|A0A2P5ZM60_XANVA Tryptophan 7-halogenase OS=Xanthomonas vasicola OX=56459; GN = FQJ88_13375 PE=4 SV=1
MIPAPLRNIVIVGGGTAGWMAAAAFARVLGPTFNVQLIESEQLGTVGVGEATVPHIKAFNNLLGIDEAEFVRQTQGSFKLGIEFVDWQRRGSAYMHGFGTQIGHPLGLLPFHQYWIKQHARGKAQPLGAYTLNTVAAARGKFMTSAGDVPANSPLANIAYAYHFDATQYAHFLRRYSEQRGVTRIEGLVEQVQLHPESGHVQSLQLASGQTVHGDLFIDCSGFRGLLIEEALHTGYHDFTHWLPCDRAFAVACEKVGPPTPYTRSTARAAGWQWRIPLQHRTGNGYVYCSAHISDDEAAATLLANLDGKPLADPRPLRFTTGRRKQFWNRNVVALGLASGFLEPLESTSIHLIQSGISKLLELFPREGISPVLVQRYNDRSAFEFDRIRDFLLLHYHATERDDSAFWRHCRSMPITPELQTTLDLFRDSGRFYRNAEEMFAEISWVQVMVGQGILPQGYHPLVDQVPDRDAEGFLASVAQTIAHCVDVMPTHQQFIERYCKAAVLA

SEQ ID NO: 84720 - protein, 472 aa, unidentified
  source 1..472: note = Hyphomonas atlantica
  REGION 1..472: note = tr|A0A059E206|A0A059E206_9RHOB Uncharacterized protein OS=Hyphomonas atlantica OX=1280948 GN=HY36_03740; PE = 4 SV=1
MLGPLLDITLVESDAIGTVGVGEATIPTHRTFHHLLGIDEREFMRATKATFKLGIAFENWGGVGDRYIHSFGQVGKPSWMGEFYNIWMYAQERGIGDALDAYCFELQAAEEDRFYTSEKANINFAYHLDASLYAKFLRTFSEAKGVKRVEGLIDTVEQDGESGFITALKLQSGERIEGDLFIDCTGFRGLLIEQTLKTGYEDWTHWLPTDSALAVQTRSVGPAIPYTRAIAHHAGWQWRIPLQHRVGNGLVFCSENMQPDEAQEFLLNNVDGEPLTEPRLIRYKTGRRRKVWNKNCVALGLSSGFVEPLESTSIHLIQIGATRLVQQFPFSGISEAIANHYNEQAERELEKIRDFIVLHYKLTERDDSDFWRARRDMPVPDTLSQRIALFRENGLVYQASDDLFRVDSWLQVMMGQRLKPKGYHHMGHMMTDDQLTRALGGLKASIAQAVSKLPKHQDFIDTYCAAPETETA

SEQ ID NO: 84721 - protein, 513 aa, Sphingosinicella sp.
  REGION 1..513: note = tr|A0A4P6FIV2|A0A4P6FIV2_9SPHN Tryptophan 7-halogenase OS=Sphingosinicella sp. BN140058 OX=1892855; GN = ETR14_08050 PE=4 SV=1
MTPVQNIVIVGGGTAGWLTAGLIAAKHKGRQAHGFTVTLVESPNVPTIGVGEGTWPTLRTSLRRIGISETELFRRCDAAFKQGARFARWTTGDEDDGYYHPLMLPQSFGQVNLAQHWLADAEGESFCDAVTPQGRLCDAGLAPKTIATPEYEAVANYAYHLDAGKFATFLQHHCCEILGVRHVRADVGEVLLSDNGDLKGLVTEQAGTINGDLFVDCTGFSALLIGKALGVPFRSCSDILFCDTALAVQVPYEHPHDPIASHTISTAQSAGWIWDIGLPTRRGVGHVFSSSHTSAEEAEQALRAYLGPRGADLPVRRLSIRSGHREQFWKGNCVAVGLAAGFLEPLEASAIVLIELSAKMIADQLPPCREVMDVVARRFNETTTYRWGRIIDFLKLHYALTKRTDSDFWRDNVRPETIPDRLHDLMTLWRYQVPWNIDEFDRAEEVFPSASYQYVLYGMGHRTDLVPGSVDADAEAARRAKRENRAQTQRMVAGLPGHRALIAKIVERGLQPV

SEQ ID NO: 84722 - protein, 501 aa, Stenotrophomonas acidaminiphila
  REGION 1..501: note = tr|A0A2W5NN23|A0A2W5NN23_9GAMM Tryptophan halogenase; OS = Stenotrophomonas acidaminiphila OX=128780; GN = DI562_12715 PE=4 SV=1
MQSQEAIATPRPVKRVVIAGGGTAGWMAAAALSKTLGKVLDITLVESEEIGTVGVGEATIPTLVVFHRLLDIKEQDFMAAVQGTVKLGISFENWKDVNHRYIHSFGISGKDHWSAGFQHFWLRGRAEGMASEYSDYCIELQAALQDRFSHLPRYHVNYAYHMDAALYARFLRDFSARHGCKRVEGKIVDVVTDAEGCISSIKLERGETIEGDLFIDCTGFRALLIGKALGVGYTDWSQWLFNDSALATQTTAVRDAVPYTRAIAGSAGWQWRIPLQHRVGNGIVYSSRHMSDDQAREEFLGSVEGEVIKQPWPIRFKPGQRQQCWAKNCVALGLAGSFIEPLESTTIHLIQRGIVRLLQTFPHTITQPAIDEYNARLDEELQHVRDFVVMHYKVSNRRDSPYWREIAEMEIPSTLRHRIDLFRETGTVFHVPGELFGENSWIQVMMGQGIVPKRYHPTADVMSPADLQRFLDDIRRNVLDTARQMPAHMDYLRSYCPAPKP

SEQ ID NO: 84723 - protein, 507 aa, Sphingomonas sp.
  REGION 1..507: note = tr|A0A4P6XBA2|A0A4P6XBA2_9SPHN Tryptophan 7-halogenase OS=Sphingomonas sp. AAP5 OX=1523415; GN = E2E30_06880 PE=4 SV=1
MATLSDPTGPIRIVIVGGGTAGWMAAATFARFLETGFEIDLIESEEIGTVGVGEATIPQIRLFNDALGLDEDAFLRATQGTYKLGIEFVDWLRPGHRYMHAFGAVGRDVGLLPFHQYWLRAQKLGSARDLAAYSLNNQAALADRMQRGSARTARVLPDMPSAFHFDAGLYARHLRRYSETRGVTRIEGKVVRVDQDERGDISTLLLEDGTTLGADLFIDCTGFRGLLIEQTLKTGYDDWTHWLPADRAIAVPSERSTAFTPYTRSTAKAAGWQWRIPLQHRTGNGLVYSSQHLSDDEATATLLAGLDGEALADPRPIQFRTGKRRQMWNRNVVAIGLSGGFMEPLESTSIHMIQSAIARLMKLLPGRTIAQADRDEFNRQSDFEYERIRDFIILHYHANNRSEPFWQMCREATLPETLAAKIDLWRGNGHITREHEELFTEVGWLQVFAGQGVMPAGHHPLADAIPAADLAEFLDTIDQLNAREVAQMPSHADFIARHCAAPTPVAA

SEQ ID NO: 84724 - protein, 521 aa, Parvularcula sp.
  REGION 1..521: note = tr|A0A357LD91|A0A357LD91_9PROT Tryptophan halogenase; OS = Parvularcula sp. OX=1979207 GN=DEA50_05855 PE=4 SV=1
MDAEASTQDAPVSSVTIVGGGTAGWMTAAALSKLLTRVKVRLIESDEIGAIGVGEATIPHIRNYMALAGVDQLRMLHASKATFKLGIQFVDWGAPEESYIHGFGRIGRDMLWLHTHQLWLAARERGVKVSHFDQYSINCRAALDNRFRFQDPRLSNTPLADLDFAYHFDASLFAAFLRSECEKRGVERIEGLVVNVTTDSETGFVRSVDLKDGRSVGGDLFVDCSGMRALLIDGAQGVGYEDWSQWLLCNRALAAPSESVSPLAPYTRSTAKKAGWQWRIPLQHRIGNGLVYCADLVSDDEAAATLLSGLDSAPLADPRPVRFRPGRRREAWRNNVVAIGLSSGFLEPLESTSIHLIQTAVHRLIALFPARGFNMADIDEFNLQTKLEYEDIRDFIIAHYKVTRRRGDPFWDHVREMTVPESLARRIALFQSSGRFFGHSKLELFAEESWVQVLLGQGLAACADPVSRFVSDADLAEFLNDIVDTIAKTAAQMPDHAAFISRLPEKEGRLDSAIIAPIKRG

SEQ ID NO: 84725 - protein, 500 aa, unidentified
  source 1..500: note = Polymorphobacter sp.
  REGION 1..500: note = tr|A0A4Y9EQN1|A0A4Y9EQN1_9SPHN Tryptophan 7-halogenase OS=Polymorphobacter sp. DJ1R-1 OX=2511025; GN = EUV02_02575 PE=4 SV=1
MPESRNIRRVAVIGGGTAGWMAAAALANALQHGVAIELIESDDIGTVGVGEATIPPIKLFNAQLGIDENDFLKCTYGSFKLGIEFVDWGWTGNRYFHPFGTFGADFDAVTLHHYWLRERQRGDTTPLSDYSMAWAAARANRFDKPTSDRRLVQSTMDYAYHFDASRYALYLRGYGEKRGVTRHEGKVATVEQDARGFVSAVQLEDGRRIEADLFIDCSGFRGLLIQGALDSGYDDWTHWLPCDRAVAVPCASSDDFTPYTRSTARDAGWQWRIPLQHRTGNGYVYASSFLDDDVAQATLLANLDGEALAEPRRLAFTTGRRKQFWNRNVVALGLASGFLEPLESTSIHLIQSGINRLLALWPDRDFDPLVAAEYNKLTAREFERVRDFIILHYKATTRADTPLWRHVAAMDIPDELANKIAHFAAHARVVADPGELFVNVSWLAVFLGQGIIPARYDPLADARNVDAPRLLSGLKRVIGEAADAMPTHRDYIARHCSSPR

SEQ ID NO: 84726 - protein, 496 aa, Sphingosinicella sp.
  REGION 1..496: note = tr|A0A4P6FPU0|A0A4P6FPU0_9SPHN Tryptophan 7-halogenase OS=Sphingosinicella sp. BN140058 OX=1892855; GN = ETR14_06770 PE=4 SV=1
MNGREVKKVVIAGGGTAGWIAAAALSRQLGRLIEIVLVESDEIGTVGVGESTIPTARSFNALLGLDEPEFMRATQATFKLGIAFEDWARVGDRYVHSFGQVGTSTWIAEFHHFWLEARARGLAGEIGDYCFELQAAEAGKFATGSDTTINYAYHLDATLYGRFLRARSESHGVTRVEGRIASVEQDPENGFIRALAMESGERVEGDLFIDCTGFRGLLIEQTLRAGYEDWGQWLATDSALAVQTGSVGPALPYTRAIAHRAGWQWRIPLQHRVGNGLVYASAHMEDDDARALLIEKLEGEAITEPRLIRYRTGRRRKTWDKNCIALGLASGFVEPLESTSIHLIMIAVTRLMQLFPFSGISDAVVNRFNEQARSELESIRDFIILHYKLTERDDSAFWRQCRDMAVPDSLAERIGLFREAGFAYQASEDLFRVDSWVQVMLGQRLQPLGHHRVGELMGSERIQQSLADLKGKIAAAVQRMPTHQAFIDRYCAPASA

SEQ ID NO: 84727 - protein, 543 aa, Shewanella sp.
  REGION 1..543: note = tr|A0A2K9AEI0|A0A2K9AEI0_9GAMM Tryptophan halogenase; OS = Shewanella sp. Pdp11 OX=2059264 GN=AYJ58_08490 PE=4 SV=1
MQQATHTAINNIVIVGGGTAGWITAALLAAEHNVDKGQLAHSPKLNITLIESPDVATIGVGEGTWPSMRNTLDKIGISETEFIRQCDASFKQGSRFIHWQHDDTEHTNPFGSNQYIHPFSLPHGHQELDLCPFWLPHSDKVSFAQAVSNQDALTQLGLAPKTIATPEYHFQNNYGYHLDAGKFSQLLMQHCTEKLGIKYVRDHVTHVHSHANGDIESLATKEHGVILGDMFVDCSGTKSLLLGEHFNVPFLCQKAVLFNDSALAIQVPYAEENSPIASCTLSTAQPNGWIWDIGLPTRKGVGYVYSSAHCSDDEAEQTLRAYLANDTSTNPQSASNNAVDCRKQEYRKLNINPGYHAKCWQNNCIAIGMAAGFIEPLEASALALVEWTANTLATQLPTHRGVIDTIAQRVNERYERHWQQIIDFLKLHYIVSRREVDGYWRDHRDTASIPERLQQQLDLWRYQAPSSHDISYKEPLFPAASFQYVLYGMGFNTALPTHIKPSQQQVAQRLFSENQKKINALSQSLPSNRDLLNKVRQFGFPKI

SEQ ID NO: 84728 - protein, 251 aa, Parvularcula sp.
  REGION 1..251: note = tr|A0A357LBB9|A0A357LBB9_9PROT Tryptophan halogenase (Fragment) OS=Parvularcula sp. OX=1979207 GN=DEA50_05250; PE = 4 SV=1
KDGLNSETRAIAMNAGWRWDIPLTNRSGNGYVYSSDFISAEAAERELRTALGLLDADAPARHLKMKVGRVDRHWEKNCLAVGLAQGFIEPLEATALHLVQATIEGFIETFEKTGFEDAGRRRFNERINARFEGVRDYIVCHYQASFRDDAEYWRANAANSKRSPSLQSMMNCWRAGSDIREEVRRQDIGKYYTDMSWTCLLGGYGDYPRELRAPAPEERRFDMGVIDDFIERASLNFPDHRAALSSLQAAE

SEQ ID NO: 84729 - protein, 543 aa, Robiginitomaculum sp.
  REGION 1..543: note = tr|A0A2G2LTY9|A0A2G2LTY9_9RHOB Tryptophan halogenase; OS = Robiginitomaculum sp. OX=2030823 GN=COA85_06095 PE=4; SV = 1
MMKKVVIVGGGSAGWMAAAYLNGALNKTGKEKTIDITLIESPTTPRISVGEATIPSIGHILSVIGIDELDFMKATDATFKQSIKYVNWLENNGTFYHHPFSRVRPGPIDYSGPEWMRSQRNIAFSECVCAQTMICEWNMAPKMLGEWSFGAPMKYAYHMNASKFADYLRDFSVARGVHHILADVTDVNVKDPNIITSVKLNDDREISGDLFIDSTGFTSLLIGKTLKVPHDDYSQWLLCNQAIVAQFPYEDYFPGIVRPYTTATALSAGWVWDIPMQNRRSLGYVHSSHFINETDARKELLSYQGISENDDKVETRIIKFKVGQRRKAWVGNCIAIGLAGGFIEPLESTGLYLADLSAVMLAEHFPYETEHMEALAFRYNRILSNRYLEILDFINMHYCLTRRTDSAFWKAVQQPEHINERLQSKLEYWQIKAPSNADFEDQAFAGYHYKSNSFDPIIDNRPPVDTAGLWNHESYESILYGMDFRGPEFKEKYGDKRPPSRVFPFIIDRLREAPKKLPPHHIWLHQVMGMKAYEEKMVPAGWV

SEQ ID NO: 84730 - protein, 521 aa, Xanthomonas oryzae
  REGION 1..521: note = tr|A0A0U4VWG5|A0A0U4VWG5_XANOO Tryptophan halogenase; OS = Xanthomonas oryzae pv. oryzae OX=64187 GN=BCR61_01980; PE = 4 SV=1
MPDTLPSDPQQRALRRVVIAGGGTAGWMAAAAMSKLLGRHLQITLVESDEIGTVGVGEATIPSLVTFHRLLEIDEAAFMAATQATIKLGIAFEHWRDVDRHYIHSFGHAGTDHWSAGFQHFWLKGQQRGVARDFGDYCLELRAAQEGRFAHLPNGGMNYAYHLDAGLYARFLRRFSEGFGVTRIEGRIGQVETDAESGFLTALTLQDGTRVEGDLFLDCTGLAGLLIGKTLGVGSDDWSRWLFADSALAVQTEAVGPPVTYTRSRADQAGWMWRIPLQHRVGNGIVYSSRYMDQDSARAVLERNLTGRALTEPRPLRVTPNQRHRVWEKNCVALGLASGFLEPLESTNIHLIQRGIIRLLQTFPQVINAVDIAEYNRQAAQEITHIRDFVILHYHATDRRDTPFWRDCAAMDIPDSLRHRVELFRQSGRVFHQANELFAENSWVQVMLGQGIVPQQHHPVADLMGDAELSRFLDTIHTRVEAALVRLPAHADFLQRYCPAPPPPEPAARLPAPPVMAPPAG

SEQ ID NO: 84731 - protein, 548 aa, Robiginitomaculum sp.
  REGION 1..548: note = tr|A0A2G2GEQ4|A0A2G2GEQ4_9RHOB Tryptophan halogenase; OS = Robiginitomaculum sp. OX=2030823 GN=COA47_08500 PE=4; SV = 1
MGNTHKTEFKKRLLIVGGGSAGWITAAYLNGALNARGAEKNVEITLIESPDIPRISVGEATIPSIGHILSVIGLDEMEFMKATEATFKQSIKYVNWLHNDGSFYHHPFSRYRAGPIDRSAQDWIGTNRGIPFTETVSAQVQICEMGLAPQMLGQWDFGARLKYAFHMNAQKFADYLRDFSVERGVKHIQANVTKTNVGKNGHIRSVETDHETELSADLFVDCTGFSAHLIEKALGVGFEDCSQFLFCDRAAVMQIPYEDYFPSQVRPYTTATAQSAGWIWDIPMSTRRSIGYVHSSSFISKDQAEREVHAYEGKHAEKYPIRFVNFKVGRRKQSWKGNCIAIGLSGGFIEPLESTGIYLADLASVMLAEHFPFTDNSMDAMAFRFNRIMSNRFYEILDFINMHYCLTRRTDTEFWKTVQRPEHITDRLAAKLEFWKLKLPSSADFEDQFFPGQSMTSSVAAADGRPAVDTAGLWNHESYEAILYGMDFRGPEFKTLLGDKRPPSRMPEFMIQRLQGARQKLPPHHIWLNRVLGMKPYEMHPPPPGWSA

SEQ ID NO: 84732 - protein, 509 aa, Xanthomonas oryzae
  REGION 1..509: note = tr|A0A346M9S0|A0A346M9S0_XANOO Tryptophan halogenase; OS = Xanthomonas oryzae pv. oryzae OX=64187 GN=BCR61_01240; PE = 4 SV=1
MIPAPLRNIVIVGGGTAGWMAAAAFARVLGPTFTVQLIESEQLGTVGVGEATVPHIKAFNNLLGIDEAEFVRQTQGSFKLGIEFVDWQRPGTAYMHGFGTQIGHPLGLLPFHQYWIKQHARGKAQPLGAYTLNTVAAARGKFMTSAGDVPANSPLANIAYAYHFDATQYAHFLRRYSQQRGVTRIEGLVEQVQLHPESGHVQSLQLASGQTVHGDVFIDCSGFRGLLIEEALHTGYHDFTHWLPCDRALAVPCEKVGPPTPYTRSTARAAGWQWRIPLQHRTGNGYIYCSAHISDDEAAATLLANLDGKPLADPRPLRFTTGRRKQFWNRNVVALGLASEFLEPLESTSIHLIQSGISKLLELFPREGISPVLVQRYNDRSAFEFDRIRDFLLLHYHATEREDSAFWRHCRSMPITPELQTTLDLFRDSGRFYRNAEEMFAEISWVQVMVGQGILPQGYHPLVDQVPDRDAEGFLASVAHTIAHCVDVMPPHQQFIDRYCKAAALPCGG

SEQ ID NO: 84733 - protein, 543 aa, Robiginitomaculum sp.
  REGION 1..543: note = tr|A0A2G2J5Q6|A0A2G2J5Q6_9RHOB Tryptophan halogenase; OS = Robiginitomaculum sp. OX=2030823 GN=COA69_02925 PE=4; SV = 1
MPDVKKVLIVGGGSAGWIMAAYLNGALNKKGTEKNIDITLVESPDIPSISVGEATIPSIGHILGVIGLNEREFMKATNATFKQSIKYANWLNNEGEFYHHPFSRYRPGPIDRSAQDWIGSDRKIPFTETVSAQAMICEMGLAPQMLGEWDFGTKLKYAYHMDAAKFANYLRDFSVPKGVKHLLANVTKTNIQENGHIKSVQTACGKTLSADLFIDCTGFSAHLMEKALGVGFEDCSQWLLCDRAAVMHIPYDDYFPSQVRPYTTATAQSAGWIWDIPMSIQRSIGYVHSSAFITEEQAQKELHAYEGAHSGAYETKFINFKVGRREQAWKGNCIAVGLSGGFIEPLESTGIYLCDLAAVMLAEHFPFTQNAMEAMAFRFNRILTNRFYEILDFINMHYCLSRRTDTDFWKEVQKPEHITDRLQAKLEFWKLKLPSTADFDDQFFPGQTSASLSGHGDVRRPIDTAGLWNHESYEAILYGMDFRGPEFENKPGHVRHPVRVPEFIIQRLHGARQKLPPHHIWLNQVMGMHQYEMHTPPPGWGKA

SEQ ID NO: 84734 - protein, 505 aa, Robiginitomaculum sp.
  REGION 1..505: note = tr|A0A2G2J629|A0A2G2J629_9RHOB Tryptophan halogenase; OS = Robiginitomaculum sp. OX=2030823 GN=COA69_06190 PE=4; SV = 1
MAENTIQKVVIVGGGSAGWMTAAALSKFIKNQYTSVQLIESEQIGTISVGEATIPPINTFNQLLGIDENEFVKATKATFKLGIEFTNWSKIGQSYMHPFGEFGQDIEAVKFYQFWLKLRSQQDMPYIDQYSLSAVAAKMGKFTKPGNDPRAVMSSLAYAFHFDATLYAKYLRTYSEKRGVQRTEGRVVDVNLRSEDGFIRSLTLEGGQIIEGDLFIDCSGFRALLIEGALKTGYEDWSHWLPCDRAVALPTSLKDEDNPAPLPYTRAIAHSAGWQWRIPLQHRTGNGHVFCSSYMSDQEATDILLNNVDGTPTAEPRILKFTTGRRKKFWNKNCVTIGLSGGFMEPLESTALHLIQAGISKLIALFPDKTFNPVERAEYNKLTCMQFDQIRDFLILHYQATQRDDSDFWNYVRTMDVPDTLASKIELFRSKGRIFRFEDELFGVSNWLAVLLGQGIYPQNWDPMVDTFDMDAVKNNLDGMQDIIRKTAEHMPTHQAYIDRFCAAK

SEQ ID NO: 84735 - protein, 493 aa, Robiginitomaculum sp.
  REGION 1..493: note = tr|A0A2G2J3E7|A0A2G2J3E7_9RHOB Tryptophan halogenase; OS = Robiginitomaculum sp. OX=2030823 GN=COA69_05580 PE=4; SV = 1
MENQTIKKVVIAGGGTAGWTAAAALSRQLGSLLDITLIESDQIGTVAVGEATIPTIRTFHHLLGIDEKAFMRATQASFKLGIAFEDWGGLDERYFHAFGQIGKSTWMGDFHHIWMMAKANGLAGELGDYCFELQAAEAGKFATSEHSKLNYAYHLDAGLYARFLRQMSEGNGVSRVEGKITKVEQVADTGYIEALVLESGERVEGDLFIDCTGFRGLLIEETLKTGYEDWSEYLPMDSALAVQTEATDPALPYTRSIAHESGWQWRIPLRHRVGNGLVYCSKYISDEDARTALFDNIQGKTLTEPRVINFKTGCRRKVWTKNCVALGLSTGFVEPLESTSIHLIQNGIIRLIQLFPFNGMDDALIRHYNEQSKEELVSIRDFIILHYKQTARDDSAFWRDQQAMDIPDTLAQRIALFKENAHAYQAPDDLFRVDSWVQVMMGQGLVPKGYHHMGALMSTEQMQKALGGIKSNIAKAVESMPPHQQFLDQYCAD

SEQ ID NO: 84736 - protein, 499 aa, Sphingomonas sp.
  REGION 1..499: note = tr|A0A0Q4KWR9|A0A0Q4KWR9_9SPHN Tryptophan halogenase; OS = Sphingomonas sp. Leaf34 OX=1736216 GN=ASF00_00980 PE=4; SV = 1
MNDTPEPPRTRVVVAGGGTAGWIAAAAIVRQLGSLVAVTLVESDEIGTVGVGESTIPTARSFHAFLGIDEAAFMRATQATFKLGIAFENWRQIGDRYFHPFGSVGRSVAIADFQHFWLEARARGFGGAYGDYSLEQQAAGAGLFGHDEQHSLAYAYHLDATAYARFLRNLAEPWGVRRVEGRIERVERDGEGGDIAALVLASGERIAGDLFIDCTGFRALLTEATLGTGYEDWSEWLATDRALAVQTETVAPPVPYTRAIAHAAGWRWQIPLQTRTGNGLVYSSRHMSDDEAHATLIGALDGRPLFEPRPLRFRSGMRRQAWNRNCIALGLAAGFIEPLESTSIHLIMNAVIRLIQLFPFRGDDHNALAARYNVQSRHEWEHVRDFIILHYHVTQRDDSDFWRDCARMTVPDSLAERISLFTATAGAWQGQDDLFRIDSWVSVMLGQGVVPRAHHRIASIIKAHDLQTSFDDLSRGIAGTVRTLPRHHDFLAHYCPASG

SEQ ID NO: 84737 - protein, 536 aa, Streptomyces sp.
  REGION 1..536: note = tr|A0A370REW4|A0A370REW4_9ACTN Tryptophan halogenase; OS = Streptomyces sp. HB202 OX=767398 GN=DER30_4721 PE=4 SV=1
MTVDGAGKQRAGDPGRTKRVVVVGGGTAGWMTASYLAAAFGERIDVTVVESARVGTIGVGEATFSDIRHFFEFLKLSEPDWMPACNATYKLAVRFENWREPGHHFYHPFEQLGSVDGFPLSDWWLRNPTTSRFDKDCFVMASLCDAERSPRYLDGKLIDQGFVEQQREETSARSTIVEYQGTQFPYAYHFEAALLAKFLTTYATQRGVRHITDDVTDVVLDQDGYIAHVQTAEHGRLEGDLFVDCTGFRALLLNKALDEPFVSYQDTLPNDSAVALQVPLDMDREPMRPCTTATAQEAGWIWTIPLISRIGSGYVYASDYTTPEEAERTLRAFIGPGAEDVEANHIKMRIGRSRRSWVKNCVGIGLSSGFVEPLESTGIFFIHHAIEQIVKYFPSGREDHRLRDLYNESIAHVQDGVREFLVLHYVGAKRADNQYWKDTKTRRVPDELAERIENWKYKVPDAQTVFPHYHGLPPYSYNCILLGTGGIEVRHSPALDMADERAAIAEFERIRLKADKLVQELPTQNEYFAAMRADAV

SEQ ID NO: 84738 - protein, 506 aa, Sphingomonas sp.
  REGION 1..506: note = tr|A0A0Q4KY26|A0A0Q4KY26_9SPHN Tryptophan halogenase; OS = Sphingomonas sp. Leaf34 OX=1736216 GN=ASF00_04305 PE=4; SV = 1
MNEHSIREVVIVGGGTAGWMAAAALSKFLGSRQGGAGQPRIRLIESEEIGTVGVGEATIPTIATFNQMLGIDEDDFVAKTQGTFKLGIEFVDWRRIGERYFHPFGQFGHDIEGLSFHQFFLKLAKQGQCADIWHYAPCAVAAAAGRFARQSPDPRSPFGTLPYAFHFDAGLYARYLRAYAEARGVERIEGRIVDVGLRSEDGFVESLTLDGGRRVEGELFVDCSGFRGLLIEGALKTGYEDWRHWLPCDRAVAVPTANIGDPVPFTRSTARSAGWQWRIPLQHRTGNGYVYSSAHISDEDAEATLLSTVEGPPIADPRRLAFVTGRRKRFWNRNVVALGLSGGFLEPLESTSIHLIQTGIAKLLALFPDRRFLEVEAGEYDRLMSSAYDGVRDFIILHYHATTRDDSPFWNHVRTMTVPDSLRRKTELFRAKGRFFRYDDELFSLASWVAVMLGQGITPEGYDPIVDGLDESKLVEAVERMRLGIRQTIAQMPSQSDYIRANCAAI

SEQ ID NO: 84739 - protein, 503 aa, Sphingopyxis sp.
  REGION 1..503: note = tr|A0A2Z5UKP9|A0A2Z5UKP9_9SPHN Tryptophan halogenase; OS = Sphingopyxis sp. FD7 OX=1914525 GN=SPYCA_0791 PE=4 SV=1
MIGMVASAPKLRIVIAGGGTAGWMAAAALSSALGAAIDLTLIESDAIGTIGVGESTIPPILLFNRLIGVNEAEFMRATQATFKLGIRFENWKDIGESYFHSFGTTGKDHWSAGFQHFWLHGLTCGHDRTYDDYCLELKAALEGKFAHLPDDRMNYAYQLDSSLYAAFLRKRAEGDGARRIEGRIAAVEIDGASGSIAALMLDGERRIEGDLFIDCTGFRALLIEGALHAGFDDWTHYLPCDSAIAVQTASVAPPVPYTRAIAHDAGWQWRIPLQHRQGNGIVYCSRYLAREEALDRLLGSVEGDVITAPNFIDYRTGVRRRQWYRNCVAIGLSGGFMEPLESTSIHLIQRAILRLIRMLPAGPVSERDIAEFNDQQFADMEQIRDFLILHYKVTERRDSPFWRQCAAMPIPASLEQKIELFRETGRVFRRNEELFVENSWVQVMMGQGIIPQRYHPIAAKLRREELDAFLSMLRDGVERTVASLPAHEAYIAQYCAAGGRHET

SEQ ID NO: 84740 - protein, 504 aa, Caulobacter sp.
  REGION 1..504: note = tr|A0A2R7L5E3|A0A2R7L5E3_9CAUL Tryptophan halogenase; OS = Caulobacter sp. HMWF025 OX=2056860 GN=DBR10_17390 PE=4; SV = 1
MTEHPPRKFVVVGGGTAGWMAAAALVHALRDRVGTVELVESEEIGTVGVGEATIPPIQFLNSLLGIDEFDFIRKTQATFKLGIEFRDWTRKDHSYFHPFGPHGTSIEGVSFHHYWMRLREQGDTSSIDDYSMATVAARMGKFAVPPKELPPGVPGLGYAYHFDAGLYARYLRGYAEARGARRTEGKIQSVALRASDGHVEALDLEGGRRIEGDFFIDCSGFRGLLIEEALRTGYEDWSAWLPCDRALAVPCEGVSPLTPFTRSTAREAGWQWRIPLQHRIGNGYVYSSGFISDDEAAATLMANLDGAPLGDPRPLKFTTGRRKKAWNRNVVALGLAGGFMEPLESTSIHLVQTGVMRLLSLLPVSGHDPATEVEFNRLSQIEYEQIRDFLILHYHATERDESPLWNYCRTMAIPDSLQHKIDLFRSRARVARFDDQLFAEPSWLAVFLGQGIEPRTYDRLADAPALADVSARLSGIRSVIHNLASRLPSHEQFIAATCKADPAP

SEQ ID NO: 84741 - protein, 505 aa, Caulobacter sp.
  REGION 1..505: note = tr|A0A2R7L557|A0A2R7L557_9CAUL Tryptophan halogenase; OS = Caulobacter sp. HMWF025 OX=2056860 GN=DBR10_18025 PE=4; SV = 1
MTADKAIRSIIILGGGTAGWMAAAALRTALGRTCEIQLIESAEIGIVGVGEATIPAIRQFNAMIGLKEAAFMRNTKASLKLGIEFVGWGDRDRRYMHPFGVYGLEAELGDFHQIYLRLREQGLADDLEAYSVCVQAAYRGRVGQVSTDPASPMSRLFSAYHFDAVLYGRHLRRFSEQMGVRRVEGQVVEVVKAPDESRVESLILKDGHSVAADLFIDCSGFKGLLIEETMKAGYEDWSHWLPVDRAVAVPCAKTGPITPYTTSTAREAGWQWRIPLQHRTGNGYVFSSRYTDEDTATATLMANLDGEALAEPRLLRFVTGRRREAWKGNVVALGLASGFIEPLESTSIHMVHSGLVKLLQHFPDRDFSPVNIATYNGRVREEAERIRDFIILHYHVTQRRDTPFWEYVATMPIPDSLAERVEIFRDRGLILSRPDELFSASSWLAVMIGQGIAPRGYNPLVNRQTTAQLDAGFKAIKSRISSLIDPLPEHEAFLAEQKMLDLEEA

SEQ ID NO: 84742 - protein, 480 aa, Burkholderia pseudomallei; identical to SEQ ID NO: 83829
  REGION 1..480: note = tr|A0A498TFD7|A0A498TFD7_BURPE Tryptophan halogenase; OS = Burkholderia pseudomallei OX=28450; GN = SAMEA1968934_01802 PE=4 SV=1

SEQ ID NO: 84743 - protein, 541 aa, unidentified
  source 1..541: note = Flavobacteriaceae bacterium
  REGION 1..541: note = tr|A0A349NW13|A0A349NW13_9FLAO Uncharacterized protein OS=Flavobacteriaceae bacterium OX=1871037; GN = DCS66_20690 PE=4 SV=1
MEINNITIVGGGTAGWMTATTLLSQFPNKKVTLVESPNISTIGVGESTVAAGQGGSGGIVNWLNMVGINEEFMPHTDAVYKLSIGFEDFYHKDSGRFHYPFGKPYIFNNKSKMNDWYYKKIRYPETPSSDYAECLYPSMALINQNKSLFSKNFTSGSGREDLEKDFDNNQVRLLSEYSYQFDATKFGIWLRDHVCKSKYGKNFTHVLAEVKDIPVNDAGIKHLQLDNGQKLTGDLFIDCTGFKALLLGQVLKVPFDSLEKVLPNNHAWATKIPYMNPEKQIVNYTNCTAIENGWIWEIPLWSRMGSGYVFSDKFVSVEDALKEFKRGLLKKGYKNVEDLEYRLMPMKCGIHSELWAKNVCAIGLSAGFIEPLQSNGLHCVHEFLFNLTRILAQDRINQWDRQCFTASCHYIFNTFTALINLTYTLSHRDDTEYWRQLENRKLPDVLQFKMNWDYPSAFYQKMIRGEFEEGAFPCTAAGLNWNPLDIHTLKYRANGRNVLNDLDNNYGFYINQLNMRKKKWSKEVKGFMSPYQYLKNYIHDK

SEQ ID NO: 84744 - protein, 533 aa, Streptomyces sp.; identical to SEQ ID NO: 83428
  REGION 1..533: note = tr|A0A286FLG8|A0A286FLG8_9ACTN Tryptophan halogenase; OS = Streptomyces sp. Ag109_G2-15 OX=1938850; GN = SAMN06272765_1413 PE=4 SV=1

SEQ ID NO: 84745 - protein, 522 aa, unidentified
  source 1..522: note = Erythrobacter marinus
  REGION 1..522: note = tr|A0A0H0XMX2|A0A0H0XMX2_9SPHN Tryptophan halogenase; OS = Erythrobacter marinus OX=874156 GN=AAV99_11840 PE=4 SV=1
MTMDKGIVNINAVDRVVVVGGGTAGWMTAAAMSRYFNNGRRKVTVVESDAIGTVGVGEATIPPIKNFNAMLDIPENEFLKATRGTFKLGIEFVNWGQQGDRYFHPFGTYGQDLHGIQFHQLFLREAARGTAGSISDYSMSTVAAALGRFGRPAPGAKSLVSQMAYAFHFDAGLYAAYLRKMAEQQGAGRVEGRIVQVHRNGESGDVTSVELESGVIVEGDLFVDCSGFRGLLIEEALETGYEDWSHWLPMDSALAMPTANVGSPPPFTRATAHTAGWQWRIPLQHRTGNGHVFSSAYMQAEEAERILRDHVEGEPLADPRLLRFTTGMRKKAWNHNVISLGLSAGFIEPLESTSIHLIQNGIARLFALFPEKAISPVERDEYNRGMRELYEDVRDFIILHYKATQRGDSEFWRYVRDMDVPESLARKIELWRLHGRIFRENAELFTMPSWTAVMLGQNIWPERYDPIADTLDEQRVASAMAQMREGYRATAQALPSQEEFLRQSGAWYDEKSTVAAMPGGFR

SEQ ID NO: 84746 - protein, 480 aa, Burkholderia pseudomallei
  REGION 1..480: note = tr|B1HJB4|B1HJB4_BURPE Putative tryptophan halogenase OS=Burkholderia pseudomallei S13 OX=320374; GN = BURPSS13_P0725 PE=4 SV=1
MHLPNRTQVLVIGGGPAGATGAAFLAREGVEVTLVDKEVFPRYHIGESLLPSCLEILTLMGARDTFDRHGFQRKPGAYFNWKGETWKLDFGELGGTYRYSYQVRREEFDHLLLQHARAVGAQVHEGVSVREILFDDGRPCAALCVAQGTEEATTVEFDYLVDASGRNGLMSTRYLDNRKFHEIFRNVAAWGYWEGLSWPDDCAPGSILVSSIPDGWWWAIPLADRPTSVGVVMHRDAFVAARRTGTLEQVYAQALALSPVMANLTEHARLVTPLKTEQDYSYTCDSFAGNGYFLSGDAACFLDPLLSTGVHLAMYSGMLAAASLASILRAEVTEREAAAYYRDSYRQAYLRFLVFVQTFYEAHGKLGYYSKADELSHYMIEAGDIRRAFLNLVSGLEDIADAEQATSHLMGEMSRRIDQNLALRKDKRALSSAIGSTQVEDNARFFDAIEGLPCLSANMALDGLYVSTRPRLGLQRVAAM

SEQ ID NO: 84747 - protein, 426 aa, Maricaulis maris
  REGION 1..426: note = tr|Q0AL35|Q0AL35_MARMM Tryptophan halogenase; OS = Maricaulis maris (strain MCS10) OX=394221; GN = Mmar10_2722 PE=4 SV=1
MAEPIRSICILGNGLEAWLTAHVLYKALGGEAVSIHIQPLDSRIHDDCAYTILRPSALVALDQFGLNLQGLLRLPATLPSLGQVLRSASGVDTLLPYGGQGVDWAGTSFHHHWLRARQAGLRHPYFAFSPGYHAMASDRFAPPDRRNAIGPMQHESGLHVSTRELTENLRLNLQANIIVLDPTANCEQADLVIHAPGAPDRNSTLDPVHAGPPKPYAVRVEAGGESRLQIPLRSGWLDLPTPAGPAKRHCGNSPWGEDGLVVGLAAAHLPGLEDRSMDRLLFELETLLELWPRSGVHSAEALEYNRLWAQEADEWTALSALSADQEDQRCQARKAVFRRRGYIEPLESRTITPEDWVEAFIGRGVIPAHYDRLSERLTDPQLKSELQKFTDAVGRTVREFPSFPSYLRAIDRAVGPATDAKTEPSA

SEQ ID NO: 84748 - protein, 421 aa, Amycolatopsis sp.
  REGION 1..421: note = tr|A0A429E5W3|A0A429E5W3_9PSEU Tryptophan halogenase; OS = Amycolatopsis sp. WAC 04197 OX=2203199 GN=DMC64_17415; PE = 4 SV=1
MSATLHGMPERFDVIVIGGGPAGATCAGLLAKEGRTVLVLERERFPRYHIGESLIPVGMRPLQELDLLDRMEARGFERKYGGSLVWGNRDVPWNFSFMKAAEGTYAYHTRRADLDTLILDRARELGAYVVEETTVKDVIQSDTGRVTGVRFTLRGSAGDYEAGASLVVDASGQSRVIGRKFSDITWHNELRNVAVWTYYDNCDRLPGDEWTNILIEGTADGWFWGIPIDKGTMSVGYVTKSDLANADDQSLEQLFLRERDKTTRLKGLLANARQHAGYRTARDWSYTNETFYGDGWVLVGDAAAFVDPLFSTGVALATLAGSSLSKVVDRILDHPAIEEKALDRYAGNYRAFFDEIRSFVERFYDRTKYKEYYYDLAQEIVDPEQLHAPSTDFVTLISGLSGKHPLLKINLDDLVANVTEP

SEQ ID NO: 84749 - protein, 497 aa, Pseudoalteromonas sp.
  REGION 1..497: note = tr|A0A317FVK5|A0A317FVK5_9GAMM Tryptophan halogenase; OS = Pseudoalteromonas sp. meg-B1 OX=2203192 GN=DK924_07260; PE = 4 SV=1
MKPIKHVVIAGGGTAGWITAALLNKVLGKVINITLIESSSIGTIGVGEATIPPIIGLNNALGINEQDFINATNASIKLGIEFENWKTPGHSYMHAFGSFGKDFPFCDFYNFWVKGHINGSEDSLWDFSLNYQAAKQHKFTLLNTIPNTQLPGLSYAFHFDATLYAEYLKNLALSRGVKHIDAKIERVEQCPETGNISNLTLDDNSQIQGDLFIDCTGQRALLIEQTLNTGFVDWSHYLPCDSAVAVQSTGSNELKPYTRSIAHDAGWQWQIPLQNRTGNGLVYCSRYLSDESATALLLNNLPGEPTTSPRLIKFKTGRRLKQWHKNVVAVGLSSGFLEPLESTSIHLIQSAVTRLIKLFPHNGVSDALVTEFNKQSTSEIEHIRDFIILHYKLTEREDTPFWRQCKQMEIPQSLAHKMDLFKQTGKVVRENDELFAEVAWQQVFIGQGLIPDDYNSIVDSLSSEQLTDLFATLKTLINSTVDKLPTHKEFLAKLKTN

SEQ ID NO: 84750 - protein, 509 aa, Pelomonas sp.
  REGION 1..509: note = tr|A0A397S329|A0A397S329_9BURK Tryptophan halogenase; OS = Pelomonas sp. BT06 OX=2135721 GN=C8K28_1072 PE=4 SV=1
MNKRRILIVGGGTAGWLTAAYLAKALKLSERSHLEVTVLESPDIGSVGVGEGTFPTIRSTLQFLGIDEARFIRETSATLKQGIRFVDWARTPTAGQHQQFFHPFEAPFYAEDLNLVPYWLLQDAAGRMPFADAMTLQVRVAEAHRAPKRAGEAPYAAPLNYAYHFDALKLAKLLAARALELGVRHVQGTVTEVALDAAGAISHLDTAQHGRFQAELYIDCTGFRAELIGRAMGASFKSVRHQLFADRALACKVPLDANGVMESSTIATAHEAGWLWEIGLNGARGIGCVYSSDHLSDDRAADILRAYCGAGQEDLGMRSIPFTPGYREQQWVKNCVAVGLSAGFLEPLEATGLVLIEAAVGMIAEMLPHSGPIHAPARRFNELMTARFENIINFLKLHYCVSQRQEPFWRDNAVASTIPDRLAGLLEEWKLRPPGRFDFVLDTETFAFFNYQYILYGMGFATDLSAGRADFPQVEEANKLFAKIQRFADRAVADLPSHRALIQQINSGR

SEQ ID NO: 84751 - protein, 506 aa, Sphingopyxis sp.
  REGION 1..506: note = tr|A0A2Z5UIM2|A0A2Z5UIM2_9SPHN Tryptophan halogenase; OS = Sphingopyxis sp. FD7 OX=1914525 GN=SPYCA_0239 PE=4 SV=1
MADQMSPMRIIIIGGGTAGWMAAACFIRFLPPGWSVTLVESDAIGTVGVGEATIPQIRLFNQALGIDEDEFLTATQGTIKLGIEFADWTRPGHRYMHAFGAVGRGLGLLEFQHYWLRARAAGVAGELGAYSLNECAARARRMQRGAPRTSPHLAEMPYAFHFDAALYAAYLRRRAEAGGAQRVEGKVVDVRMEGDSGNVAGITLEDGRRIDGDLFIDCSGFRGLLIEGALATGYDDWSHWLINDRAIAVPCAHGDTPQLPWTGATARDAGWQWRIPLQHRIGNGYVYSSHHITDEDAERTLLAHLDGVPQAAPNRLRFVSGKRRKLWNRNVVALGLASGFMEPLESTSIHLVQSGISRLLKMLPVGAADPAVAAEYNRQSDFEWERIRDFLILHFKATERRDTPYWRDRAAMPIPDTLAAKIEQFRAQGLIFREHEELFTESGWLQVLVGQGVEPRAWHPLAHGIGEGDLAKYMAGISLMIEREVATMQSYDDFLAATRPAAGVAA

SEQ ID NO: 84752 - protein, 511 aa, Pseudoalteromonas issachenkonii
  REGION 1..511: note = tr|A0A290SG31|A0A290SG31_9GAMM FADH2 O2-dependent halogenase I OS=Pseudoalteromonas issachenkonii OX=152297; GN = prnA PE=4 SV=1
MDIKKVAIVGGGTAGWLAANHIGKEMLNRKGISVTLIESPDIPPIGVGEGTVPDIRNTLKSFGIREDEFIRQCDATFKQSIKFINWMDKKKHGEGNFFHHLFDVPSPYDAKHLTSYWLNNKEKSQSYAQGLSSQHVICEAGLAPKNITNAQYEGELAYAYHFNAGKFAQLLACNAKEKFSVEHIHTHVTQVKLGDDGAIAALITDNNEELEFDFYIDCSGFESLLMSKALKVPFVDVSESLLINSALVVQVPTKADDAIPPYTLATAHQAGWIWDIALTNRRGVGFVYSDNHMTDEQAHEKLDRYLGDSKQDLTYRKIPMRVGYRKKFWHKNCIALGLAQGFLEPLEATSILLTDFSAKFLTLRFPSSTTQLEQLEERFNHAMGYAWERVIDFIKLHYCISDRTDSAFWIANKNQDTISTSLKEKLNLWKEFTPVRDDFFSQFEVFYLENFLFVLYGMNYNTKASNSPDKEQAHCLARLKQRAEIDHYLINKLPDHRALLNKIKQYGLQSI

SEQ ID NO: 84753 - protein, 480 aa, Burkholderia pseudomallei
  REGION 1..480: note = tr|A0A3B6W4S2|A0A3B6W4S2_BURPE Tryptophan halogenase; OS = Burkholderia pseudomallei OX=28450 GN=ERS013345_03932; PE = 4 SV=1
MHLPNRTQVLVIGGGPAGATGAAFLAREGVEVTLVDKEVFPRYHIGESLLPSCLEILTLMGARDTFDRHGFQRKPGAYFNWKGETWKLDFGELGGTYRYSYQVRREEFDHLLLQHARAVGAQVHEGVSVREILFDDGRPCAALCVAQGAEEATTVEFDYLVDASGRNGLMSTRYLDNRKFHEIFRNVAAWGYWEGLSWPDDCAPGSILVSSIPDGWWWAIPLADRPTSVGVVMHRDAFVAARRTGTLEQVYAQALALSPVMANLTEHARLVTPLKTEQDYSYTCDSFAGNGYFLSGDAACFLDPLLSTGVHLAMYSGMLAAASLASILRTEVTEREAAAYYRDSYRQAYLRFLVFVQTFYEAHGKLGYYSKADELSHYMIEAGDIRRAFLNLVSGLEDIADAEQATSHLMGEMSRRIDQNLALRKDKRALSSAIGSTQVEDNARFFDAIEGLPCLSANMALDGLYVSTRPRLGLQRVAAM

SEQ ID NO: 84754 - protein, 536 aa, Sorangium cellulosum
  REGION 1..536: note = tr|A0A150PAE4|A0A150PAE4_SORCE Tryptophan halogenase; OS = Sorangium cellulosum OX=56 GN=BE08_05175 PE=4 SV=1
MSDLIESIVILGGGTAGWMAASYLSKALQHKVKITLVESKAIPKIGVGEATIPNLQKSFFDYLGIPERQWMKHVNGAFKAGIKFVNWKKTPAPGRENAFYHLFGNLPSCDGVPLAHYWVKKHKEGFAEPMEYACYPQPEALDAKHAPCLLDGTRQMYYAWHFDAHLVADYLKQWSIERGVTHIVDDMVDATLDDRGHIASVSTKEGRTLRADLFIDCSGFRGLLINKTMKEPFLDMSDHLLCDSAVASAVPNDDARVGVEPYTSAIAMNAGWTWKIPMLGRFGSGYVFSSKFASREQATADFRALWGLPESHPLNHIKFRVGRNARSWVKNCVGIGLSSLFLEPLESTGIYFIYAALHQLVKHFPDTSFDQRQIDSFNKEIAYMFDDCRDFVQAHYFTTSRDDTPFWRANQHELRISDSIKEKIERYKAGLPVTATNLDEASYYDNFDYEFRNFWQDGNYYCILSGMGWQPDRVLPVIRYRQSSLDKAEAMFRDIKRRSEELKSSLPTNYHYLQSLQNGRASAHRQPHQTEPSSFS

SEQ ID NO: 84755 - protein, 504 aa, Maricaulis maris
  REGION 1..504: note = tr|Q0AL23|Q0AL23_MARMM Tryptophan halogenase; OS = Maricaulis maris (strain MCS10) OX=394221; GN = Mmar10_2734 PE=4 SV=1
MKPNRIKSVLIVGGGTAGWMAAAALSRFLGPSLSITLVESDQIATVGVGEATIPQIKHLNAALGIEERDFVARTNGSFKLGIEFIDWHRKGAAYLHNFGSIGLNLQQVPFHHYWLRERSEGATTSLWDYCLNTAAARDMRFAPMEKVGSSPLSGIGYAYHFDATLYGRFLREYAEQRGVSRIEGLIETCRQDPQTGDVSKVCLQDGRELAADLFIDCSGFRGLLIEQALETGYEDWTHWLPCDRAIPVPSSNEAAPIRPYTQSIAHKAGWQWRIPLQHRTGNGHVFSSAHMSEAEATDTLLDNLEGKPLAEPRMIRFVTGRRKQFWNRNVVALGLASGFLEPLESTSIHLVQSGISRLIAMFPDGDIAAADRTEYNRQMVLEYERVRDFIILHYHLNERTDSDFWQDCAAMSVPDSLTAKMDLFRANGRLYHREEDLFTDSSWLQVMLGQGLMPRGYHPIADALPSDQLAGFLGDILKIVGQAAATLPPHADYLARHCPAAADA

SEQ ID NO: 84756 - protein, 508 aa, Pseudoalteromonas agarivorans
  REGION 1..508: note = tr|A0A290RLB8|A0A290RLB8_9GAMM Uncharacterized protein OS=Pseudoalteromonas agarivorans DSM 14585; OX = 1312369 GN=PAGA_a0247 PE=4 SV=1
MNKAIKTIAVIGGGTAGWLSAAIIASYHQGNKGDGLKVMLVESSDIPTIGVGEGTWPTMKNTLQQIGLREVDVFKACNATFKQGGKFVNWTHGNNDFYYHPFTVPLGYGRIDLAPYLDNVENFAQQTNFQHDICEANLAPRGIAQGEYQANCNYAYHLDAGAFAELLKQHCKSKLGIEHIIGTVDQVKLDESGAIDTLTLTDQTRTINADLYIDCTGFSSLLLGQALNVPFKKMDHVLFNDSALAMQVPYDEGDESLASHTIATAQNAGWIWDIGLTHRRGVGHVYSSKFLSDEEAEQNLRNYLGDAAKGLSARKISFESGYREKFWHKNCVAVGMSAGFVEPLEATAIMLVEISSRFVAEHMPADTQVMPIVAKRFNEQMDYRWQRIIDFLKLHYMLTKRPEPYWQAHVQPQSIPQSLQEDLLLWGTRGPLIQDFHGALELFPAASYQYVLYGMGFKPDFTKQAYLYSNDAQANQIIERNSQLTQQMLQTLPPHRAYIEQWLAANPV

SEQ ID NO: 84757 - protein, 502 aa, unidentified
  source 1..502: note = Erythrobacter marinus
  REGION 1..502: note = tr|A0A0H0XRQ2|A0A0H0XRQ2_9SPHN Tryptophan halogenase; OS = Erythrobacter marinus OX=874156 GN=AAV99_05955 PE=4 SV=1
MAIEHIVIVGGGTAGWMAAAPLSRMKKGRKLAVTLIESEAIGTVGVGEATIPPFREFNQALEIDDREMLSEVQGSFKLGIQFVNWGALGDSYIHPFGNYGYTIGGLSFHQVWHHMKVAGDKRPLQVFNVETMAAYFGRFMRSKDMEREDLPPVNYAYHLDASQYAKYLRKYAESRGVVRREGKICDVQLDGESGDVKSVKLEDGTVIEGDLFVDCSGFRGLLIEQALETGYEDWSHWLPCNRAVAMPCQRDDGTPPPPFTRATAHAAGWQWQVPLQHRNGNGHVYCDSFMSADEATDILVKNMAGKPTADPNHLRFVTGRRKKFWNRNVVALGLSAGFMEPLESTSIHLVHTGINKLIALLTLDDITDAARNTFNRLTGREYARIRDFLILHYNATSRDDTEFWNYCRTMSVPDTLSEKVELFRTTGQIFREEDELFTETSWAAVMLGQGVEMQAHNAMASSLDKAATKSEFDEIERTIRTMVQHMPGHGDYLAKYCPAAPA

SEQ ID NO: 84758 - protein, 506 aa, Sorangium cellulosum
  REGION 1..506: note = tr|A0A150SRZ1|A0A150SRZ1_SORCE Tryptophan halogenase; OS = Sorangium cellulosum OX=56 GN=BE18_13000 PE=4 SV=1
MTQATAQQDEQFDVIVLGGGPGGSSVASFVAMQGHSVLLLEKEKFPRHQIGESLLPATTYGICGLLGIRDRIERAGFTRKQGGTFRWGKSPEPWTFRFAENPRVPGGYAFQVERSVFDKMLLDAAREKGVDVREEHPVVRVEQEDGRFSRVRFRDDRGSERTATAKYIVDSEGHRGQTYALVGERVFSQFFQNVALYGYYLDGKRLPAPSSGNILCAAFRDGWFWYIPLSDRLTSVGAVVSREAAQRIQDGPEQAFQSFVDSCPIIAEYLASATRVTEGVYGEFRVRKDYSYCNTRFWKPGLVLIGDAACFIDPVFSSGVHLATYSALLAARSINSCLAGDIDEEEAFDEFEFRYRREFGNFYQFLLSFYDMHQEADSYFWKARKVLNTDEKANDAFIRLVAGASSVDEPVFNHAEDFFRSRQGLGQWFEGMLSNQLATQVDGLPGQSAPATLEGGPSAEQFMEGFTAEVRQIQTQAMFGHRRARESSVRPQGLIPSTDGFAWQRG

SEQ ID NO: 84759 - protein, 522 aa, Pseudoalteromonas agarivorans
  REGION 1..522: note = tr|A0A290RUB2|A0A290RUB2_9GAMM Uncharacterized protein OS=Pseudoalteromonas agarivorans DSM 14585; OX = 1312369 GN=PAGA_a1717 PE=4 SV=1
MNDTLKSIVIVGGGTAGWLSAGIIAAYLKKHHSLNYHITLVESAGIATVGVGEGTWPTMRRTLQNMGVDEAQFINQCNVSFKQGAKFANWHSTKENDFYYHPLMMPQGFADNDLAAAWLRQDIDSAAPHNHFANFVCPQHALCEHNLAPKALTTPQYSGVANYAYHLDAGLFATFLKNHCINHLNVTHVVASVLSVNNNANGDIHSLSLDNNTALCGDLYIDCSGFKSLLLGENLKIGFKSCKDILFADSALAVHMPYDDETQAISSHTISTAQTAGWIWDIGLQTRRGVGYVYSSRHISEQEAKEQLFDYLNISPAERADFNVKKISFEPGHREKFWHKNCVAIGLSAGFLEPLEASALLLVEISANFIAEQLPANRQVMDITAARFNRTFSYRWQRIIDFLKLHYMLSERTDSLFWQQHCAEQSIPQSLQDNLALWRTHIPNDNHFDYSVEVFPAASYQYVLYGMGFKTATTHYGNHPRAIKKARNLAAKNTKDTAELVSKLPDNRTLLKQIKQYGLQKI

SEQ ID NO: 84760 - protein, 497 aa, Pseudoalteromonas issachenkonii
  REGION 1..497: note = tr|A0A290SJ10|A0A290SJ10_9GAMM FADH2 O2-dependent halogenase I OS=Pseudoalteromonas issachenkonii OX=152297; GN = prnA PE=4 SV=1
MKPIKHVVIAGGGTAGWIAAALLNKVLGKVINITLIESTHIGTVGVGEATIPPIMQLNNALGINEQHFINATNATIKLGIEFENWKSSAHSYMHAFGTLGKNFPFCDFYNFWLKGQTQGNKDDFWDFSLNYQAAKNNKFAPLNTISNTSLPGLSYAYHFDASLYAEFLKHLATERGVKHLDAKINEVMQCPTSGNIQSLTLDDGSSISGDLFLDCTGLRALLIEQTLNTGFVDWSHYLPCDSAIAVQTASNDELKPYTRSIAHSAGWQWQIPLQHRMGNGLVYCSRYISDDDAKQLLLNNLPAEPITEPRLIKFKTGRRLKQWHKNVVAIGLSSGFLEPLESTSIHLIQSAVTRLIKLFPHHGVSDALVTEFNKQSITEIEHIRDFIILHYKLTEREDTPFWRQCKQMEIPQSLTHKMDLFKQTGKVVRENDELFAEVAWQQVMIGQGLIPDDYNSIVDSLSSEQLTDLFLTLKTLINSTVEQLPSHTVFLSSLKPK

SEQ ID NO: 84761 - protein, 475 aa, Sorangium cellulosum
  REGION 1..475: note = tr|A0A150P2A9|A0A150P2A9_SORCE Tryptophan halogenase; OS = Sorangium cellulosum OX=56 GN=BE04_23050 PE=4 SV=1
MQGHSVLLLEKEKFPRHQIGESLLPATTYGICGLLGIRDRIERAGFTRKQGGTFRWGKSPEPWTFRFAENPRVPGGYAFQVERSVFDKMLLDAAREKGVDVREEHAVVRVEQEDGRFSRVRFRDDRGSERTATAKYIVDSEGHRGQTYALVGERVFSQFFQNVALYGYFLDGKRLPAPSSGNILCAAFRDGWFWYIPLSDRLTSVGAVVSREAAQRIQDGPEQAFQSFVDSCPIIAEYLASATRVTEGVYGEFRVRKDYSYCNTRFWKPGLVLIGDAACFIDPVFSSGVHLATYSALLAARSINSCLAGDIDEEEAFEEFEFRYRREFGNFYQFLLSFYDMHQEADSYFWKARKVLNTDEKANDAFIRLVAGASSVDEPAFNHAEDFFRSRQGMGQWLEGMLSNQLAMQVDGLPGQSAPATLEGGPDAEQFMEGFTAEVRQIQTQAMFGHRRARESSVRPQGLIPSTDGFAWQRG

SEQ ID NO: 84762 - protein, 514 aa, Rheinheimera sp.
  REGION 1..514: note = tr|A0A437JJF7|A0A437JJF7_9GAMM Tryptophan 7-halogenase OS=Rheinheimera sp. YQF-1 OX=2499626; GN = EMM73_07565 PE=4 SV=1
MMEAKQRIVILGGGTAGWMTAAALSRFLPPHSYSIQLLESAQIGTVGVGEATIPHIRQFNQWIGLDESEFLKATGASYKLAIRFRGWGQANSDYYHPFGLSGEDLYGLPFHQHWLWLQQQKTTSLKDYGQYSLAVLMAQQGKFSRPAADLKDPSSSFNYAYHLDATLYAALLRQHSIAQGVEWLDGKVTAVTQHQNGDIAQLILEDGRQIAGDLFIDCSGFSALLINKTLQTGYDNWQHWLPCDKALAVPSEKAPAPPSYTSSKAMAAGWQWRIPLQHRTGNGLVYCSSYLTDSAAEQALMTGLEEQALAPARALQFVTGRRKQSWVNNCIAIGLSSGFLEPLESTSLYLVQIAIESLLQYFPSHPVGDIERELFNQKMQLEYLRVRDLLILHYKLNSRPEPFWQYCAQMAIPDSLAQRLEMFKETGHALEYRQGLFQPASWLALYLGQGLQPKQLDTRLGALDPNQLESWFSRYQYQLQQVVNAMPEHHQVLQRTELAGAAVAPAFSLYGHRG

SEQ ID NO: 84763 - protein, 515 aa, Streptomyces sp.
  REGION 1..515: note = tr|A0A4R2E188|A0A4R2E188_9ACTN Tryptophan halogenase; OS = Streptomyces sp. BK387 OX=2512128 GN=EV289_11257 PE=4; SV = 1
MTQSVVILGGGTAGWMTASYLRAAFADRVDITVVESRRIGTIGVGEATFSTVRHFFDYLGLSEADWMPECNGTYKLAVRLENWRAPGTYFYHPFERMRVVDGVPLTDWWQKVGGTDRFDRDCFLIPWLCDAKASPRYLDHRLFEQDFDEDPDRPLYRTTLAEQNTQFPYAYHFDASLLADFLCRHAVGRGVHRIIDDVVDVRLDERGWIDRLVTREHGDLTADLYVDCSGFRSRLLGDALGEPFISFQDSLPNDRAVALRVPVDTAVRGIRPCTTATAQDAGWIWTIPLYDRIGTGYVYAADYCEPEEAERVLRDFVGPAAADLEANHIRMRIGRSHRAWVNNCVGIGLSAGFVEPLQSTGIFLIQHAIEQLVRYFPGTDRDPVLRDTYNLSTARAIEGVREFLILHYRGAARVDNDYWRDAKKRAVPEDMAVRMEQWQSKLPDNDTTYPYYHAFEPYSYVCMALGLGGIPLRHPPALDLFDTRAARAELARVREQARKLVDTLPSQVEYLSGLR

SEQ ID NO: 84764 - protein, 499 aa, Robiginitomaculum sp.
  REGION 1..499: note = tr|A0A2G2J3Q6|A0A2G2J3Q6_9RHOB Tryptophan halogenase; OS = Robiginitomaculum sp. OX=2030823 GN=COA69_09260 PE=4; SV = 1
MSIKNIVIVGGGTAGWMTAAAFSHATGDRAQITLIESEQIGTIGVGEATIPPFVGFNNLLGIDEATLMANVQGTFKLGIQFVNWGQKGDSYFHPFGDYGYSIDGNDFHSIWMKFRKNGDPRPLYAFSPETIAAMHRKFERTPEGQRGDLPPINYAYHMDASQYAKYLRKYAEPRGVKRVEGLVEDVTLNSENGFVDSVTLKGGQIIEGDFFIDCSGFRGLLIEGALKTGYEDWTHWLPCDRAIAVSCAQDDAPLPYTRSTAWSAGWQWRVPLQNRLGNGHVFCSEYMSDDEAQDILMSNLDGEPLTEPKTLRFKTGQRKKFWNKNVVAIGLSAGFMEPLESTSIHLINTAITKLIATFSLDGISPIQENIFNRLTQKEYRRIRDFLILHYHVNQRDDGEFWKYCQNMDIPDTLQEKLDLFKWNGQFFREEDELFTATSWVAVMMGQGIEPQTYNPVVDAMDAEKTKKEFDEIEKSIQFLVQEMPTHEEFLHQYCEASKS

SEQ ID NO: 84765 - protein, 528 aa, Undibacterium parvum
  REGION 1..528: note = tr|A0A3Q9BP27|A0A3Q9BP27_9BURK Tryptophan 7-halogenase OS=Undibacterium parvum OX=401471; GN = EJN92_04270 PE=4 SV=1
MKPISSILIVGGGTAGWLTAAFLAKSLGVASSKTLSISVVESPEIGIIGVGEGSFPSIRGTLAAIGIDEARFVKECNASFKQGIKFVDWVRPKGSAGIDHYFHPFSQPSQRQGGPELLPYWLLGAAGNHTPFAQAATMQKRIADASHAPKRNEDGDFLGPMNYAYHFDASLFAKLLETHAKSLGVQHISATIEQVQLAEDGAIAAVITHTTERLTADLYVDCSGFRARLIGQALGSAFTAVDEVLFVDRALAVQVPYPASDTPISSYTIATAQEAGWIWDIGLQQRRGVGHVYSSRHTDDVRAEQVLRDYLRDHLGPDNAQLTPRMLKLKVGYREVHWIKNCVAIGLSGGFLEPLEASGIGLIETAVYLLSYLFPHDGNTAPVAKLFNSMMKDRYERIVDFVKMHYCISQRKDSQFWLDNTESRSIPESLQEKLAMWRCRPPHRLDFITDLEMYPPSSWQYVLYGMEFKTALHANALAYPRMEEARQEFQMIEQMARRALDNLPTHRALIAQFCARYQQQLLGKQAEA

SEQ ID NO: 84766 - protein, 501 aa, unidentified
  source 1..501: note = Sphingomonas pokkalii
  REGION 1..501: note = tr|A0A2U0SDD0|A0A2U0SDD0_9SPHN Tryptophan halogenase; OS = Sphingomonas pokkalii OX=2175090 GN=DD559_08705 PE=4; SV = 1
MSAPLSHIAIIGGGTAGWMAAAALARVLDTKAIAITLVESEAIGTVGVGEATIPPIQAFNALLGIDEAEFLRATKGTYKLGIEFVDWRAHGTRYFHPFGTHGVDFGAIPFEALWQRARMAGAAAPLEAYSICAEAARLGRFQRPATTGNNPLAHIGYAYHFDAALYAGFLRARAEQWGVRRQEGRVTSVERASDGAIAGVVLEDGARIAADFYIDCSGFRALLLGEALGIPFEDWGRWLPNDRAVAVPCALGLEGRTPFTRSTARGAGWQWRIPLQHRVGNGLVYASAQCSDEDAQALLLSTLEGEPLAEPRVLRFRAGRRARFWERNCVALGLSSGFLEPLESTSIHLVQAGIARLLEMLPVGGGTPADIRRYNRLMATEFETIRDFLILHFHATARDDTDYWRQLRTMELPDTLADRLAIYRASGRLYREADELFSKTSWLAVLHGQGVDPIGYDPIADGMARDEARTRLARIAEVTALAASRIPAHDAFLRESGAMVE

SEQ ID NO: 84767 - protein, 510 aa, Caulobacter sp.
  REGION 1..510: note = tr|A0A2R7L6D4|A0A2R7L6D4_9CAUL Tryptophan halogenase; OS = Caulobacter sp. HMWF025 OX=2056860 GN=DBR10_17020 PE=4; SV = 1
MPAPLKVVIVGGGTSGWMSAAALVAGLPPGLCEVRLVESDEIGIVGVGEATLPQIKDFNDHIGVDEADFMRQTQATFKLGIEFVDWGFKGSSYIHPFGVHGKPLGGVPFYQYWAKARLNGRVDDLGDYSLPIVASRQNRFAFPSTDEDGLSSNFAYAYHFDAHLYARFLRGFAEARGLRRTEGRIVDVTLKPEDGHIASIRLESGEVIAGDLFIDCSGFRSLLMGQALGVGYEDWTPWLPCDRAYAVPCERAGALTPYTRSTAREAGWQWRIPLQHRTGNGYVYSSRFISDDEAAATLLANLDGEAQGDPRPLRFQAGRRETSWSRNCIAIGLASGFLEPLESTSIYLIQVAITNLLKLLPGRAIDPALVSEFNRLIDVEYGRVRDFLILHYHLNGRDDAPLWRYCREMPVPDSLTSRMALFEHRGHIAKYKDGLFQPPSWLAVFVGQGLLPAGYDPLVDNVPQEHILRELDQFRADVAQTVEAMRDHGGFVADFCAAPANRPLSSRVAS

SEQ ID NO: 84768 - protein, 504 aa, unidentified
  source 1..504: note = Sphingomonas pokkalii
  REGION 1..504: note = tr|A0A2U0SF51|A0A2U0SF51_9SPHN Tryptophan halogenase; OS = Sphingomonas pokkalii OX=2175090 GN=DD559_12265 PE=4; SV = 1
MAGVKPVRVVIVGGGTSGWMTAAALARLLPGRVSIHLIESEAIGVIGVGEATLPHIRGFVEKLGIREADFMAWTRGTFKLGIEFRDWGKIGDSYVHPFGTFGRGKGEVDFHHYWTRLRLAGTDVPPLEQFSYGCMLARANRFDLPLDDPDHLASTYGYAYQFDALLFAPYLRTIAEGLGAQRTEGKVVEVLRDAERGTISAVRLDDGALIEGDLFIDCSGFRSLLLGEALEEPFEDWNHWLPADRAVAMPCRTATAVTPYTSAIAMPAGWRWRIPLQHRTGNGYVYASAFTSDDDAARALTHAVEGAPLADPRVLRFRAGRRRRSWVKNCVAIGLASGFLEPLESTSIYLVQQAITALIELFPETADAPVERDEFNRLIDLEYDRIRDFLILHYHATTRTDTDFWNYVRTMTIPDSLSEKIELFRRAGRVVKYREGVFLDASWIAVYVGQGILPEGYDPRADAPDSGALIQGMQALHREITATVERVPEHLRYIDRYCAMAAAA

SEQ ID NO: 84769 - protein, 434 aa, unidentified
  source 1..434: note = Frankia torreyi
  REGION 1..434: note = tr|A0A0D8B9Y1|A0A0D8B9Y1_9ACTN Tryptophan halogenase; OS = Frankia torreyi OX=1856 GN=FF36_04593 PE=4 SV=1
MTQKVLVLGGGTAGLLSGIALLQLAPGAEVTVVRSSALSHIMVGEGTFADTPRMLHGPLGVPRDEFLASTNPTVKLGIRFEWGPRPYFDYPFEEDFDNQILPGPDKPWGYYHLTDARDESPFPATTRRTRVGYHVENQRFVEYLEGFFEQLGGDLVEGKVIGAERSDAGLDCVLIEGGARMSADLYVDASGFRGELIHRTLGEPYVSMRDHLFCDRAVVGGWQRGDEPIQLYTTVETMDSGWAWQIEHEHLVNRGYVYCSAFADDEEASAEFLRKNPLVAPATLRVIRFETRRIRRSWVGNVVAVGNSCGFIEPLEATNLQLICQQAMRLAETVATSGPSGAEAIDAYNEAVTEQWIDIQDFLAMHYRFNTRLNTPFWKMARNDTPLGNLEPYIEEYKRSGPVLMGQRNSMFGVDGHLAILLGMRVPWRETGVR

SEQ ID NO: 84770 - protein, 650 aa, unidentified
  source 1..650: note = Legionella massiliensis
  REGION 1..650: note = tr|A0A078KXL7|A0A078KXL7_9GAMM Tryptophan halogenase; OS = Legionella massiliensis OX=1034943 GN=BN59_03473 PE=4; SV = 1
MKNIVIAGGGPIGLYTAIRISKLIEKYGLKATVTVVEPKLNLYSRPGIVAKNVLDVIERNVELDHNLLPDGDDSGSSIFIMDLEKALYKEAQNHGIKFVRGKVAAIEGKALVLEDGRKIPCEIVIDSTGPRRTLINQVNQQSTSEKKPFTIRQVADNPIKNHFVAYVHMDGENAKLIAGKMVKDPLKHALALEKLRTEFGWPHFKEPELSIRKYTPKGENKDDDMQRFYFYFEIPPELAESEPSEQLAWLKALLYLKTENDDIEFTVEDGAMKFLPFGVNPHEVTEPVYTSSGLPVVIPCGDAQIEPDYRPGIGIRSGAFRADTLVDSFMRDLDGGLVLNQEAYEHSLQGPLGLHRTTLKDEYKNNRERLDSALLEKGKIYSEALALAETPEQGEIILKGLRQIVSEIERLGVQAYRDSCQKGTPSQKVPQFKIDNYGHLAEVTSLEQSKTLLATALELLPETEVELRTQIKNNIDDLAMSYKAFAALKFSSKEYGFAHKFYNEALSLLTSNMPGEHKDEIAKIYSNLALIAKAQKKYDLVKDYVDKGLQELGSMLSEDRNTPDMKTIYAKLLNTQCNALFDEVEANITKLDSRDHPLNAKLQQGKDLCNTLIENSLIHSSSAKILSERLAKVERAVSEKLEPLVTVQIK

SEQ ID NO: 84771 - protein, 500 aa, Sphingomonas sp.
  REGION 1..500: note = tr|A0A4Y8ZR32|A0A4Y8ZR32_9SPHN Tryptophan 7-halogenase OS=Sphingomonas sp. 17J27-24 OX=2555898; GN = E2493_09545 PE=4 SV=1
MADGAVRSIVIVGGGTAGWMAAAAFARFLGPPFDIRLVESDEIGTVGVGEATIPQIRLFNDGLGIDEDEFLRATQGTFKLGIAFDGWRAPGQSYIHAFGSIGRPLGLIAFHHYWLRARAEGAAEGLWDYSPSALAANANRFARPNESGLPSGIAYAFHFDASLYAAYLRSYAEARGARRIEGRIADVARRGEDGFVEAVTLAGGQRIEGDFFVDCSGFRSLLLGEALETGFEDWSRWLPCDRALAVPCAPVRPLTPCTRATAKAAGWQWRIPLQHRTGNGYVYSSRHVSDDEAEATLLAGLDGEALAEPRRLRFVAGRRREAWRGNCVALGLAAGFLEPLESTSIHLVQAGIARLLQLLPGGAIDPSYAAEFNRQTAREWESIRDFLILHYHANGRDEPLWRACREMEIPASLTEKIALFRAGGRIFRTEEELFTEVGWLQVMLGQGIDPVSYHPLADRLAPEQLREFLSLASSHAGHVAGRMVDHADYVAQRCAAAPRR

SEQ ID NO: 84772 - protein, 534 aa, unidentified
  source 1..534: note = Flavobacteriaceae bacterium
  REGION 1..534: note = tr|A0A2E8DGL1|A0A2E8DGL1_9FLAO Uncharacterized protein OS=Flavobacteriaceae bacterium OX=1871037; GN = CMC55_00190 PE=4 SV=1
MTNKIIIVGGGSAGWMTAATLSKFFSHKSITLIESPDIPTIGVGESTLGQINRWLSMLDIKDEDFMKACDATYKLSIRFQDFGRIGDGGFHYPFGDPYIKENSAEMNDWYFKKILYPQTPNWDYAECLYPSMGLVFQNRLTDRDDLFPDCWSFQKDTAYHLDATKFGIWLRDHYCIPKGVKHIKEEIKSVEVSHKEGIISLNKKYKADLYIDCTGFKSLLLGKTLLEPFESFDYLPNNSAWATKIPYRNRTNEVKNYTNCTAIQNGWIWTIPLWSRIGTGYIYSDKFVSDETALKEFKHWLANPTMNFFPLPSFFSDEKGQWDPKWVDQLEFKKFKFKGGMYKKPWVKNVCAIGLAAGFIEPLESNGLLSVHEYLQLLLRCLGREEISQFTRDNFNFGVRKLSKSFSEFVALHYALSSRTDTKYWKAIQERAYPFDFDYPTLNSDFQLATISKMENHHYRPTGGLHCIATGMDWYPTDLPTLMSFSYKNTYKELKKMWQPSINKLNLRSLDWKRLAITCPSALKFTKDKIYRDS

SEQ ID NO: 84773 - protein, 507 aa, Robiginitomaculum sp.
  REGION 1..507: note = tr|A0A2G2J3Z5|A0A2G2J3Z5_9RHOB Tryptophan halogenase; OS = Robiginitomaculum sp. OX=2030823 GN=COA69_06180 PE=4; SV = 1
MSQETGAVKKIVIAGGGTAGWMAASGLAKLLGDQNLEIELVESEQIGTISVGEATLPHIRFFNQKLGLDEADFIAKTQATIKLGIEFKDWGRIGDSYIHPFGDYGRDFNEVDFHHYWLKLNQMHKAGRIDDYSLPIVMAEMNKFGFPDPDERSVMSSFSYAFQMDASLYAKYLRGFAENLGVKRTEGRIVDVTQHAETGFIKSLVLEDGTSVEGDIFLDCTGFRALLIDKTLKIGFEDWSNYLPCDRAIAVPCEGSDTPIPYTRATARGAGWQWRIPLQHRIGNGYVYCSEFISDDEACADILANLDGKPLNDPLFLKFQAGKRKTQWEKNCITIGLSSGFLEPLESTSIYLIQAAITNFIEMFPQKDCAETDVKEFNRIMDLEYERVKDFLILHYYATERDDTPFWNHVRNMEIPDSLEYKMSLFRERGIVVEYKDGLFLHPSWVAVYLGQRIVPKRYDPLVDAIPTDALIQRLDEMKGQIAQVVGALPSHPEFLRSNCPAPPVSM

SEQ ID NO: 84774 - protein, 538 aa, Burkholderia pseudomallei; identical to SEQ ID NO: 84273
  REGION 1..538: note = tr|A0A3B6WKQ7|A0A3B6WKQ7_BURPE Tryptophan halogenase; OS = Burkholderia pseudomallei OX=28450 GN=ERS013345_04634; PE = 4 SV=1

SEQ ID NO: 84775 - protein, 561 aa, unidentified
  source 1..561: note = Marinibacterium profundimaris
  REGION 1..561: note = tr|A0A225NI01|A0A225NI01_9RHOB Tryptophan halogenase; OS = Marinibacterium profundimaris OX=1679460 GN=ATO3_12265; PE = 4 SV=1
MNNRLRKITIVGGGTAGWMTALIMETEFSRTSAPKDRPRICLIESPNIATVGVGEATVPHMPRTIRKAGITERDFFRETNASFKLGVKFCNWNKDARGNRIDYVNPFAHGQILEGLEAAEYFLRFGNGDRDFTQSVAPHDDLGRLCKGARELGQPEFEQRFGYAYHLDAVKFAGMLSRVCTRRGVEHIQDEVQSVELDEQGNVSHLMLERKGRHDVEMVVDCTGFRGLIINQALGEPFLDYSDYLPNDRAMALQIEHPDPEKIESVTRSTALGAGWTWRVPLYNRVGTGYVYSSAHRTDDQAADEYLEWLGDSGKGATPRVIPMRIGRVRNAWVKNCVAVGLSGGFIEPLESTAIHMIEHAVRWFTEHLPTREIEPALRSRYNRQMNRLYDEVLDFICLHYRLGNRTDDQYWIDARTEMKIPDRLAENLELWQYRLPMDHDIGFATLFDFRVYQTVLLGKQVYDTGYGPGIRDRLRPVKKPIWFHYTKGAKAHLAQILKTMPDHKTLLRDIRGELEQPAYARVAAMKPTVPMPGEAPEPVKIQNMPNHAEIRSGAKDLQLF

SEQ ID NO: 84776 - protein, 511 aa, unidentified
  source 1..511: note = Erythrobacter marinus
  REGION 1..511: note = tr|A0A0H0XN46|A0A0H0XN46_9SPHN Tryptophan halogenase; OS = Erythrobacter marinus OX=874156 GN=AAV99_11845 PE=4 SV=1
MNGDPIRKIVIVGGGTAGWMAAAAISKIMGNFPRLTITLVESEAIGTVGVGEATIPQIAAFNKLLELDEREFVRETCATYKLGIEFVDWLRPNHSYVHPFGSYGLDMLGIEFHHFWLRARTLGQDIPLDDFSIAVAAGKAGKFFWPRPDQPNSPLSRLSYAFQFDAGRYARYLRKIAETCGVLRVEGKVTQVLQNSENGHVTAVKLEDGQSVEGELFIDCSGFRSLLLGQTLGIGFTDWTKWLPCDRAVAIPCELGGKREPLTRSTARPAGWQWRIPLQHRIGNGHVYSSAHMEPDEATEMLLANLDGTPLAEPNHLRFTAGHRDKAWDRNVVALGLAGGFLEPLESTAIHLVQSGIARLMSLFPTTAFAQKEIDRYNRETASDYADIRDFLLLHYMASERNDSEFWRYCRALDPPDALKEKLEMFRSSGRVIREHNELFTETSWLSVMVGQGIDPQGYHPVAGMLDEEETRRRVSHIRDVIQTTVGQMPTQEEFLAQNGAAIPASERLNA

SEQ ID NO: 84777 - protein, 557 aa, unidentified
  source 1..557: note = Methyloligella halotolerans
  REGION 1..557: note = tr|A0A1E2RXA4|A0A1E2RXA4_9RHIZ Flavin-dependent tryptophan halogenase RebH OS=Methyloligella halotolerans; OX = 1177755 GN=A7A08_02496 PE=4 SV=1
MGEPLRSITIVGGGTAGWLTATFLNRYCSSKDGRGGPEITLIESPNIPIVGVGEASLPGMVVLLNQLGVSESEFLKLTDATFKVAAHFINWNHDDKGRPTEFLNVLNAAGQIDGRKLADYFVTFDAAHRGPEAGLDYVRLFSPAVEIVRRNLAPRRPGAPDFSGELGYTYHFDATKLAAFLKDVATNRGVNHILADVDEVNLDERGFVKSLSLRDRGEHPVDLVIDCTGFRGSILQQALGEPFESYGDHLLNDRAAVVQIPHEDERVMAPTTRATGFKAGWNFNIPLTTRVGTGYIYSSKFISDDEAVDELLAFYGDQAKGHEPRIIPMRTGRVRNAWVKNCVALGLSCGFIEPLEATAIFMTDLGARWLHHYLPTQDFEPELAAAYNRQVSKVYEEVRDFVQAHYHLNNRQDSEYWRVAREEMKLSDRLQENLKVWQHTTPEMMDLDTAYLFSAPVYTLLLIAKGFYKDREIAKAGSLSRSAYERYRTEMRKARPGQLEGLVGQAEFLKAAGRPPAGPLAQPAPADFASFTASSTKIKLGGAPKTVKGRRRKLKRR

SEQ ID NO: 84778 - protein, 507 aa, unidentified
  source 1..507: note = Erythrobacter marinus
  REGION 1..507: note = tr|A0A0H0XST9|A0A0H0XST9_9SPHN Tryptophan halogenase; OS = Erythrobacter marinus OX=874156 GN=AAV99_11860 PE=4 SV=1
MPQPDQKRCRVVVLGGGTAGWMTAAGLAKLLPDLASVDLVESEDIGIVGVGEATLPHIRGFVERLGIDEAAFMKATHATYKLGIDFRDFGAIGTSYIHPFGSFGEEVAGVGFHHWWLELQRQGLAAELGQFSLAVAAAKANRFAPPAQDTSLASTYGYAYQFDATLFGPFMRDFGTGLGVTRHEGRVTRVERDAETGNVTALLLEDGRRIEGDLFVDCSGFRSILLGQELEEDWEDWTHWLPCDRAAAMPCTHFTPDIRPYTTATAMPAGWRWQIPLQHRMGNGYVFSSAFLSEADACDAIRNAAEGEPLAEPRILRFRPGRRSRSWSHNVIGVGLASGFLEPLESTSIYLAQMAITYLIELFPEGGEIDPRDRDEFNRLVDMEYDRVRDFLILHYHATTRDDSDFWNHVRTMTVPDSLSEKMELWRKAGRIEKYSDGLFYDASWIAVYLGQGVFPETHDARAAMADPARVKAALDRLQQAISAHVDSMPGHVDYLRAESARLAEQM

SEQ ID NO: 84779 - protein, 506 aa, Sorangium cellulosum
  REGION 1..506: note = tr|A0A4P2QSU3|A0A4P2QSU3_SORCE Tryptophan halogenase; OS = Sorangium cellulosum OX=56 GN=SOCE836_052790 PE=4 SV=1
MTQATVQQDEQFDVIVLGGGPGGSSVASFVAMQGHSVLLLEKEKFPRHQIGESLLPATTYGICGLLGIRDRIERAGFTRKQGGTFRWGKSPEPWTFRFAENPRVPGGYAFQVERSVFDKMLLDAAREKGVDVREEHPVVRVEQEDGRFSRVRFRDDRGIERTATAKYIVDSEGHRGQTYALVGERVFSQFFQNVALYGYFHDGKRLPAPSSGNILCAAFRDGWFWYIPLSDRLTSVGAVVSREAAQRIQDGPEQAFQSFVDSCPIIAEYLAPATRVTEGVYGEFRVRKDYSYCNTRFWKPGLVLIGDAACFIDPVFSSGVHLATYSALLAARSINSCLAGDIDEHEAFEEFEFRYRREFGNFYQFLLSFYDMHQEADSYFWQARKVLNTGERANDAFIRLVAGASSVDEPVFNHAEDYFRSRQGMGEWFEGMLSNQLAMQVDGLPGQSAPATLEAGLSAEHFMEGFTAEVRQIQTQAMFGHRRARESSVRPQGLIPSTDGFAWQRG

SEQ ID NO: 84780 - protein, 538 aa, Burkholderia pseudomallei; identical to SEQ ID NO: 82926
  REGION 1..538: note = tr|B1H9D1|B1H9D1_BURPE Tryptophan halogenase; OS = Burkholderia pseudomallei S13 OX=320374; GN = BURPSS13_X0871 PE=4 SV=1

SEQ ID NO: 84781 - protein, 475 aa, Sorangium cellulosum
  REGION 1..475: note = tr|A0A150TA50|A0A150TA50_SORCE Tryptophan halogenase; OS = Sorangium cellulosum OX=56 GN=BE21_56480 PE=4 SV=1
MQGHSVLLLEKEKFPRHQIGESLLPATTYGICGLLGIRDRIERAGFTRKQGGTFRWGKSPEPWTFRFAENPRVPGGYAFQVERSVFDKMLLDAAREKGVDVREEHAVVRVEQEDGRFSRVRFRDDRGSERTATAKYIVDSEGHRGQTYALVGERVFSQFFQNVALYGYFLDGKRLPAPSSGNILCAAFRDGWFWYIPLSDRLTSVGAVVSREAAQRIQDGPEQAFQSFVDSCPIIAEYLASATRVTEGVYGEFRVRKDYSYCNTRFWKPGLVLIGDAACFIDPVFSSGVHLATYSALLAARSINSCLAGDIDEEEAFEEFEFRYRREFGNFYQFLLSFYDMHQEADSYFWKARKVLNTDEKANDAFIRLVAGASSVDEPVFNHAEDFFRSRQGMGQWLEGMLSNQLAMQVDGLPGQSAPATLEGGPNAEQFMEGFTAEVRQIQTQAMFGHRRARESSVRPQGLIPSTDGFAWQRG

SEQ ID NO: 84782 - protein, 538 aa, Burkholderia pseudomallei; identical to SEQ ID NO: 82376
  REGION 1..538: note = tr|A0A5K1LIM7|A0A5K1LIM7_BURPE Tryptophan halogenase; OS = Burkholderia pseudomallei OX=28450 GN=BGI47_23915 PE=4; SV = 1

SEQ ID NO: 84783 - protein, 501 aa, Pseudoalteromonas agarivorans
  REGION 1..501: note = tr|A0A290RVI2|A0A290RVI2_9GAMM FADH2 O2-dependent halogenase I OS=Pseudoalteromonas agarivorans DSM 14585; OX = 1312369 GN=prnA PE=4 SV=1
MKPIKHVVIAGGGTAGWITAALLNKVLDKVIKITLIESSTIGTIGVGEATIPPIIQLNNALGINEQDFINATNASIKLGIEFENWKTPSHSYMHAFGSFGKDFPFCDFYNFWVKGHISGAEESLWDFSLNYQAAKQHKFAPLNTLPNTQLPGLSYAYHFDATLYAEFLKKLATSRGVEHIDAKIEQVEQCPLSGDIKSLTLGNTQQINGDLFIDATGQRALLIEQTLNTGFVDWSHYLPCDSAVAVQSQGTSELKPYTRSIAHSAGWQWQIPLQSRIGNGLVYCSRYLSDDAATQLLLNNLPTEPMTEPMTEPRVIKFKTGRRLKQWHKNVVSVGLASGFLEPLESTSIHLIQSAVTRLIKLFPHNGISDALVTEFNKQSVIEIEHIRDFIILHYTLTAREDSPFWRQCKQMDIPESLAHKIKLFKQTGKVVRENDELFAEVAWQQVFIGQGLIPEDYNSIVDSLSSEQLNDLFSTLKTLITSTVDQLPTHKNFLAKIKKA

SEQ ID NO: 84784 - protein, 505 aa, Sphingopyxis sp.
  REGION 1..505: note = tr|A0A2Z5UKS2|A0A2Z5UKS2_9SPHN Tryptophan halogenase; OS = Sphingopyxis sp. FD7 OX=1914525 GN=SPYCA_0788 PE=4 SV=1
MDRSIHNVVIVGGGTAGWLSACVLAARRPDLSIMLIEAPNIAPIGVGEGTWPTMRETLATIGIEESEFLRECDASFKQGSLFVGWVNGAPDDRYLHPFSAPPPHDMRDLLAAWRADEDATSFAAAMTPQAAICERNLAPRHPAMPDYAGTVNYAYHLDAGKFARLLARHATERLGVTHIAAEVAGIIGGSDGDIAALGLRDGRSIEGDLFVDCSGQAALLIGGHYGVEWIDRADVSFNDRALAVQVPTQAGSAIASQTIGTAHRAGWIWDIALPTRRGIGCVYAARFMSDGEADATLRDYIAANMPEVHARDLTPRALAFRTGYRARLWHKNCVAVGLSAGFIEPLEASAIVMIELSLRALADNFPAGRAAMDIHARRFNALFHYRWERIVDFLKLHYVLSQRDDPYWKAHRAPATIPPRLAEQLALWRDQPPSAWDFPQMDEVFPAASQQYILYGMRPGETVSPCRPRSHVAARLADISERARALAAALPENAAYFAALRARAA

SEQ ID NO: 84785 - protein, 515 aa, unidentified
  source 1..515: note = Sphingomonas spermidinifaciens
  REGION 1..515: note = tr|A0A2A4B3P7|A0A2A4B3P7_9SPHN Tryptophan halogenase; OS = Sphingomonas spermidinifaciens OX=1141889; GN = COC42_12790 PE=4 SV=1
MTGPVQKIVIVGGGTAGWLAAGVIAARHKTRIDAGQFSVTLVESPNVPIIGVGEGTWPTLRSTLAKMGVSETDFFRECDAAFKQGARFQRWTTGAPDDAYYHPLMLPTNFQHLNLVPHWLAANDDESFCDAVCPQGRICDDGLAPKTIATREYDAVANYAYHLDAGKFADFLTRHCTQKLGVRHILADVTQVCQAEDGDVTHLVTEQAGTIPGDLFVDCTGFKALLIGGAMGVPFRPLKDVLFCDTAMAVQVPHERPDSPIASHTLSTAQSAGWIWDIGLPTRRGLGYVYSSAHVDDETAERELRAYAGAAADGLSVRKIPIRAGHREQFWKRNVVAVGLAAGFLEPLEASAIVLIELSAKLIAEQMPARREVMDTIARRFNETTAYRWGRIVDFLKLHYVLTKRTDTDFWRDNVRTESIPDRLADLIDLWRWQSPWFHDEFDRAEEVFPAASYQYVLYGMGFRTEVEPVTLGDDARLAERARRENRMQTEKLRAGLPRHRDLIDRIKVQGLSAI

SEQ ID NO: 84786 - protein, 370 aa, unidentified
  source 1..370: note = Vitiosangium sp.
  REGION 1..370: note = tr|A0A2T4VEB7|A0A2T4VEB7_9DELT Tryptophan halogenase; OS = Vitiosangium sp. GDMCC 1.1324 OX=2138576 GN=DAT35_29300; PE = 4 SV=1
MLSHCDVAILGGGPAGAAAALLLRQHTGLSVALVERSTYQPPRIGETVSPDSRRLLQQLGIWEAFVKDQHLPSQGTCSCWGSATPGYNDYLFSPWGPGWHLDRERFDRMLATEARARGAHVLMDTEPVRWEPHSQGGYTLHLATGETPFTLQARFVVDATGRRAVFASSRGARRHMADRALGFYGFFHIPPGKTFDTYTLVETCREGWWYSARLPGDRVAVGLMGDGESLRGLKQHEPKPWLSLLKQTQMTQQRLAGCAFADASLLALPASVSLLDPVQGQDWIAVGDAACTYDPLSSQGILKALRSAVMATEALERAARGDSAGLHAYAARVREQFQEHLAIRRGFYRQETRWSEAPFWKNRGRTEVTA

SEQ ID NO: 84787 - protein, 493 aa, Rheinheimera sp.
  REGION 1..493: note = tr|A0A437JJF0|A0A437JJF0_9GAMM Tryptophan 7-halogenase OS=Rheinheimera sp. YQF-1 OX=2499626; GN = EMM73_07530 PE=4 SV=1
MQQVKKVVIAGGGTAGWVAAAALSKRLKGLVEVVLIESEEIGTVGVGESTVPPVLLFHNLLGINEQEFMQATDATFKLAISFENWGQTGDQYFHPFGVTGKGSFLTDFQHYYLHALQQGVDAPFGDYCYELQAAKLHKFGKSDKSSINYAYHLDAGRYARFLRKFSEDLGAVRIEGKIAQVQQHVNGDIRSLVLESGQEISADLFIDCTGFKALLIEQTLKTGYEHWDHWLPCNKAVVVQTESAATLPPYTRAMAHDSGWQWRIPLQHRVGNGLVYASDYLSDEKAQQRLLGNLETAPLMEPRMLSYQTGRRKKLWNKNCIAIGLSSGFIEPLESTSIFLFMSGIIRLLRLFPFNGVTPALTDEYNQQSITEVEKIRDFIILHYHQTERTDSPFWNYCRTMSIPDTLAHRIELFKESAHAFQTGDEMFRLESWSHVMLGQRLQPKGYHQLVAALAQGELSSHLHNIRQTIQGAVDRLPSHRDFIRHYCPSNLS

SEQ ID NO: 84788 - protein, 422 aa, unidentified
  source 1..422: note = Vitiosangium sp.
  REGION 1..422: note = tr|A0A2T4V8K2|A0A2T4V8K2_9DELT Tryptophan halogenase; OS = Vitiosangium sp. GDMCC 1.1324 OX=2138576 GN=DAT35_41555; PE = 4 SV=1
MDSMSWDVVVVGGGPGGSTVGGLLARRGYRVLLIEREKFPRYHIGESLVPGIMPVLKELGLYEKALQQGFTRKYGVTLLWGRHREPWSVYFGEAGPFAYTFQVCRSEFDSMLLKHARALGATVLEETKVSEFLFEDGRCVGVRYAASGGEPPREARARFVIDASGQSHLLGRALDLIEWDEDLKNLAVWTYFSGARLYEGRDAGNILVENLPDGWLWLIPLHDGTQSVGWVTPHENARAHEGRLGQLLLDRIEQSVEARRMLAPAQRVAAFHSMRDWSYRCRRFHGPGFLLVGDAAGFVDPLFSTGVFLAMNGGSLAATVLDHLLRHPKDEERMRQRYEAIYRQFLDVVFSFVHYFYDASKDKEVYWAHAQELVDPLRQMSARQDFIHLISGLGGLHTLKELSEPLPAARPEPRRRAASRRR

SEQ ID NO: 84789 - protein, 510 aa, unidentified
  source 1..510: note = Sphingomonas spermidinifaciens
  REGION 1..510: note = tr|A0A2A4B3N7|A0A2A4B3N7_9SPHN Tryptophan halogenase; OS = Sphingomonas spermidinifaciens OX=1141889; GN = COC42_15055 PE=4 SV=1
MRDDALRKLVIVGGGTAGWMAAAGISRVAGELPGLEIELVESEEIGTVGVGEATIPQICLYNAMLGFDEAEFVRETHATYKLGIEFVDWTRIGHRYVHPFGFYGIDMGGIQFHHHWLKARMLGDRTPLDAYSLSCVGGLAGKFAHPRPDQPNSPLSKIGYAFQFDAALYARYLRKLAERWGVKRTEGRIVDVLKDGESGHVTAVVLADGRRVEGELFVDCSGFRGLLIEGAMGAAFEDWSSWLPCDRALAVPCETGGDRLPLTRATARPAGWQWRIPLQHRIGNGYVYSSAHISDDEAAATLLANLDGAALAEPRPLRFKAGHRREAWKGNVVSLGLAGGFLEPLESTSIHLVQSGIARLMTLFPARGLDPLEIARFNAETEQEYVDIRDFLILHYTATERDDTPFWDYCRTLTPPEGLAYKLDMFRRNGRIFREHEELFTETSWLSVMVGQGIEAGGYHPVADLLPDEETLRRVAHIREVVAQTAAAMPDHEGFLRRIGCDLTPLKRAS

SEQ ID NO: 84790 - protein, 496 aa, Rheinheimera sp.
  REGION 1..496: note = tr|A0A437J832|A0A437J832_9GAMM Tryptophan 7-halogenase OS=Rheinheimera sp. YQF-1 OX=2499626; GN = EMM73_18730 PE=4 SV=1
MQTPVKKLVIAGGGTAGWMAAALLKKVFAHQLEVELVESEDIGIIGVGEATIPPIQIFNQYLGLDEKEFLRETNATIKLAIKFENWRVKGESYYHTFGAPGATLGVANFQHYWLRAKELGLTQSLWDFDLNYLCCEQGLFNKIKTPNPVYDMPYAYHFDSALYGKYLRKLAEQAGVVRTEGLIEHVKQNCENGFVQSLLLKDGREVTGDLFIDCTGLRGLLIRKTLGLAYERWDHYLPANSALAVPTERFEQTLPYTRSIAHSAGWQWRIPLTHRNGNGIVYSSSYLSDEQAYQTLMNNLDSKALAEPKKISFETGRTTEQWHKNVVAVGLSSGFLEPLESTSIHLIQSAIVRLMKMFPNQGISEAQVSAYNAESKDEFETIRDFIILHYHVNERDDSDFWQDMRNMAIPHRLQEKLALFKETAGIFNDANDIFRDSSWLQVMLGQGLLPIDYHPSARTYTKEQLLEMMQKIRIAKQQPLAKLTSHDEFLALYTGQ

SEQ ID NO: 84791 - protein, 498 aa, unidentified
  source 1..498: note = Sphingomonas spermidinifaciens
  REGION 1..498: note = tr|A0A2A4B8H6|A0A2A4B8H6_9SPHN Tryptophan halogenase; OS = Sphingomonas spermidinifaciens OX=1141889; GN = COC42_06500 PE=4 SV=1
MMPKRIVVAGGGTAGWMAAAAIARTMGGAATVTLVESEAIGTVGVGESTIPPLVTYNRLLGIDEASFMRATNATFKLGILFDGWRDGHDRYFHSFGVTGKDHWAAGFQHYWLSGLERGQHASYDDYCLELVAALQGRFAHLPDNALNYAYQLDSNAYARFLRSMAEGDGTIRIEGRIREVELDGETGDIVALILDGGRRIEGDLFLDCTGFRALLIEKALHAGYDDWSHWLPCDSAIAVQTENAAPPVPYTRAMAHDAGWQWRIPLQHRTGNGIVWCSRYLSREAALERLLGNVEGRVLTEPNHLSFQTGARRKQWHRNCIAIGLSGGFMEPLESTSIHLIQRAILRLIRMLPLGPVNPSDVAEFNDQQLTDMVQIRDFLILHYKATDRRDSPFWRQAAAMDVPETLAQKIALFRETGRVFRRNEELFAENSWVQVMLGQGIVPQSWHPIAAKLSDDELARFLGGLREQVARTVATLPSHAAYVARYCGAAVPAERAA

SEQ ID NO: 84792 - protein, 495 aa, unidentified
  source 1..495: note = Sphingomonas spermidinifaciens
  REGION 1..495: note = tr|A0A2A4B3W0|A0A2A4B3W0_9SPHN Tryptophan halogenase; OS = Sphingomonas spermidinifaciens OX=1141889; GN = COC42_13465 PE=4 SV=1
MRTVILGGGTAGWMTAAGLARLLGRETEVTLVESAEIGIVGVGEATLPHIRAFNQRLGIDEAAFMAETLGTFKLGIDFHDFGAIGEAYIHPFGSFGAPIGDVGFHHYWLRAGAPAPLERFSLPCLMARAARFAHPDPTETADHAGYGYAYQFDATRFAPFLRARAEADGAVRIEGRVVGVERHGESGDVAALILADGRRVVGDLFVDCSGFAARLIEGALAAPWEDWSRWLPCDRAVALPCTAPAGRVEPYTRATAMAAGWRWRIPLQHRVGNGYVYSSAHLADEAAADAIAAALDGPALAEPRLLRFRAGRRRASWVGNVVSVGLASGFLEPLESTSLYLAQMAITELVELFPDGAIDPRDRAEFNVRVDHEYDRIRDFLILHYTATRRDDSDFWRDMRALTLPDTLAERIELWRATGRVAQYSHGLFLEPSWIAVLIGQGILPHGIDPRAAAADPARLGRAMAALDADLAARVAAMPDHAAALGLHARAADAA

SEQ ID NO: 84793 - protein, 515 aa, Rheinheimera sp.
  REGION 1..515: note = tr|A0A3S2TM55|A0A3S2TM55_9GAMM Tryptophan 7-halogenase OS=Rheinheimera sp. YQF-1 OX=2499626; GN = EMM73_03295 PE=4 SV=1
MQTEAIRSVLVVGGGTAGWLTAANLAQSFNSAEPGAIQVTLIESPDIATIGVGEGTWPTMRATLQKLGIKEEDFLRSCNATFKQGTKFVDWQHSDLPASYHHLFTSVSDPTQFNLAPYWLQGRAGQHKSYASAVSAQGVIAELGLAPKKITNKAYEGVLNYAYHLDAGKFADLLKNHAQQKLGVHFISANVLDVSLAIDGSIAAVITDSAGRQQADFYVDCTGFQSLLLGKAMGVGFRPVSDTLLTDHAVTIQVPYPTPDSPINACTHSTAQAAGWIWDIGLTNRRGVGYVYSSNYVSHEQAEQCLRRYIGPAADTLEARKLAMQVGYREKFWHKNCVAIGLSAAFVEPLEASAIFLIEAAANMLADQLPALKENLPLAESKFNKSFLFRWQRTIDFIKLHYALSGRTEPFWQAARAKQLIPQSLQDVLQSWQTQPVSPYDFAHVYEPFPMESYQYVLYGMGFKQQLADLQRYQQGGKAALYFQRVQQLTHQLQQELPAQRELLAKIYRYGFSAL

SEQ ID NO: 84794 - protein, 504 aa, unidentified
  source 1..504: note = Halioglobus japonicus
  REGION 1..504: note = tr|A0A2N5YCU2|A0A2N5YCU2_9GAMM Tryptophan 7-halogenase OS=Halioglobus japonicus OX=930805; GN = C0029_07065 PE=4 SV=1
MNNNDSRTITIVGGGSSGWMTALYLNTLFNKEQLNYQIRVIESPDIGIIGVGEATVHSVRFFFAAMGLDENELLRETNGSLKLGILFRNWMKPVDGKTHEYFHPFEQQRLGRGMDISSMWHMSGRGTRERYDEAVSLSSELVAHRHVPKTANSQAYQGVVPYGYHIDATLLARFLRRKAVAEGVEHIEATVTSATTEGEMIQSVETDKGSFTADFFIDCTGFRGLLIDQLKQDNWESFADALPCNKAVAIQRELPDDLGAKPYTTATALSNGWAWQIDLQNRQGTGYVYDGNRLSKEEAEQELRDFLGPDAAVLKCAHLNMKVGCRKEFWVGNCVAIGLSAGFIEPLESTGLHLINLGAGLLATHQPNREVDQSIRDSYSRLMRGFYQDLKQFIVLHYCLTDRDDTDFWRAAPATVEHTPWLQSQLQIWKHKICEFHDLAGSFSTTFNDENYRYILYGMHHNPALTQSVDAAASEQLFAQANANAERARQLTSAQGDYLSQLNL

SEQ ID NO: 84795 - protein, 497 aa, Rheinheimera sp.
  REGION 1..497: note = tr|A0A3S2UKJ8|A0A3S2UKJ8_9GAMM Tryptophan 7-halogenase OS=Rheinheimera sp. YQF-1 OX=2499626; GN = EMM73_04535 PE=4 SV=1
MNNEQNRIKKVVIAGGGTSGWMTAVALTKLLGKNLEVVLVESDDIGTVGVGEATIPTLHIFHRLLNIKESEVMAATNATFKLGIQFENWKTLGEDYIHSFGFLGKDCWACGFQHFWVKGRQKGIATEIGDYCVEHLGARQGRFAVMPNQDLNHAYHMDASLYAGFLRRLSEQHGIKRIEGKIREVQQHMDGAISALLLESGELVEGDLFIDCTGFRALLIEQTLNTGFEDWSHWLPCDSAYAVQTKTTQEPLAYTRAIARGAGWQWKIPLQSRVGNGLVFCSKFMTEAEAKQTLIDNVEGEMLFEPRLIKFKTGTRRQHWNKNCVAIGLSSGFLEPLESTSIHLIHRSIIRLLQMFPSNGIVSADVAEFNRQTKIEMDNIRDFIILHYKATERTDTRFWRYCKNMDIPETLTHRMELFKQSGKVYKFAQELFGESSWLQVLIGQGLMPQQYHPIVDLMPDSELNDFLMSIKHNVRRTVSQFPTHQEFIQHYCKSSLV

SEQ ID NO: 84796 - protein, 506 aa, unidentified
  source 1..506: note = Sphingomonas spermidinifaciens
  REGION 1..506: note = tr|A0A2A4B453|A0A2A4B453_9SPHN Tryptophan halogenase; OS = Sphingomonas spermidinifaciens OX=1141889; GN = COC42_15265 PE=4 SV=1
MVQQRSIVIVGGGTAGWLTAAYLARALGSRATITLLESPGIGIIGVGEGAFPTIRSTLRFIGIDEARFVREAGATFKQGVRFDDWRREAVGDRRHRYLHPFDAPYQADDADLVAHWLAKDPATREPFAEAMTIQNRVADAVRAPKQPSEGDYDGPLAYAYHFDAHRLAALLRARAVELGVRHLQGELTGVETGEQGIACVHTDAHGALTADLYVDCSGFRAELLGRALRVGPRSAKAHLFTDRALACKIAYAGPDAPIESVTTATAHEAGWIWDIGLQNARGLGCVYSSAHLSDARAAEILCGYVGHDRFEARIIPFEPGWRETQWVGNCVAVGLAGGFLEPLESTGIVLIEAAAAMIADFLPMAGPVDASAGRFNQLMNARYAAITNFLKLHYCLSQRQTAFWRDNADAASIPDALAALLAEWRHRPPSRFDFQGGVESFAAFNYQYVLYGMGFETDLGPSTPPRGEQAHAERLFERIRSFGRQAVAELPEHRALIREIGQRMPA

SEQ ID NO: 84797 - protein, 517 aa, unidentified
  source 1..517: note = Sphingomonas spermidinifaciens
  REGION 1..517: note = tr|A0A2A4B6R2|A0A2A4B6R2_9SPHN Tryptophan halogenase; OS = Sphingomonas spermidinifaciens OX=1141889; GN = COC42_04430 PE=4 SV=1
MGRRVVIVGGGTAGWLTAGYLAKRLAADLPGGVAITLVESTEIGILGVGEGTFPTIRKTLATIGISESDLVRHCGASFKQGAKFAHWRHAPGAAGPDHYTHPFQVAAQDDGLELLPYWLLGHGGTANWDEVCSPQKKAADAHRAPKLPSHPDYVAPLNYAYHFDAVALAALLRDRAVASGVTHIVDTVTEVIVDGDGAIGGIDTAAHGRLTADLYIDCTGFRAELIGRALGIPYRSCRDVLFCDSALAMQVPHRDAQEPIVSYTVATAQEAGWVWDIGLDRRRGVGHVYSSAHTDDAAAEAKLRAYIGPASADLDMRKIRFEAGYREVNWHKNCVAIGLSSGFFEPLEATGIVFSEVAAGMVANLFPWGGDYETSARQFNAVMLKRYERARDFIKLHYCISERRDSDFWHDNVAAASIPDSLHELLDRWRFRPPTEIDVDANIDIFTEASWQYVLYGMGWTTDLSARAGTYRHAEAARRAFAAVDRQAAYAIANLPSNRQLIEHARHHRFGPEGMAA

SEQ ID NO: 84798 - protein, 521 aa, Xanthomonas gardneri
  REGION 1..521: note = tr|F0CD45|F0CD45_9XANT Tryptophan halogenase; OS = Xanthomonas gardneri ATCC 19865 OX=925777 GN=XGA_4899; PE = 4 SV=1
MSDTHASDPRQRPVRRVVIAGGGTAGWMAAAALSKVLGKQLQITVVESDEIGTVGVGEATIPSLVTFHRLLEIDEAAFMAATQATIKLGIGFEHWRDVDRHYIHSFGHTGTDHWSAGFQHFWLKGRQRGVARDFGDYCLELRAAQEGRFAHLPNGGMNYAYHLDAGLYARFLRRFSEGFGVQRIEGRIGHVETDAHSGYLTALTLENGTRVEGDLFLDCTGFAGLLIGKTLGVGADDWSHWLFADSALAVQTESVGAPVPYTRSRADQAGWMWRIPLQHRVGNGIVYSSRYMDQDSAAQVLQRNLTGRALTEPRALRFTPNQRHRVWEKNCVALGLASGFLEPLESTNIHLIQRGIIRLMQTFPQVINDSDIAEYNRQAAEEITHIRDFVILHYHVTDRRDTPFWRDCAAMEIPDTLRHRVELFRQSGRVFHQANELFAENSWVQVMLGQGITPKQHHPVADLMGDAELNHFLENIRTRVDAALVRLPAHADFLRRYCPAPPLPEPATRLPATPVLATPAA

SEQ ID NO: 84799 - protein, 516 aa, unidentified
  source 1..516: note = Alteromonadales bacterium
  REGION 1..516: note = tr|A0XZU3|A0XZU3_9GAMM Putative tryptophan halogenase OS=Alteromonadales bacterium TW-7 OX=156578; GN = ATW7_07979 PE=4 SV=1
MTKPIKKIVILGGGTAGWLSAGLLAAEHPHLSVTLIESANVPILGVGEGTWPSMRNTLQRIGIKEIDFITQCDATFKQGSKFINWCNLSKGENYYHPFMDPQGYEQTNLHANWQRIAPNQKFADVVNMQSFVCQAALAPKQLQTPEYAAVTNYGYHLDAGKFAEFLKNHCVKHLNVTHNTDDVTHVINDEHGYIASLKTNKNGDITGDLFLDCSGSRARLIGEHFNSEFIAQDHILFNNSAVAAQVPNAHINQPIASATLSTAQSNGWIWDIALPTRRGTGYVFSSKYQSGESATDTLKSYIAKSTSEQQAEQLNYRVLKFSPGYRQKFWIKNCVAVGMSAGFLEPLEASALAMVELSISMLSEQLPQNRTHMSQLANRFNDRFSTRWQRVVEFLKLHYVLSERDDTPYWQNIRDLTTAPEHLQNLLKLWQFQPPSRFDFIENEEVFSSSSYQYILYGMGFNTQTPQAHNAFTSAQAGDYFYQQNREKIAQYLKSLPSNRALLNDLLSNNRQPHND

SEQ ID NO: 84800 - protein, 469 aa, unidentified
  source 1..469: note = Sphingomonas spermidinifaciens
  REGION 1..469: note = tr|A0A2A4B512|A0A2A4B512_9SPHN Tryptophan halogenase; OS = Sphingomonas spermidinifaciens OX=1141889; GN = COC42_15065 PE=4 SV=1
MRSVVVAGGGITGWAAAAALKRRLPMLEVTVLPIAPPADALADRFPATLPSILAFHGDLGLSEADAIVRTRAGFRLGSRFVGWGEGLPDYVHSYGTHGPAIEGTAFHQHWLRARDAAPFDRHAPAAMLGREGRFVPAGEAPIDGYEYGLVLDLPAQTAMLRAFALHLGVREAAGAFRTLTLEDSGFARAIDTNAGPLAADLFVDATGPAAQLRSAMGGARDDWRRWLSCDRFVIAAEAAAAPPGSLDTVEAQPTGWRFRIEGLNETTTGACWSSAHDAREGIAFEAGSFAEPWLRNVVAIGDAATVVEPLEWTNLHLALSGIDRLVTMMPGRDCAPVEIAEFNRQAAAEAVRVRDFLMLHYVTARRPEPFWREMAAAELPDTLAHTLTQFAERGRLPFYEEETFARDSWLAVLFGQGVRPRRLDPLVEAIDPAPIAAGMARHRDAIAAAAARAPTHAAFLQALHRQALR

SEQ ID NO: 84801 - protein, 511 aa, Pseudoalteromonas sp.
  REGION 1..511: note = tr|A0A317FT22|A0A317FT22_9GAMM Tryptophan 7-halogenase OS=Pseudoalteromonas sp. meg-B1 OX=2203192; GN = DK924_04740 PE=4 SV=1
MDIKKVAILGGGTAGWLAANHIGKELLKRKGVSVTLIESPDIPPIGVGEGTVPDIRNTLKSFGIREDEFIRQCDATFKQSIKFVNWMDKKKHGEGNFFHHLFDVPSPYDTKHLTQYWLNDKQTTKSHAQFLSSQHAICEAGLAPKNITNAQYEGELAYAYHFNAGKFAQLLACNAKDKFSVSHVHTNVTQVKLANDGTIAALMTNSEGELEFDFYIDCSGFESLLIDKALKVPFVDVSDSLLINSALVVQVPTKEDEDIPPYTLATAHQAGWIWDIALTNRRGVGFVYSNNHMTDEQAHEKLDRYLGASKQDLSYRKIPMRVGYRKKFWHKNCVALGLAQGFLEPLEATSILLTDFSAKFLTLRFPSSTKQLEQLETRFNHAMGYAWERAIDFIKLHYCISDRTDSAFWVANKNDDTTSESLKEKLSLWEEFIPVRDDFFSQFEVFYLENFLFVLYGMNYNTKASACSKAEHEHCLVRLQQRAEIDQYLLNKLPNHRALLDKIKQYGLQTI

SEQ ID NO: 84802 - protein, 506 aa, Alishewanella sp.
  REGION 1..506: note = tr|A0A1C2C4F4|A0A1C2C4F4_9ALTE Tryptophan halogenase; OS = Alishewanella sp. HH-ZS OX=1856684 GN=A9165_07280 PE=4; SV = 1
MTEQQLVKEVVIVGGGTAGWISAALLVKMLGKSLKITLVESEEIGIVGVGEATIPPVIHFNEGLGLDEATFLKETFGSIKLGIQFENWGQQGDSYMHAFGNFGKDYPFCTFHHFWLKAKQLGLSDNFWDYSFNYQAALQNRFTKLDSIPNVNLQGLVYAYHFDAALYAQFLRRWCETLGVVRVEGKIEQVHTRPDDGFISAVQLQSGEQIKGDLFIDCSGMHALLIEKTLNTGYEDWSHWLPCDRAWAVPTESVKPIVPYTRSIAHQAGWQWRIPLQHRTGNGLVFSSKYWSEEDARAHLLANLDAPALAEPRLIKFRTGRRLKQWHRNVVSIGLSSGFLEPLESTSIHLIQSGIIRLVKNFPHLGIKAAEVAEYNRQSQLEFEHIRDFIILHYKLTQRTDSKFWRDCQQMEIPERLARKMELFQATGKVYREQDELFSPIAWIQVMLGQGMVPQDYHPIVNALPAEQLSELLSYLKTIYSATATKLPQHDEFLKQFCQSDAMNTA

SEQ ID NO: 84803 - protein, 512 aa, Pelomonas sp.
  REGION 1..512: note = tr|A0A397QRZ0|A0A397QRZ0_9BURK Tryptophan halogenase; OS = Pelomonas sp. BT06 OX=2135721 GN=C8K28_4881 PE=4 SV=1
MNDRLREVVVLGGGSAGWLVAGLLAAEHGELKITLIESSDVPTIGVGEGTWPSMRDTLRRIGLSEPEFIRRCQVSFKQGSRFDGWARGAAGSDGDGDRYYHPFMLPVGHGDVDLVQPWLATQGQRPFADVVSPSVQVCEAGRAPKQVQTPDFAAVANYAYHFDAGLFGQLLREHAITRLNVHHVVDHVEAVIPHENGDIAALQTRGHGELKADLFIDCSGLASRLIGQHFGVALKSERDVLFNDAALPVQVPYATPEAPLASVTIATAWAKGWIWDIGLPSRRGVGCVYSRAHASDDEAHAALTAYLDATGAPTERPEPRSIRFDPGYRERFWVRNCVAIGLSAGFIEPLEASALALVELSAQRLCDELPMTRASMDTVARRFNDDFSYRWARVIDFLKLHYALSQRDDSPYWRAHRDPATWPERLRELLPQWQLRAPARHDFGRNDEVFPSASYQYVLYGMGFRPDVQPLSNAKLQAAQAAFDEAARQARRFVPGLPGHRSLIEHIHKTET

SEQ ID NO: 84804 - protein, 505 aa, Xanthomonas sacchari
  REGION 1..505: note = tr|A0A2P5Z6V0|A0A2P5Z6V0_9XANT Tryptophan 7-halogenase OS=Xanthomonas sacchari OX=56458; GN = XsacCFBP4641_06000 PE=4 SV=1
MIAAPLRNLVIVGGGTAGWMAAAALARVLGPDYRITLIESEQIGIVGVGEATVPHIKAFNNLLGINEAEFVRHTQGSFKLGIEFADWQRPGTSYVHGFGTEIGHPLGLLPFQQYWFKQALAGKAKPLGAYTLNTVAAKRDRFMTSATDVPPNSPLANIAYAYHFDAALYAGFLRRYAEQRGVTRREGIVEEVQLHPESGDVRAVRLASGEAIAGDLFIDCSGFRGLLIEQALHTGYHDFSHWLPCDRALAVPCAKVGPPTPYTRATARAAGWQWRIPLQHRTGNGYVYCSAHISDDEAAATLLANLDGPALADPRPLRFVTGRRKQVWNRNVIALGLASGFMEPLESTSIHLVQSGISKLLELFPREGISPVLVRRYNERIAFEFDRIRDFLLLHYHATERDDSAFWRHCRTMPITPELQETLDLFRDSGRFYRNGDEMFAEISWVQVMVGQGILPRAYHPLVDQVPQADLERFMASVEQTIGHCADAMPPHQAFIDRYCAARPA

SEQ ID NO: 84805 - protein, 496 aa, Streptomyces qinglanensis
  REGION 1..496: note = tr|A0A1E7KD84|A0A1E7KD84_9ACTN Tryptophan halogenase; OS = Streptomyces qinglanensis OX=943816 GN=AN217_00675 PE=4; SV = 1
MSSTETYDVVVVGGGPGGSTLAALVAKQGHSVLLLEKEFFPRYQIGESLLPSTIHGICRLSGATDELLRAGFPVKRGGTFRWGANPEPWTFSFSVSPRMAGPTSTAFQVERSRFDKILLDNARRCGAEVREGCAVTEVLEEGERVTGVRWTDDGGAQREAAARFVVDSSGSKSRLNQRIGGHREYSEFFRNLALFGYFENGKRLPEPDRNNILCVAFDSGWFWYIPLSDTLTSVGAVVRRDLAEKVQGDPEKALQALIDECPMISDCLAPARRVTEGQYGEVRVRKDYSYHHTSFWRPGMVLVGDAACFVDPVFSSGVHLATYSALLAARSINSTLAGTVGEEAAMNEFEARYRREYGVFYEFLMSFYDMHHAEGSYFWEAKKVTRNSRSEMESFVDLVGGVSSGESALTGADGIEQRLHTQNREFASAVETIADGGNDNWAPLLGSSVVREAMTESSKVQMHAALGEDAEEETPLFDGGLIPSADGMTWVRAAAD

SEQ ID NO: 84806 - protein, 522 aa, unidentified
  source 1..522: note = Sphingomonas naasensis
  REGION 1..522: note = tr|A0A4S1WEN3|A0A4S1WEN3_9SPHN Tryptophan 7-halogenase OS=Sphingomonas naasensis OX=1344951; GN = E5A74_13720 PE=4 SV=1
MRAPLFRHWRADAIIAYTRARRGGEVNQPRKRVIIVGGGTAGWMAASAIAKLLPHAVEVTLIESAEIGIVGVGEATLPHLRAFIETLGLDEAEFMAATHATWKLGIEFRDFGKPGDRYLHPFGDFGRPLHDIPFLHWWLRMHALGQGGDIADYSVANVMAAQRRFARPAEDPDALLASYGYAYQFDATRFGPFLRSFAEEQGVTRIEGRIVSVERDGATGDVAALLLESGTRIEGDLFVDCSGFRSLLLGDALGEEWEDWSHWLPCDRAMALPCAAPPGEIEPLTRATAMPAGWRWRIPLQHRVGNGYVYSSAHLSDDAASAAILAAVEGEPLADPRVLRFRAGRRKRSWSHNVVAVGLASGFLEPLESTSIYLVQVAIQQLIALFPIGGIAEVDRDAFNDQVDYEYDRIRDFLILHYHASTRDDSEFWRAVRHMAIPDSLAEKIELFRRAGRIQRYSRGLFFAPSWIAVMIGQGLVPQGWDQRVDAADPRALGQALDRLRSQIAAEVATLPGHRAALGLPA

SEQ ID NO: 84807 - protein, 502 aa, unidentified
  source 1..502: note = Sphingomonas naasensis
  REGION 1..502: note = tr|A0A4S1WJA4|A0A4S1WJA4_9SPHN Tryptophan 7-halogenase OS=Sphingomonas naasensis OX=1344951; GN = E5A74_08870 PE=4 SV=1
MSAAAIRSVVIVGGGTAGWMTGAALARLVRAGVQVTLVESEAIGTVGVGEATIPPIRTFNAMLGIDENHFLAHTQGSMKLGIEFVDWNASGHRYLHPFGDYGFDIEGVKFHQVWQRLHAAGNAAPLDDYSLCAVAARANRYAAPANDPSSPLSRLVQAYHFDASLYARYLRGYAEARGVVRREGKITEVSLRGADGFVEAVMLEDGSRLEGELFIDCSGFRGLLIEEALHTGYEEWTHWLPCDRALAVPTANAGPLTPYTRCTARAAGWQWRIPLQHRMGNGYVYSSAHVSDDEAAATLLANLEGAPLADPRPLRFTTGRRKQAWNRNVIAIGLSGGFLEPLESTSIHLIQAGISRLLALFPDRGWGDAERDSYNDFTRTQYEQVRDFVILHYKANGRDEPLWRQVREMDVPDSLARRIDLFRNRGRVFRREDELFAETSWIAVMLGQGITPQGWDPLADALDAGQLAAMLERIRSTFRRAAEGMPDHAAYLARHCSARGPQ

SEQ ID NO: 84808 - protein, 505 aa, unidentified
  source 1..505: note = Sphingomonas taxi
  REGION 1..505: note = tr|A0A2W5AM80|A0A2W5AM80_9SPHN Tryptophan halogenase; OS = Sphingomonas taxi OX=1549858 GN=DI640_13350 PE=4 SV=1
MTDSKIRRVVIAGGGTAGWMAAAAIARTMGGTIDLTLIESDAIGTVGVGESTIPPMITFNRLLGINEAEFMRETQATFKLGILFDDWKVRGESYFHSFGITGKDHWSAGFQHFWLHGLTKGHDQPYDDYCLELRAALQGKFAHLPDERMNYAYQLDSTRYAKYLRGMAEADGTRRLEGKIAQVELNGESGDIAALVLESGTRIEGDLFLDCTGFRALLIEGALHAGFDDWTHYLPCDSAIAIQTESVRPALPYTRAMAHDAGWQWRIPLQHRTGNGIVYCSRYLDRDAALDRLLGNIEGKTLTEPNMIRFVTGARRQQWHRNCIAIGLSGGFMEPLESTSIHLIQRAVLRLLRLFPSGAVSPRDVAEFNDQQHTDMLQIRDFLILHYKATERRDSVFWRHCAAMPIPDSLEQKIELFRETGRVFRKNEELFAENSWVQVMLGQGIVPRSYHPIATKLRDEELARLLGGLRDGTNATVAGLPDHAEYVARYCGTASAPAPSPAVAA

SEQ ID NO: 84809 - protein, 499 aa, unidentified
  source 1..499: note = Sphingomonas naasensis
  REGION 1..499: note = tr|A0A4S1WPK7|A0A4S1WPK7_9SPHN Tryptophan 7-halogenase OS=Sphingomonas naasensis OX=1344951; GN = E5A74_06755 PE=4 SV=1
MQQLKRILIVGGGSAGWMTAALLAKLFEGLYEVTLIESEQIGTIGVGEATIPAIKKYNELIGLDENDFMRRTQGSFKLGIQFVDWWRRGHSYIHGFGVIGQDLGWLRCHQYWLKAQAAGKASDFSAYSINTAAALANKFMRADPKLAESPIGHIAHAFHFDAGLYAQYLRGLAEARGVRRREGKVAGVALRSEDGFVESVTMDDGEVIAADLFIDCSGFRGLIIEEALKTGYEDWTHWLPCDRAMAVPCARTEPFTPYTRATARTAGWQWRIPLQHRTGNGHVYASSFIDDAEAEAQLLANLDGAQLAEPNRLRFTTGKRNRTWNRNCVAIGLAAGFMEPLESTSLYLIQSAIVRMVRLLPDTGFDPATIAEFNRQTDFEYERVRDFIILHYKATERDDTPFWRHCRDMEIPATLQRKIDLFAANGRVFREDEELFTEESWIQVFLGQGVIPRGYDPLVDIRSEVQVDQFLDNIEKVIAKCVAVMPGHAEFVAKTCPAS

SEQ ID NO: 84810 - protein, 503 aa, unidentified
  source 1..503: note = Sphingomonas taxi
  REGION 1..503: note = tr|A0A097EKZ1|A0A097EKZ1_9SPHN Tryptophan halogenase; OS = Sphingomonas taxi OX=1549858 GN=MC45_13060 PE=4 SV=1
MSGQDGAIRRIAIIGGGTAGWMAAAALARVLGPHGPAITLVESEEIGTVGVGEATIPPIQAFNALLGIDEDDFVRATGGTFKLGIEFVDWRALGQRYFHPFGVYGIDLGAVPFEALWRRLHAEGAAGPLSDYSICAAAAATGKFMRPQPGNTPLAHIGYAFHFDAALYARFLRGRAEAAGVVRREGRVVDVVLRGADGFIEAVTLADGGRVEADLFVDCSGFRSLLLGDTLGAGFEDWSAWLPNDRAVAVPSAVTRPPPPYTRATARTAGWQWRIPLQHRVGNGYVFAADHISEDEATATLLANLEGEALAEPRTLRFRAGRRSALWVRNCVALGLSGGFLEPLESTSIHLIQSGIARLLEMLPTRAFEPADIRRYNRLMATEFDSIRDFVILHFHATGRRDTAYWRRLAEMPIPDTLAERIAIYRRTGRVFRETDELFTKTSWLAVMDGQGLTASGYDPLGAALPLADARAALDRIGKVTAAAAAHMPPHQDFIARHCRAPR

SEQ ID NO: 84811 - protein, 506 aa, unidentified
  source 1..506: note = Nitrospirillum amazonense
  REGION 1..506: note = tr|A0A560HKY2|A0A560HKY2_9PROT Tryptophan halogenase; OS = Nitrospirillum amazonense OX=28077 GN=FBZ90_101329 PE=4; SV = 1
MSASTVTRLVIVGGGTAGWMSAAFLSSLFPARQLSLTVVESAEIGTIGVGEATIPPIQVFNKAAGIDEAAFLRATEGTYKLGIEFVDWLRPGHRYMHPFGQPGQAINGASFHAWWLRLRAAGYPHPLSDFWMSEVLARKNRFDFPSSDPRTPKSNLAYAYHFDAGLYAQFLRRIAESRGVRRIEATVANVALDGADGTVSHLDLADGRRVEGDFFIDCTGFRALLIGQALGQGYEDWSHYLPANRAVAVPSQRVAAPVPYTSATARTAGWQWRINLRHRTGNGYVYVSDLISDDEAAATLLANLDAPALDDPRFLRFTTGRRRSRHKNVLAVGLSSGFLEPLESTSIHFIQHALIKFAATFPLAKDDPVSAGIFNRIMAEELEQVRDFLVFHYHANDRVGEPLWDRARAMPLPDSLVEKMALFRARGFAIFPSQTLFQEPNWLAVMLGQGLEPQSYDPLTDGAPLEEVRGGFDAMRRTIAQVADGCHPHEAFLDDGAAVPMARARA

SEQ ID NO: 84812 - protein, 551 aa, unidentified
  source 1..551: note = Nitrospirillum amazonense
  REGION 1..551: note = tr|A0A560H8R7|A0A560H8R7_9PROT Tryptophan halogenase; OS = Nitrospirillum amazonense OX=28077 GN=FBZ90_106327 PE=4; SV = 1
MRMTVAEGARRRILIVGGGTAGWLTAAYLAKTLGTGLSGGTDITLIESTDIGIIGVGEGTFPTIRSTLAAIGIDEARFLRESSATFKQGVHFVDWAEAPAPDAAPTQALGAVPGHSHYFHPFNFPHQVKGPELLPYWLLGAAGDLPFAEAVTLQKAVADACRGPKRAIDPPYHAPLNYAYHFDANRLAVLLRTVAVELGVHHLVGTVDGVVLDGSGAVARLDTREHGGLTADLYIDCTGFRAQIIGQALKVPFKPWGDVLFNDRAVALQVPYDRPDAPIPSYTVATAHEAGWTWDIGLNDRRGTGYVYSSRHTDDARAEEVLRRYIGPMAAGRDVRLLKFESGCRNRHWVGNCVAVGLSGGFFEPLESTGIMLIEVAAHMIAQFFPWGPSGLDSAQTAAAMAATARTYNALMGARYDRIVDFLKLHYCLTRRTDSAYWRDNADPATVPDSLRDRLALWAHRPPGRFDFVADHETFLPASYQYVLYGMGFKTDLEPARALYRRMEEARHEFQGLRTVTPQALSSLPSHRDLVEEVYRNGFRPPPAAQAGSRR

SEQ ID NO: 84813 - protein, 511 aa, unidentified
  source 1..511: note = Nitrospirillum amazonense
  REGION 1..511: note = tr|A0A560H4B8|A0A560H4B8_9PROT Tryptophan halogenase; OS = Nitrospirillum amazonense OX=28077 GN=FBZ90_10825 PE=4; SV = 1
MDRPIQHIVIVGGGTAGWLTAGIVAARHKARMAAGFKVTLVESPNVAIIGVGEGTWPTMRTTLEKMGVSETEFFRHCDTAFKQGGKFVGWTTGAADDAYYHPLMLPHGWSQVNLAPHWLQDARGRTFSAAVCPQESICEEGLAPKTIATPEYRGLANYAYHLDAGKFASFMQRHCTEKLGVHHILADVTEVRQDENGDITSLVTVQSGEIAGDLFVDCTGFHALLIGKTLGVGFKECRDVLFCDTALAVQVPYETADAPMASQTIATAQSAGWIWDIALPTRRGLGYVYSSDHIDEEAARAELARYAGTQAEARKIPIRGGHRETFWKNNCVAVGLAAGFLEPLEASAIMLIELSAKIIAEQLPARRSVMDIVARRFNEVTRYRWGRIIDFLKLHYVLTQRTDTAFWRDNVDPASVPARLQDLLRLWKYRAPWFLDEFDRLEEVFPAASYQYVLYGMGFRTEVDPAENGADTTLASRILEENAAMAQKMRANLPKNRDLVRKIRDHGMQSI

SEQ ID NO: 84814 - protein, 514 aa, Novosphingobium sp.
  REGION 1..514: note = tr|A0A257GFS1|A0A257GFS1_9SPHN Tryptophan halogenase; OS = Novosphingobium sp. PASSN1 OX=2015561 GN=CFE35_02380; PE = 4 SV=1
MSSTETSGSAGPSGPLRIVVAGGGTAGWMTAAALGHFLDRGFTVTLVESEEIGTVGVGEATIPQIRMFNQALGIDEDAFSRATQATFKLAIEFVGWGRPGERYMHAFGDVGRDVGLCAFHHYWSRGRRLGLAGPHGDYAINDIAARAGRMHRGAPLTSRNVPEMPHAFHFDAGLYAAFLRQFAEARGVVRREGKIGEVRQDAQSGDITALVLASGEEIAGDLFIDCTGFRGLLIGGAMGSGYVDWSHWLPCDRALAVPSARVENFTPYTRATAHDAGWQWRIPLQHRTGNGRVYCSAFTTDEAAAESLLAHLDAPALADPRPIRFTTGRRAEAWRGNVIAVGLASGFLEPLESTSIHLIQTAISRILKLLPGKEQTQAARDEYNRQFTFEMERIRDFIVLHYHVNQRPEPFWQAMRDMALPDTLKDRIELFRTNGHIFRHGDELFGEVGWFQVMAGQGIVPERSHGLAETIDEADLKGYLETLNGLYRREVERYPAHADFIARHCGAPALGGAA

SEQ ID NO: 84815 - protein, 789 aa, Methylobacterium sp.
  REGION 1..789: note = tr|A0A5C8UCB2|A0A5C8UCB2_9RHIZ Tryptophan 7-halogenase OS=Methylobacterium sp. WL9 OX=2603898; GN = FV217_02600 PE=4 SV=1
MLEPSRTAPPRLVIAGGGLAAWTAAAYLRRMLRRVGWTVTVVGPVPPAGPSVGLATRPILTRFLRGLGIDEAIFMRRCGATYRVASRFDDWFEAGQGHWHPFGVCGPRINGRDLFHYWLKHRNEGGSGAAYADYAPQALMAAAGRGPRNETGVSSAVEAGSYGYHLDRTALVRFLREIALSEGVRAVPARVLGASRDFSGNIRSLDLEGGASVEGDLFLDCTGAAALLIGETLGEAWIADSAACDSLVSLSLPPAPDPPPFTTYAGLPEGWTASLPLAGRTEAVLAYDGETTTPEAAEAALQAAFGLGEHIVHRSLPSGRRNPWLRNVVALGAAARAVEPLAGFGLDLDLVALEAFVAHLPRGEGAEILSRSYTARMNRLHDDALEALAAHYVLGRRPEPVWAAARAKLPEGLADRLDLYEVAGHVVPREEAVFGETDYYLLFTGADFLPRRAFAPVDVADGREIGGYLAEIRARAAQVADATALHASLLEPLHGTAPAAGPVARITVAATASGPASLRRTPEGTRLADLVAGLGQPYGYERSVKATPGGLQVERFLVSLHRTSLGLQPGQTLDTLAEKLGLPERERAEAAGLIGEADVLHLGYEDGPSGALYKLYVEWSADTDTAWQKAETKGEPLLVHRAYKWSSHAATPPVVTLYHWPRVRAAAEIGARLTRMGADWGEAGSGVIGLAHAVLGLAQERGRGAIHYLEAREEPGPRLSYDLNLYACGLMVADVEPLLAPAFADLGIAPQAVAAVLGERRDEALGHVAGGLGRDGRPFLTVYSGMAGS

SEQ ID NO: 84816 - protein, 513 aa, unidentified
  source 1..513: note = Sphingomonas taxi
  REGION 1..513: note = tr|A0A097EHR4|A0A097EHR4_9SPHN Tryptophan halogenase; OS = Sphingomonas taxi OX=1549858 GN=MC45_12650 PE=4 SV=1
MHQIRNIVIVGGGTAGWLTAGVIAARHQGQRPHGFTVTLVESPNVPIIGVGEGTWPTLRSTLKRMGVSETEFFRQCDASFKQGARFNRWTTGAVDDGYYHPLMLPQQFASVNLAPHWLTGDGDGSFCDTVTPQGRICDEGLAPKTMATPEYEGQANYAYHLDAGKFSHFLQRHCCETLGVRHVRADVTDVRKDESGDIVGLDTEQGIAIDGDLFVDCTGFAALLIGKAMGVPFRSCADTLFCDTALAIQIPYAQPDDPIASHTISTAQSAGWIWDIGLPTRRGIGHVFSSSHIDVDAAERELRAYIGPAGDDLPVRKLSIRAGHRTRFWERNCVAVGLAAGFLEPLEASAIVLIELSAKMIAEQLPPCREVMDVVARRFNDTTQYRWGRIIDFLKLHYALTQRTDTDFWRDNVRPETIPDRLRGLMELWQHQSPWLHDEFDRAEEVFPSASYQYVLYGMGARSAVLPGTIEADAELARRARRENAVQTQRMVASLPRHRDLIERIVRHGLQPI

SEQ ID NO: 84817 - protein, 503 aa, unidentified
  source 1..503: note = Sphingomonas naasensis
  REGION 1..503: note = tr|A0A4S1WU42|A0A4S1WU42_9SPHN Tryptophan 7-halogenase OS=Sphingomonas naasensis OX=1344951; GN = E5A74_03670 PE=4 SV=1
MSDQAIRSILIVGGGTAGWISAAVLARFLDPARCTITLIESEEIGTIGVGEATVPLMQHLNGLLGIDEREFVRATQGSFKLGIEFRDWGRIGDRFFHGFGDYGDAIEGVAPHQHWLKLRGEGDPTPIDAYSLPWAMAERGRFAPPSSDPAKQQHYYRYAFHFDALLYARFLRNYCEQRGVRRIEGRVVDAALDGESGRIAAVITADGERHAADLFIDCSGFRGLLIEEALGTGYEDWRHWLPCDSAVVAPSALAGPPAPYTLSTAREAGWQWRIPLQHRMGNGYVYASGFTDDARARDLFTANVEGALLADPRLLRFTTGRRKRFWNRNCVAIGLAGGFMEPLESTSIQLIQTAIARLIEYFPDRNWDPRVAEEYNRVTTSEFERIRDFLILHYCLTRRDDAPLWDHCRAMALPDTLAHKIATFRATGRVPLLSEESYQEPSWVAIFAGNGLLPDRYDPLVDRIDRDRLRAGLAHRRQQIAEAAEATPPHGLFLNRCCRAEAA

SEQ ID NO: 84818 - protein, 501 aa, unidentified
  source 1..501: note = Sphingomonas taxi
  REGION 1..501: note = tr|A0A2W5P1M6|A0A2W5P1M6_9SPHN Tryptophan halogenase; OS = Sphingomonas taxi OX=1549858 GN=DI544_11315 PE=4 SV=1
MGDPIRSIVIVGGGTAGWMAATYLARRLAHLRLSITVVESSAIGTIGVGEATVPAIRDFFAAIELGEADVLRETEATIKYGIRFASWKAPGHDFFHPFGLYGVAARGVAFHHYWLKRRAAGDATPLGAYCLATQLAERGLFLPPVERPANDLGVFNFAVHFDASKFAALLRRLALANAVAHIDARITTVARDEADGRITAVTLNNGQQVTGDLWIDCSGFRSLLLGEALDVPFLDWRQWLPCDRAIAIPCRAARVHPPFTAATATGAGWRWHIPLRHRVGNGHVYCSDFMTDAVAEETLIAALEGEPLHEPNRIRFTPGHRARFWERNVVGLGLSSGFLEPLESTSITLIQSGLERLIPLFPDRDFDPRLADTYNRQSVLEFERIRDFLMLHYSGNRRIGEPFWDHVRGIAPTDGLRGKLDAWRAAGEFVRREWDTFQDASWLSMYAGFDDLPARYAPLADQVADADLRDSLSRMRAAIDATLAHAEPHADFLARVHAGRA

SEQ ID NO: 84819 - protein, 481 aa, Sphingomonas sp.
  REGION 1..481: note = tr|A0A3R9Z8E9|A0A3R9Z8E9_9SPHN Tryptophan 7-halogenase OS=Sphingomonas sp. HMF7854 OX=2315330; GN = HMF7854_12260 PE=4 SV=1
MLARSLPRDRVRITLLESEEIGTVGVGEATIPPIRELNAMLGIDEDAFVRATQASFKLGIAFEDWHSVGERYFHPFGRFGASLGTLPFQSYWHELSRRDADRAGPLLAYSLPGMAAAAGRFCRPSPDPRNALSNISYAFHFDASLYARFLRSVAEGGGVERVEGRAVATRMTADGAIEAVVLSDGRTLDADFFIDASGFRGLLIEEALKTGYEDWRHWLPCDSAIALPTSAHEPPRPYTRSIAGPAGWQWRIPLQHRTGNGHVFCSAFLSADEAEAQLRSSVAGRPLAEAKRLRFTTGRRRVAWNRNVLAVGLAAGFLEPLESTSIHLVQSAITRLLALFPDRGFAPADLAYYNHATAREYERIRDFLVLHYHATERRDSAFWEHCRAMAIPDTLRERLDLYRSRGRFFPAEFDLFLEPSWVAVMEGQGVRPAAPDPLAAVHAERLAELLPRIRGTIAAAVTAMPPHERFIAEHCRAPAAA

SEQ ID NO: 84820 - protein, 485 aa, unidentified
  source 1..485: note = Pelagibacter sp.
  REGION 1..485: note = tr|A0A1Z9LTL9|A0A1Z9LTL9_9PROT Uncharacterized protein OS=Candidatus Pelagibacter sp. TMED197 OX=1986808; GN = CBD57_02770 PE=4 SV=1
MKKNFVILGGGTAGWFTALFIQKVRPNDNVSIIESTKIGTIGVGEATTPNVINFFTYLNIPIEDVIKNTNGTIKNGISFENWNGDGKKYFHAFFEHLTPFKVHPMFSNDCFEFYLKHLIHENKNLEDYQYSPLISYQNKVDTKHTSYALHFDAGMLAAFLKKTAIERGINHIDAEFESLSTNDKNDITKITLNNDQSVDVDFVFDCSGMARKIIGEHYKQKWISYRDHLPMKKAIIIPKEKEDLFPYTKAIAMKYGWIFEIPLQHRVGRGYIFDSDYINEEQALKECEEYYGEKINVKKVIDFDAGRFEKVWVNNCVAVGLSSTFIEPLESTSLFLTIEQLMMFNHFHNTWFESNEDDRDMYNLICGNNMKETLSFVYLHYITKRKDSQFWIDFPTKHKPPKHFEKKLHKLKQNNIRHYDCVDTMLTAQFRMSSYVQVAQGLGVADVPINIKGFENIEPSVDNYKKLIDYNAKYADTMSDYLKKL

SEQ ID NO: 84821 - protein, 504 aa, unidentified
  source 1..504: note = Sphingomonas taxi
  REGION 1..504: note = tr|A0A097EF54|A0A097EF54_9SPHN Tryptophan halogenase; OS = Sphingomonas taxi OX=1549858 GN=MC45_07135 PE=4 SV=1
MERAERQRVVVVGGGTSGWMAATALAKLLPSRCTVALIESEAIGIIGVGEATLPHIRAFNERLGIVEAEFMAATRATFKLGIEFRDWGRVGDSYIHPFGTFGRGSGEVQFHHYYTRLLRAGVPLPPIEHYSMACSLARANRFGQPARDPQQIASTFGYAYQFDAVAFAPYLRRIAEGLGVRRTEGKVVAVERDAQSGDVTALVLADGRRVEGDLFVDCSGFAALLIGQELAEPFEDWSRWLPADRAVAMPCRTATAVTPYTSAIAMPSGWRWRIPLQHRTGNGYVFASDFLSEGAATDALLAAVEGTPLADPRVLRFKAGRRARSWVNNVVAVGLASGFLEPLESTSLYLVQQAITALIELFPEKRIAPVDRDEFNRLINMEYDRVRDFLILHYHATERDNSPFWTYVRTMPIPDSLAEKMALFRRRGRVVKYREGAFLDASWVSVYLGQRVVPTGADPRAAAPSTDSLVAGLERMRGEIAAAVGAMPAHAAFLADYCPMPAAA

SEQ ID NO: 84822 - protein, 511 aa, unidentified
  source 1..511: note = Nitrospirillum amazonense
  REGION 1..511: note = tr|A0A560IZ47|A0A560IZ47_9PROT Tryptophan halogenase; OS = Nitrospirillum amazonense OX=28077 GN=FBZ92_102159 PE=4; SV = 1
MDRPIQHIVIVGGGTAGWLTAGVIAARHRARMASGFKVTLVESPNVAIIGVGEGTWPTMRTTLEKMGVSETEFFRHCDTAFKQGGKFVGWTTGAPDDAYYHPLMLPHGWSQVNLVPHWLQDGRGRTFSAAVCPQEAICEEGLAPKTIATPEYRGLANYAYHLDAGKFASFMQKHCTEKLSVRHVLADVTQVKQDESGDITSLVTEQAGEITGDMFVDCTGFRALLIEKTLGVGFKDCRDVLFCDTALAIQVPHDSDDAPMASQTIATAQSSGWIWDIALPTRRGLGYVYSSDHIDEEAARAELARYAGTQAEARKIPIRSGHREMFWKNNCVAVGLAAGFLEPLEASAIMLIELSAKIIADQLPARRSVMDVVARRFNEVTHYRWGRIIDFLKLHYVLTQRTDTAFWRDNVDPASTPERLQDLLRLWKYRAPWFLDEFDRLEEVFPAASYQYVLYGMGFRTEVDPAENNADALLASRIMEENAAMAQKMRANLPKNRDLVRKIRDHGMQSI

SEQ ID NO: 84823 - protein, 505 aa, unidentified
  source 1..505: note = Nitrospirillum amazonense
  REGION 1..505: note = tr|A0A560GYE2|A0A560GYE2_9PROT Tryptophan halogenase; OS = Nitrospirillum amazonense OX=28077 GN=FBZ90_11150 PE=4; SV = 1
MSDRRIRKVVILGGGTAGWMTAAALAKVNAPPQFEVTLIESEEIGIIGVGEATIPTIHWFNTLIGLDEARFLRETKATFKLGIEFVGWNGTPGGNPSRYFHPFGRYGGPADAQMFVHRWVRARQDGLPHSHEDYSLATLAARTGKFGPPAPDPHSLFSTLGHAYHFDAGLYAAHLRQLAEARGVRRVEGKVERIERHPETGFVTRLTTHRGDVIAGDLFVDCSGLRALLIGGVMESGFEDWSHWLPCDRALAVPCERVADTPPYTRATAHAFGWQWRIPLQHRTGNGMVYSSQVASDDAAADALMANLDGKALAEPRLIRFQTGRRRQAWVKNVVAIGLSSGFLEPLESTSIHLIQSGIAKLLSLFPSRECPEETAGQFNQVFATDMESVRDFLVLHYSRTQGREEQLWRHCQAMAVPEGLTWKERHFTRTGRIVLSTDELFRDASWFAVMMGQGLRAADYNPLLDTLPAAENIAYLQRLREQMAKAMATLPSHDAYLRRVMAPA

SEQ ID NO: 84824 - protein, 513 aa, unidentified
  source 1..513: note = Nitrospirillum amazonense
  REGION 1..513: note = tr|A0A560FNW7|A0A560FNW7_9PROT Tryptophan halogenase; OS = Nitrospirillum amazonense OX=28077 GN=FBZ89_10266 PE=4; SV = 1
MAEAMRNGDGCCGRRIVIVGGGTAGWMAAAVLARVLKGKYGTIDLVESAEIGTVGVGEATIPPIQFLNHLLGIDEIDFVRKTQATFKLGIEFVDWTRLNHRYFHPFGPHGHAIDAVSFHHYWLRQRAKGDTSDIGDYSPSTVAARMGKFQPPAPDTRSGGPVIAYAYHFDAGLYARYLRGIAERNGVKRTEGKIVQVTQRGPDGFIDSLVLDNGTRVAGDLFIDCSGFRGLLIGETLKAPYEDWSHWLPCDRAVAVPCEGVAAITPYTRSTARAAGWQWRIPLQHRIGNGHVYSSRFISDDEATATLLANLDGKPLADPRPLRFTTGRRKNSWTKNCISLGLASGFMEPLESTSIHLVQSGLFRMVSLLPRDGFEQATVDEYNRLTNIEYEQIRDFLILHYHAVERDDSPLWNYCRTMEIPDSLRHKIDLFRARGRIARFDEQLFAEPSWVAVFLGQGIQPHSYDPVADVMPEAEVAARLARIREAIRRMADALPAHAEFINRHCRADRPVAA

SEQ ID NO: 84825 - protein, 501 aa, unidentified
  source 1..501: note = Nitrospirillum amazonense
  REGION 1..501: note = tr|A0A560JN90|A0A560JN90_9PROT Tryptophan halogenase; OS = Nitrospirillum amazonense OX=28077 GN=FBZ87_10860 PE=4; SV = 1
MSDRRIRKVVILGGGTAGWMTAAALAKVNTPPQFEVTLIESDEIGIIGVGEATIPTIHWFNRLVDLDEAQFLRETKATFKLGIEFVGWNGGDSRYFHPFGRYGGPADAQMFFHRWIRATLGGFPHGHQDYSLATLAAMANKFGPPATDPNSLFSTLGYAYHFDAGLYAAHLRRRSEARGVKRIEGKVEQIEQDPETGFVTRLTTHRGEGVEGDLFIDCSGLRALLIEGVMNSGFEDWSHWLPCDRALAVPCERVAAPVPYTRATAHAFGWQWRIPLQHRTGNGIVYSSRFASDDEAASTLMANLDGKALADPRLIRFQTGRRRRSWVKNVVAIGLSSGFLEPLESTSIHLIQSGIAKLLSLFPTRDCPEETAGQFNQVYGADVESVRDFLVLHYSRTQGRDEPLWRHCQAMAVPEGLSLKERHFTRTGRIVLSTDELFREASWFAVLMGQGLRATDYNPLLDTMPADENLAYLLRLRDQMAKAAATLPSHEGYLHRVMGPA

SEQ ID NO: 84826 - protein, 507 aa, unidentified
  source 1..507: note = Sphingomonas taxi
  REGION 1..507: note = tr|A0A097EK96|A0A097EK96_9SPHN Tryptophan halogenase; OS = Sphingomonas taxi OX=1549858 GN=MC45_04520 PE=4 SV=1
MAGVSGSHPNPPLKTITIVGGGTAGWMTAALLSRLLLGAYTIRLIESAEIGTIGVGEATIPAIRTFNGLAGIDEFEFVRATQATFKLGIEFRNWGGVGDSYIHGFGKIGQDLYWLHCHQFWLKARSMGEGRPLDHYALNTLAARMNRFALPDPAHPNSPIADLDYAYHFDAALYAAFLRGRAEAAGVQRIEGRIVAANRRGQDGFLDHVVLADGRTVDGDLFVDCSGMRGLLIGDAMGVGYEDWDHWLLCDRALAVPSARQGPLTPYTRSIAHDAGWQWRIPLQHRTGNGHVYASRFVSDEAAAQTLLAHLDSPAIGDPRPVRFRPGKRQRAWEKNVVALGLAGGFLEPLESTSIHLIQTGILRLIALFPGRGFQDADIAEYNRQTDFEYRDVRDFIIAHYKVTDREDTEFWRYVKHMDVPDSLTERLALFAASARFFMHGKAELFREESWVQVLLGQRLRAAYDPMVDMIPAAQAAAFLGDVEEVIAEVAAGMPTHEAFIARHCQA

SEQ ID NO: 84827 - protein, 507 aa, Sphingomonas sp.
  REGION 1..507: note = tr|A0A429V8A5|A0A429V8A5_9SPHN Tryptophan 7-halogenase OS=Sphingomonas sp. HMF7854 OX=2315330; GN = HMF7854_04685 PE=4 SV=1
MIGDPVRRIVIVGGGTAGWMAAAALAKVIGALPGLTIELVESDEIGTVGVGEATIPQINLFNQLLEIDEAEFVSRTQATYKLGIEFRDWTRLGHRYIHPFGFYGVDMGGIEFHHHWLKGRSLGDDSELDDYSLAAVAARQGRFSHPRPDQPKSPLARIAYAFQFDAALYARFLRSRAEAGGVRRTEGRVVDAEQDGESGFVRALHLADDRRVEGDLFIDCSGFRALLIGQTLGVGFEDWSRWLPCDRALAVACESGEDRRPLTRSTARPAGWQWRIPLQHRTGNGYVYSSAHVSDDAAAATLLGSLDGAALGDPRALRFRAGHRREAWNRNVVALGLAGGFLEPLESTSIHLVQTGIARLLTLFPTLAFDPAEIARYNALTVQEYVDIRDFLVLHYKATERDDSEFWNYCRTLEPPPALAEKLAMFRSNGRVFREQHELFTETSWLSVMVGQGIAAGGYHPAADLLADDETLARLGHIRGVVEHTASLLPTQQQWIRQLGAGIPTAA

SEQ ID NO: 84828 - protein, 490 aa, Sphingomonas sp.
  REGION 1..490: note = tr|A0A3R9X9T3|A0A3R9X9T3_9SPHN Tryptophan 7-halogenase OS=Sphingomonas sp. HMF7854 OX=2315330; GN = HMF7854_02765 PE=4 SV=1
MAACLLQQRWGSRGTRITLIESSAIPIIGVGEGSTPQLKAFFDALGIAEREWMPRCHATYKTGIQFRGWSDRPGFDQYFHPFPTALDVHTAGDFFHHCRLRRLGVDVPAHPDLFFLPARLAAAAKAPLPAADFPFDTSYGYHFDAALMGSFLREVATSRGVVHADARIVETVLAPDGDVEALLGDDGRRFEADLFVDASGFRALILEGALGEPHRSFAENLFNDRAVVAPTPLPAEGPGVCTRSTALSAGWAWHIPLTSRIGNGYVYSSRHCSDEAAASEFRSHVGLAADAEVRHLEMKVGRLERSWVRNALAVGLAQGFVEPLEATALHVVLATVEDFIAAFEQEGATDRTRADFNRGCASRIEGIRDYIVAHYRAAPRGDTRYWQEATGHDQLSDSLKALFTCWFTGRDMVEEIDRQGIAAYYPAISWHCLFGGYGNFPSVLSPVPDNVRAADMARVEHFLTACAGHYPAHSAALERLDRAERVGSPG

SEQ ID NO: 84829 - protein, 534 aa, unidentified
  source 1..534: note = Sphingomonas taxi
  REGION 1..534: note = tr|A0A097EF93|A0A097EF93_9SPHN Tryptophan halogenase; OS = Sphingomonas taxi OX=1549858 GN=MC45_07125 PE=4 SV=1
MNEHTIRSVVILGGGTAGWMAAAAMARFLNNGVTRVTLIESEEIGTVGVGEATIPPLRTFNSMLGIDEHAFIRETGGTYKLGIEFVGWGDIGERYFHPFGAHGHDLGGVHFHQLYLRERQRRVLPDISAWSMSAVAAQAGKFAPPAPQAQSAVKDLFYAYHFDAVRYAGFLRRFAERNGVQRIEGKVVAVAQRPEDGHVTALKLDDGQTVGGDLFIDCSGFRGVLIEETLETGYEDWRHWLPCDRAVAVPSAYSGDPDPFTRATARGSGWQWRIPLQQRMGNGLVYCSDFQQADDAERELLANLEGAPLAAPRHLAFTTGRRKLAWNRNVVALGLASGFIEPLESTSIHLVQSGIARLIALFPDRRFDPVERDEYNAQMHELYADVRDFVILHYKATRRRDTPFWDRCRTMDIPDSLARKIALFRGKGRVFRENRELFATTSWVSVCLGQDIVPQEYEPAVDALDEERVAGALEEMRREYLDIAGRLPSHGDFLRHISGQPAAPAVAPAAPAAAAGPTFSFASESPFDFSADPL

SEQ ID NO: 84830 - protein, 510 aa, unidentified
  source 1..510: note = Sphingomonas naasensis
  REGION 1..510: note = tr|A0A4S1WS90|A0A4S1WS90_9SPHN Tryptophan 7-halogenase OS=Sphingomonas naasensis OX=1344951; GN = E5A74_03665 PE=4 SV=1
MSDAAIRTILIAGGGTAGWMAAAALSVAFQPHQCRIVLVESDEIGTVGVGEATIPPIQLFNKILGIDEREFVRATQGSFKLGIEFVGWLREGQRYFHPFGRYGDDFGLTAFHQQWLRAQTLGSTTPLDGYSLNHQAAYRGRFEIPTPQSNPVFSTFSWAYHFDAGLYARYLRGFAERRGVERVEGKIAEVVLRPGDGFVDRLILGDGRALEAELFLDCTGFRGLITEALGTGYEEWTHWLPCDRALAVPCARVADPVPYTRATARQAGWQWRIPLQHRTGNGHVYCSGAISDDAAAATLLANLDGAPEADPRMLRFTTGRRRKAWNRNCIALGLASGFLEPLESTSIHLIQTGISKLLSWFPDRHCDPLLAAEYNRLVDAEMESIRDFLILHYQANERDEPFWRQCAAMPIPDTLAAKIEMFRANGRLIERPHDLFHPTSWLAVLLGQGVAPAAHDPLADTVPPEELAAVLGGMRHVIDQAAARMSTHQQFIDRNCRAAPASAITQEPHP

SEQ ID NO: 84831 - protein, 492 aa, unidentified
  source 1..492: note = Planctomycetes bacterium
  REGION 1..492: note = tr|A0A518HQL4|A0A518HQL4_9BACT Tryptophan halogenase; OS = Planctomycetes bacterium Enr13 OX=2527979; GN = Enr13x_29450 PE=4 SV=1
MNKRFDVAIIGSGFSGSILARILASRGRRVALLDAARHPRFAIGESSTPIADLLLRRLGQQYGLADLENLSAYGRWRQTLPELACGMKRGFSYFDHRRWNVESQLGERSLIVAASPTDSNSDTHWYRSDVDAYLFRKALDAGVDAREDVSVTSLDLSDSAQSRIHLASGDPITAAFVVDASGAAAVSARLLGVAPITERLTTKTCAAYAHFRGVESYSELFNSIHGDRRASQPFDADAAAQHHLIDDGWVWMLRMNNGITSVGVVSPLPGDASTHHDTLQRATRALNDRFSGDATLNRVFRDSVLVAPGSAVATIGRIQRLHDPVVATNCLMTPTTAATIDPLHSTGIAHALAGVGRLADILLANHPGERIGRYRASILAEACHVDQMIAMAYRAMKYSSLHSFPRFVASCMVYFAAAIACEERIGRGEMPGRLWQADDEAFVAAVKQSANVIDSDADDGEVVDQLRNLIAPWNTAGLFEGDGNRYAYTATK

SEQ ID NO: 84832 - protein, 505 aa, Pseudomonas sp.
  REGION 1..505: note = tr|A0A1B8TJW4|A0A1B8TJW4_9PSED Uncharacterized protein OS=Pseudomonas sp. AU12215 OX=1860123; GN = A9513_025380 PE=4 SV=1
MLNLSNCRRVAVVGGGSAGWFAALELRKLFLHKVEVVLVEAESLGIIGAGEGSLPNFNRALEHYGLDRTEFMRETHSTHKLGLALEGWRSGAPDDIFLHQFSYSHDGVDLTSWVEPNGSYPLASILINQGYQLQHYPATWKMWQEGASQATAEAFLQSLPAKTPMAYHFDARKLASYLRDIAIKRGVQHINATVESVRLDEKRHVTALVLPDREIEVDFVIDASGLHRLIIGKTLNASWQSYADHLLLNRALPFFIPSQTEHPPLVTRAIAMRHGWMWCIPTLERLGVGYVYCDRYTDREAAVKEVQDYWGMDIEPANDFAFEPGHYDQVWLGNVMAVGLSSGFVEPLEATSIGQTLDQLARFGELIVACDGIIPQQLIDQFNHEIGRYWDGIRDFLFLHYDTPRNDTEFWRAASNAAAPSTYKELKRTLAHRPPRLMDMEQYQGGPFRMFGVPNWMSVAAPLGILSREATALDLRSLSQEKRQRLGSFLAKVESRMKAESGASN

SEQ ID NO: 84833 - protein, 516 aa, unidentified
  source 1..516: note = Chlamydiales bacterium
  REGION 1..516: note = tr|A0A212KP74|A0A212KP74_9CHLA Flavin-dependent tryptophan halogenase RebH OS=Chlamydiales bacterium SCGC AB-751-O23 OX=1871322 GN=rebH PE=4 SV=1
MEEKIQEVVIVGGGTAGWLSALFLKKHLGKEANITLIESPNIPTIGAGEATIPGIISFIEALGIDEEDFLISCNATFKFGIEYTHWTNPNEKNPIWHPFYSTKKLSPSIADLYFYKEKMGLTEENIASFWNPDMPFILENKAPRDFTESPYYWNIPYAYHFDSHLLAKFLTNLGEKKGIKHISDTVIDVQMQDKENIHSVHTRSNGSFKADLFIDCSGFKRIMIKEKLNSPYVSVQDKILCDRALALKLPYKNKSEEMTPYTTVKGMKSGWMWRIPLQEEIGYGYVHSSRHSSKEEATEEMSQHLGFSPEKYPLNHIFMENGYLEKPWIGNCIAIGLSAGFIEPLESTGLYFITYTLDTLLKYFPCKGNFKHQAKPYNLELQNLTKSVLTFIYLHYHLNSRDDTPFWQDNKNNPVKDPDLEAVYQNYLENYGKPLILSTFKKSSVFTGPSYIFFLHGLGIKPKEFPPIAKHPNFNRIAELEHQQSILQSKQLEKLPTMEVFLKHLKEKKMSSNLKT

SEQ ID NO: 84834 - protein, 500 aa, unidentified
  source 1..500: note = Sphingomonas naasensis
  REGION 1..500: note = tr|A0A4S1WMS6|A0A4S1WMS6_9SPHN Tryptophan 7-halogenase OS=Sphingomonas naasensis OX=1344951; GN = E5A74_08865 PE=4 SV=1
MTDHRIRNIVIVGGGTAGWMAAATFARILGPEYAKVTLIESDEIGIVGVGEATIPQMATFNRMLGLDENEFMRATQGSFKLGIQFVNWGRQGHTYFHPFGKYGIDMKGVSFHAYFLRLHQLGEAPDIDDWSLQAAASRTNKFMRPIDAGNSPLSEIPYAFHFDAGLYARFLRGYAEERGVVRREGKIVEVRLRGADGFVESVVMEDGAAIEGDLFVDCSGFRGLIIEQALKAGFTDWSHWLPCDRAIAVPCESVDAWTPYTRSTAHKAGWQWRIPLQHRTGNGHVFCSKYISDDEATATLLANLDGKPLADPRTVPFRTGHRNKLWIKNCVSLGLAGGFIEPLESTAIWLIQSGLSRFLTMFPDKRFNQADIDRYNRIMITDYEEIRDFIILHYHATERDDSPFWDYCRTMEIPERLAEKMRVFRSHGRAFRENEELFNDTSWFAVMHGQLMRPQGFDPVAEIMSLDETRSRLAHIREAIANSADYMPSHRDFVREHCAA

SEQ ID NO: 84835 - protein, 508 aa, unidentified
  source 1..508: note = Nitrospirillum amazonense
  REGION 1..508: note = tr|A0A560GCX0|A0A560GCX0_9PROT Tryptophan halogenase; OS = Nitrospirillum amazonense OX=28077 GN=FBZ88_101138 PE=4; SV = 1
MAEAMRSGRKIVIVGGGTAGWMAAAVLARVLKGKYGTIELVESAEIGTVGVGEATIPPIQFLNHLLGIDEVDFVRKTQATFKLGIEFVDWTRLNHRYFHPFGPHGHTIDAVSFHHYWLRQRAQGDTSDIGDYSPSTVAARMGKFQPPAPDARPGGPVIAYAYHFDAGLYAQYLRGIAERNGVKRTEGKIVRVAQRDPDGFIDSLVLDNGTRVQGDLFVDCSGFRGLLIGETLKAPYEDWSHWLPCDRAVAVPCEGVAAITPYTRSTARAAGWQWRIPLQHRIGNGHVYSSRFISDDEATATLLANLDGKPLADPRPLRFTTGRRKNSWTKNCVSLGLASGFMEPLESTSIHLVQSGLFRMVSLLPRDGFEQATVDEYNRLTNIEYEQIRDFLILHYHAVERDDSPLWNYCRTMEIPDSLRHKIDLFRARGRIARFDEQLFAEPSWVAVFLGQGIQPHSYDPVGDVMPEAEVTARLARIREAIRRMADALPTHAEFINRHCRADRPVAA

SEQ ID NO: 84836 - protein, 496 aa, unidentified
  source 1..496: note = Gammaproteobacteria bacterium
  REGION 1..496: note = tr|A0A2N1Y9N8|A0A2N1Y9N8_9GAMM Tryptophan halogenase; OS = Gammaproteobacteria bacterium HGW-Gammaproteobacteria-15 OX=2013797 GN=CVV11_17585 PE=4; SV = 1
MTNHTVKQVLIVGGGTAGWMTAAMLSKLMGPQLSIRLIESDAIGTVGVGEATIPAIQHFNAALGINEAEFLQSTQGTIKLGIQFENWGKAGDSYMHAFGPVGRPLGFTAFHHYWLAAQARGDNSSFWDYSLNYQAAHTGKYAPLSHIPNTPLQGLVHAYHFDASLYAAFLRRYSEQLGVVRTEGTIGAVVKTPAGDIASVTLKDGQSFSADLFIDCSGLRALLIGGELGGGYEDWRHWLPCDSALAVPTAATLPVMPYTRAIAHSGGWQWRIPLQHRTGNGLVYSSRFLDDNAARQTLMSNLDAEALAEPRKISFVTGRRKQQWLQNCVAIGLSSGFLEPLESTSIHLIQSAVVRLVQCFPQQADMAALRREYNRQSQQEFEAIRDFIILHYHLNQRNDNGLWQYCRTMALPDSLAQRIELFRQSGAVFRQQDELFTEVAWQQVMLGQHLRPQHYHPLADSLTDAQLNGFLADLKAIISRTAEQLPAHQQFLQQGR

SEQ ID NO: 84837 - protein, 498 aa, unidentified
  source 1..498: note = Sphingomonas taxi
  REGION 1..498: note = tr|A0A097ECS8|A0A097ECS8_9SPHN Tryptophan halogenase; OS = Sphingomonas taxi OX=1549858 GN=MC45_01980 PE=4 SV=1
MTASVTTIVIAGGGTAGWMAAAALGGFLETGYRIRLIESDEIGTVGVGEATIPQIRLFNQALGLDEDAFLRATGGTFKLGIAFDGWREPGHSYMHAFGDVGRDVGLIAFQHYWLRARRLGLAKPLDAYCLNEVAARAGRMHRGGPLTAATIPAMPYAFHFDAGLYAAYLRRFAVNRGVERTEGRIAGVERDSLTGDVAALTLDSGERVAGDLFLDCTGFRGLLIEGALATGYEDWRHWLPCDRAIAVPSANVGAPLPYTRAIAREAGWQWRIPLQHRTGNGHVYCSAFTSDEAAADTLLATIEGEAQGDPRQLRFVTGRRKRAWSHNVVAMGLASGFLEPLESTSIHLIQSAIARLIKLLPALPVAPALRDEYNRQTGVEIERIRDFLILHYWANGRDEPFWQACRAMDLPDTLRAKIALWQEAGTIVREQEELFTEDGWLQVLAGQGVAARAHHPLADQIDDGDLGEYMETLELLYRREAGAMPTHAAFIDRHCKAR

SEQ ID NO: 84838 - protein, 484 aa, Sphingomonas sp.
  REGION 1..484: note = tr|A0A3S0EPE8|A0A3S0EPE8_9SPHN Tryptophan 7-halogenase OS=Sphingomonas sp. HMF7854 OX=2315330; GN = HMF7854_02750 PE=4 SV=1
MSAALLSNFVAGGDFRIELVESEAIGTVGVGEATIPQINLYNQALGIDEDEFLAATQGSYKLGIEFVDWSRRGHRYMHAFGEVGRDIGVVPFHHYWHRARELGLAGELAAYSLNETAARAGRMQRGPLKTTNVVPPMPYAFHFDASLYAAYLRRLAEQRGVVRREGRIVSVERDGESGDVTEVRLESGEAIAADLFLDCSGFRGLLIEETLSTGFHDWSNWLPCDRALAVPCAAAAELTPYTRSTALEAGWQWRIPLQHRTGNGHVYCSGFTSDEAAAELLLAGLDGEALAEPRPLRFTAGMRRKAWNHNVIAVGLASGFLEPLESTSIHLVQSALSRLVKMLPRGKGDAAVAAEFNRQAAEEYESIRDFIILHYKATERDDSAFWRHCAAMPIPDSLAERISLFREAGHIFRRGEELFTVVGWLQVLVGQGVLPASHHPLADHVEPADLESYMQTFEALMRREAAQMPRHADFIARHGAAQAA

SEQ ID NO: 84839 - protein, 499 aa, Sphingopyxis sp.
  REGION 1..499: note = tr|A0A1P8WXX3|A0A1P8WXX3_9SPHN Tryptophan halogenase; OS = Sphingopyxis sp. QXT-31 OX=1357916 GN=BWQ93_10745 PE=4; SV = 1
MIDPVRTVVIVGGGTAGWMAAAAAARFLNDGQRRILLVESDAIGTVGVGEATIPPIRDFNRMLGIDEAEFLRETGATFKLGIEFVDWGALGERYLHPFGDPGHNFEGIAFHQFWLKHRDDPRIRPFTDYFITGAAVRHGGYAPQSGDPRSPLHQMAAAYHFDAALYAAYLRRRAEAGGVTRIEGRIERVSRDPASGHVAALHLTDGRAVAGDLFIDCSGFVSLLLGKEMGVGYRDWSRWLPCDRALAVPSARVDPLIPATRATAHGFGWQWRIPLQHRTGNGIVYSSAYAGEEEARATLLAHLDSEPLAEPRGLRFTAGVRERLWDGNVVALGLAGGFIEPLESTSIHLIQTGINKLFWLFPDMRFSAAERDEYNRLMIDQYEYVRDFIVLHYKATARSDTPFWRDMAAMEIPDSLAQKIELFRTKGRIRRFDHDLFGIANWAAVMLGQNIMPEGYDPLVDATDDERIVAAMERIASVFETQARAMPKHADHIARLVSR

SEQ ID NO: 84840 - protein, 498 aa, Sphingopyxis sp.
  REGION 1..498: note = tr|A0A1P8WWY3|A0A1P8WWY3_9SPHN Tryptophan halogenase; OS = Sphingopyxis sp. QXT-31 OX=1357916 GN=BWQ93_08540 PE=4; SV = 1
MTQPIQRIVIAGGGTAGWMAAAAIARTMGRAVSVTLVESEAIGTIGVGESTIPPLVNFNRLLGINEADFMRATQATFKLGILFDNWKEEGHRYFHSFGLTGKDHWSAGFQHFWLHGRTRGHEQSYDDYCMELVAAMAGKFAHLPNDGTNYAYQLDSGLYARFLRQMAEGDGTVRVEGKIGHVELDPESGDIAALILDGERRIEGDLFLDCTGFRALLIEGALHAGFDDWTHWLPCDSAIALQTPNVRPPVPYTRAMAHDAGWQWRIPLQHRTGNGLVYCSRYLGRDEALERLLGNVEGEVLTEPNFLRFTTGIRRRQWMRNCVAVGLSGGFMEPLESTSIHLIQRSVLRFIRMLPLGRPSVRDIAEYEEQQLQDNLQIRDFLILHYKATNRRDSAFWRQCADMEIPDSLAQKIELFRETGRVFRKNEELFAENSWVQVMMGQGIEPQSYHPVATKLSDDELDRLLGMIRQQVADTVAKLPDHHAYVARYCGADVSQAA

SEQ ID NO: 84841 - protein, 516 aa, Sphingopyxis sp.
  REGION 1..516: note = tr|A0A1P8X1E5|A0A1P8X1E5_9SPHN Tryptophan halogenase; OS = Sphingopyxis sp. QXT-31 OX=1357916 GN=BWQ93_17785 PE=4; SV = 1
MTAEQVYRIVILGGGTAGWMCAAGLSRLLPAADYDITLVESDEIGTVGVGEATLPHIKTFNDMLGIDEAEFMRETMGSFKLGIEFVGWKAHGARYIHPFGTFGDRWAGSDFQHAWARARLAGTDTRSLQDYSFAVAAARANGFEHPNEDPKSIRSTYAYAYHFDAGLYARFLRQWATARGIRRIEGKVVDVARDPENGDVASVTLESGAVVAGDLFVDCSGFRSLLLGQTMGVPWIDWSEWLPCDRALALPCTGVAPLTPYTRATAQKGGWTWRIPLQHRAGNGYVFSSHFCGEEEARETLLGAIDGEAMDEPRLLRFQAGRRASGWAGNVVAIGLSSGFLEPLESTSIFLIQAATTDLAALMPRRGEKVDPRLVAEFNRLFEIHYDRTRDFLVLHYTANARAGEPLWDHVRHMALPDSLAHKIALFRESAIAPDYKLGLFSRDSWLSVLEGQGVLPSATNLLTHRQPDTELQARLDDLAERIAVNAADMTPHAEFIAGYCAAAGIAAPGATASAA

SEQ ID NO: 84842 - protein, 575 aa, unidentified
  source 1..575: note = Prauserella shujinwangii
  REGION 1..575: note = tr|A0A2T0M3U8|A0A2T0M3U8_9PSEU Tryptophan halogenase; OS = Prauserella shujinwangii OX=1453103 GN=B0I33_101533; PE = 4 SV=1
MIGNNSAFDALVSSLGEPEATALRAWLRGRAGDQDGGWDPLTFLRDRERTSRPLARPVDDDPNAIRRIGVIGGGTAGYLTALALKARRPWLDVTVVESSSIPVIGVGESTVQSIVPFLHHYVGIDPVELYRRVQPTWKLGIRFDWGPDPAGFMAPFDWSANSVGMLGSLATQGNINAFTLQSLLMAADRTPVYRVDDRLVSLMPYLPFSYHLDNQPLVAFLTDLARGRGIGYVDAKIADVVLRGDEWVDHLRADDGRRLDFDFYVDCTGFRSMLLGTAMRTPFHSYADSLVNDSAVIGNVGHGGLLKPYTTASTMNAGWCWTIPTVPSDHLGYVYCSAAISDERAAEELAGRFPGVTAPEFVRFRTGRHARAWRGNVMAIGNSYAFVEPLQSSSLLMITLMVMMLTQTLPASWDDAGTRTAFNMSIAKKWDALRWFIAVHYRYNTRLDTPYWRDARANVEVSGIEPLVEAYVEGAPLQLRDAYTRGAVRAAVRTFYDLQAYDCVLAGQKLPARMMPMAEDVETWRERKRAADSLVTRALPQHEALAAYHEHPSLHKELIDGADSWTGPRQPIRLV

SEQ ID NO: 84843 - protein, 511 aa, Sphingopyxis sp.
  REGION 1..511: note = tr|A0A1P8X2I3|A0A1P8X2I3_9SPHN Tryptophan halogenase; OS = Sphingopyxis sp. QXT-31 OX=1357916 GN=BWQ93_20150 PE=4; SV = 1
MAKRSILIVGGGTAGWLTAAYLARFFDLPRNPRLAITLIASDEIGSIGVGEGAFPTIRSTLQFIGIDESQFVRSTTATFKQGIRFDDWVRTPAPGKSSHFLHPFEPPYHGDGHSLVSYWLLQDPATRPAFAEAMTIQNRVAEARRAPKRSGEGAFDGPLNYAYHFDAARLADVLSAQARALGVEHLQGTLTDVALDGASGAIDHVVTAEHGTLSADLYIDCSGFRAELIGALGAPFHSVRHQLFTDRALACKLPYVDPATPLDSYTIAAAHAGGWTWDIGLAGARGIGCVYSSAHLSDDRAAEILAAYTGGRSHDVKVRSIPFEAGYRTTPWIKNCVAVGLSGGFLEPLESTGIVMIEAAAAMIAEMFPLGGPVGAPARRFNELMSARYANIVNFLKLHYCLSRRDEPFWRDNGDPASIPDRLKELLEEWRYRPPGRFDFILDLESFAFFNYQYILYGMEYRTDLSPVREEFPDVAEAERIFARIRNFGDRAASELPAHRTLIDQINAAAA

SEQ ID NO: 84844 - protein, 501 aa, Sphingomonas adhaesiva
  REGION 1..501: note = tr|A0A2A4IA32|A0A2A4IA32_9SPHN Tryptophan 7-halogenase OS=Sphingomonas adhaesiva OX=28212; GN = COA07_05655 PE=4 SV=1
MSTDRRISRIVILGGGTAGWMTAAALSRSFGRSVAITLLESDEIGTVGVGEATIPTIHWFNDLIGLDEAEFLRETKATFKLGIEFVDWTRPGHRYFHPFGQYGAPLPGVAFHHRWLKARAQGSDVPLSGLSLAARLAAEGRFAKPVGDARSILSTLGYAYHFDAGLYARYLRRLAEAAGVVRVEGRLRDVVRDGDDGQVTALLTERGETLAGELFVDCSGFRALLIDGAMGEGLEDWSHWLPCDRAVAVPCARVAATTPYTRSTARAAGWQWRIPLQHRTGNGYVYASAHLSEDEATATLLANLDGEALAEPRTLRFTAGTRRRPWRGNVVAIGLSSGFLEPLESTSIHLIQSGIAKLLTLFPDRDMDPALADRFNQLFGRDMDGIKDFLILHYHATSGRDEPLWRHCRTMALPDTLSARVAQYRRSGRLILDSDELFREASWLAVLDGQGVIASGYNPLTDAIDADTNRAQVEQIAQVIARAAPTLPMHDDALAQLIGAP

SEQ ID NO: 84845 - protein, 502 aa, Shewanella sp.
  REGION 1..502: note = tr|A0A516G1C7|A0A516G1C7_9GAMM Tryptophan 7-halogenase OS=Shewanella sp. YLB-06 OX=2593655; GN = FM037_21315 PE=4 SV=1
MAKEAIKSITIVGGGSSGWMTAMYLQRLYNQSGGRVKIRLVESKDVGTIGVGEATVHSIRFFFAAMGLDENELLRETNATLKSGIMFRNWMKPKDGQTHEYFHPFEQQRPAGPLDNATAWIQSPKRVSYAQATSISSELISNANCPKAATSPQYQGIVPYGYHLDAILMGKYLRKKACAAGVEHIEANVEHVKTNGETITSIITDKGEFTSDIFIDCTGFKGLLIESLRENNWQSFEQELPCNKAVAIQRKPLLGQPPKPYTLATALTNGWAWEIDLSNRQGTGYVYDGNRLTKEEAEAELLEHLGDSQEILRTVHLDMKIGCRKEFWIGNCISIGLSGGFIEPLESTGLHIVNLGARLLATHLSSNAPTQPVRDSYNKTLNGIYQDLRQFIILHYCLSDRDDTEFWKQAAKTAAYAKGLPEKLELWRNKTCEFMDLAGGYGTIFNDENYRFILYGMDHTPDLSQPASGYEIQNILQRLAQQQEQAVKSTMLHSEFLKQVSR

SEQ ID NO: 84846 - protein, 491 aa, Sphingopyxis sp.
  REGION 1..491: note = tr|A0A1P8X3U7|A0A1P8X3U7_9SPHN Tryptophan halogenase; OS = Sphingopyxis sp. QXT-31 OX=1357916 GN=BWQ93_17780 PE=4; SV = 1
MSALHIALLGRDAPLWLAAAALRRALAPAGVAVTAVALPGEAGPADLHATLPAIEALHNQIGIDEAALLRTTGGAFTLGQNFTERSGAGRASFLHSYGGFGSAIDGGDFFPHWVKARRHGLGVGLDDFSLTASAAHQGRLFFPDDESERYARADYGYHLPAAAYAKSLRAIALHLGVEIVEATSIDVAHGEDGITALLLDGGPRIEAGLFVDVTREGQLLRRTPGAAFDPTPLPGDRLLVARAPRFAALPVYSEVRASADGWTALYPAMAHTHVTHIFSSAVTNDDDALAAAQAASGLPLESVAIRPLATGMAAAPWAQNVVALGEAAAAFDQLHGLPMHALQLGIVHLIAAYPGAAACDVRRAEYNRLMRSHFDRVADFQTAHFALQTYSGRYWDAARAVPRSAELEHLLAFFRARGELAPHEDESLPPDSWRALLTGHGILPEGWRPSVDRTPPDTVKAHLRKMLGTVREQVLRQPTHDAALARIMQRA

SEQ ID NO: 84847 - protein, 491 aa, Sphingopyxis sp.
  REGION 1..491: note = tr|A0A1P8WWT6|A0A1P8WWT6_9SPHN Tryptophan halogenase; OS = Sphingopyxis sp. QXT-31 OX=1357916 GN=BWQ93_08360 PE=4; SV = 1
MTAIRRIVIVGGGSAGWMTAAAFGRALSPQTHQITLVESEAIGTVGVGEATVPPIHEFNRFLRIDTADFLRATHGTIKLGIQFEGWSGVGHSYFHPFGYLGIEMAGIHFHHHWLRHLAEGGDADHEPYNLETMAARAGRFAPATRHGPVHHAVQFDAAAYARYLRAYAEAKGVTRIEGKVADVQLRSEDGHISALNLDDGRTIEGDFFIDCSGFRGLLIEGALRTGYTSWQHWLPCDSAVAMPCARTGDPMPYTVSTAREAGWQWSIPLQHRDGNGYVYSSTHLAHDEAESLLRSRLPGEPLADANRLRFVAGHRKAIWNRNCVAIGLAGGFLEPLESTSIHLIQTTIIRLLSLFPRDAIDPNVVSRFNRDALHEYATIRDFVIAHYATANRTDTPFWRDLAAAGMPDSLAERIAAFRATGNILFEPGDLFGPTNWYAVLTGQGVQPQSHHPIADTLPADELAKRLAILRTRVAEQLAELPPHADFLRSLG

SEQ ID NO: 84848 - protein, 536 aa, Luteibacter sp.
  REGION 1..536: note = tr|A0A1T4ZRJ2|A0A1T4ZRJ2_9GAMM Tryptophan halogenase; OS = Luteibacter sp. 22Crub2.1 OX=1283288; GN = SAMN05660880_00028 PE=4 SV=1
MARLKKVLVVGGGTAGWLTACYLARAVNAVDPRSVQVHLVESPDIGLLGVGEATFPSIRGTLAAIGLDERRFLVGATATYKQGIHYRHWVRPPGAPGADHFFHPFNAPSQRPGGPELLPYWLLGAAPAGMPFADAVSMQTALVDHSRAPKRVKDADYQGPMNHAFHFDAACFARVLAEHGQETLGVVRHTATVERAELDEHGAIARVVTKEEGELTADLYVDCTGLRGMLIGGAMQSPFRSRADVLFADRAVAMQVPYDAPDTPIPSYTISTAQEAGWIWDIGLQKRRGVGYVYSSRHTDDERAEAVFRKYLGEAGKGGRAMQIKFETGYRPEHWRKNCVAVGLAGGFVEPLESTGIALIELATYLLTHLLPGDTDDMESAARHYNEMMVARYDRIIDFIKMHYCLSQRRDSAFWLENADPSSIPQTLREKLEKWKTRPPHRLDFVSDLEMFMTSSWQYILYGMEFRTDLEPMRSAYPDVEVARREFGMIQQAAVRALDDLPDHRGLVEQLCAEHRPRSPATHAGHRDRIAERSRV

SEQ ID NO: 84849 - protein, 498 aa, Sphingopyxis sp.
  REGION 1..498: note = tr|A0A1P8X1D9|A0A1P8X1D9_9SPHN Tryptophan halogenase; OS = Sphingopyxis sp. QXT-31 OX=1357916 GN=BWQ93_17885 PE=4; SV = 1
MTDNPPFRIVILGGGTAGWMTACLFAKQWAGRAAITVIESPEIGIIGVGEGSTPQLKAFFDALGIAERDWMPACDATYKIGIGFEGWGGAVAPGYFHPFPAPLDVHTQSAFIRNAALRRGGVDVPAHPDAFYLAPRLAAAGQGPHPAESFPFELSYGYHFDAYKVGAFLCDHAVGLGVTHLTRKVEDVRVGSEGAVEALLLEDGEAVEGDFFVDCSGFRALIAEQALGTKFLPFADNLFNDRAVVMPTPHAEGAPLPIATGSRAMAAGWRWTIPLTTRIGNGYVYSSRYIDPEAAAIELRTALGVGDEVAARHLSMKVGRLAESWTGNCLAMGLAQGFIEPLEATALHIVIATAQEFIAAFESGGFSPKHRAVFNARIAARYEGIRDYIVAHYRMNRRADAGDYWRDAAAMETLSDDLKAMITAWFTRSDIDAVIAERGIGAYYGSISWHCLFAGYGVFPDAARMRAAAPGDGAADMAAIDDFLRRAALNFGAHRPPT

SEQ ID NO: 84850 - protein, 519 aa, unidentified
  source 1..519: note = Nitrospirillum amazonense
  REGION 1..519: note = tr|A0A560FGX5|A0A560FGX5_9PROT Tryptophan halogenase; OS = Nitrospirillum amazonense OX=28077 GN=FBZ89_106267 PE=4; SV = 1
MTVERTILIVGGGTAGWLAAAYLARYLGVREGGAIGITLLEAPDIGIVGVGEGTFPTIRGTLRFLGLNEAQFMRDTSATFKQGIRFARWVDGGEGDSFFHPFEAPFPTDGAGLVPYWLLQDGDRRPPFAQAMTFQQQVTDARRAPKRGPEGDFEAPLNYAYHFDAAKAAQALAARARELGVRHLRGTVTDVALAADGAIAHLVTREYGAIAADFYVDCSGFRAELIGRALGVAQKSVKPILFTDRALSCKVPYGAADGPLESCTLATAHAAGWTWEIGLEGARGVGCVYSSDHMSDDEAEGVLRAYVAPHLGPGVEPPAPRKTAFDAGYRETPWVKNCVAIGLAGGFLEPLESTSVVLIEVAVGMLAELFPHDGNWAAPAARFNELMTRRFENIVNFLKLHYCLSRREEPFWRDNRDPATIPAALRDLLAQWRTRPPSRFDFALDLEAFAFFNYQYILYGMGFATDLSAARAAFPQAEAAQKTFARIRAYGDHATRDLPAHRALIRRMNQISALGKVGT

SEQ ID NO: 84851 - protein, 511 aa, unidentified
  source 1..511: note = Nitrospirillum amazonense
  REGION 1..511: note = tr|A0A560FFB6|A0A560FFB6_9PROT Tryptophan halogenase; OS = Nitrospirillum amazonense OX=28077 GN=FBZ89_10713 PE=4; SV = 1
MDRPIQHIVIVGGGTAGWLTAGVIAARHKARMASGFKVTLVESPNVAIIGVGEGTWPTMRTTLEKMGVSETEFFRHCDTAFKQGGKFVGWTTGADDDAYYHPLMLPHGWSQVNLVPHWLQDGRGRTFSAAVCPQEAICEEGLAPKTIATPEYRGLANYAYHLDAGKFANFMQKHCTEKLGVRHVLADVTQVKQDEAGDITGLVTEQAGEITGDMFVDCTGFRALLIGKTLGVGFRECRDVLFCDTALAVQVPHESEDAPMASQTIATAQSSGWIWDIALPTRRGLGYVYSSDHIDEEAARAELARYAGTQAEARKIPIRSGHREMFWKNNCVAVGLAAGFLEPLEASAIMLIELSAKIIADQLPARRSVMDVVARRFNEVTHYRWGRIIDFLKLHYVLTQRTDTAFWRDNVDPASTPERLRDLLRLWKYRAPWFLDEFDRLEEVFPAASYQYVLYGMGFRTEVDPAENSADALLASRIMEENAAMAQKMRANLPKNRDLVRKIRDHGMQSI

SEQ ID NO: 84852 - protein, 504 aa, unidentified
  source 1..504: note = Sphingomonas taxi
  REGION 1..504: note = tr|A0A097EGC1|A0A097EGC1_9SPHN Tryptophan halogenase; OS = Sphingomonas taxi OX=1549858 GN=MC45_09815 PE=4 SV=1
MRGERPVRAEQRIRVVIVGGGTAGWMTAAALATLAPGAATVHLVESQEIGIVGVGEATLPHLRAFVARLGIDEAAFMAATHATFKLGIEFRDFGAIGDSYIHPFGSYGRPLDGVGFHHYWLRRHHAGATAPIGDYSTAVVAAAAQRFTRPGSDPHDLASAFGYAYQFDATRFAPFLRAHAEARGALRTEGLVTGVDRDADSGDVVAITLADGQRIEGDLFIDCSGFRALLIGGAMDEAWEDWSHWLPCDRAVAAPCASPAGGIEPYTRATAMAAGWRWRIPLTHRIGNGYVYSSAHLSEGAATDALVDALESPPLAEPRHLRFRAGRRRRSWVGNVLSIGLASGFLEPLESTSIYLVQMAITQLVEHFPAARVTDADRDGFNALVDAEYDRLRDFLILHYHATTRDDSPFWDHVRTMTIPDSLAEKMALWRQTAQVSRYSHGLFLEPSWVAVYLGQNVVPDGWDPRADLPDGAALDRALAALRGGIAAAVATMPDHAAYLQAAA

SEQ ID NO: 84853 - protein, 511 aa, unidentified
  source 1..511: note = Sphingomonas naasensis
  REGION 1..511: note = tr|A0A4S1WJU8|A0A4S1WJU8_9SPHN Tryptophan 7-halogenase OS=Sphingomonas naasensis OX=1344951; GN = E5A74_08935 PE=4 SV=1
MVNGGSAADAIERVVIVGGGTAGWMAAAALSAHLAGAGVAITLIESSDIGTVGVGEATIPTIRRFYAALGMSDAEVMQACQATAKLGIRFVDWLRPGHSFVHPFGRFGQDLKGLDFHHYWLKARAAGEPAPLDDYSLGALLAREGHATLPASDPGSQLGIFDWALHFDAALFAQHMRRFAEKMGVTRIDARIVEVRQRPEDGFLDSLVLDSGASIAGDLFVDCSGFRSLLLGETLGIDYADWSHWLLCDGAFAVQSERAGPPPACTTVTARSAGWQWRIPLRTREGNGLVFSSRFQSDDDARKELLAAMPGKPVMEPRRLRFTPGRRAVAWAKNCVGLGLASGFLEPLESTSIALIETGIERLKQLFPDKSFDPAVIAEYNEQSAEEIERVRDFLILHYKLNGRSGAFWQACRAMDVPDSLNAKLALWRARGAFVRYRWEMFSPASWLAIYAGFEDLPTRLDPAVAGIDSDQLARSLAAMRRALRETVADTPTHQEFLEIMDGAAAQGRAA

SEQ ID NO: 84854 - protein, 513 aa, unidentified
  source 1..513: note = Nitrospirillum amazonense
  REGION 1..513: note = tr|A0A560IRH6|A0A560IRH6_9PROT Tryptophan halogenase; OS = Nitrospirillum amazonense OX=28077 GN=FBZ92_10787 PE=4; SV = 1
MAEAMRNEDGRGGRKIVIVGGGTAGWMAAAVLARVLKGRYGTIELVESAEIGTVGVGEATIPPIQFLNHLLGIDGVDFVRKTQATFKLGIEFVDWTRLNHRYFHPFGPHGHTIDAVSFHHYWLRQRAKGDTSDIGDYSPSTVAARMGKFQPPAPDARPGGPVIAYAYHFDAGLYAQYLRGIAERNGVKRTEGKIVQVTRRDPDGFIDSLVLENGTRVAGDLFVDCSGFRGLLIGETLKAPYEDWSHWLPCDRAVAVPCEGVAAITPYTRSTARPAGWQWRIPLQHRIGNGHVYSSRFISDDEATATLLANLDGRPLADPRPLRFTTGRRRNSWTKNCISLGLASGFMEPLESTSIHLVQSGLFRMVSLLPRGGFEQATVDEYNRLTNIEYEQIRDFLILHYHAVERDDSPLWNYCRTMEIPDSLRHKIDLFRARGRIARFDEQLFAEPSWVAVFLGQGIQPHSYDPVADVMPEAEVTARLGRVREAIRRMADALPTHAEFINRHCRADRPVAA

SEQ ID NO: 84855 - protein, 499 aa, Sphingomonas adhaesiva
  REGION 1..499: note = tr|A0A2A4IAT8|A0A2A4IAT8_9SPHN Tryptophan 7-halogenase OS=Sphingomonas adhaesiva OX=28212; GN = COA07_04990 PE=4 SV=1
MTALPVREVVIVGGGTAGWMAAAALSRFLPRARTRIRLVESEEIGTVGVGEATIPTIQTFNRMLGIDEDAFVAATGGTFKLGIQFEHWRAVGDRYFHPFGQFGQDIDGLSFHQLFLKLAGQRRCADLWHYAPCAVAASAGRFARVAEGEAPFPLPYAFHFDAGRYARFLRDYAEARGVERIEGRVADVAQHADTGFVQAVRLADGRRVDGELFVDCSGFRGLLIEGALASGYEDWRHWLPCDRAVAVPTARDGAPVPYTRAIAQGAGWQWRIPLQHRTGNGYVYSSAHVDDDAAQAALLDAVEGEVLAEPRRLSFVTGRRRRFWNRNVVALGLAGGFLEPLESTSIHLIQTGIAKLLALFPDAGFSPVEAEEYDRLMRGAYDGVRDFIILHYHATQRDDTPFWRHVRTMEVPDSLRRKIELFRVHGRFFRYDDELFSLASWTAVLLGQGIVPAAYDPVVDVLDEDRLAGTLERLRHAILAQTRAMPSHADFIARHCAAR

SEQ ID NO: 84856 - protein, 551 aa, unidentified
  source 1..551: note = Nitrospirillum amazonense
  REGION 1..551: note = tr|A0A560K2K2|A0A560K2K2_9PROT Tryptophan halogenase; OS = Nitrospirillum amazonense OX=28077 GN=FBZ87_103293 PE=4; SV = 1
MADTNAPDGTRANGAPVRNVLIVGGGTAGWLAAAYLARTLSIGQPGGARITLVESADIGILGVGEGTFPNIQRTLRRIGIDESVFMRESEATFKQGIRFDHWQHAPGSGERDHYFHPFQSAISRQDLDLVPYWLLGAAGEGVPLDTALTMQKRVADAALAPKRSGDADYAAPLNYAYHFDAVKFARLLRVVATDLGVRHVIDTVDAVPLDEAGAIAGVVTRENGTLTADLYIDCTGFRAQLIGQALKSPYQSCRKWLFCDRAVALQVPYDQPDAPIPSYTISTAHGAGWTWDIGLETRRGIGHVYSSDHTDDARAEQVLRDYIGPAAAGKTARTFRFEAGYRPEPWVRNCVAIGLSSGFFEPLESTGIVLIEVASVLLTSLFPWAGNMDTAARQFNRIMRQRYERALDFLKLHYCLTRRTDTAFWRDNADAATAPDTLHDLLDRWRHRPPEGLDFDLNLDTFSEASWQFVLYGMGYHTDLSAQAGAFRHMDEARQQFAAIRASTEQALGALPRHRDLITQIYRHGLRPRTPFGGPPSGRASLSSGMAGLSR

SEQ ID NO: 84857 - protein, 519 aa, Novosphingobium sp.
  REGION 1..519: note = tr|A0A1E4MKU1|A0A1E4MKU1_9SPHN Tryptophan halogenase; OS = Novosphingobium sp. SCN 66-18 OX=1660121 GN=ABT11_00410; PE = 4 SV=1
MHAVRDVVIVGGGTAGWLTAAIIAAKHRPRMGHDFSVTLVESPNVPIIGVGEGTWPTLRSTLKSVGISETDFFRECDAAFKQGALFAKWTTGADDDAYYHPLVLPQRFGQLNLAPHWLAGTMVEDGDADETFCDAVCPQGRICDENLAPKTMTDAEFEGQANYAYHLDAGKFAPFMQRHCTEKLGVRHVLADMRQVLQDESGDIRAIVTEQAGEIAGDLFVDCTGMRSLLLGETMGVGFKDCNDVLFCDTALAVQVPYPDPDAPIATHTISTAQSAGWIWDIGLPTRRGVGHVYSSRHISREQAEAELRAYIGPAADGLAVRKIDIRSGHRELFWKGNCVAVGLAAGFLEPLEASAIVLIELSAKMIADQMPPAREVMDIVARRYNEKTLYRWGRIIDFLKLHYVLSQRRDTAFWRDNMDPATIPERLRELLALWRWQPPYMHEEFDRVDEVFPSASYQYVLYGMGFRSEVSARALEPEVRDARRARGQNADVTARMLTALPRHRDLINRIVEYGLQPV

SEQ ID NO: 84858 - protein, 533 aa, unidentified
  source 1..533: note = Nitrospirillum amazonense
  REGION 1..533: note = tr|A0A560HH35|A0A560HH35_9PROT Tryptophan halogenase; OS = Nitrospirillum amazonense OX=28077 GN=FBZ90_101110 PE=4; SV = 1
MREAMAEAPSGKSENHAIRRVVVVGGGSAGWIAAARIAARNADPEGGPELDRVAVVLVESPTEPSIGVGEGTWPTMRNTLAKIRLSETDFIRSADAVFKQGARFVGWTWGGDDAYYHPLNPPVGAGEVNLSPHWQERAAAGPAGEDFAHSVDFQGALCDAGLAPKAITHPEYAGLANYAYHLDAGKFATLLRDHAVSRLGVRHVVGDVVAADQTAEGDIQALRLADGTVIEGDLFVDCTGFKGVLIDRVYGVPLKSCRQYLFADKALALQIPYSAEDAPIACHTVATAQTAGWIWDIGLWSRRGVGYVYSSAHTSADQAEATLRAYAGAGADALSVRSIDINAGHRETFWIRNCVAVGLSAGFIEPLEASALMLIELSMDTIADRLPATRRAMDHIARQFNADFHHHWARVIEFLKLHYILTRRQEPFWRDNLDPATVPGELAERLELWRHHPPCAADFPRHREVFSWPSYQYVLHGMGFPTRYAGHPTLGPERKAAARLFARAAAQRSDAMTRLPPHRSLIRAIRQHGLQRL

SEQ ID NO: 84859 - protein, 519 aa, unidentified
  source 1..519: note = Nitrospirillum amazonense
  REGION 1..519: note = tr|A0A560FS40|A0A560FS40_9PROT Tryptophan halogenase; OS = Nitrospirillum amazonense OX=28077 GN=FBZ89_10169 PE=4; SV = 1
MTFAPLRDIVIVGGGTAGWMTAALFSHILGPGDHRIHLVESEEIGTVGVGEATIPPIAIFNRALGLDENDFLRQTQGTIKLAIEFVDWLRPGHRYLHSFGAFSRSLGLGHFQDFWLRAHRLGMTDDWESYILNSVAARRGRFLRPDPRRQSPLEPLAHAFHIDAGLYARYLRRFAEQRGVRRTEGKIVRTVLRAHDGFVDAVEMADGTRVAGDLFIDCSGFRGLLIEQALNTGFEDWTHWLPCDRAWAVPSAHDGSAAALTPYTRSTARPAGWQWRIPLQHRTGNGYVYSSRHVSDDEAAATFMANLDGEALAEPRQLRFTAGRRRRFWNRNVVAVGLAGGFMEPLESTSIHLVQSALSRLITLLPNREFDPAVAEEFNRASAIEYERIRDFIILHYAATERADSPFWRECRDRPVPEELARRMRIFRALGRVARDHDELFSEVSWLHVFLGQGVWPRDHHPLADQLSEEDLRRFLADIKSAVAREVDAMPTHADFVARHCSAPPWPRHHQADSLTRTA

SEQ ID NO: 84860 - protein, 522 aa, unidentified
  source 1..522: note = Nitrospirillum amazonense
  REGION 1..522: note = tr|A0A560GUG1|A0A560GUG1_9PROT Glycine/D-amino acid oxidase-like deaminating enzyme OS=Nitrospirillum amazonense OX=28077 GN=FBZ90_114164 PE=4 SV=1
MTRTRTILIVGGGTAGWLAAAYLARYLGVREDGPIRITLLESQDIGIVGVGEGTFPTIRGTLKFLGIDETRFMRETAATFKQGIRFDRWVTGAEDDSFFHPFEAPFPMEGAGLVPYWLLQERDARPPFAQAMTFQPRVAEARRAPKRGPEGDFEAPLNYAYHFDAAKAAAALARCARDLGVLHLQGTVTDVMLGPDGAIDHVLTREQGPLSADFYLDCSGFRAELIGRALGVPQKPVKPILATDRALSCKVPHGMPDAPLESVTLATAHAAGWTWDIGLEGGRGIGCVYSSDHMSDDAAEAALRAYLAPMLGRDAAPPPLRRIAFDPGYRETPWVKNCVAIGLSGGFLEPLESTSVVLVEVAVGMLAELFPHDGDWQAPAARFNELMTRRFENIVAFLKLHYCLSRREEPFWRDNRDPATIPPGLRDLLARWRTRPPSRFDFALDLEAFAYFNYQYILYGMGFETDLSAARGAYPDVDAARKTFARIQAYGDHAIRDLPAHRALIRRLNQTSAPEDRVALRR

SEQ ID NO: 84861 - protein, 364 aa, unidentified
  source 1..364: note = Methylovulum psychrotolerans
  REGION 1..364: note = tr|A0A2S5CI05|A0A2S5CI05_9GAMM Tryptophan halogenase; OS = Methylovulum psychrotolerans OX=1704499; GN = AADEFJLK_03848 PE=4 SV=1
MTQPTLFDVFIVGAGPAGCAVALSLAQTVPGLRVAIADPGRSTPFRIGESVPPLIKPFLDQLGVGAAFLQDNHCPSFRTVSAWGSPELVSNEFFLNVHNTGWRLDRARFDQTLLNAARQQGAQRLPAQLHTLSHHAPYWHIGCGDAGDYRATYLIDASGRTALPSRLAGLKPINHDRLVASAVFFGQTDPDLPNADAVLTEACPDGWWYTAALPEGRRVVALMTDADLTRRLKAKQLAAWQQQLAQTRHVQPLIGNARPLAPPQLWPANSRYLHGPARPDLLAVGDALSCFDPLSSQGIIKALRSGLFAAYALTDYIRRQDSSGFTRYQALMQREFAAYQTTLSDYHRQEQRWPDAPFWQRRLG

SEQ ID NO: 84862 - protein, 506 aa, Porphyrobacter neustonensis
  REGION 1..506: note = tr|A0A192D7J8|A0A192D7J8_9SPHN Tryptophan halogenase; OS = Porphyrobacter neustonensis OX=1112 GN=A9D12_01490 PE=4; SV = 1
MDRPDVTRLVIVGGGTAGWITAAAFAKLLGKRLKIELVESEAIGTVGVGEATIPQILRLNAILGLDENAFLSATSGTFKLGIEFVDWGAKGSRYLHTFGETGMSLGRVPFHHYWRRAAMIGQAGSLWDYSLHQMAADQARFGKMDRVGNTAMTGLAYAYHFDASRYALFLRSHAEANGVTRTEGIVESVARDGESGDITAITLKGGKTVAGDFFIDCTGFRSLLLGEALGVGYQDWSKWLPCDRALAVPSERLPTLVPYTRATAKDAGWQWRIPLQHRTGNGHVYSSGFKSDEAAADTLMAGLDTRPLGDPRPIRFTTGRREAFWAHNCAAIGLSSGFLEPLESTSIHLIQSHVSRLVQLFPRHGDPASLRAEYNARCAAEVAQIRDFLILHYHQTAREDTEFWRYCKHMDVPDSLTHKLALFAASGRVGRDVNDLFRDASWVQVMLGQGVMPADYDAMADQLAPAQLTEFLANVKTITARAVATLPTHADYLARHCPVDAALLAA

SEQ ID NO: 84863 - protein, 533 aa, unidentified
  source 1..533: note = Gammaproteobacteria bacterium
  REGION 1..533: note = tr|A0A2N1YAM6|A0A2N1YAM6_9GAMM Tryptophan halogenase; OS = Gammaproteobacteria bacterium HGW-Gammaproteobacteria-15 OX=2013797 GN=CVV11_18375 PE=4; SV = 1
MQSTDSLAPDNLATANAQSFAVGQVNIVVVGGGSAGWLTAALLAAEHQTDPLITITLIESASVPTIGVGEGTWPSMRATLARIGISETEFLLSCDASFKQGSVFRQWRSADPQDCYYHPFTAPVAANDLDIAEHWFSHHQQVEFAPAVSSQPAVIAAGLAPKRIATPEYAFLQNYGYHLDAGKFVALLSQHAKRLGVKHVVDDVVAVHSHIDGRIAALQTGQQGSLAGDLFVDCSGLQSLIIGRHYQTPLVSVQHCLLNDSALAVQVAYDDEHTPLASATLATAQAQGWVWDIGLPTRRGVGFVHHSGHTNEAQALATLAQYLRLSEQEFSARYQPRLIRFTPGYREQFWRHNCVAVGMAAGFIEPLEASALVMVELSAKFISEQLPRNLSQLAIVAERFNQIFSYRWQQIVEFLKLHYVLSARDDSDYWLAQRAEASIPSSLQEKLLMWHQFVPSRYDLPMAEELFPAASYQYILYGMRHLPRSGRPIKPGSDLRARQAFAEVQQKTQQLRAGLVSNRELLNQIKAHGLQKI

SEQ ID NO: 84864 - protein, 599 aa, Microcystis aeruginosa
  REGION 1..599: note = tr|A0A3E0M5P7|A0A3E0M5P7_MICAE Tryptophan halogenase; OS = Microcystis aeruginosa TA09 OX=2060472 GN=DWQ58_08440; PE = 4 SV=1
MVTTDTKVYDVVIMGAGFAGVCQARHLLLNVPNIKIALIDPRPEERTDKDLKIGESMVEIATLFVCKELGLYEYMIENHPPKYALNFHWAKDADKTDTIDDYYHIWANRQFPLGTFQMNRAKFERDLLKMNKKMGASFYQGRVVDVDITPTDEMHTVKVKMIDGNYHELRAKHLVDAAGRKFIIGHKTDNVIVGADNLFGVDTGSAWVRVKNIDRTIFHDGYDPYGATCSHYYATNHWFGHGHWLWMIPTEKDSQEISIGIAQHRSVIANGQINTQEKFYAFLKANHNLLYRLVTSGENVDFHYLPRVSHTSKTMFSQDNWYVVGDAACIFDPFYSLGTSMIAFAIESITEIIRSQLAGEADTEEKRAAYNDFNLTYTRLNNHLIEHHDKQLGHASIMSWRIYAEYMWWFGIQIPLYVGKWHLDTGFISRYVPKVQADIKGYWHHLYEQFNQLVEQNKNIGFMDAHRTDQLIWGYHTLKHFDDFIENTKFEPRRCNVFAGIKATSFYTAVWYAKFLWKGFGFSAFLNRKNLSYLFGHLNGALQSAITEMVYKYLTCKLPDNSQIEQTRQEFTNYRYRPQLNTWLTETATNSPKKVPVNV

SEQ ID NO: 84865 - protein, 413 aa, unidentified
  source 1..413: note = Methylovulum psychrotolerans
  REGION 1..413: note = tr|A0A2S5CGW1|A0A2S5CGW1_9GAMM Tryptophan halogenase; OS = Methylovulum psychrotolerans OX=1704499; GN = AADEFJLK_04177 PE=4 SV=1
MPSIKNVAIIGGGPASSALAIHLCRQGCKVAIFAMPERASILVGESLVPMIVPLLQELDVEAEVASYSQYKPGACFTYNADEVFEFRFADTPSDLPSYSYNVPRDRFNATLLAAAQRAGAKLIAHHVQLSRVADTDWLTFDAQSLAAAAGCWDAAEPDLIVDAAGRANLIGRLLNIPMQKGLRQDVALFAHVDKTELVDPGYVHNDRMDQGWCWRIPLPGRVSFGFVVPEAYAFQHGETPEEQYEQLLKTDTVLRRLAPEAKRVTEVLCFRNYQSISDRICGENWVMLGDAGGFVDPVFSSGMLIALDSAKKLSAILLANKPLADYETVTRRHLAAWFEIVSYYYDGRLMGSIKAGQTMPVNRFTRWLLAWVSARVSRIFSGAAASNPFCLNLLRFLVKYTLIGLSPERYKIN

SEQ ID NO: 84866 - protein, 511 aa, Leptothrix cholodnii
  REGION 1..511: note = tr|B1Y1M4|B1Y1M4_LEPCP Tryptophan halogenase; OS = Leptothrix cholodnii (strain ATCC 51168 / LMG 8142 / SP-6) OX=395495 GN=Lcho_3228 PE=4 SV=1
MSNPERHLRDIVIIGGGSAGWMAAAALSSALSQRCRVTLVESDEIGTVGVGEATIPPIRIFNQTLGLDEAEFLKRTQGTFKLGIEFVDWARLGQRYFHPFGPHGVQFDLSPQHQYWLRSRGREGMPGIDEHSMAWVMASRGRFDRPSSDPRSVLSTFDYAYHFDATLYARYLREVSEARGVRRIEGQVVGVALRPTDGFVASVRLADGRDIAGELFIDCSGFRGLLIEQTLHTGYEDWSHWLPCDRAMAVPCSHPESPEGGELTPYTRSTARAAGWQWRIPLQHRIGNGHVYSSQFLDDDEAAAVLLDNLDGAALAAPRALRFTTGRRKQFWNRNVVALGLASGFMEPLESTSLHLVQSGISRLLALFPDRDFDPLTAAEYNRIGVQEFERIRDFLILHYKLTERDDAPLWRYCAAMPIPDTLQYKIEHFRRYGRLVSEGMELFGNASWLSVHIGQLNWPQRHDPLVDLRDVDGDAVLARLRQAMVSAAHGLPGHADFIRRHCAARAACPA

SEQ ID NO: 84867 - protein, 512 aa, unidentified
  source 1..512: note = Nitrospirillum amazonense
  REGION 1..512: note = tr|A0A560H423|A0A560H423_9PROT Tryptophan halogenase; OS = Nitrospirillum amazonense OX=28077 GN=FBZ90_10822 PE=4; SV = 1
MATSHASNDTATNAPLRRIVIVGGGTAGWMAAASLARFLRNLKCDIQLVESEQIGTIGVGEATIPPIMNFIRVLGIDEDDLIRQTNATFKLGIRFQDWTRVGHSYFHPFGRTGFEMEGIGFPAYWMRQRLAGDAAPLEEYSLQAMAAAHNRFMRPVQAPGSPLEGITYALHFDAALFARYLRGYSEARGVTRVEGRVVRVDLRPEDGFIEALRLEDGRRIDGDFFIDCSGFRGLLIEEALQAGYENWQRFLPCDSAVAVPSERAGPPPSYTLAAARSAGWQWRIPLQHREGNGVVYARDFLSDEAARETLLSNLAGKPLADPRVLRFVTGRRRESWKRNCLSLGLASGFLEPLESTSIHMVHRGLALFIQMLPDRHCEPADIARYNRMLAFEYERIRDFLVLHYATGQRRDSDFWRHCAGIEWPDSLRAKIELFQGYGRIQREDTELFPEQSWLYVFTGQDIRPRRPDPMTDLLDPDKIRGGLANIHDVIGRVVQTMPHHQAFIDRHCAAAG

SEQ ID NO: 84868 - protein, 519 aa, unidentified
  source 1..519: note = Nitrospirillum amazonense
  REGION 1..519: note = tr|A0A560I5U4|A0A560I5U4_9PROT Glycine/D-amino acid oxidase-like deaminating enzyme OS=Nitrospirillum amazonense OX=28077 GN=FBZ92_11569 PE=4 SV=1
MTVERTILIVGGGTAGWLAAAYLARYLGVREGGPIGITLLEAPDIGIVGVGEGTFPTIRGTLRFLGLNEAQFMRDTSATFKQGIRFARWVDGGEDDSFFHPFEAPFPTDGAGLVPYWLLQDGDRRPPFAQAMTFQQQVTDARRAPKRGPEGDFEAPLNYAYHFDAAKAAQALAARARELGVRHLRGTVTDVALAADGAIAHLVTREYGAIAADFYVDCSGFRAELIGRALGVPQKSVKSILFTDRALSCKVPYEAADTPLESCTVATAHAAGWTWEIGLEGARGVGCVYSSDHMSDDEAEEVLRAYVAPHLGPGIEPPAPRKTAFDAGYRETPWVKNCVAIGLAGGFLEPLESTSVVLIEVAVGMLAELFPHGGNWDAPAARFNELMTRRFENIVNFLKLHYCLSKREEPFWRDNRDPATIPPALRDLLAQWRTRPPSRFDFALDLEAFAFFNYQYILYGMGFETDLSAARAAFPQAEAAQKTFARIRAYGDHATKDLPAHRALIRRMSQISALGKVGT

SEQ ID NO: 84869 - protein, 498 aa, Cellvibrio sp.
  REGION 1..498: note = tr|I3I8P1|I3I8P1_9GAMM Tryptophan halogenase; OS = Cellvibrio sp. BR OX=1134474 GN=O59_002756 PE=4 SV=1
MGGGTAGWLCANHLGKRFSASTEFSPQITLIDSNEIPPIGVGEGTVPAIRQSLKYLGISETELIRHCDATFKQSVKFIGWNQQSAPNYYHHVFDFPELRSPDQIYSWLASARPEIPFTDIVSIQGHLCDVGLGPKLITQPEYAGVANYAYHFDAAKFSQLLMKNATEKYAVKHLKADVEQVKITEMGDIESLVTKQLGQLRADLYIDCSGFSSLLLGKSLGVPFVDKSGVLFVDTALAYQTPYESAEAPIPCSTLATAKKAGWIWDIGLSSRRGAGYVYSSSHTTDSAAEQDFARYLGLQENDVNFRKIPMRVGYREKFWQKNCVAIGLSQGFVEPLEATGLLMFDATAKMLAELIPSSSSTFPVVAKQFNKIVRAAWDNVVDFIKLHYCISDRTDSDFWNDNRELRGVPDSLQEKLESWRWRTPNIYDFPNKLGIFHWENYLYVLYGMDFKTSSVHRESENPDLTGQCSRRFTELNLKLDKHRDLINKIKQYGLKKI

SEQ ID NO: 84870 - protein, 505 aa, Rhodanobacter sp.
  REGION 1..505: note = tr|A0A1V3Q8X4|A0A1V3Q8X4_9GAMM Tryptophan halogenase; OS = Rhodanobacter sp. B05 OX=1945859 GN=B0E47_02655 PE=4; SV = 1
MTDHRIKNIVIVGGGTAGWMAAAALSKSLGRECSIRLIESEEIGTVGVGEATVPHLSTFNQLLGIDEADFVRSTMGTFKLGVRFVDWSRIGHSYVHGFGTRIGLDFGSLPFHQYWLKAFKAGHAKDIGAYSLNTLAAPLGKFMVSAVDAPANTPLANIPYAYHFDAGLYGRYLRRLAEAQGVRRTEGKIKETVLRPLDGFVDAVVLESGERIGGELFIDCSGFRGLLIEQALKTGYEDWTHWLQNDRAVAVGCERVGPPAPYTRATAQPSGWQWRIMLQNRTGNGHVYSSQYISDDEATATLLRNIDGKPLGDPRLLRFTSGTRKKFWNKNVVALGLASGFLEPIESTSIYLVQSAIARLLALFPQQDFSDVLIDRYNAQSRFELERVRDFLILHYYATERDDSPYWNYCRNMDIPEPLRDTIALFRKSGAFFRNGEEFFGPVSWVQAMLGQGIMPENHHFAVDQMSPKDLHEFVAHVEQVIASCVDAMPPHQAFIDRYCKAPGV

SEQ ID NO: 84871 - protein, 478 aa, Cellvibrio sp.
  REGION 1..478: note = tr|I3I8A4|I3I8A4_9GAMM Tryptophan halogenase; OS = Cellvibrio sp. BR OX=1134474 GN=O59_003370 PE=4 SV=1
MNTLLDSDISGAYKDPLNSTPSKRQNLVDKPLTNIPTLTKNVQKHTVVIIGGGPAGSVAATRLAQTGVDVLVLEREQFPRFHIGESLLPNGNRILQAIGVWDKIAAAGFIEKRGAQFTLADRSRTVRNVFAQGWVKGLEMTYQVERARFDEILLRHAESCGAQVWEQCPVTKVTRTESGWQLEASRAGQPQVINAEWVIDASGRHCVMGRAMKLAKAALPYPGRMAVFNHFEHMQRDSGEPAGDVIVLRLEQAWFWAIPISPTVTSVGVVLQKNGGREKDESWEQLFWRKVKESPFLSDALAQAKPLGEYRIESDYSFSHETFGAERCLLVGDAASFIDPVFSSGVYLALESGLLAADQIAAQLKVKLPLLAAHREARLYTRYTKTLKSQIGTMRQLIDAYYDNSACEVFMSPRPTLSLPQAINSVLAGSLKPGFAVRWRLWLFQQICKLQKKRPLVPPIEWRSPGDSAATRSAESPH

SEQ ID NO: 84872 - protein, 502 aa, Cellvibrio sp.
  REGION 1..502: note = tr|I3I5T8|I3I5T8_9GAMM Tryptophan halogenase; OS = Cellvibrio sp. BR OX=1134474 GN=O59_003821 PE=4 SV=1
MNSIKKIVILGGGVSGWIAASMLAAQVRRDLCEIELIESEDIGSVGVGESTIPPVVRLITSLGIDEEDFIRETQACYKLGIKFVDWRSKNQSYFHPYGALGQRIGTQDFYQCWLKATMAGGDYPLQDFSPCSVMAAQGRFFLPAQAMNTPIGGAGYAIHLDAKLVAAYLRRYAEARGVVRSEGNYVAVERRDNGFISALVLADGRKIEGDFFVDCSGFRALLIDGAMAAGFEDWAQYLPCDRAIVVKTGAAGSRMPYTTATARKAGWSWRIPLRNATGHGYVYSSRFCSDTEAKSTLLGNLDAPRINDPRLISFKAGRRLEFWKNNCLALGLAGGFVEPLESTAIHLIARGMDYFLRFFPDLECEPSLRREYNRRMAADYQEVRDFIVLHYCTSERSDSDFWRWCQTMPLPDSLRERIELFKGHGIVREERDELFRSASWQSVFEGMGIRPAKYSPRVDNIELAQINENLKLARSAILNMVKTLPTHDDYLAGRFGVPVVDQ

SEQ ID NO: 84873 - protein, 526 aa, Dyella sp.
  REGION 1..526: note = tr|A0A2N7QT99|A0A2N7QT99_9GAMM Flavin-dependent tryptophan halogenase PrnA OS=Dyella sp. AD56 OX=1528744; GN = prnA PE=4 SV=1
MARLKKVLIVGGGTAGWLAACYLAKAVNAVDPQSVQVHLVESPDIGLLGVGEATFPSIRGTLAAIGLDERRFLVGATATYKQGIHYRHWVRPPGAPGADHFFHPFNAPSQRPGGPELLPYWLLGAAPEGMPFADAVSMQTALVDRSRAPKRFNDPDYQGPMNHAFHFDAACFARLLAEHGQETLGVKRHVATVERTELDEHGAIARVVTKELGELTADLYVDCTGLRGMLIGNVMQSPFRGRADVLFADRAVAMQVPYEKADTPIPSYTISTAQEAGWIWDIGLQKRRGVGYVYSSRHTSDERAEEVFRGYLGAAAEGLKAMHIKFETGYRPEHWRKNCVAVGLAGGFVEPLESTGIALIELATYLLTHLLPNDTDEMERAARHFNEMMVARYDRIIDFIKMHYCLSQRRDSSFWIDNAEATSIPLTLQDKLAQWKHRPPHRLDFVSDLEMFLVSSWQYVLYGMEFKTDFSAMRSAYPRVDEARQEFRNIQLAASQALHDLPDHRSLVERMCREYRERAGMDSALA

SEQ ID NO: 84874 - protein, 497 aa, Sphingomonas sp.
  REGION 1..497: note = tr|A0A0Q4K1H8|A0A0Q4K1H8_9SPHN Tryptophan halogenase; OS = Sphingomonas sp. Leaf28 OX=1735695 GN=ASE79_05050 PE=4; SV = 1
MAEQRVKKVVIAGGGTAGWLAAAALSRQLGQLLDITLVESEEIGTIGVGEATIPTMRSFHAILGLDEREFMRATQATFKLGISFENWARDGDRYIHSFGDLGKSTWMGEFHHFWLAAKAAGDPSEIGDYCLELQAAKAERFALPSEGEIHYAYHLDAGLYARFLRARSEANGLKRIEGRIASVDRDGETGFIRALVLDSGARVEGDLFIDCTGFRGLLIEGTYAAGYEDWSHWLPTNSALAVQSAATGPAHPYTRAIAHDAGWRWRIPLQHRVGNGLVYASEHLSDDEAHARLLGAIDGAPLTEPRLIRFRTGRRRQVWMGNCVALSLASGFVEPLESTSIHLVMTGVTRLMQAFPFGGIAAAVVTRFNDQAQAELERVRDFIILHYHLNQRPEPFWAARRDMPIPDTLVERIALFAEAAQAYQGGEDLFRVASWVQVMLGQRLMPRDHHRLGTIMGGPQLTGVLAKMRSDITDVVAAMPTHQQFLDRHLLRPPRAA

SEQ ID NO: 84875 - protein, 506 aa, Xanthomonas hortorum
  REGION 1..506: note = tr|A0A248YC62|A0A248YC62_9XANT Tryptophan halogenase; OS = Xanthomonas hortorum OX=56454 GN=XJ27_14990 PE=4 SV=1
MIPAPLRNIVIVGGGTAGWMAAAAFARVLGPGFNVQLIESEQLGTVGVGEATVPHIKAFNNLLGIDEAEFVRQTQGSFKLGIEFVDWQRPGTSYIHGFGTQIGHPLGLLPFHQYWIKQHLRGKAQPLGAYTLNTVAAVRGKFMTSAGDVPANSPLANIAYAYHFDASHYARFLRSYSEQRGVTRIEGLVEQVQLHADTGHVQSLQLASGQVVSGDLFIDCSGFRGLLIEEALHTGYHDFTHWLPCDRALAVPCENAGPPTPYTRSTARAAGWQWRIPLQHRTGNGYVYSSAHISDDEAAATLLANLDGKALADPRPLRFTTGRRKQFWNRNVVALGLASGFLEPLESTSIHLIQAGISRLLELFPREGISPVLVQRYNDRLAFEFDRIRDFLVLHYHATERDDSAFWRHCRTMQITPELQFTLDLFRDSGRFYRNAEEMFAEISWVQVMVGQGVLPQGYHPLVDQVPDHDAERFLASIAQTIGHCVDAMPTHQQFIDRYCKAAAPR

SEQ ID NO: 84876 - protein, 505 aa, Pseudoxanthomonas sp.
  REGION 1..505: note = tr|A0A2S6B8Z4|A0A2S6B8Z4_9GAMM Tryptophan 7-halogenase OS=Pseudoxanthomonas sp. KAs_5_3 OX=2067658; GN = C0063_12635 PE=4 SV=1
MSEHAIKTVVIVGGGTAGWMTAAALSKVLGESCDIRLVESEAIGTVGVGEGTIPHIRLFNSLLQIDEADFVRKTQGTFKLGVQFNNWGRIGETYVHGFGNGIGQSVGLLPFHQFWIKAARAGKAEGIGSYVLSSQAAPQGKFMVSANDVPQTSPLANIAYAYHFDAGLYARYLRSYSESRGVKRIEGIVTRVALDAESGHVDAIELDSGETIRGDLFVDCSGFRGLLIEEALGTGYVSFKHWLPCDRALAVPCENVGPPTPYTRATAREAGWQWRIPLQHRTGNGYVYSSAHISDDEAAATLLKNLDGRALDDPRPLRFVTGRRKRFWNKNVVAIGLSSGFVEPLEATSIYSIQSGIMRLLSLFPRDGFNPTLIDRYNAQMVFDFERIRDFLILHYHATQRDDTAFWRQCRDMPIPQELDDVIALFRDSGRFYRNGEEMFAEMSWVQVMLGQGIVPQSYHPLVDQLSDEDLSGFVSGVGRVVANCVDAMPSHQAFIDRYCKAALM

SEQ ID NO: 84877 - protein, 510 aa, Alteromonas sp.
  REGION 1..510: note = tr|A0A495UMQ5|A0A495UMQ5_9ALTE Flavin-dependent dehydrogenase OS=Alteromonas sp. TK-46(2) OX=1276890; GN = CLW98_3068 PE=4 SV=1
MNHSSDTSKKQRIVIVGGGTAGWLTAAIVAAKHKVAMGECGLDITLVESSDIPTVGVGEGTWPTMRNTLKDIGLSEKEVFRRCSAAFKQGGKFVNWVNGDGDFYYHPFTVPLGYGRVEMAPYVGDIVNFANATNFQQHVCERNMAPRTLSEQEYSSAQSNYAYHLDAGAFADMLRDFSKTELGVKHIVATVESVAASSSEHVESVTLNNGMVLDADLFVDCSGFRSLLLGETLGESVVSADDVLFNNSALALHVPHEEDFEIKPYTQATAQEAGWIWDIGLSSRRGVGHVYSTDFTTDERAEEVLRQYVGDEHGDLKARTIRFNSGYKKRIWKGNCIAVGLSAGFVEPLEATALMLIEISARYIAEQMPLPTSAMPIVSQRFNKQMNYRWQRIIDFLKLHYIFNQRSEPYWVANRDEASIPDSLKEDLEIWKYRGPQIADFSAAIELFPAASYQYVLYGMGFSPDFSLQSHFYNERDLADKVIKQNQLITQQKLSSLPNHRDYIEQWLAS

SEQ ID NO: 84878 - protein, 506 aa, Xanthomonas cynarae; identical to SEQ ID NO: 84875
  REGION 1..506: note = tr|A0A2S7B226|A0A2S7B226_9XANT Tryptophan 7-halogenase OS=Xanthomonas cynarae OX=109214; GN = XcyCFBP4188_17155 PE=4 SV=1

SEQ ID NO: 84879 - protein, 506 aa, Cellvibrio sp.
  REGION 1..506: note = tr|I3IB03|I3IB03_9GAMM Tryptophan halogenase; OS = Cellvibrio sp. BR OX=1134474 GN=O59_001916 PE=4 SV=1
MVHAMNYLTKVKKVVIVGGGTAGWMAAASFAKLLGKSVAVILVESDEISTVGVGEATVPPLILLNRYLGINEQELLTFVKGTIKLGISFENWKNINDRYIHSFGHTGKDTWAASFQHFWRRGLDIGVDDPLGDYSLEYAAALHNKFAHMSNPPLTYAYHIDAGFYAKFLRRIAENAGALRIEGKVENVVLDDSGYIKNIRLASGTVVEGDFFIDCSGFRGLLIEEALHTGYEDWSHWLPCDSAIAVQTESVREPVPYTRAIAHHAGWQWQIPLQHRVGNGFVYCSQYMSDEDARTLLLEKIDGQLISEPRVIKFKTGQRLKHWNKNCVALGLASGFIEPLESTSIHLIQRGITRLIQMFPYDGIRACDMDEYNNQMKTEILTIRDFVIMHYHLTEREDSGFWRYCKNMPIPESLEHRIRLFRETGKLFVESPYKLFAESSWLQVMVGQGLVPERYHAVANEMTDAELKTFLSDIRSQVKHSVQKMPGHHDYLQYYCKAAVWGDACE

SEQ ID NO: 84880 - protein, 501 aa, unidentified
  source 1..501: note = Burkholderiales bacterium
  REGION 1..501: note = tr|A0A1F4JP97|A0A1F4JP97_9BURK Uncharacterized protein OS=Burkholderiales bacterium RIFCSPLOWO2_02_FULL_57_36 OX=1797562 GN=A3I66_10000 PE=4; SV = 1
MLNLLGAKRIVVVGGGTAGWLSALEMRHSFPLSVEVLLIESAQLGILGAGEGSIPNLDLALKRYQIDRTTFMSATQSTYKLGVCFEGWRSGGEEKYHHMFSTIREDLGLMEWQEHGFYPLSSTLLNRGMALDRFPDAAHLMQRKASQAEVAAHIQRSDKEVFAYHFDARRLATFLREKAESRGIKRVDALVQAVTVDLQGNVTTVNTDKGNFDGDFFIDASGFSRLILGKGLGIEWESFQKYLILDAALPFLLPQKDKNPSLITHSKAMNSGWMWTIPTQGRLGCGYVYSSAHISETEVLRELELHWKQEIVPVNRLRFSPGRLKKCLHSNVMAVGLASGFVEPLEATSIAQTLYQLAFFGNLMRENQRVIPERVLNIFNADVANFWDGIVDFLVMHYDTSRADTPFWMDVGKAARPDRYLELKEAFSARTPRIADLVPYQMGGVILFGVASWETVGSAMGIVSPESTVAQLALLEQSAHITLENFIERYQRSVSSNTTML

SEQ ID NO: 84881 - protein, 507 aa, unidentified
  source 1..507: note = Croceicoccus naphthovorans
  REGION 1..507: note = tr|A0A0G3XJ22|A0A0G3XJ22_9SPHN Tryptophan halogenase; OS = Croceicoccus naphthovorans OX=1348774 GN=AB433_11085; PE = 4 SV=1
MSGTVDHVVIAGGGTAGWLAACTIAARGPRDVARPLAVTLVEAPDIPTIGVGEGTWPTMRATLAAIGIAEEEFLTACDASFKQGSRFDGWRDGSAGDSYLHPFTSPVGDAPRDAVAAWTAAGGGFADAVTPQAEVCEQGLAPRQKAMPGYAGALNYGYHLDAGKLVDLLKRHALGLGVRHVAARIEGVDRAANGDIAALVLDSGEVLSGDLYIDCTGMRGLLIAGEMGAGRIDRSDVLFNDRALAAQVPTAPDSAIASVTVGTAHDAGWLWDIALPTRRGIGCVYASRFCSDDRALATLRDYVARALPGVPVPEPRLLRFESGHLDRFWIGNCLAIGLSAGFVEPLEASAIVMIELSLRALMDGFPETRAEMDIHARRFNQLFRTRWDRIVDFLKLHYVLSDRGGAYWQAHRETVPDNLADLLTLWRNHVPTSADFPMADEIFPAASWQYVLYGMGAPAPRLPTWQSAGGEVSRRARQLASALPTNRAYLDTLRNTAPVRQATGCPA

SEQ ID NO: 84882 - protein, 503 aa, Sphingobium sp.
  REGION 1..503: note = tr|A0A2G1LJP3|A0A2G1LJP3_9SPHN Tryptophan halogenase; OS = Sphingobium sp. IP1 OX=2021637 GN=CG471_26540 PE=4 SV=1
MHADFPTSDRVVKRVVVAGGGTAGWVTATALVRHLGPLIDITLIESDAIGTIGVGESTVPTFRGFHQLMKIREDRFMAEAQATVKLGIEFKNWGRVGDRYIHPFGTIGLQWSWMADFHHFWLHARAQGFGGELGEYCLEWVAGEANRMSLSSSVAPSYAYHIDAARYARFLRSLAEPAGVKRVEGKIRHVELVPESGHIAALVLESGTRIEGDLFIDCTGFRSLLLGEALGVGFEDWGQWIRTDRAVAVQSTSDGPAQPYTSAIAHEAGWRWRIPLQHRDGNGFVFASDFMSDDEAHARLLAEIEGEPIVDPWLVRFKTGTRTRAWHKNCVGLGLAGGFIEPLESTSIHLMMAAVTRLIEDFPFHGFDDALLDHFNRKSRLEFENIRDFIILHYRVTQRDDSPFWDHCRTMEIPDSLKERLALWQENGRAYQLGHELFRVDSWSSVLLGQGMHPRGYHHVAAMMPEPQLREELARMRKDIAGVVAEMPSHREFLRRYCPAELV

SEQ ID NO: 84883 - protein, 506 aa, Cellvibrio sp.
  REGION 1..506: note = tr|I3ICT0|I3ICT0_9GAMM Tryptophan halogenase; OS = Cellvibrio sp. BR OX=1134474 GN=O59_001504 PE=4 SV=1
MLKSHSKKIIVLGGGTAGWVTGAILSKKWETHGYQIVVVDTAEIPTIGVGEASIPTIYDLLNYIEISDQDLVKHCQATFKYGIQFENWSRPGERYMHGFGNMGHNLGQAEFFKIWLSTARYFKNPDLTPFIPSAVAAYSDKFSRGSKAPENTNGLLYPLSNLLYALHFDASLLARLLREKALHNGATHISKHIVKVETDENGISALIAEDGETLSADLYVDCSGMHGALNKQALKANFDNWQAYLPCDTAIAVQTTLDKTPRLYTRSIAHAAGWRWEIQLQNRTGNGIVYCSKHMDYDTAKQHLLEGVEGELLTTPRKIEFTTGRLSSPWMLNSVAIGLSAGFLEPLESTSIHLICAYARKLRDSIDNNELNAVGRDKFNQSWRAETEGVRDFLMVHYLCNQRDEDSFWQERKSGPRPESLAQLLDELSKTGWISPPEASIFGTDSWLEVLIGQKFFLNYEKFSMPADKAPHYIQFLQNVSYAIKNEVNKIPDSHQSILGTLRAEI

SEQ ID NO: 84884 - protein, 504 aa, unidentified
  source 1..504: note = Duganella sacchari
  REGION 1..504: note = tr|A0A1M7QXP5|A0A1M7QXP5_9BURK Tryptophan halogenase; OS = Duganella sacchari OX=551987 GN=SAMN05192549_108225; PE = 4 SV=1
MRDTNNRQPVRRVVICGGGTAGWMAAAGISKVLGKLLDIKLIESEEIGTVGVGEATIPTLMNFHNVLEINEQEFMAETQATFKLGISFESWRDVKQDYIHSFGTTGIDHWTAGFQHFWHKGVERGVASDYGDYCLELKASLENRFAHLPNNGMNYAYHLDASRYAKYLRRLSEPRGVQRIEGKIVSYAKHDNGDVRSVTLASGQVIEGDLFIDCTGFRALLIGDAMQEDVEDWSQWLFCDRAIAVQTSSVGDAVPLTRSMAHQAGWQWRIPLQHRVGNGIVYSSRHLDEETAHKQLLANVEGKTLIEPRVIKFKPCQRRNTWKGNVVAIGLSSGFLEPIESTSIHLIQRSVIRLMQSFPSDGIQQADIDEYNAQCNREIDHIRDFIILHYHVNNRTDAQFWIDAREMRIPESLKHRIDLFKETGRVFRIPNELFAENSWIQVMLGQGIMPKSHHQTADLMADEELKAFLGGIKGRIDRTVVQLPTHQAYVERYCGRADAGAKAA

SEQ ID NO: 84885 - protein, 514 aa, Pseudoalteromonas luteoviolacea
  REGION 1..514: note = tr|A0A167JPK2|A0A167JPK2_9GAMM Uncharacterized protein OS=Pseudoalteromonas luteoviolacea S4060-1; OX = 1365257 GN=N478_05160 PE=4 SV=1
MIKKIVIVGGGTAGWLAANHLAKKLQPYNTSQVEVTLVESPDIPTIGVGEGTVPMMRSTLQYLGISETQFIRECDVTFKQGIKFVNWLNNPDVKQHAYYHPFDYPFLEKFDLSAYYLLGAFEDFNSYSELVGFQSHVCNANLAPKSITHTEFQGVSNYAYHLDAGKFSSMLQKHATEVLGVNYISATMKQANVGANGEITSIETLEAGEIEGDFFLDCTGFSAKLSSGVLNVPFVDKKDTLFVDSALAIQVPYGKENESIPSYTLSTAQKNGWIWDIGLTSRRGIGHVYSSSHTSDEQALRDLSDYLKMPDEQVDARKISMRIGYREEAWTKNCVAMGLAQGFVEPLEATGLLVFDITARMLAEQFTFEHKAMEVNAKAFNRRVSHMWDKVIDFIKLHYCISKRSDSQFWLDNRCKNSIPESLQEKLTLWRYQIPKAYDFSSTLEVFNLENYLYVLYGMEFDTDISALSCIYQQKELARKEVAEITRYAQSLEKQLEPNRALLEKINQFGLSKV

SEQ ID NO: 84886 - protein, 538 aa, unidentified
  source 1..538: note = Burkholderia reimsis
  REGION 1..538: note = tr|A0A365R2M9|A0A365R2M9_9BURK Tryptophan 7-halogenase OS=Burkholderia reimsis OX=2234132; GN = DPV79_01065 PE=4 SV=1
MSNPIKNIVIVGGGTAGWMAASYLVRALQQHTSITLVESAAIPRIGVGEATIPSLQKVFFDFLGIPEREWMPQVNGAFKAAIKFVNWRKSPERSRDDHFYHLFGTVPNCDGVPLTHYWMRKREQGFQQPMEYACYPQPGALDAKLAPCLSDGTRQMSHAWHFDAHLVADFLKRWAIERGVKQVIDEVEQVHLNERGHIASLSTKEGRTLEADLFIDCSGMRGLLINQALKEPFIDMSDYLLCDSAVASAVPNADARVGVEPYTSAIAMNSGWTWKIPMLGRFGSGYVFSSKFTSRDQATADFLNLWGLSDKQPLNQIKFRVGRNGRAWVNNCVAIGLSSCFLEPLESTGIYFIYAALYQLVKHFPDTSFDPRLADAFNAEIVHMFDDCRDFVQAHYFTASRDDTPFWLANRHDLRLSDAIKEKVQRYKAGLPLTTTSFDDSTYYETFDYEFRNFWLNGNYYCIFAGLGLLPDRSLPLLQHRPESIDKAEAMFARIRREAERLRTSLPTNYDYLRSLRDGGAGLSRSQPGPTLAAPEIL

SEQ ID NO: 84887 - protein, 518 aa, Cellvibrio sp.
  REGION 1..518: note = tr|I3ICR9|I3ICR9_9GAMM Tryptophan halogenase; OS = Cellvibrio sp. BR OX=1134474 GN=O59_001493 PE=4 SV=1
MTNNLIQSVVIVGGGTAGWLTAGIIAAEHQHKIKQGELQITLCESPSTPIIGVGEGTWPTMRATLKKIGVSETAFIRECDVAFKQGSKFLRWKDGSEKDFYYHPFSVPQGQSSINLAEHWLNTNDPMSFSTAFHPQEAICEASLAPKTITTAEYDAIVNYGYHLNAGRFAEFLRKHCLTNLHVDHILAEVTEITQQENGHIQSLITDRAGIITGDLFVDCTGFTAMLLGETLGVEKISISDILFTNCALATQIAYPYEDSPIASATLSSAQTAGWIWDIGLPTRRGVGHVFAKEYQSIDHATQQLINYIDETGGDSSHISIREIHFNSGYRKEFWKHNCVAVGLSAGFLEPLEASALVMVELSALMIAEQLPRTTSAIPIIAKRFNERFSYRWERAVDFLKLHYLLNQRNDSPFWQDNRQPSTTPLDLSERLLLWQNTSPQHYDFDRTGEIFHALSYQYVLYGMGFKTNLVFSTPAEIQKMAAELVMKNKMITRQLLDILPTQRKLLQKINLYGLSSI

SEQ ID NO: 84888 - protein, 502 aa, unidentified
  source 1..502: note = Rheinheimera tuosuensis
  REGION 1..502: note = tr|A0A285JNR9|A0A285JNR9_9GAMM Tryptophan halogenase; OS = Rheinheimera tuosuensis OX=1323745 GN=SAMN06297280_0143; PE = 4 SV=1
MTNNSSAIQRICILGGGTAGWMTAAALSKVFAEQSIQIELVESESIGTVSVGEATIPQIRAFNHLLGLDEMDFIRHTQGTFKLGIEFIDWYKPGTAYLHPFGPYGANMAGVPFHHYWLKHGCQRPLEDYCLEAMAARAGKFIPVLKRAGAPPRQVNYAFHFDAVAYADYLRKFAEQRGVKRSEGRMQNVVLDPVTGFVQALLMQNGQKIEADFFIDCSGFKGLIIEKALHSGFEDWSHWLPCDRAIAQPCAATEAPKPYTQSIAQAAGWQWRIPLQNRVGNGHVYSSHYVDDDEALRVLHNTMLGAPLAEPNLLRWQTGRRREPWKKNCVAIGLSAGFLEPLESTGIQLIQSAISRLLSLFPDKSFAAETIDTYNRYSSLEMEQIRDFIILHYKANERQDADFWRYCRTMKVPDSLKDKIQLYRQTGRIFRENNELFSEISWLSVLNGQGIFPESYHPLADQFPAAKLDAQLAMLQQQVADSVAEMPGHADFIAHNCQANSS

SEQ ID NO: 84889 - protein, 506 aa, Sphingomonas sp.
  REGION 1..506: note = tr|A0A0Q4JUS8|A0A0Q4JUS8_9SPHN Tryptophan halogenase; OS = Sphingomonas sp. Leaf28 OX=1735695 GN=ASE79_09245 PE=4; SV = 1
MDMRKTRVVVVGGGTAGWMTAAALVRLLPVACSVHLVESADIGIVGVGEATLPHIRAFVERLGLDEADFMRATHATFKLGIDFRDFGAIGDSYIHPFGSFGRPLDDIGFHHYWLRLAAAGRAGPIGDYSVAVAAAKRHRFAIPDGAPDDLAASFGYAYQFDATLFGPYLRHFAEAHGARRTEARIVSVDRDPLNGDVRALRLDSGEAVEGDLFVDCSGFRSLLLGDAMTEPWEDWSRWLPCDRAVAMPCTSPDGPIEPYTRATAKPAGWQWRIPLQHRVGNGYVYSSAHLSDQAAADALVTSVEGAPLADPRVLKFRAGRRRSSWVGNVVAIGLASGFLEPLESTSIYLAQMAITQLIELFPQNMRADGIAAADRIEFNRMVDMEYDRIRDFLILHYHATTRDDSDFWNHVRTMEVPATLADKIDLFRRAGRVTQYSEGLFLEPSWIAVYLGQGIVPQAWDQRADRPGLDGLDRAIASLRDRVAATATAMPDHGTFIARRNATIAA

SEQ ID NO: 84890 - protein, 493 aa, Cellvibrio sp.
  REGION 1..493: note = tr|I3IDW0|I3IDW0_9GAMM Tryptophan halogenase PrnA; OS = Cellvibrio sp. BR OX=1134474 GN=O59_000266 PE=4 SV=1
MSEKMMKVVIAGGGTAGWITASALAHQMGEILDITLIESEDIGTIGVGEATIPPMRTFHRLIGINEKEFVAATNATFKLGIQFENWKQIGEKYFHSFGVTGKQTIVTDFIHFWLRGQRLGIAQPFGDYCLEFKAALEERFAITDQIKMNYAFHLDAGRYARFLRERAEVRGVKRIEGKIAEVRVNSETGFISTIVLESQQEIEGDLFIDCTGMRGLLIEQTLQTGYEEWRQWLPCDRAIAVQTESTSPALPYTRSIAHHAGWRWKIPLQHRVGNGIVYSSPYLSDDEATQMLLNAVDGKVLTEPKVIKFKTGRRKKAWNKNCIAVGLSSGFLEPLESTSIHMIMTAVTRILQLFPHGKINQSTVDEYNAQAESEFARIRDFIILHYKATERDDSPFWRYCKEMSVPEDLRHRIQLFKENGRSNQVEGELFRLDSWTQVMLGQGILPDGYHPIVDLMPEVQLRAFLGGLANDINNQLAVLPSHQEFIEEFCRRA

SEQ ID NO: 84891 - protein, 504 aa, Cellvibrio sp.
  REGION 1..504: note = tr|I3I5N9|I3I5N9_9GAMM Tryptophan halogenase, putative OS=Cellvibrio sp. BR OX=1134474 GN=O59_003772; PE = 4 SV=1
MQDNNIRRIAIVGGGTSGWMTAAALSKLIKPDYCQIQLIESEEIGTVGVGEATIPQIQLFNKLLDLDENEFIRKTQGTFKLGIQFVNWKKIGHKYIHAFGEVGKDMEGVQFYHYWLKMAELGKAEELGNYTIGGLASDRGKFMRPFDAGNSPLSNIAYAFHFDAGLYARFLREYSEARGVIRTEGKVVDTILRASDGFIESVQLESGERIEADFFIDCSGFRGLLIEQALKTGYEDWSHWLPCDRAWAVPCERVGEPTPYTRSTAHSAGWQWRIPLQHRTGNGHVFSSKFMSEDEACSILLNNLDGKPLAEPRLLKFVTGKRKKIWNKNCLAVGLASGFMEPLESTSLHLVQSTIARLMSFFPNKYFDQEDIDEFNRQAGFEVEKIRDFLILHYHATERNDSVFWNYCRNMSIPKELTQKIEQFKKNGRIYRNNVEMFNELSWLEVMHGQGIYPRTYHPLVDRMTDDEITKRLEGIRSVIEKSVEYMPTHAQYIAENCRAEKIY

SEQ ID NO: 84892 - protein, 498 aa, Alteromonas sp.
  REGION 1..498: note = tr|A0A2K8Y599|A0A2K8Y599_9ALTE Tryptophan halogenase; OS = Alteromonas sp. MB-3u-76 OX=2058133 GN=CW735_08015 PE=4; SV = 1
MTNNTVTNVVVVGGGTAGWISAAVIKRLLGSQVNVNLVESEDIGTVGVGEATIPPIALLNNMLGLDEKEFLRETNATMKLAIRFENWKTQGDSYYHTFGAPGKSYAFCHFHHYFKRAQQLGLKDSIWEYDLNYLACEAGKFAHIKTPDPVIEMPYAYHFDASLYARFLRKKCEAMGVARTEGVIERVEQHPENGFIKGVCLKNGQMINGDLFIDCSGFKGLLTQQTLNTGYEDWSHWLPCDRAVAMPSERFEKTVPFTRSIAHSAGWQWRIPLQHRNGNGLVYSSNYYSDDEALGILSANLETKPLADPNFIRFKTGRRRKQWNKNVIAVGLASGFLEPLESTSIHLIQSAIVRLIHLFPHHGVKQKQVDEYNEQSRIEYEQIRDFIILHYHVNERTDSQFWRDVREMDVPDSLTHKIELFRDSGNLFREQNDLFLESSWLQVLMGQGVSPNDYHPLANGISEQKLMDLMENIKRIKREPVSKIASHDEFLKQFCAQQ

SEQ ID NO: 84893 - protein, 548 aa, Hyphomicrobium sp.
  REGION 1..548: note = tr|A0A3S0TL99|A0A3S0TL99_HYPSQ Tryptophan 7-halogenase OS=Hyphomicrobium sp. OX=82 GN=EKK38_17620; PE = 4 SV=1
MGKPIRKITIVGGGTAGWLAAAFLNRYCTSEDPRKSIEITLIESPDIPIVGVGEASLPGMVVLLHQLGISESEFFKATNATFKVAAHFVNWNHDRRGNSTEFLNILNAPPILDGHHLADYFITFDPARSDPSAGMSYVRAFSPVVEIVKGDLSPRAPEDPEFSGEIGYTYHFDATKVAEFLKELATRRGVIHILDTVDSIALDEKGFVKSLDLREHGEHAIDLVVDCTGFRGSILQKTLGEPFISYADHLLNDRAAVIQIPHNDVTRISPATKATGFSAGWNFNIPLTSRVGTGYIYSSRFISDEDAADELLRHYAGQVKGAEPRVIPIQTGRVRNAWVKNCVALGLAGGFIEPLESTAIFMTDLAVRWLRRFMPTKDFEPEFTTAFNRQVHRLYDEVRDLVQLHYHLNNRQDSKYWRAAREELKLSDRLQENLSIWRTRSPEDLDLASTFLFGGPVYALLLISKGYYSDAHLANAHHLKRSVYDRYRQAIRAARANQLRKLVPQSEFLRGNHFVWGERASRPPPIPAFFPAATKIKLPLHPPKPKKN

SEQ ID NO: 84894 - protein, 493 aa, unidentified
  source 1..493: note = Alteromonas mediterranea
  REGION 1..493: note = tr|S5CEN6|S5CEN6_9ALTE Tryptophan halogenase; OS = Alteromonas mediterranea UM7 OX=1300258 GN=I635_19700; PE = 4 SV=1
MNKSVKTIVIAGGGTAGWTAAAAIAKQMGPTVNITLVESDEVGTVGVGEATIPPMRVFHKLLGIDEKDFMRATSATFKLGIQFENWGQKGDNYIHSFGVTGRESFVAPFHHFWLYGKEQGVANDFGNYCFELEAAKQDKFATSQNANIQYAYHLDSSLYATLLRNYSETRGVTRKEGKIEQITQNKETGFIESLKLASGDVIHGDFFIDCTGFRGLLIEEALKTGYEDWSHWLPCDSAVAVQTESDSAPRPITKAIAHDSGWQWKIPLQHRTGNGLVYCSKYLSDEHATQRLLDNITGNTITKPRIIKFKTGRRLKAWNKNCLALGLSSGFVEPLESTSIHLIIMGIIRFLKLFPNGGVSELIADEYNRQTLEEVVKIRDFIILHYHATYRKDSPFWQYCHDMEVPDTLKHRMQLFKEFGHAFQEDGELFRVDSWTQVMLGQGIMPESYHASVKGMPAKELQRFLQGIELSVLKGLENMPSHETFLKHYCSSR

SEQ ID NO: 84895 - protein, 512 aa, unidentified
  source 1..512: note = Duganella sacchari
  REGION 1..512: note = tr|A0A1M7QXZ9|A0A1M7QXZ9_9BURK Tryptophan halogenase; OS = Duganella sacchari OX=551987 GN=SAMN05192549_108228; PE = 4 SV=1
MLRRIVIVGGGSAGWLTAGLIAAEHRAAPAALHITLIESPDVAPIGVGEGTWPSMRDTLRRIGVAESDLFRACDAAFKQGSRFNGWVDGSADDSYFHPFSLPQGYGEVDLPAQWQAQHPQRAFADLVSYQPLLCVQGRAPKQVVTPEYAAVANYGYHLDAGKFGLFLRQHCQEKLGVHYVADHVLSVVSHDNGDIAALRTQQHGAIEAELFIDCTGMQSLLLGQHYGVPLVPQQHVLYNDAALAVQVPYPADDDPIASHTCSTAQSAGWIWDIGLPTRRGVGHVYASRYISDDQAEAELRAYIARTSGQTDIATPRKLRFTPGYREKFWHRNCVAIGLSAGFIEPLEASALAIVEMSAAMVSEELPATRAAMDIVAKRFNEAFTYRWERVIDFLKLHYVLSQRRDTAYWRDNTDPAKVPERLQELLTLWQHRAPSRSDFYRIEEVFPSASYQYILYGMGFRSDFSRAPKPQEAAMADGYFHEAASLARKMLGALPDNRALIHHIKRHGLQKI

SEQ ID NO: 84896 - protein, 490 aa, Asticcacaulis sp.
  REGION 1..490: note = tr|A0A2T5XJQ1|A0A2T5XJQ1_9CAUL Tryptophan halogenase; OS = Asticcacaulis sp. CF398 OX=2135738 GN=C8K45_1836 PE=4; SV = 1
MQPVKKVVIAGGGTAGWCAAAALSKLLGQVLDITLIESEEIGIVGVGEATIPTARTFHHFLGIDERAFLKATNATYKLGIAFENWAREGDRYIHSFGEIGKSNWMAPFHHVWMAARDKGFAGDLGDYCFELQAAEQGRFFTSDTARINYAYHFDAVLYGRFLRQFSEANGAKRIEGRIRHVRQDAESGFITGLELESGEVVEGDLFIDCTGFKGLLIEETLKTGFEDWSHWLPTDRALAVQTAPAGQLDPYTRAVAHGEGWRWRIPLQNRVGNGLVYSSAHLTDEAARERLLRLLDAEPLIEPRLIRYRTGRRKKIWNKNCLTVGLSSGFIEPLESTSIHLFQVAVTRLIQMFPFGGITEAVTDHYNDIARREIEKVRDFVVLHYKLTQRDDTDFWRERREMSVPDSLTERLEMFREQAHAWQAADDLFRVDSWVQVLLGQRLEPKSHHAIGSLMSDAQLRQALDGLKSHIARTVAAMPTHEAFLKSYLA

SEQ ID NO: 84897 - protein, 503 aa, Asticcacaulis sp.
  REGION 1..503: note = tr|A0A2T5XHY2|A0A2T5XHY2_9CAUL Tryptophan halogenase; OS = Asticcacaulis sp. CF398 OX=2135738 GN=C8K45_3085 PE=4; SV = 1
MNRPLQVVIVGGGTAGWMTAAAFAGVISPRQAEVRLIESDEIGTVGVGEATLPQIKEFNDRIGIDEAEFMRATNASFKLGIEFVDWGKRGNRYVHPFGAFGQPMGGVDFHQCWLRAQASGLDSPLEAFSYPIVASYAQKFDFPAKDQTSVAAAYAYAYHFDAFLYARFLRGFAEARGIVRKEGRIVDVALNPQNGHVQSVTLASGEMIEGDLFIDCSGFRSLLLGQALETPYEDWTPWLPCDRAVAVPCARNEAAFTPYTRSTAREAGWQWRIPLQHRTGNGYVYASSFISDDEAIRTLMDNLDGAPEAEPRPLKFKAGRREKCWNRNVIGVGLASGFLEPLESTSIYLIQIAVINLIRLLPRDGQIDPVIEAEFNRLVDLEYERIRDFLILHYKANTRDEPLWRQTRGMAVPDSLAARMERFRHRGLVPNYRDGLFAPPSWISVMFGQDLRPEGYDPLADNIDLERLIGRMRDMERQIHQHVEKMPSHADFVREFASAREVA

SEQ ID NO: 84898 - protein, 506 aa, unidentified
  source 1..506: note = Duganella sacchari
  REGION 1..506: note = tr|A0A1M7R294|A0A1M7R294_9BURK Tryptophan halogenase; OS = Duganella sacchari OX=551987 GN=SAMN05192549_109196; PE = 4 SV=1
MNVTSTPRKIIIVGGGTAGWMTALMYGDALIKQGVEITVLESPTVGVIGVGEGSTPALKRYFDSLGIQESEWMPACNATYKSGIGFDGWSTKPGYDNYFHQFATMVDNLTLPNFMENVHARQRGVHIDARPNRYFLSARLSEDCLAPKSSENFPFFTNYGYHFDATLLGQFLHKRAVALGVQYKSCHVTHAVMNERGDIAAVATKEGEHLAADFFVDCSGFSALLIGKALETPFVSYADNLFNDSAIAMPSEIGDKIPTKTVSSAMRHGWAWKIPLTNRYGNGYVYSSSFVSADEAEHELRSKLGLLESDTQARHLKMKLGRVTKHWNRNVLAVGLSQGFLEPLEATALYLTQMTAAIFLLFLEKGDLSDQARDVYNQQIHDYFDSHRDYIVAHYKTNSRTDTPYWRANAENLDSVSDSLKHIFQTWIEGRDLAAEIRRQNIEHFYPVGSWYSLLAGMGSFPDIGPATGPDLVAPLDDFMRRCALNFRDHRTVLNEMAEQAKASSM

SEQ ID NO: 84899 - protein, 518 aa, Cellvibrio sp.
  REGION 1..518: note = tr|I3I722|I3I722_9GAMM Tryptophan halogenase; OS = Cellvibrio sp. BR OX=1134474 GN=O59_002938 PE=4 SV=1
MSESIKKIIIVGGGTAGWLAAGLLAAEFRHNEAGVSITLIESPDVNTIGVGEGTWPSMRATLRKIGISETDLIRECFASFKQGSKFVGWKTGAADDIYHHPFSIPHGYAECNLAAAWQAQFADRPFAEVVSSQFVVAEQGCAPKQITTPEYAGVLNYGYHLDAGKFAALLQRHCTTALGVIHVLDHVTQVAADDSGDITGVDTKASGVIYGDLFVDCSGLSCLLLGQHFGVPFVDKKHLSLNDTALAMQVPYPEQSSPIESCTVATAQSAGWTWDIGLSSRRGVGYVFSSSYLSEEKAEIELRAHIAKSVGQSVANSLSSKKLSIRAGHRQEFWHRNCVAVGMSAGFIEPLEASALALVELSMNMICEEFPADKVAMKIAAKRFNEVFSYRWDRIIDFLKLHYALTERNDSDYWRDMSAPEALPEHLRELLLLWKHRPPHRSDFIQVEEIFPSASYQYVLYGMGFSMDASRLPRTSDNLPMATARIRETVEKTRKYLSGLPSNRALIDHVMKHGMPLI

SEQ ID NO: 84900 - protein, 522 aa, Streptomyces sp.
  REGION 1..522: note = tr|A0A1C6PCF2|A0A1C6PCF2_9ACTN Tryptophan halogenase; OS = Streptomyces sp. WMMB 714 OX=1286822 GN=H181DRAFT_03534; PE = 4 SV=1
MAKSVVIVGGGTAGWMTASYLKASFGDRLAVTLVESRNVPTIGVGEASFSTIRHFFAYLGLEERDWMPECHATYKLAIRYDDWRAEGHHFYHPFERPRVVEGVSLADWWLHKKPSADYDRDCTVIAALCDAKRSPRGMDGQWLGPEFGEHGSGAMARSTMAEQTTQFPYAYQFDATLLAKLLTRYGTDRGVRHVLDDVVAAELDEGGNITHVRTKESGDLAGDLFIDCTGFRGMLLNKKLGVPFVSYQDTLPNDSAVALRVPREMADQGMGPYTRSTAKEAGWIWTIPLVGRIGTGYVYASDYCTPDEAERTLREFVGPAADDLEANHIRMRIGRSENSWVNNCVAIGLSSGFVEPLESTGIFFIQNGIEQLVKHFPGGRDDDQLRRSYNRQVAHVMDGVREFLVLHYVAAKRNDNDYWRDAKTRAKPDGLAERLEQWKVKLPDENTVYPYYHGFEPYSYTAMILGLGGLEVRSLPGLAMMDDVAATKELRLIRDQAKAQVERLPSHWDYLEHVLDSKAARS

SEQ ID NO: 84901 - protein, 532 aa, Actinomadura sp.
  REGION 1..532: note = tr|A0A372GFL1|A0A372GFL1_9ACTN Tryptophan 7-halogenase OS=Actinomadura sp. LHW52907 OX=2303421; GN = D0T12_18690 PE=4 SV=1
MDDTRIRKVVILGGGTAGWMAACYLGKALGPTVSVTVLEAPAVPRIGVGEATVPNLHKVFFDFLGLSEDEWMRECNASFKLGIRFLNWRTPGAGEALARRGSDGRPDRFDHLFGLLPDHENLPLSHYWAYRKLTGATDEPFDRACYPQPAVMDANLSPRFLDGTKWANYAWHFDANLVAEFLCRFATGKLEVAHVQDLYTHAEFDHRGFVTAINTETGRRLEGDLFVDCSGFRSLLMNQAMREPFLDMSDYLLNDSAVATAVKNDDAADGVEPYTSAIAMSSGWTWKIPMLGRFGTGYVYSSRFQSQDEATVEFCRMWGLDPEDQPLNQIRFRVGRNRRAWVRNCVGIGLSSCFLEPLESTGIYFTYAALYQLVKHFPDKRFEPILIDRFNHEIEKMFDDTRDFIQAHFGFAPRDDTPFWRTCKELEFADDFKEKVAMYKAGLPVETPVADENNYYGNFEAEFRNFWNNSNYYCVFAGLGVLPDHPLPALSLRPDAADTAEAVFTDVKRRQAELSESLPSTYEYLRRLHGGE

SEQ ID NO: 84902 - protein, 503 aa, Sphingomonas adhaesiva
  REGION 1..503: note = tr|A0A2A4I956|A0A2A4I956_9SPHN Tryptophan 7-halogenase OS=Sphingomonas adhaesiva OX=28212; GN = COA07_09275 PE=4 SV=1
MSDRPMRIVIAGGGSAGWMCAAALIHLLGDGFAVTLVESDDIPTVGVGEATIPQIRLFNQALGIDEDELIRATGATFKLGIEFAGWGAPDDRYMHAFGDVGRDSGTLAFHHLWLRGHRAGVARPLGDYALNAVAAKADRMRRGAPRPASMLPDMPYALHFDAALYAAFLRRRAEAGGVTRVEGRIVDVVRDGGSGDVAALMLAGDRRVDGDLFVDCTGFRALLIGGALGVGYEEWTRWLPCDRAMAVASAPIVQAGPYTRAIAHDAGWQWRIPLQHRTGNGIVYSSRHLDDAAAAERLLANLDSAPVGDPRPLRFTTGRRQVAWHANVVAMGLSSGFLEPLESTSIHMIQSAIERLVTLLPGRATAPALRDEYNRRTAFEAERIRDFIILHYIANRRDAPFWRERRDGDIPDTLRAKLELWRGAARILRDRDELFTEAGWLQVLVGQGVIPAAHHPMADAPTPAQLAEFLDILPRLNLREVAQMPRHDDIIARHCAAPAGLAA

SEQ ID NO: 84903 - protein, 523 aa, Cellvibrio sp.
  REGION 1..523: note = tr|I3ICS9|I3ICS9_9GAMM Tryptophan halogenase; OS = Cellvibrio sp. BR OX=1134474 GN=O59_001503 PE=4 SV=1
MGGGTAGWMTAMLFQHAFQDCTITLVESAVTGIIGVGEGSTPALKAFMDALGISESEWMSVCQATYKSGISFRGWSTRNGFEEYFHPFFSHFDRDHIKALIFNSELRRAGKRAHAHPNLFSYASYLAANSLCPITPYAFPFEVQYGYHFNAAMLGSFLKEKAIERGVVWKSAHVENIALNAEGDIAHLAFEGGAILEGDFFVDCTGFASLITGKTLGTPFIPYSDVLFNDRAVTLASPVEEVISTQTVATALNNGWAWKIPLQNRVGNGYVYSSAFCSEAEAEEELRAYLNMNNGEGESRHLKMRVGRAKTMWNKNSLAVGLSQGFLEPLEATALALVQLTLVRFVKLYKAGAYTNQYAEQLNSEIAEAFDNVKDYIHTHYLTSDREDTPYWRACRHNSAAASNRLKLVLQTWLSGADISEALQSTGLNRHYKVNSWVYLLSGMGIFPPEHQLVQASPDDLAKVPLDSIVDFFERCALNHMPQAEALNILRTGASPFSVEGRNKASKEQALARLLGLSFAVSS

SEQ ID NO: 84904 - protein, 522 aa, unidentified
  source 1..522: note = Nitrospirillum amazonense
  REGION 1..522: note = tr|A0A560KGQ5|A0A560KGQ5_9PROT Glycine/D-amino acid oxidase-like deaminating enzyme OS=Nitrospirillum amazonense OX=28077 GN=FBZ87_101120 PE=4 SV=1
MTVERTILIVGGGTAGWLAAAYLAKYLGVREGGPIGITLLEAPDIGIVGVGEGTFPTIRGTLRFLGLNEAQFMRDTSATFKQGIRFARWVDGGEDDSFFHPFEAPFPTDGAGLVPYWLLQDGDRRPPFAQAMTFQQQVTDARRAPKRGPEGDFEAPLNYAYHFDAAKAAQSLAVRARELGVRHLRGTVTDVALAADGAIAHLVTREYGAITADFYVDCSGFRAELIGRALGVPQKSVKSILFTDRALSCKVPYEAADAPLESCTVATAHAAGWTWEIGLEGARGVGCVYSSDHMSDDEAEGVLRAYIAPHLGPHIEPPAPRKTAFDAGYRETPWVKNCVAIGLAGGFLEPLESTSVVLIEVAVGMLAELFPHDGRWDAPAARFNELMTRRFENIVNFLKLHYCLSKREEPFWRDNRDPASIPPALRDLLAQWRTRPPSRFDFALDLEAFAFFNYQYILYGMGFETDLSLARAAFPQVEAAQKTFARIRAYGDHATRDLPAHRALIRRMNQISAPDGRVASRR

SEQ ID NO: 84905 - protein, 517 aa, Cellvibrio sp.
  REGION 1..517: note = tr|I3ICV8|I3ICV8_9GAMM Tryptophan halogenase, putative OS=Cellvibrio sp. BR OX=1134474 GN=O59_001532; PE = 4 SV=1
MTTTIKSIVIVGGGTAGWITAGTLAAKIRKHYSEGINICLVESPKTPIIGVGEGTWPTMRNTLKKMGVRETDFIRECNASFKQGAKFVHWCTGQKNDFYYHPLVLPLGFSEINLAPHWLADSNNQSFSNAVCVQETLCEEGLAPKLITTPEYAAVANYAYHLDAGAFAEFLKKHCTTKLGVTHLLADVINVNAADNGDIASITTDTQGDIAGDLFIDCSGFISLLLGKHYEVPFVSCKDVLFIDTALAVHLPYENDNSPIASHTISTAQDSGWIWDIGLPTRRGIGHVFSSAHTSTEQAEEKLHQYLKQHSSKTDQLSVRKIPITPGHRAKFWEKNCVAVGLSAGFLEPLEASALVLIEISAAMIADQLPATRIAMDIIAKRFNETFLYRWQRIIDFLKLHYTLSKRDDSDFWRENKHPNSIPESLQELMTLWRYQSPWHMDFDRAVEVFPAASYQYLLYGMGHTTAASPQGMSSRNRQLAQELFNKNTTLAQQLKNQLPSNRELINKIKDYGLQPV

SEQ ID NO: 84906 - protein, 517 aa, Mitsuaria sp.
  REGION 1..517: note = tr|A0A1A9HSS5|A0A1A9HSS5_9BURK Tryptophan halogenase; OS = Mitsuaria sp. 7 OX=1658665 GN=ABE85_25300 PE=4 SV=1
MQPIQDILIVGGGTAGWLTAAFLARQLGTAHGGVRITLVESSDIGIIGVGEGTFPSIRGTLSAIGIGEAEFLDACSATYKQGIRFEHWVRPPGTPGADHYFHPFSQPSQRPGAPELLPYWLMGDAGKGRAFAEAVTLQKAVADARHGPKRASDGDFLGPLNYAYHFDAGRFAALLAEHGQALGVKRVIATVDRVDLDEQGAIAAVHTKEAGTLTAGLYVDCSGFRARLIGEALGSPFKSMRDVLFVDSALAMQVPYARPDAPIASYTIANAQDHGWIWDIGLQERRGIGHVYSSRHCDDEEAERALRRYIGPASDALTPRKLALNIGYRETQWVKNCVAVGLSGGFLEPLESSGIGLIETAAYLIGQLFPFNGDTAPVANHFNAFMKERYARIVDFIKLHYGLTQRTDTAFWRDNADPASFTESLKEKLAMWRCRPPQRLDFITDVEMYLPASWQYVLYGMEFETQLGSGAAALRRGEEARREFATIAQLGAHALRDLPPHRVLIEQLLARTGRRVA

SEQ ID NO: 84907 - protein, 497 aa, Cellvibrio sp.
  REGION 1..497: note = tr|I3I4S1|I3I4S1_9GAMM Tryptophan halogenase; OS = Cellvibrio sp. BR OX=1134474 GN=O59_004160 PE=4 SV=1
MLMSNKPVNHIVIAGGGTAGWMTAAYLARWLEPTNIQVTLVESELIGTVGVGEATVPGIHQFIKHLGVKESEFIAATHATFKLGIEFEGWVAPEQTFFHPFAGYGVPIEDRPFHKTWWSAKQQGYSASLAEFCLCTQLAGAGKFAQPSFDPDSRLAWYNYAYHFDASLFAKYLRGYAEQRRVTRIEGKIQQVTLDPDSGFIQSLQLESGQVIGGDLFVDCSGMSALLIEKALGVGYEDWSQWLLSDSALAVQTRTVAEPDPFTRSTARSAGWQWHIPLQHRVGNGYVYSSQFISEDQARAELLANIEGERLTEPRLIRFTTGMRDHFWHKNCVAIGLSSGFLEPLESTSISLIQTGISKLAAFLVNFEINDQHVTEANRLNRLEYERIRDFIILHYKLNGRPEPLWQHVQAMDIPASLTEKIARFKATGDIQLLEQESFVEESWISMFAGFGLSPAALTPSRDSAKMHTVMDKMRAAIVKGREYAPSHADFLRTLGS

SEQ ID NO: 84908 - protein, 544 aa, unidentified
  source 1..544: note = Rheinheimera tuosuensis
  REGION 1..544: note = tr|A0A285I696|A0A285I696_9GAMM Tryptophan halogenase; OS = Rheinheimera tuosuensis OX=1323745 GN=SAMN06297280_0599; PE = 4 SV=1
MQQRKVLIVGGGSAGWMTAAYLNGALNKQGTEQNVLIELLESPDIPRISVGEATIPSMRHLLAVVGVDEREFMQATDATFKQSIKYCNWVHNDNSFYHHPFTSMRVQPIDRAGSDWLQSDRSIPFMETCSAQPIICEMGLAPLMLGKWDMGSPLNYAYHMNAQKFADYLRDFSTARGVVHTLANLTDVEMQGDDKIVAVITDQQQRLTADLFVDCTGFKAKLIEEKMGVGFEDCSQWLLCDRAVIMHLPYDKFYPGMVRPYTTATALSAGWIWDIPMQNQRSVGYVHSSQFISKQQAEQEMRAYQGPGTEGLTARFVDFKVGRRQGNWRGNCVAIGLSGGFIEPLESTGLYLSDFGAVLLAEHFPYDDDSMQVLAGRYNRLMANRFYEVLDFINMHYCMTKRTDTAFWREVQKPERITERLKAKLAFWRIKPPSAHDFQDQWYPGMATSGTDTTSSQTADSRAAVDTGGLWNHESYECILYGMGFLEQECQQRYGPELAPSGVHPAIIQRLQMARQKLPPHAIWLNRVLDMPQYPTAYRPKGWV

SEQ ID NO: 84909 - protein, 532 aa, Alteromonas sp.
  REGION 1..532: note = tr|A0A2K8Y5F1|A0A2K8Y5F1_9ALTE Tryptophan halogenase; OS = Alteromonas sp. MB-3u-76 OX=2058133 GN=CW735_18205 PE=4; SV = 1
MHDNFEDNETAIQSIVVAGGGAAGWLTAAVIAAEHNVKSNHNISVTLVESPDVKILGVGEGTWPTMRDTLRKIGVDENEFLVACDASFKQGTRFTDWRYAPSNQRTDVYDHPFSLPAGFFEGNIGAWWLLNQHNDSGAPSFSHVVSAQSFLCDSHKAPKQAQTPPFAAVANYGYHLDAHKFAEFLRNHCVNVLGVAHVRDHIKAVTVDGIGNISALECTNGNITGDLFVDCTGFAATLIGGYYHSEFTDVSCGLKNDSAVAIQATYKNENEDIASATLSTAHKNGWIWDIGLPHRKGVGCVYSSEFCSEEKAVETLLSYVSSCDKLSSISGDAIRKISFNPGYRKKAWVNNCVAVGTSAGFVEPLEASALVMVELSAKFIAQNLPAHRDLLKAVAKQFNANFSQRWERIVDFLKLHYVLSERRDSEYWRYMSSLETASDQLQEWLMQWRYRPVSTSDFIYADELFPAASYMYVLYGMKPPSAFHLERLRYSTSLMSSTYNAVRQTQKYGQQQLSALPSNRTLINSIRSVNRA

SEQ ID NO: 84910 - protein, 508 aa, Sphingomonas sp.
  REGION 1..508: note = tr|A0A0Q4JPB7|A0A0Q4JPB7_9SPHN Tryptophan halogenase; OS = Sphingomonas sp. Leaf28 OX=1735695 GN=ASE79_09255 PE=4; SV = 1
MTDANPGPIRKVVIVGGGTAGWMAAAAAARYLDDGQRQIVLIESDAIGTVGVGEATIPPILGFNALIGVDEREFLRATGATFKLGIEFVGWDTGDDRYMHAFGGHGRDIQGLAFHQLWLKLRDRPGIGGIDAYAPSAVAAYLNRFGLPTGPQTAPLAYAYHFDAGLYAAFLRRRAEAGGVTRIEGRITRVDRDPDTGHVRAVRLDDGRSVDGDLFIDCSGFRSLLLGETMGVPFEDWSHWLPCDRAVAVPTEPSAPLLPYTRATARTAGWQWRIPLQHRTGNGHVYSSAHISDDEATAVLLANLDSRPTAEPRQLRFKAGRRTSMWQGNVVALGLAGGFLEPLESTSIHLIQTGISKLFALFPDRGFSAVERDEYNRLMGDAYTSVRDFIILHYHATRRDDSAFWRHVRTMPIPDSLTRKLALFREKGRVFRYDDELFGISSWVQVLLGQNVIPVGHDPIVDALDADRVADAIRQIRAATIRGAQSLPNHADLVAHHGPFDRKNEFAK

SEQ ID NO: 84911 - protein, 135 aa, Erythrobacter sp.
  REGION 1..135: note = tr|A5PC89|A5PC89_9SPHN Tryptophan halogenase, putative OS=Erythrobacter sp. SD-21 OX=161528; GN = ED21_30679 PE=4 SV=1
MNEPRPPHVVILGGGNSGWIAACLLHHAWGTRGGKITVVESPSIGIIGVGEGSTPQLKMTTWFTHEDIAAANRSIYGQQPAYAPMSWHCLFAGYGCFPPREKLQPVPQGMPRGDVEAVRATLTPCATNFGGYAPL

SEQ ID NO: 84912 - protein, 538 aa, Pseudomonas sp.
  REGION 1..538: note = tr|A0A2K4JBR6|A0A2K4JBR6_9PSED Tryptophan halogenase; OS = Pseudomonas sp. FW507-12TSA OX=2075552 GN=C1889_07340; PE = 4 SV=1
MNKPIKNIVIVGGGTAGWMAASYLVRALQQQVDITLIESAAIPRIGVGEATIPSLQKVFFDFLGIPEREWMPQVNGAFKAAIKFVNWRKSPDPSRDDHFYHLFGNVPNCDGVPLTHYWLRKREQGFQQPMEYACYPQPGALDGKLAPCLPDGTRQMSHAWHFDAHLVADFLKRWAVERGVNRVVDEVVEIQLNDRGYISTLLTKGGRKLQADLFIDCSGMRGLLINQTLKEPFIDMSDYLLCDSAVASAVPNDDARDGVEPYTSAIAMNSGWTWKIPMLGRFGSGYVFSSKFTSRDQATADFLKLWDLSDNQSLNQIKFRVGRNKRAWVNNCVSIGLSSCFLEPLESTGIYFIYAALYQLVKHFPDTSFDSRLRDAFNAEIVYMFDDCRDFVQAHYFTTSREDTPFWLANRHELRLSDAIQEKVQRYKAGLPLTTTSFDDSTYYETFDYEFKNFWLNGNYYCIFAGLGMLPDRSLPLLQHRPESIEKAEAMFASIRREAERLRSSLPTNYDYLRSLRDGDAQVSGNQRGPTLATREGR

SEQ ID NO: 84913 - protein, 503 aa, Cellvibrio sp.
  REGION 1..503: note = tr|I3IFM3|I3IFM3_9GAMM Tryptophan halogenase; OS = Cellvibrio sp. BR OX=1134474 GN=O59_000879 PE=4 SV=1
MNDNAKRRIKKIIIVGGGTAGWMTAAAFSKVLGTSCYDIVLIESDDIGTVGVGEATIPLITSFNQILGLDESQFMKKTQATFKLGIEFVNWGNIDDRYIHPFGVYGKGIGSLAFYNFLLKQQKIKPDTDVGDYSINIQAARHNKFMRAPNLPNSPLADIRYAYHFDAGLYALYLRNYAEQQGAIRVQGEITNVSLDDDSGCITSVTLKDGQTHSADFFIDCSGFRGLLIEQALKTGYEDWSHLLLSDTAVTVPSEVIHPLPSFTRSTAHSAGWQWCIPLQHRTGNGHVFSSRFMSEDEATSLLLQHLPTPALAGPRTVKFKTGIRRKLWNKNCVAIGLSSGFIEPLESTSIHLIHSAIHKLLTFFPTGALSQVDIDKYNDVMRTDIEFIRDFILLHYKATSRTDSAFWNHCRTMDVPDGLRKKMELYIKSGRLYRDNNELFTEDSWFAVMEGQGVKVEDYHPLVDSVEQVKFDAMLGDIARAIRESTDVIPSHAEYIARYCKA

SEQ ID NO: 84914 - protein, 493 aa, Cellvibrio sp.
  REGION 1..493: note = tr|I3I724|I3I724_9GAMM Putative tryptophan halogenase OS=Cellvibrio sp. BR OX=1134474 GN=O59_002940; PE = 4 SV=1
MRLVKNLVIVGGGTAGWLAAAAIGKIYQGKVNVTLVESEEIGVVGVGEATIPTMLAFHKLIGINEADMMRATHATFKLGINFKNWGEIGEDYIHAFGQVGRIFWAGEFQHFWARAKALGLDIPFGAYCLEHEAARAERFGISESPALNYAFHFDAGLYAKFLRQFSEGLGVVRHEGKIEHVELNPDTGFIECLHLHGGMKIEADFFIDCSGFRGLLIEQALQTGYENWQHWLPCDSALAVQTAKVKPATPYTTSTAREFGWQWRIPLQNRTGNGLVYSSQFTDQTWAEKTLTNNVEGTMLNNPRLIQFTTGRRKFGWNKNCIALGLASGFLEPLESTSIHMVTSGLIRFLRLFPLRGVQPVLVDEYNRQSKEEAESIRDFIILHYHATRRSDTEFWNYVRTMQIPDTLRHRMDMFTQSGMVFLGGDELFRTNGWTQVLIGQGFAPANYQPIVDNMSNTEFSQYMTGFRDHISRNLALLPSHEQFIAQYCAMEK

SEQ ID NO: 84915 - protein, 510 aa, Rhodanobacter sp.
  REGION 1..510: note = tr|A0A1V3PSL6|A0A1V3PSL6_9GAMM Tryptophan halogenase; OS = Rhodanobacter sp. B05 OX=1945859 GN=B0E47_14035 PE=4; SV = 1
MRRIVVVGGGTAGWMTALTLANSAYGSRLQVTVIESPQVGTIGVGEGSTPYLRRFFQDLGIEEAEWMPACNATYKNGITFDKWSTRPGFESYFHAFASMLDNLTMTQFINNVHARLNHADVHAHPDRFFIANRLARDCRAPKPVRSFPFDIWHGYHFDASLLGAFLLKKALERGVRHVPRHVNEVILKENGDIDSLRLEGGETLDADFFVDCTGFASLLIGKALKVPFVPYAENLFNNAAVALPTPLDGPIMSQTISTALKHGWAWKIPLTNRYGNGYVYSTDFCSPEQAETELRTHLGMLDADAPARHLKMRVGRVTESWHRNCVAIGLSQGFVEPLEATTLLFAQRTANMLVAVLEKGDLGESARTTFNQTINGQLEGTRDYIVTHYKTNTRTDTDYWRANAANTNLSHPLKQLLATWLSSKPIIPGLKRGVFGQGYPTLSWYSLLAGMGLFPEPQDLRPPTPEEAQHDLTQIDNLLERSALNYPDQRELLQRIPLRSTEPSLQVYLW

SEQ ID NO: 84916 - protein, 495 aa, Oceanicola granulosus
  REGION 1..495: note = tr|Q2CK16|Q2CK16_OCEGH Tryptophan halogenase; OS = Oceanicola granulosus (strain ATCC BAA-861 / DSM 15982 / KCTC 12143 / HTCC2516) OX=314256 GN=OG2516_10936 PE=4; SV = 1
MTGPARHIVIVGGGTAGWLAALILARRDDLRVTVVESSRIPTIGVGEGTTAVFRQMLQHLGLDERAFLAATGATIKYGIRHRDWRRVGHSYDGPIDDTAQVAGPGLDLYAVASGRPVAEVHLFGTLMDRRRAPVAEVGGREVPAGPFHWAYHFDQARAGAWLKRQATGVTVVDDVVAGLERDGEGGDITALRLESGARLEGDLFIDCTGFRRALIGPMGAEWVSYGDVLPVNRAMPFWIDLQEGEEIDPFTLAHAQGAGWMWKIPTTERYGCGYVYSDAHTTPDAAQAEIEAALGRAIEPRNDIRIDAGRLREAWIGNCVAIGLASSFLEPLEATSIHGTIVQLMWLDSLLAAPDGAARYNAAVARQVDDFRDFIRLHYVSERRDTAFWRDVAASHPPEVRARLDLWRHRLPERRDFAPVPLDLPHVQEQLYTPVLDGLGLLDRASARAALADHPHRRARLRKTHEQLTKDHRRAAGRCRPHRAWLSSLREEIPA

SEQ ID NO: 84917 - protein, 522 aa, unidentified
  source 1..522: note = Alteromonas mediterranea
  REGION 1..522: note = tr|S5C7N5|S5C7N5_9ALTE Tryptophan halogenase; OS = Alteromonas mediterranea UM7 OX=1300258 GN=I635_19205; PE = 4 SV=1
MTTANPITHIVVVGGGSAGWLTAGRIAAQHQCAIRKDIKVTLVESPNVPIIGVGEGTWPTMRSTLIALGISETTFIKECDATFKQGAKFAKWTTGEEHDFYYHPLMLPQGFSQTNLGPYWQTVAPELNESFSHAVCVQEAICEAGCAPKSIRHAEFAGTANYAYHLDAGKFTAFLTKHCTEKLGIHHVLADVNRVESNDNDDIKALHTEQGVIVEGDLFVDCTGFKSMLLGEHYKVPFIPCDDVLFIDRALAVHVPYDTPQSPIASHTISTAQDAGWIWDIGLQSRRGVGHVYSSRHQSKDEAYARLDSYVRQTSALNGIDGINVKDITIQSGHRQHFWQNNCVAVGLAAGFLEPLEASALVLVELSASMIAEQLPANRAVMDIVAKRFNETFSYRWQRIIDFLKLHYMLSKREDSAFWRDNRDSHTIPDSLKELLALWQYHPPSDKDFTSNNEVFPAASYQYVLYGMGFISDLATHQQWVDADFAKQQLMQNRKARGMAVEKLPKHRELINKIHQFGLQAV

SEQ ID NO: 84918 - protein, 523 aa, unidentified
  source 1..523: note = Duganella sacchari
  REGION 1..523: note = tr|A0A1M7Q3C0|A0A1M7Q3C0_9BURK Tryptophan halogenase; OS = Duganella sacchari OX=551987 GN=SAMN05192549_106129; PE = 4 SV=1
MKTLPNHGVKNVLIVGGGTAGWLTAAFLAKQLGAGAEGAVQITLVESKEIGIIGVGEGTFPSIRGTLATIGIDEARFVRECNGTFKQGIRFNHWVREPAAAGADHYFHPFSLPSQRPGGIELLPYWLQGAAGPDVGFAAAVTMQKRVADAARAPKRPGDADFMGPLNYAYHFDAGKFAALLSTHAQSLGVRHVQATVERVVLDADGAVGAVHTKEAGMLTADLYIDCTGFRAALIGEALGSKFRNINDVLFVDRALAMQVPYERPDAPIPSYTIATAHEAGWTWDIGLHQRRGIGYVYSSRHTDDTRAEQVLRNYIGKAADDLNPRQLKLNVGYREQHWVKNCVAVGLSGGFLEPLESSGIGLIETAAYLVSYLFPYDGDFAPVAKTFNEMMKARYERIVDFVKLHYCLTQRKDHAFWTDNADMASVPDSLQDKLAMWRQRAPHRMDFVVDYEMYPPSSWQYVLYGMEYPTTLYANAKTLPRMDEARKEFAMIEQVSQRALADLPGHRAMVEHLLRQGERKIA

SEQ ID NO: 84919 - protein, 503 aa, Sphingomonas sp.
  REGION 1..503: note = tr|A0A0Q4JAJ2|A0A0Q4JAJ2_9SPHN Tryptophan halogenase; OS = Sphingomonas sp. Leaf28 OX=1735695 GN=ASE79_18705 PE=4; SV = 1
MTEHPIRRVVIAGGGTAGWMAAAAIARTMGSTIALTLVESDAIGTVGVGESTIPPMITFNRLLGINEAEFMRETQATFKLGILFDDWKDRGESYFHSFGITGKDHWSAGFQHFWLHGLTKGHDQPYDDYCLELRAALQGKFAHLPDDRMNYAYQLDSTRYARFLRKMAEADGTRRVEGKIAQVELNGESGDIAALVLESGARIEGDLFLDCTGFRALLIEGALHAGFDDWTHYLPCDSAIAIQTESVRPALPYTRAMAHDAGWQWRIPLQHRTGNGLVYCSRYLDRDAALDRLLGNIDGKTLTEPNMIRFVTGARRQQWHRNCIAIGLSGGFMEPLESTSIHLIQRAVLRLLRLFPAGAVSPRDVAEFNDQQHTDMLQIRDFLILHYKATNRRDSAFWRQCAAMPIPESLDQKIELFRETGRVFRKNEELFAENSWVQVMLGQGIVPQSYHPIATKLRDEELARLLTGLRDGTNATVAGLPEHADYVARYCGAAPARPSTVVA

SEQ ID NO: 84920 - protein, 550 aa, unidentified
  source 1..550: note = Nitrospirillum amazonense
  REGION 1..550: note = tr|A0A560HWX2|A0A560HWX2_9PROT Tryptophan halogenase; OS = Nitrospirillum amazonense OX=28077 GN=FBZ92_121109 PE=4; SV = 1
MTAAEGARRRILIVGGGTAGWLTAAYLAKTLGANLSGGTEITLIESSDIGIIGVGEGTFPTIRSTLAAIGIDEARFLRESTATFKQGVHFVDWAETPAPGASPTQALGAVAGHTHYFHPFNFPHQGNGPELLPYWLLGGAGDLAFAEAVTLQKAVADAARGPKRPIDPPYAAPLNYAYHFDANRLAVLLRTVAIELGVRHRVGTVTDVVLDGSGAVARVETCEHGSLSADLYIDCSGFRAEIIGRALKVPFKSYQDVLFNDRAVALQVPYDRPDAPIPSYTVATAHEAGWTWDIGLNDRRGTGYVYSSRHTDDARAEQTLRRYLGPAAEGRDVRLLKFDSGCRTAQWVGNCVAVGLSGGFFEPLESTGIMLIEVAAHMIAQYFPWGETGLDSAQTAASMAATARTYNALMGKRYERIVDFLKLHYCITRRTDSAYWRDNADPATIPESLRDRLAVWAHRPPGRFDFVADHETFLPASYQYVLYGMGFKTDLEPARALHRRMDEAQHEFRGLRTVTPQAVSSLPTHRELVEEVYRNGFRPPQAAPAVGGRR

SEQ ID NO: 84921 - protein, 494 aa, Rheinheimera nanhaiensis
  REGION 1..494: note = tr|I1E2W9|I1E2W9_9GAMM Uncharacterized protein; OS = Rheinheimera nanhaiensis E407-8 OX=562729 GN=RNAN_3673; PE = 4 SV=1
MQSVRKVVVLGGGTSGWIAAALLKKVLGPVVDIDLIESDDIGTVGVGEATIPPIRLLNNVLGVNEAEFLRETKATIKLAIKFENWRVPGEGYYHTFGAPGKSLAFCHFHHLWRRAQQLGDTTSLWQYDLNYLCAEAGKFASINSKDPVLELPYAYHFDAGLYARFLRKFSEQMGVVRHEGKVSGVTQHGNGDIQHLVLEDGRVLAGDLFIDCSGFRGLLIQQKLNTGYEDWSHWLPCDRAVAVPSERFEHTLPYTRAIAHSSGWQWRIPLQHRNGNGLVYSSSHYTEQQAAELLLSNLDSKALAEPKFIQFKTGRRRKQWHRNVVSVGLSSGFLEPLESTSIHLIQSGVVRLLQLFPHQGVTEALVNEYNRQSQIEFEQVRDFIILHYHVNERTDSPFWRDVRQMQVPDTLKRKIQLFAENGSLFREQNDLFLESSWLQVMLGQGIVPKDYHPLANSYSEAQLKQMLQTMLAIKRDPLDKLPSHDEFLRRICAA

SEQ ID NO: 84922 - protein, 507 aa, Shewanella oneidensis
  REGION 1..507: note = tr|A0A2W5DD61|A0A2W5DD61_SHEOE Tryptophan 7-halogenase OS=Shewanella oneidensis OX=70863; GN = DI594_19355 PE=4 SV=1
MTIRKIAIIGGGTSGWLAANHLGRALKGRSGLSISVIESPDIPIIGVGEGTVPSIKKSLQSFGISESEFIRTCDVTFKQSIKFVNWLDKSRHGKHNFYHHLFDIINLHQGDAVSAWLAEQSGHFADFISPQHLACEAAKAPKLITTPEYAGVLGYAYHLNAAKFAKLLAKNAIEKFNVEHILTTVHDVCLGVDGAIESLQTEQGNLSFDFYIDCSGFESILLAKALKVPFISKAQQLFIDTALVAQIPTQPADVIPPYTKATAHQAGWIWDIALTQRRGTGFVYSSAHMNQTEAEQKFDRYLGGKLADIPHRKIPMTVGYRQQFWVKNCVALGLAQGFLEPIEATSILLTDFSARFLAERFPANKDEVDYLSMRFNRTVNHAWERVVEFAKLHYCLSDRIDSAFWLDNQREETIPEPLKERLNMWKSFSPIAEDFPSKFEVFNLDNYLYVLYGMKYPTQPHDRGLVAKANLNAYMSNMSNVKRQMFEGLPEHRELIDKICTYGLQAI

SEQ ID NO: 84923 - protein, 530 aa, Sphingomonas sp.
  REGION 1..530: note = tr|A0A0Q4J0W8|A0A0Q4J0W8_9SPHN Tryptophan halogenase; OS = Sphingomonas sp. Leaf28 OX=1735695 GN=ASE79_18690 PE=4; SV = 1
MATDTGPGATNDQPITTIVVVGGGTAGWLAACLIAARAYRGAEQPLSVTLIESPDVATTGVGEGTWPTMRRTLERIGISETDFLLACDGAFKQGSRFDGWRTGAADDSYLHPFTAPVDGDPRDIVAAWAEHGGRFADTVGAQGAICHRDLAPRQRAMPDYAGTLNYAYHLDAGKLAAMLMRHATERLGVRHVRDHVVGIDGTADGDIAAVRTRESGAIAGDLFLDCTGHAALLIEGHYGIGTVDRGGTLFNDRALAVQVPVAANSPIASQTNATAHAAGWIWDIGLPTRRGVGCVYSSAHLSDDAAADTLTRYLRATAPDAALPSFRQLTFRSRHRETFWHRNCLAVGLSAGFLEPLEASAIVLIELSLEALLDNFPSHRGAMDIHARRFNTLFRYRWDRIVEFLKLHYVLSERDEPYWRDHRDPASIPPRLAELLQLWRHQPPSRADFPMVDEIFPAASYQYVLYGMGFPAPTRGPIATPDRARTQTLLAQVDQRRRMLAAGLPTNRAYLDALRHATAPAPAPAMEPIA

SEQ ID NO: 84924 - protein, 499 aa, unidentified
  source 1..499: note = Duganella sacchari
  REGION 1..499: note = tr|A0A1M7N007|A0A1M7N007_9BURK Tryptophan halogenase; OS = Duganella sacchari OX=551987 GN=SAMN05192549_103409; PE = 4 SV=1
MENIKQVVIVGGGTAGWMTAAALARVLGDKIKLTLIESDDIGTVGVGESTIPMIKLFNSVLGIDEDEFMRATQATFKLGIEFKDWGRIGDSYMHGFGIFGQDLATLPFYQYWLRMQHAGKAPDIEHYSINRMAAKAGKFMRADRSHGNSPLADIVHAFHIDAGLYARYLRHYAEAKGVRRIEGKVVDALTRASDGHVDAVRMENGELIGGELFIDCSGFRGLLIEQALHTGFEDWSHWLPCDRAYAVPCELGNELLPYTRATARPAGWQWRIGLQHRTGNGHVYCSKFMSDDEAAGILMSSLDGRALAEPKQLRFTAGKRKQVWNRNVVAVGLSSGFMEPLESTSIHLIQSTIARLIAFFPDQGFSAADVAEFNRQCDFEVERIRDFLILHYHATERNDTPFWDHVRTMDVPQTLRDKMALWRTRGRIVRVDNELFAEAGWLQVLQGQRVPVEGYHPLADLMDESEVAGYLRDIASVIGQCVSQMPSHAAYIKARCAAK

SEQ ID NO: 84925 - protein, 495 aa, Oceanicola granulosus
  REGION 1..495: note = tr|Q2CG82|Q2CG82_OCEGH Putative tryptophan halogenase OS=Oceanicola granulosus (strain ATCC BAA-861 / DSM 15982 / KCTC 12143 / HTCC2516) OX=314256; GN = OG2516_03645 PE =4 SV=1
MRVVILGGGTAGWMAAAALSRYFGDRLSVTLVESDAIGTVGVGEATIPQLRLFHEGLGIDEADFLRATGGTIKLGIEFIGWQREGTRYFHGFGDVGRKIALAPFHQYWLRYNAEGGELPLEAFSVNAEAARRGLYGVRPGAAAARLPASAYHFDATRYAAFLRRFAEAHGVVRREGRVRAPELTASGDIAALVLESGARLSGDLFLDCSGFRALLIEEALGAGWEDWSHWLPCDRALAVASAGDGRLDPFTRASARAAGWQWRIPLQHRTGNGHVYASAFTTDDAAHDALMTTLPGEAQGESRPLRFTTGRRRAFWRRNCIALGLASGFLEPLESTSIYLVQSGIARLLALFPPPGGDATALRAQYNRQMAFDFALTRDFLILHYHLTERPGALWEHCRTMALPDSLAEKIALFAERGEIVRFNGELFDVPSWLQVMWGQGLRPARHHPLVDAARPADLARYIDDTARDVAARLAPLDSHAAFIARRAAAPAPAL

SEQ ID NO: 84926 - protein, 509 aa, Gordonia sp.
  REGION 1..509: note = tr|A0A1A0IU02|A0A1A0IU02_9ACTN Tryptophan halogenase; OS = Gordonia sp. 852002-51296_SCH5728562-b OX=1834101; GN = A5766_23600 PE=4 SV=1
MSDATRSGRLISETADVVVVGGGPGGSTVATLLARSGHRVVQLEKESFPRYQIGESLLPSTIHGVCRLLGVDEKIKNAGFMHKRGGSFRWGKNPVPWNFLFAISPEFAGEGSYAYQVERMKFDQILLENAAEQGVDVRQRSRVNGTITDETGRVTGVRYVDAERVEHRIDAKFVVDASGNTTRLSKHAGGERIYSDFFQNVAVFGYFENGKRFPAPDSGNILCAAFDEGWMWYIPLSDTLTSVGAVISRDKAEHVLNAQEETLLHYVDRCEIVKDMLSDATRVTEGTYGEIRIRKDYSYANTRFWGNGMVLVGDAACFIDPVFSTGVHLATYSGVLAARSINSVLAGAMTEERAFTEFEGRYRREYAVFYEFLSAFYDMEQSEDSYFWKARKVTNFDRNDMTAFVSLVAGAYSGEQALTDPEQIIERFSASTAALTEAAERTGGMDTDSGQRMGHLFGTQVVRDVMEEMNAFQARGAVGTDGTEPPLLDGGLVPSADGLSWAEPAPATV

SEQ ID NO: 84927 - protein, 501 aa, Cellvibrio sp.
  REGION 1..501: note = tr|I3IF32|I3IF32_9GAMM Tryptophan halogenase; OS = Cellvibrio sp. BR OX=1134474 GN=O59_000688 PE=4 SV=1
MKNIVIVGGGTAGWMSALVMAREWIQQGVSIRVIESPDIGIIGVGEGSTPALKLFFDRLNIAESEWMPACNATYKCGIRFDGWSTHAGFESYFHPFSAALDRQTLPMFMHNAQMRLRGADVYAQPDRFFIAARLAQQCLAPVAPEHFPFDVHYGYHFDSTLLGQFLRKKALALGVIHESAHVVAVQQRENGDIASVQLADERIIAADFFVDCTGFSSLLLQQTLQVPFISYANNLLNNAAVAMPSVIGEKIPSQTLATAMSCGWAWQIPLTNRYGNGYVYSADFCSADQAETELRAHLGLLDADVPVRHLKMKVGRVKQHWAHNCLAVGLAQGFIEPLEATALFLVQQTVAIFAECFARGEFTNRLQAEFNQRMNNHFDGVRDYIVTHYKTSSRRDTDYWCANTANQQDVSPVMLELYRSWYAGKDLAAEINRLQLGNYYPAPSWYSIFTGMGIVPKGEQLRRATAEEACFDIAAVDEFLRRCSLNFNDHRALLMRWQLSG

SEQ ID NO: 84928 - protein, 495 aa, Cellvibrio sp.
  REGION 1..495: note = tr|I3IE99|I3IE99_9GAMM Tryptophan halogenase; OS = Cellvibrio sp. BR OX=1134474 GN=O59_000405 PE=4 SV=1
MDMSQKIKKVVIAGGGTSGWCTAVALSRQLGTLLDITLIESAEIGTVGVGEATFPTICSFHKIHGIDEQEFLSATLGSIKLGISFENWARKGDRYIHPFGSFGKASWIGDFYHYWLAAKARGYEGELEDTCFELQAAKAHKFSITENPKLNYAYHFDASLYAKFLRRLSEEKGVRRVEGKIVQVKQHADSGFIESVVLESGACIEGDLFIDCTGFRGLLIEETLKAGYEKWGHWLRNDSAVALQTEFSGDIPPYTRAIAHDSGWQWKIPLQHRQGTGHVYSSAYISDEAARNTLLENLDGDIRAELRLLKFNTGRRKQAWVKNCVAIGLAGGFVEPLESTSIHLIQIGVSRLLQLFPFEGCNEHLIRRYNKMSHAEYENVRDFIILHYKATERDDTPYWRDCRDMTIPDSLAERIELFKQTGHVHHETNEVFGVTSWLQVMIGQRITPQGYSHFPHVISDEQIVAGLMSMKSKIAKTLEKIPSHADFLKSYCAVK

SEQ ID NO: 84929 - protein, 411 aa, Marinobacter sp.
  REGION 1..411: note = tr|A0A139DH70|A0A139DH70_9ALTE Tryptophan halogenase; OS = Marinobacter sp. T13-3 OX=1794906 GN=AWU57_2935 PE=4; SV = 1
MTTKDLESDIIIIGAGPSGAVAAALLRKNGYQVTILEKQHFPRFSIGESLLPQCMEFLEEADMVSAIEEAGFQYKNGAAFHYDGRNSAFDFREKFSPGWGTTFQVQRAHFDHLLAKEAEKQGADIRYGHEITEVDFSGERPWLKVRTDEGQEYEARGKFVLDASGFGRVLPRLLDLETPSEFPVRMSLFTHIEDNIDHPRHDRDKILITVHPKRRDIWFWLIPFSNGRCSLGVVAKPEYIESREGEPLDILREIVAEDPNLSSLLENAKWDTPAREIRGYSCNVKHLAGRNYALLGNAAEFLDPVFSSGVTIAMKSASLAADTLHRQFSGEAVDWQEDYAAPLMVGVDTFRTYVDAWYEGTFQDVVFAENPNDSIKQMISSILAGYAWDSSNPYVSESRRRLGTLAELCRA

SEQ ID NO: 84930 - protein, 552 aa, unidentified
  source 1..552: note = Nitrospirillum amazonense
  REGION 1..552: note = tr|A0A560FP36|A0A560FP36_9PROT Tryptophan halogenase; OS = Nitrospirillum amazonense OX=28077 GN=FBZ89_10264 PE=4; SV = 1
MADTEAPTDGAHAKGAPVKNVLIVGGGTAGWLAAAYLARTLSIGQPGGARITLVESSDIGILGVGEGTFPNIQRTLRRIGIDESVFMRESEATFKQGIRFDHWQHAPGSGERDHYFHPFQSAIGPQDLDLIPYWLLGATGDGMPLDTALTMQKRVADAALAPKRSGDADYAAPLNYAYHFDAVKFARLLRVVATDLGVRHVVDTVDAVPLDETGAVAGVVTRENGTLTADLYIDCTGFRAQLIGQALKSPYQSCRKWLFCDRAVALQVPYGQPDAPIPSYTISTAHEAGWTWDIGLETRRGIGHVYSSDHTDDARAEQVLRDYIGPAAADKTARTFRFEAGYRPEPWVRNCVAIGLSSGFFEPLESTGIVLIEVASVLLTSLFPWAGDMTTAARQFNRIMRQRYERALDFLKLHYCLTRRTDTAFWRDNADAATVPDTLHDLLDRWRHRPPEGLDFDLNLDTFSEASWQFVLYGMGYHTDLSAQAGAFRHMDEARQQFAAIRAGTEQALAALPRHRDLITQIYRHGLRPRTPFGGAPSGRANLSSGMAGLSR

SEQ ID NO: 84931 - protein, 490 aa, Sphingomonas sp.
  REGION 1..490: note = tr|A0A0Q4JPS5|A0A0Q4JPS5_9SPHN Tryptophan halogenase; OS = Sphingomonas sp. Leaf28 OX=1735695 GN=ASE79_01655 PE=4; SV = 1
MTACLIAHRWRARGMRVTLVESPEIGIVGVGEGSTPQLKHFFDTLGIAEDAWMPACDATYKLGIGFEGWSDRAGYERYFHPFPTALDSHTASQFFYNARALRTGRDVEAHPDRFLLPARLAAAHCAPQPAASFPFEVSYGYHFDAYKVGAFLATHATETLGVDHLQCRIASVERTPTGQITALIDTDGGRISGDFFVDASGFRSTIFAALDVPFVSYADALFNDRAVVMPTAHTPGAPIPSQTRATALSAGWAWHIPLTSRAGNGYVYSSRHLTEAQAEAELRAHVGTEAGEARHLKMRVGRVHDSWSHNALAIGLAQGFLEPLEATALHLVIATVEAFLDGVDAGSATDAVRSAFNTRIAARYDGVRDYIVAHYRLNQRHDDPTGYWAQARGVEVLSDDLKMLMSAWFTGADMVASIDRAGLARYYSAISWHCLFAGYGTFPEPARLIPPGADIDPVDMTRIDDFLTRCAMNFGSHASRLRPADLKDFA

SEQ ID NO: 84932 - protein, 495 aa, Alteromonas sp.
  REGION 1..495: note = tr|A0A2K8Y3W3|A0A2K8Y3W3_9ALTE Tryptophan halogenase; OS = Alteromonas sp. MB-3u-76 OX=2058133 GN=CW735_18190 PE=4; SV = 1
MTVSNQARQKQRIVIAGGGTAGWMAAAAFTRLLGKEVDVTLIESSDIGTVGVGEATIPTLVFFHKLLKISEQEFMSETNATFKLGINFENWKDVNDAYLHAFGVTGKDCWAAGFQHFWLRGLKEGLAGDFGDYCLERQAAEANKFAHLPNNGLNYAYHIDATKYALFLRKLAEKEGLRRIDSTICDVKLRESDGFIQSLTLSSGETIEGDFFIDCSGFRGLLIEKALHTGYEDWSHWLPCDSAVAVQTESVGDPIPYTRCIAHEAGWQWRIPLQHRVGNGMVFCSNYFSDEQVVEKLLANVEGKPLNDPRVIHFRTGRRRKQWNRNCLALGLASGFLEPLESTSIHLIQQGIVRFLRMFPTQGVIQEDIDEFNKQSEFDIEHIRDFIILHYHVTNRSDTPFWRHCRQMDIPDSLTHRIELFKKTGRVFREGNELFDDSWQQVMIGQGLMPQSYHPIVDTMSRQELASLLNGISDGISRSVDKLPPHQDYITRFCG

SEQ ID NO: 84933 - protein, 512 aa, Lysobacter sp.
  REGION 1..512: note = tr|A0A0Q8JTC6|A0A0Q8JTC6_9GAMM Tryptophan halogenase; OS = Lysobacter sp. Root690 OX=1736588 GN=ASD86_03215 PE=4; SV = 1
MHNDAERNASAARPIKRVVIAGGGTAGWMAAAAISKILGGSLEISLIESEEIGTVGVGEATIPTLTTFHRLLDIDEREFMASTQGTIKLGISFENWTTEQHRYIHSFGSTGKDHWSAGFQHFWRRGRELGLAGSYDDYCVELQAALQGKFAHLKNYRMNYAYHLDASLYARFLRTMSEGNGCRRIEGKIVEVLTDPDSGYITALRLERGEVIEGDLFIDCTGFRALLIDKTLGVGFEDWSHWLLNDSAIAVQTTSVCDPVPYTRAIAEKWGWQWRIALQHRVGNGIVYSSRHVGDDEAKQALLDSVDGEILKNPWPVRFRPGRRLQCWSHNCIALGLAGSFIEPLESTTIHLIQRGITHLIRSFPQVISQAGVDEYNTQMADELQHVRDFVVLHYHATERRDSPYWEYVSSMTLPDTLRRRIELFRETGTVFHVPGELFAENSWIQVMMGQGITPKTHHPTADTMSQADLRRFLDDIRTQVDATVRALPSHQAYLSQYCPSAPRVTVPANVA

SEQ ID NO: 84934 - protein, 500 aa, Xanthomonas cynarae
  REGION 1..500: note = tr|A0A2S7B8E4|A0A2S7B8E4_9XANT Tryptophan halogenase; OS = Xanthomonas cynarae OX=109214 GN=XcyCFBP4188_13975 PE=4; SV = 1
MTQAPIRKVVIVGGGTAGWIAACALSHQFRELLEITLVESEQIGTVGVGESTVPPIRTFHRFLQIDEQEFLRAVAGTFKLSIFFEHWRRQGERYIHPFGITGQSTLVCAFHHLWLESQRRGMPGTFGDYCLETVASRVDRFALLREPAVNYAYHLDAALYAKFLRARSEAFGVKRIEGKIQQVTLQPDSGDVATLVLEDGQVLDGDLFIDCSGFRGLLIEQALHTGYEDWSHWLPCDRAVAVQTEAAGPPVPYTRAIAHQAGWRWHIPLQHRVGNGLVFSSRHLSDDEAHAKLLRDAAAPALKDPWLVPFRTGRRRKAWNKNVVSLGLASGFIEPLESTSIHLTIAAVVRLITLFPADGIAPSQVQLFNDISRAEMEHVRDFIILHYHATQRDEPLWRQCREMELPESLALRLRAWRERAHAWQGADELFRVDSWTHVLMGQGLIPAQHHPLARAVSDRDLHRLLDGIAQPIQRAVEQMPSQQAFIDAYCKAGASAWGAA

SEQ ID NO: 84935 - protein, 504 aa, Sphingomonas sp.
  REGION 1..504: note = tr|A0A0Q4K2A2|A0A0Q4K2A2_9SPHN Tryptophan halogenase; OS = Sphingomonas sp. Leaf28 OX=1735695 GN=ASE79_01645 PE=4; SV = 1
MANHPLRIVIAGGGTAGWMAAATFARFLETGYEIDLIESDAIGTVGVGEATIPQIHLFNDALGLDEDAFLRATGGTFKLGIEFVDWLKPGHRYMHAFGDVGRDVGLLPFHQYWLRARSLGLAGDLGAYSLNTHAALANRMQRGPARTARTLPSMPYAYHFDAGLYARYLRRYSETRGVNRIEGKIVRVTRDGDSGDVSRLVLENGTTVAADLYIDCTGFRGLLIEEALGTGYEDWTHWLPCDRAIAVPSARGEKFTPYTRSTAHAAGWQWRIPLQHRTGNGVVYSSAHMSEDEATATLLRGLDTPAMADPRTITFRTGRRKRMWNHNVVALGLAAGFMEPLESTSIHLIQSAIARLLKLLPGRVIAEADRTEFNRQSDFEYERIRDFIILHYNATERDDTPFWRQCRDMAVPDTLAAKIALWRGNGHIVREHEELFTEVGWLQVLAGQGIVPDGHHPLSDAISTADLGEFMDTIDKLNAREAHQMQDHAAFVAQHCAAAPSLAA

SEQ ID NO: 84936 - protein, 502 aa, Sphingomonas sp.
  REGION 1..502: note = tr|A0A0Q4IXQ9|A0A0Q4IXQ9_9SPHN Tryptophan halogenase; OS = Sphingomonas sp. Leaf28 OX=1735695 GN=ASE79_19410 PE=4; SV = 1
MKRVQRLVILGGGTAGWMTAAAMSATFGDLVNISILESDAIGTIGVGEATIPTIHWFNQLIGLDEEAFVAATKASFKLGIEFVDWARPGTRYFHPFGRYGVDLGLVPFHQHWLRGKGDGLDRPLSVYSLAAQLAAAGRFAKPVDDPRSILSTLGYAYHFDAGLYARHLRQLAEKRGVVRHEGLLRDIERHPKTGFVTALTSDRGERLEGELFIDCSGFRALLIGETMGARFEDWSHWLPCDRAVAVPCARIAATTPFTRSTLRPAGWQWRIPLQHRTGNGYVYASSFVSDDEAVATLLSNLDGEALADPRMLRFTAGFRREAWRGNVVAIGLSSGFLEPLESTSIHLIQSGIAKLITLFPDADCDPVLARQFNTLFARDMDGIRDFLILHYHATQGHDAPLWQHTRHMTPPPTLVDKIAQYTRAGRLMLSADDLFREASWLAVLEGQGVGALGHAPLADTLDAATNRRQLNQIETVIARATPTLPLHDAAIAALVAPQVAGR

SEQ ID NO: 84937 - protein, 526 aa, Dyella sp.
  REGION 1..526: note = tr|A0A3M0EMB3|A0A3M0EMB3_9GAMM Tryptophan halogenase; OS = Dyella sp. YR388 OX=2135665 GN=C8J93_3766 PE=4 SV=1
MARLKKVLIVGGGTAGWLAACYLAKAVNAADPDGVQVHLVESPDIGLLGVGEATFPSIRGTLAAIGLDERRFLVGATATYKQGIHYRHWVRPPGTPGADHFFHPFNAPSQRPGGPELLPYWLLGAAPDGMPFADAVSMQTTLVDHGKGPKRFRDADYQGPLNHAFHFDAACFARVLAEHGQETLGVQRHIATVERAELDEHGAIARIVTKELGELTADLYVDCTGLKGMLIGNMMQSPFRSRADVLFADRAVAIQVPYAQPDSPIPSYTISTAQEAGWIWDIGLQKRRGAGYVYSSRHTDVERAEAVFRNYLGPVADGLKAFHIKFETGYRPEHWRKNCVAVGLAGGFVEPLESTGIALIELATYLLTHLLPNDTDTMEQAARHFNEMMIARYDRIIDFIKMHYCLSQRRDSKFWIDNADPASIPDSLQDKLAQWKHRPPHRLDFVSDLEMFLVSSWQYVLYGMEFKTDLSPMRNLYPRVDEARQEFRNIQVAASQALHDLPDHRALVEQMCREYRARAGIEDAVA

SEQ ID NO: 84938 - protein, 536 aa, Cellvibrio sp.
  REGION 1..536: note = tr|I3IFM1|I3IFM1_9GAMM Tryptophan halogenase; OS = Cellvibrio sp. BR OX=1134474 GN=O59_000877 PE=4 SV=1
MQQNKTQQDAMQQQELQKKGLQKTVQSIVIVGGGTAGWMTAAALSHFLSAQHYHITLIESDQIGTVGVGEATVPHIRYFNQTLGIDENEFIRQTNATYKLGIEFIDWGKLGDAYIHPFGIYGRTINDVSFHHYWLKAKLAGDSRPIGDYSLAVQAALQSKFSYPSANPESLASKYSYAFHIDASRYAQFLRTYAEQKGITRREGKIQQVNQCTDSGCITSVILDDGSTIGGDLFVDCSGFRGLLIEQTLQVGYDDWSQWLPCDRAIAVPSEKISPPLPYTKATAKAAGWQWRIPLQNRNGNGQVYCSHYVTEEQVAENLLASLDGKPLANLNHIRFTTGCRKKTWYKNCVAVGLSSGFLEPLESTSIYLIQMAITKLVEYFPRTQNDITLAEEFNRDMRLEYERVRDFLVLHYTATTRDDTEFWRYMRNMKKPASLDEKIALFVEQGHVMQYKKGMFLEPSWVAVYLGQGIVPKGYHPAVERLNKTELDSHMANLRAEINNYCTDMPPHSLAIEKHTNAMSNVWPPAALSLYEVFS

SEQ ID NO: 84939 - protein, 501 aa, Rhodanobacter sp.
  REGION 1..501: note = tr|A0A1V3PVS0|A0A1V3PVS0_9GAMM Tryptophan halogenase; OS = Rhodanobacter sp. B05 OX=1945859 GN=B0E47_11015 PE=4; SV = 1
MNDARIRRLVIVGGGTAGWLTAALLAHALGSQLKILLVESAEIGTVGVGEATIPQILHVNRFLGIDEDDMLRAVHGTFKLGVQLNDFTRVGDSYLHAFGDLGLPLGLTPFHHYWLRSRGRPGAQSLWAHSLNAAAAAANRFARMDTVPNSPLGGIRYAYHFDASLYGQYLREHIKPGIVQRIEGKVVDVRLHADDGHIESLLLDGGATVEGDFFIDCSGFRGLLIEGALKTGYENWQHWLPCDRALAVASAPGGPMRPYTQASARSAGWQWRIPLQTRTGNGHVYCSRFISDDEAAAQLLANLETEALGDPRPLRFVTGMRKLAWNRNCLALGLAAGFMEPLESTSIHLVQSGVNRLLAMFPDRHCDPKLADEYNRQTRFEYERVRDFLILHYKATERDDTAFWRQCAAMEVPPELARKIALFRSRGQIFREHDELFTEIAWLQVMIGQRIEPQNHHPLADALDEAQLDGFLGDIRTLIGRASASMPDHARFVADHCRGGP

SEQ ID NO: 84940 - protein, 505 aa, Cellvibrio sp.
  REGION 1..505: note = tr|I3I6N3|I3I6N3_9GAMM Tryptophan halogenase; OS = Cellvibrio sp. BR OX=1134474 GN=O59_003598 PE=4 SV=1
MKPVNNVVIVGGGTSGWMCAAAIARMAPPNASITLVESEAIGVIGVGEATIPPLLEFNQFLGLDEHEVLRECQGTYKLGIEFVDWLDLGKRYFHPFGFYGRDTPEFAFHQLWLRLRALSETGKAPAELAGDINDYNLCAMAARLGRFAQPQGGSDAILSTLRHAYHFDSMRYGQLLRRYAEQRGVRRVEGLVDSVQQHPDHGMIESVTLSDGQVLAGELFIDCSGFKSLLIEGAMNSEFIDWSRYLPCDRALALSTTGTGAPDPFTRATADNAGWRWRIPLQTRMGNGYVYSSAFADEDDVHRALLAGAEGEALGNPRPLRFRTGHRRLFWEKNCVAIGLAGGFIEPLESTSIHLAQIGIQRLINLWPGRGINAAEIAHYNRIMTADYERLRDFIVLHYSATQRRDTEFWRYVGHMKIPDTLASKLEIFRGSGRVIAAPDDLFTPHSWLAVMLGQGINPTHYDALVDRVPETALIQNMRHLKDAIGKTAAALPSHEAYLKRYCAA

SEQ ID NO: 84941 - protein, 498 aa, unidentified
  source 1..498: note = Croceicoccus naphthovorans
  REGION 1..498: note = tr|A0A0G3XIC8|A0A0G3XIC8_9SPHN Tryptophan halogenase; OS = Croceicoccus naphthovorans OX=1348774 GN=AB433_11070; PE = 4 SV=1
MTQQPIRIVIAGGGTAGWMTAAAMSRTLGRTAHVTLVESDMIGTVGVGESTIPPLVNYLRLLNIPEPDFMRATHATFKLGIQFDNWRVPGESYFHSFGGTGKDHWTAGFQHFWMEGKARGHDVSYDEYCTELVAARESRFAHLPDGRLNYAFQLDATAFARFLRGIAEGEGTQRVEGKIAHVEMDGESGDVAALTLESGTRIEGDLFIDCTGFRALIMGQALHIGYDDWTHWLPCDSAIAVQTSSVRPAVPYTRAMAHDAGWQWRIPLQHRVGNGIVYCSRYLDHDAAEERLLGNIEGETTTKTNRLRFVTGARRKQWHRNCVAIGLSSGFMEPLESTSIHLIQRAIMRVIRMLPAGRVSERDEAEFNAQQMQDMEQIRDFLILHYKATDRRDSAFWRHCASMEIPDSLAHKIALFRETGRVFRTNEELFVENSWIQVMMGQGIMPQSHHPVAGKLSDRELEHLLRGLRETVAKTVGSLPAHADYVAKYCGAQEAEAA

SEQ ID NO: 84942 - protein, 507 aa, Cellvibrio sp.
  REGION 1..507: note = tr|I3I6B7|I3I6B7_9GAMM Tryptophan halogenase; OS = Cellvibrio sp. BR OX=1134474 GN=O59_003482 PE=4 SV=1
MKFMIKKIVILGGGTAGWMAANILAKRWAKYSVEIALVESSDIGIIGVGEGSTPQLKSFFDYMEIAEAEWMPACNATYKTGIRFCNWSTKPGFENYFHPFPAQPDDYSAPAFFYNCFVRRKGADVYAHPDKFFLATYLAKHQLGPKPAHHFPFQLGYGYHFDSSLVGLFLKQHAAKLGVAHIDARITEVKLDAQGYISHLLTENQQPLAADLFIDCSGFAGVLIQQALKVPFINFSSNLFNDSAVVMPTAAAMDITPQTTATALNAGWMWNIPLVNRIGNGYVYSSNYLSADMAETELRQKLNLLDKDVPVRHLKMKVGRLQHHWAKNCLAVGLSQGFIEPLEATALHLVQETVLGFAEAIELGDFTDREQANFNRSINQRFEAVRDYIVCHYRVNSRMDTQYWRDNANNNSLSDSLRELLQVWVGGGNLTQEIERQKIGCYYPSASWHCLLAGYGLFPTQDQLSVGNEVAHKYKMENIENFISRCALNFSSHREQLNDLVAKQQVM

SEQ ID NO: 84943 - protein, 503 aa, Cellvibrio sp.
  REGION 1..503: note = tr|I3IAH9|I3IAH9_9GAMM Tryptophan halogenase; OS = Cellvibrio sp. BR OX=1134474 GN=O59_001738 PE=4 SV=1
MQQPFRIIIVGGGTAGWMTAAAISSVYKDRSRFQITLVESEEIGSIGVGEATLPSIKSFNDQLGIDEVEMMRRTQATFKLGIQFNDWGRLGASYIHPFGLYGSLKNSSDFYQYWSHVASKKTIPDISKYSFAVQLCERNQFTFPSKDSGQIESTFSYAYHFDAALYAAYLREISERAGVLRVNGIVEAINNDPDTGNITAVFLRDGKTLSGDFFIDCSGFRSLLLHKNLQSEFEDWSHWLLCDRAVAMQSEQPKDIPPYTMSTAKEAGWQWRIPLQHRAGNGYVYCSNLISDDQAHDSLLKGLAGKPLTDPRFIKFKAGRYKKSWQKNCVAIGLSSGFLEPLESTSIYLIHIAIICLLRVFSFQSNKNLSILSDEYNRLIDNEYERIRDFLILHYRLNDRTDSELWRHCQSMKVPDSLMQKMDLFKRRGYSESFKYGLFSTPSWLAVFHGQGLFQQGVDPFISSIPTEKIEPILAEVSGMIDKGLQAASTHEHFIKQYCNAAT

SEQ ID NO: 84944 - protein, 413 aa, Rheinheimera nanhaiensis
  REGION 1..413: note = tr|I1E0N1|I1E0N1_9GAMM Tryptophan halogenase; OS = Rheinheimera nanhaiensis E407-8 OX=562729 GN=RNAN_2872; PE = 4 SV=1
MEHFDVVIIGAGPSGACAGALLRKAGKKVLCVEKQHFPRFSIGESLLPHCMQFLAEAGLEPALQQQAAAHGFQFKNGAAFLKNDFRTAFDFTDKFSPGPGTTFQVKRAAFDKILADAAAEQGLQIRYGVTVEQVDITGAAQALLQVSDDNGRQYQLSAGFVLDGSGFGRVLPKLLDLEQPSDFPVRQASFCHIRDNISDPRFDRNKILITVHSSLPDVWFWLIPFSDGSASLGVVGKQQRFDASRSAADNLWQHVQQTPELAQLLAQAEPVNEAQSLTGYAANVRSLHGNRFALLGNAGEFLDPVFSSGVTIALRSAAMAVPLVLRQLNGEQPNWDTEYSKPLRKGIDTFRAFVTAWYDGRFQDVIFSRQRQAKVTAMISSILAGYAWDQANPYVAEPERRLNVLRELCLDAE

SEQ ID NO: 84945 - protein, 494 aa, Massilia sp.
  REGION 1..494: note = tr|A0A0Q7G0P1|A0A0Q7G0P1_9BURK Uncharacterized protein OS=Massilia sp. Root418 OX=1736532 GN=ASC94_03310; PE = 4 SV=1
MNTAYKRIVVVGGGTAGWMAATSLATALPGSTVELVESEAIGIVGVGEATFPMLRDFHKLNRIAEADFLRATNGTFKLGIEFRDWRAKGHRFFHTFGNFDDLAGPACLWGQYRRVDDPALGALGEQCLPSVMASQGRFVTPPADQAGLFNYAYHFDASLYAGFLRGIALSRGAGRTEGRIVEVRRRADGSVDHLKLEDGRVVAGDLYIDCSGFASLLLGRALEEPFVDFSRWLPVDRAWAVPSKPSGPGLAPHTVATALEAGWSWRIPLSSRVGNGHVFSSRYIDEDRARTQLLDQLDGPALAEPRLLRFTTGHRERFWVHNVVGLGLSSGFLEPLESTSILLIQRGLGKVIELLLPGARPAAAVVASYNRGMARVFERIRDFIILHYCLTERRDSALWRDMASMELPETLDFKLHAWRQTGSLNMYGEEGFEATSWLAIHAGMGNWPLRADPVLAEVPRAEALQALHQRRDHFAAVVAGMPTHEAFLRHVLGR

SEQ ID NO: 84946 - protein, 501 aa, Cellvibrio sp.
  REGION 1..501: note = tr|I3I495|I3I495_9GAMM NAD(FAD)-dependent dehydrogenase, putative OS=Cellvibrio sp. BR OX=1134474; GN = O59_001161 PE=4 SV=1
MQTAIPKSIAIVGGGTAGWMAASILLHAWKTHQVEITLVESEDIGIIGVGEGSTPALRKFFSYLHIAEKEWMPACNATYKAGIYFDNWGETPGYESYFHPFYTAWDQEGAYAFVAAANSQRLGNNQQAHPNPYFLAYHLAQANRAPLPVDPQLGNQVNYGYHFDSALLGKFLRDRAKQLGLTHLIDNVEQVTLTAEGDISSIQTRQHGSIGADFFIDCTGFASLLMGKTLLEPFLSFKENLFNDAAVTLPTAIDEEIVPATRSTALGYGWAWKIPLTNRYGNGYVYSRDFISPEQAEQELRNHLGDVAKDSPARHLTMRVGRIHNHWKKNCLAVGLSQGFIEPLEATALAIVQSTLENFVDCFDQPVSETTKENYNNYINELIDGIRDYIVTHYLLNTRTDTTYWRACREQAKPSTKLEALISCWDNQGDFMDLLFKQQRAKVYKPESWFCIFAGMGRFTHLRTTKANITPTNIELTLQEKLNNIGNLYFIDHKKRLNIHC

SEQ ID NO: 84947 - protein, 324 aa, Bradyrhizobium sp.
  REGION 1..324: note = tr|J3CXQ4|J3CXQ4_9BRAD Tryptophan halogenase; OS = Bradyrhizobium sp. YR681 OX=1144344 GN=PMI42_01602 PE=4; SV = 1
MSPLVQPVLRQLGLWPAFVAQGFSPSHRTLTAWDEAGLTSSELLLEARGPSWRVDRPAFDGCIAMEACRAAARVDAKVSQIEREEDGWSVACDDGNSHSARLVIDATGRARALADRRGSRAKVQDRLIAAYAEAVTSGPSAPELLVEAFEDGWWYTLALGEGRRAFACMTDSDLARGLRLSTPDGWRAALAKTQFVAAVASKVVQFEQPRLLPAGSRTAANATGFRFLCAGDAASAFDPISGHGVVKAMRSGVFAAYAASDCLARGDTTALDRYDSWVAREAAVYATTLSEHYGSVSRWDGRPFWQRRRADMSSSNSLSSLSGQ

SEQ ID NO: 84948 - protein, 502 aa, Asticcacaulis sp.
  REGION 1..502: note = tr|A0A2T5XCF5|A0A2T5XCF5_9CAUL Tryptophan halogenase; OS = Asticcacaulis sp. CF398 OX=2135738 GN=C8K45_3946 PE=4; SV = 1
MMQPVRKVVIVGGGSAGWMTAAALAKGLGDTVEIALIESEEIGIVGVGEATIPPILKYNAFLEMDEATFVRETHATYKLGIEFVDWRAKGHSYFHPFGHCGSEIESFPFHHYWLVDWKRRGGPCDLTRHNLETVAAYKGRFGHLAAEGDKPGMNYAFQFDAALYAGFLRRYSEDRGVTRLEGRITGVEQHPETGYVTAVVTADGRRLSGDLFIDCSGFRGLLIEQTLKCGYEDWSKWLPMNRAVAVPCTRVEPLTPFTRATAREAGWQWRIPLQHRTGNGHVFCDGFTSEEAATQRLMDSLDGAPLADPRPLRFVTGHRRRFWEKNVVALGLASGFLEPLESTAIHLVQSGALRLLSLFPKTGIFPSVVEQYNRDVLFDYNNIKDFLIAHYKVTERNDTPFWRWVQAMDIPDSLKERLDMFRETGLLVARDPELFREASWLAVLTGQGLIPHSHHPAVDKLEVADIGLHMSRWRKMLDARADALPRHEDHLRRFAPSASGIR

SEQ ID NO: 84949 - protein, 500 aa, Asticcacaulis sp.
  REGION 1..500: note = tr|A0A2T5XMR4|A0A2T5XMR4_9CAUL Tryptophan halogenase; OS = Asticcacaulis sp. CF398 OX=2135738 GN=C8K45_1517 PE=4; SV = 1
MVKPIRKVVIAGGGTAGWMTAAWLSKTLKGDLEEIVLVESDEIATVGVGEATTPYIQIYNQVLEIDEAAFLKATHGTYKLGIEFVGWGHEANRYFHAFGTYGRDFGALPFHAVWLRRALADEAERLEDYNLQALAAETDRFMRPSGRNSPLAEIAYAYHFDASLYARFLRTMSEQAGVRRVEGKIQDVVLDARGFISGLRLDHDRFIDGDLFIDCTGFRALLLGEAMGIGFEDWTHWLPCDRAYAVPSKSTGRLAPYTQSTAHEAGWQWRIPLQHRTGNGTVFSSAFIDETVAVERLMRNLDAKPLADPRRLSFTTGRRQKFWHNNCVAIGLASGFLEPLESTSIMLIQNGIARLQYLFPDTGFEAADIDAYNAEMTREYEEVRDFLILHYKLTQRNDSDFWRYCRSMSTPDSLAARMSLFESRGRIPAERGEQFKTPNWLAVMWGQGLRPRSADPLVASIPEGAMRQSLADIRDVIRTCRDCMPTQAEYLRHIGAGSIN

SEQ ID NO: 84950 - protein, 502 aa, Asticcacaulis sp.
  REGION 1..502: note = tr|A0A2T5XHZ5|A0A2T5XHZ5_9CAUL Tryptophan halogenase; OS = Asticcacaulis sp. CF398 OX=2135738 GN=C8K45_3084 PE=4; SV = 1
MQTDAIKHVVIAGSDAPAWLTALILLRALGQNRDQTGLTVEVVEIRSALRPADVTVTLPSLRAFHRMLGLDQAELIAATDATYSLGQRYAGFVGSRPAYLATYATAGVPQHNLGFLQFWLRARHEGLKIELDEFSLGAAAARVGRYAPPPPSAAGLDAAEHGFHMHTLSYVRWLRAHALQRGVKVTPGAAFEVMTGEAGIAGLKLTDGRVIEGDIYIDATGTEAKLISALDNSRDEAAHLPGDRLLVTAAAPLSPLPLHAQISAHRHGWLGLYPLRSQTGMVMGYDSTAFSDDEALQQIATLSGLKPASGAVAEVYRPGRLRRAWVQNTIAVGPAAAVLEPNDGLDLHMVQVALSHLVSLFPLSRLRMPEADLFNDYLASYYDRALDYQATRYHLNRRFGEPLWDRLRDVPVTETVRHRIDLFRRRGLVALYEHEATNEDGWVAHLLGMGIVPEDYDPQVDQAPEGEVIQRFQGILKYVADRVRQMPTHEELLARAAGKVGA

SEQ ID NO: 84951 - protein, 499 aa, Asticcacaulis sp.
  REGION 1..499: note = tr|A0A2T5XCL8|A0A2T5XCL8_9CAUL Tryptophan halogenase; OS = Asticcacaulis sp. CF398 OX=2135738 GN=C8K45_3945 PE=4; SV = 1
MSDAHPVKRVVIVGRDEALWLTANVLQRALRASGLTFTVVELPSLLRPGEVFPTLGNQAAFHSLLGLDEAILMDGLGATFTLGQRFVGWAAKSKPPFMLGYSSVGVPLERTAFHHHWVRARASGLTAAYEDFAINAVAAKNGRFVTSGSDLQGFAQSEYGYHLPALPYVEVLRDIALKRGVVHVKAHHISPDGTGEQMRAVVLSDGARVEGDLFIDATGAEARLLSQMPGTDFDSWRHWFPCDRLLTAYAAPMSPLPAYAQITAFRSGWLGLFPVRDYTALQQVYLSSDLSDDEAFEMAGMVASLPFNPQATVTPFEAGRRAQAWSGNVIALGDAAAVFDPLDSARMPALLTGLSHLISLFPLDTGCIEAAVYNRVVTQAYERLRDFQCLHYKLNQRRDQPLWDQLRGTEAPETLDHKLRLFAARGHMPMYDDEAFDESLWIAACIGHGLIPEVYDPMADQVPEPEVIAHFQKALGYLRQQVEALPPMEAVLKRQMQRA

SEQ ID NO: 84952 - protein, 497 aa, Phenylobacterium sp.
  REGION 1..497: note = tr|A0A1G2WDP2|A0A1G2WDP2_9CAUL Tryptophan halogenase; OS = Phenylobacterium sp. RIFCSPHIGHO2_01_FULL_69_31; OX = 1801944 GN=A2790_04190 PE=4 SV=1
MQGQVVKKVVVAGGGSAGWMAAAGLSTQLGALLDITLVESDAIGTVGVGESTIPTARTFVHLLGLDEREFMRETGATFKLGILFENWGQVGDRYIHSFGQVGKSTLMAHFHHLWLHAKAQGFGGDLGDYCLELRASEEGKFYTADDAPVNYAYHIDATRFGRYLRKRCENKGVRRVEGKIQEVQQHPQTGHITALVLESGERVEGDLFIDCTGFRGLLIEQTLKAGFEDWGQWLPNDRAVAVQTRTRDPAMPLTRAIAHTAGWQWGIPLQHREGNGWVYCSDFMSDDEASSSLLGQLKGERLTDPWQLRFRPGRRRKAWDKNCVAIGLAAGFIEPLEATSLHMIMIAVTRLLQLFPFTGVNDALTTRFNFLANQEIERIRDFIILHYNATERTDTPYWNRCRTMEIPASLAERIQLFRETAQVYHVPGELFLVDSWLQVMLGQRIRPASHHLMGALMPPEQLRRALDDLKGNIDRAVARMPSHQDFVDRYAGLELAD

SEQ ID NO: 84953 - protein, 477 aa, Streptomyces violaceusniger
  REGION 1..477: note = tr|A0A0X3VRN9|A0A0X3VRN9_STRVO Tryptophan halogenase; OS = Streptomyces violaceusniger OX=68280 GN=ADL28_33370; PE = 4 SV=1
MNSAVESDYDVVVVGGGPGGSTLSTLVALQGHRVLLLEKEEFPRHQIGESLLPSTVHGICRLLGVTDELANSGFMKKHGGTFRWGLNAEPWTFDFSVSEKFSGPTSYAYQVERMKFDKILLDNARSKGVDVRERSEVVGVLEEEGRIRGVRYDDAEGVRREVRARFVADASGNKSRIHNRIGGARKYSDVFQNIAVFGYFTGGKRTPAPWTGNITCASFDLGWFWYIPLSDELTSVGAVLRREALARLQDGPRDKVLEGLIEECPLIADYLSEAERVTEGPYGEVRVRKDYSYIQEKFWRPGMVLVGDAACFIDPLFSSGVHLSTYSALLAARSINTTLGGVIDEAHCFREYEARYRREYDVFHDFLVAFYDLQKDEHAYFREAKDVIGSSASAAESFAELVGGGASNEEALIGTAPSFSQERRADLLEQSRKIHWQGSRVQVQALFGESVGDAPLYEGGLVESPDGMHWARPERPS

SEQ ID NO: 84954 - protein, 507 aa, Pseudoxanthomonas sp.
  REGION 1..507: note = tr|A0A2S6B1G5|A0A2S6B1G5_9GAMM Tryptophan 7-halogenase OS=Pseudoxanthomonas sp. KAs_5_3 OX=2067658; GN = C0063_15930 PE=4 SV=1
MTATHNRITSVVVVGGGSAGWMAATALATYLGKQASIRLVESEEIGIVGVGEASVPYMKQFNAGLLGINEFDFVARTQGTFKLGIQFNDWDRIGDSYIHGFGKIGQGVGPLPFHQFWLKLFLAGRAPPIGDYSLATVAAPLGKFMSSPANAPMESPLADIAYAYHFDAGLYAAFLRGLAESRGVQRIEGKITGVQQRGEDGFVEAVVLESGERVEGELFIDCSGFRGLLIEQTLGTGYNDWTHWLPCDRAMAVPCATMGPPTPYTRATALSAGWQWRIPLQSRVGNGYVYSSEHISDDEAAATLLANLDGRALADPRPLRFTTGVRKKLWNKNVVALGLASGFMEPLESTSIYLAQSGIQRLLGLFPNRGFDPLLARQFNEESAFEYESTRDFLILHYCATRRNDSTFWDYCRTMSIPDTLRHKIDMFRNGGRYFRSGDEFFALPSWVQVMLGQGIVPASYHPIVDDMPEQALVDHVERVRRSLAMCAAEMPSHQAFIDRHCKALAM

SEQ ID NO: 84955 - protein, 510 aa, Shimia sp.
  REGION 1..510: note = tr|A0A0N0DAA2|A0A0N0DAA2_9RHOB Flavin-dependent tryptophan halogenase PrnA OS=Shimia sp. SK013 OX=1389006; GN = prnA PE=4 SV=1
MPSKKSNSKSQEGPKPLHICIVGGGSSGWMMAAYVTNHFKFDGRKLKMTLIESAEVPPTGVGEATIHTMRGYLEDAGISEEKFLNECQGTFKHGIEFVGWSENTPPFFHPFENPPVVFENHAALNFLKADRSEGAMARYDYWAGIQSRLARRGVSPRQKSDVPYHGIVPYGYHLDANAFAHFLKKIATQRGVNHIISHVDKVESTKGKIDRLHLRNGKQIEADIFVDCTGFAARLIKELGGEFISGAEQLLVDSAVTCQVDAKDIEARPFTTATARNAGWTFDIDLQTRGGRGYVYSSKYLSKDEAFKEFSDAYPGQLDESRARHFQLRIGRMDKAWKGNCCAIGLAAGFLEPMESTGLYFVEYTARLFVEVLKSLTDNNMEVHADWFSNIFSELFDEVSAFIEAHYKLSDRRDTQFWRDATSAPHSPRLAQLLSLWESRAPGQFDFTGRSFFGAESWQAILFGLGWRPQKSHRLATVDQKAALAHFKVLKGHADRIAATNPQQADYLGL

SEQ ID NO: 84956 - protein, 514 aa, Asticcacaulis sp.
  REGION 1..514: note = tr|A0A2T5XCU3|A0A2T5XCU3_9CAUL Tryptophan halogenase; OS = Asticcacaulis sp. CF398 OX=2135738 GN=C8K45_4016 PE=4; SV = 1
MMGKRRILILGGGTAGWLAAAYLARHFDIRRQPRLEIVLVESPEIGSVGVGEGTFPTIRQTLKFIGIDEAPFMRRTTATFKQGIRFADWVKTPVNGRHEHYFHPFEAPYYTEGEGLVPYWLLQDEATRKPFAEAVTFQKRVAEARRAPKRPHEGDFAGPLNYAYHFDARQLAEVLNERAIALGVTHKQAKLDGVVLDHTGQIDHIVADGEVLTADLYIDCSGMRAELIGKALGSPFRSVRGTLFTNKALACKTAYERPDTPIESYTVATGHAAGWTWDIGLDGQRGIGYTYSTDHTTDAEAEATLRRYVGGKAPLSIREIPFEPGYREKQWIGNCVAVGLSGGFMEPLESTGIVMIEVAVAMIAELFPLAGPIDAPAKRFNALMTARYENVVNFLKLHYALSHRSEAFWRDNTDPQTWPDRLRDLLEQWRYRPPSRFDFLIDVETFAFFNYQYILYGMGFRTDLSGARDHFPHVEDANRTFAKIHNFGERATLDLPSHRTLIRQIYAEGFAENA

SEQ ID NO: 84957 - protein, 472 aa, Asticcacaulis sp.
  REGION 1..472: note = tr|A0A2T5XQU8|A0A2T5XQU8_9CAUL Tryptophan halogenase; OS = Asticcacaulis sp. CF398 OX=2135738 GN=C8K45_0790 PE=4; SV = 1
MVRKSVEIVLVESDEIGIVGVGEATIPPLVNLFTFLGIPEAEMLSKVQGTYKLGIEFVNWGQTGERYIHAFGNPGRDLGIVPFYQYWLKAHAEGRGGDLWDYSLNAQAAFAHRYAPLKQIDGGIEGLTHAWHFDAGLLARYLRAGCETQGVIRKEGKVTGVNLRPEDGFIVSLNLESGETVDGDMFIDCSGFRGVLIEEALKAGYDDWSHWLPNDRAIAVPSESNGPLLPYTRATAHTAGWQWRIPLQHRIGNGHVFSSGFMEEDEAARILLDNLDGKPLADPRTLRFTTGRRRQSWVKNCLALGLASGFLEPLESTSIHLVQSGMTRFLKLFPDRGFNPLTIAEYNRQTAHEYELVRDFIILHYHATQRTDSDYWNHCRTMPLPDSLAHKIAYFREHGRLLIEEADLFRESNWAQVLIGQNITPTHASPLTHAVEDAALDDYMANIKRLVGHAAAGLPLHADFIGRHCRAR

SEQ ID NO: 84958 - protein, 521 aa, unidentified
  source 1..521: note = Methylorubrum extorquens
  REGION 1..521: note = tr|H1KVD3|H1KVD3_METEX Tryptophan halogenase (Fragment) OS=Methylorubrum extorquens DSM 13060 OX=882800; GN = MetexDRAFT_6596 PE=4 SV=1
MFRSERSAPARLVVAGGGPAGWMAALYLKRVLRRAGWTVTLVGSAPAAGASAALATRPAFTRFLKGFGIDEAIFMRRCAATYRLASRYDDWFAEGQGHWHPFGACGPRIAGRDLFHYWMKLRGEGAEDEAGSYADYAPQALMAAEGRGPRPLADRSSLTESGDYGYHLDRKALVRFLRELALSEGVRGVTGRVREIERNLYGDVGALILDGGQTIEGDIFLDCTGAAAQLIGTALGEAWVAGSGPGDRVARLSLPRSPEVPPFTAYRGRAEGWTASLPLADRTEHLFVYDSRTTPPDAAAATLRRAFDGQAGIVDAELRHGRRASPWQRNVVAMGAAARAVEPLLGFDLDLVLAGLETFLAYLPRQGEGGDVLRRAYAARLNRFHDDAAEAVAAHYVLGRRSEPFWAAARAVMIPDRLADRLDLYELAGHVALSEEGPFSEGDHYLLFSGADFLPRRPFAPVDVADGREIARLLASIRAQSAQIAGAMAPHVRLMDALHGEAPVAAPAVRIAAASAPAGPA

SEQ ID NO: 84959 - protein, 506 aa, Asticcacaulis sp.
  REGION 1..506: note = tr|A0A2T5XNL8|A0A2T5XNL8_9CAUL Tryptophan halogenase; OS = Asticcacaulis sp. CF398 OX=2135738 GN=C8K45_1824 PE=4; SV = 1
MSPPHPRPIKSICIVGGGSAGWMTAAFLSKMLGQACAITLIESEEIGTIGVGEATIPAIKTFNGLLELDEVEFIRRTQGSFKLGIEFRDWGHTGNSYIHGFGRIGQDWGWLRLHQYWRRALSLGETPGDIGRYSINVQAARANRFMPPRTDSKTSPLADIAYAYHFDAGLYARYLREQAQTRGVSRIEGHITGVDLRAADGFIESVTLRSGQVVGAELFIDCSGMRSLLLGEALKVPFEDWSHWLPCDRALAVPSESVSPLTPYTRSTAHSAGWQWRIPLQHRIGNGHVYASAFIDDEAAADTLLRHLDSPPTAEPRAIRFRTGRRRTLWEKNCVAIGLSGGFLEPLESTSLHLIQSGLIRLLSLFPDSAFRPADIALYNHQSVIEYAHVRDFIIAHYKLNRRDDSDFWRTCREMSIPDSLQRRLDIFASAGRVMPEVADELFSAESWIMVLLGQGLLPAAWDPAAELKTPEETLRFLANVEAVVRKCVAVMPDHAEFIARTCAAQ

SEQ ID NO: 84960 - protein, 497 aa, Massilia sp.
  REGION 1..497: note = tr|A0A0Q7FF27|A0A0Q7FF27_9BURK Uncharacterized protein OS=Massilia sp. Root418 OX=1736532 GN=ASC94_13720; PE = 4 SV=1
MDAANHSAYKRIVVVGGGAAGWMAATALATAQPASTVELVESEEIGIIGVGEATFPSIRAFHKILGIDEAEFLRATNGTYKLGIEFCNWRTQGERYFHTFGDFGALTGPQALWGQHRRLGDDALGALGEQCLPSVMASQGRFQVPPEREQFFNYAYHFDAVLYAGFLRALALKRGVRRTEGRIVDVARRADGGVNQLRLADGRTVAGDLFIDCSGFASLLLGRTLDEPFVDFSHWLPADRAWACPSGRNGPDLAPYTRATALEAGWAWRIPLSNRTGHGHVFASRYIDEERARTQLLEQMDGPPLAEPRLLRFTTGHRARFWVHNVVALGLSSGFLEPLESTSIFLVQSGLGRMIELLLQGAAPGRQAVADYNAGMVRQFERVRDFIMLHYCLTARRDSKLWRAMMAMELPDTLAFKIHAWRQTGALHQYSDEGFDATSWLAIHAGMGHWPERADPALREMAPEAARQALLQRRASIAAVVAAMPSHDAYLRSVLAR

SEQ ID NO: 84961 - protein, 507 aa, Asticcacaulis sp.
  REGION 1..507: note = tr|A0A2T5XHS0|A0A2T5XHS0_9CAUL Tryptophan halogenase; OS = Asticcacaulis sp. CF398 OX=2135738 GN=C8K45_3037 PE=4; SV = 1
MRENRITSIAIIGGGTAGWMTAAALSKILGRDYADIVLVESDEIGTVGVGEATIPQINVFNRLLGLDEDEFIRRTQGSFKLGIEFVDWGARGERYFHPFGPYGVDMRGVSFHAFWQKLQTLGVADSISDYNLQAIAARENRFMRPVRSAEGSPVSQIAYAFHFDAGLYARYLRQFSEDHGVVRQEGRVVDVAQNAETGFVEAVELADGRRVEAELFIDCTGFRALLIEQTLKAGFVDWSHWLPTDGAWAVPCESAQPFTPYTRSTARDAGWQWRIPLQHRTGNGHVFSSDFVSPDAARETLLQNLDAKPLAEPRLIRFKAGHRRTFWEKNVVAIGLAGGFLEPLESTSIHLIQSGIAKLLQLFPDKGFEAADRRRFNEMTRLEYEYIRDFIILHYNCTRRDDSDFWNHVRTMEIPDRLREKYDVFQSRGRIFREHEELFNDTSWFAVMVGQGMKWRAYDPVADLMSDDEVRARLSNIRDVMRRSADMIPDHADYIARTCAAPSLQTA

SEQ ID NO: 84962 - protein, 314 aa, Streptomyces sp.
  REGION 1..314: note = tr|A0A397N7B3|A0A397N7B3_9ACTN Tryptophan halogenase; OS = Streptomyces sp. 3212.5 OX=2135785 GN=C8R36_7489 PE=4; SV = 1
MPGGWRLSALPREPVARVPETILEGPVPVLVDATGAARAVSRGRLGRSEVDRLRHTVWRLRPRPERHAWSLMEATPDGWWYSAPLPDGERLTVVRVRGTGRPGRTPAAPPPRTAERLTVPLPPLPEPAAERVAVVGRADPPWGAQLVAVGDAALSVDPLSSAGLRHALELAGPAAEAALGLAAGDPSPAAAYGELVEAEFTRHLTQRRAVHTAATVYREEEFWRRPAKRGSRSPSASAETRCTHRDHLTAGSGLRPEVVARDRRRCAASARERVRQCPDSCELPHPAITPRTDELPGRRPSPPVPRSPVGRIRQ

SEQ ID NO: 84963 - protein, 503 aa, Asticcacaulis sp.
  REGION 1..503: note = tr|A0A2T5XCI8|A0A2T5XCI8_9CAUL Tryptophan halogenase; OS = Asticcacaulis sp. CF398 OX=2135738 GN=C8K45_3944 PE=4; SV = 1
MAPIRNITILGGGTSGWMAAAVLARAFKPGTCTVRLIESEEIGIVGVGEATLPQVRDFNTFLGLDEPEFMRATNATFKLGIEFRGWGTSDSYHHPFGVHGQSAGGIPFHQLWLKARSFMDPGPIEDYSFPIRLARENRFDFPIEDPKSIRSTYAYAYHFDAVLYARYLRQWCEARGVQRIEGKVTGVNQNAETGFVESLTLESGETVGGDLFIDCSGFRAVIAGQALNIGWEDWTPWLPCDRALAVPTERTEDLTPYTRATAREAGWTWRIPLQHRTGNGYVFSSRFTSEDRAREVLLGALDAPAQAEPRLLRFQAGRRTASWTRNVIALGLASGFLEPLESTSIYLSQIALTFLMRLMPDTRFDPALSDEFNRLIDIEYERVRDFLILHYHANTGSSGPLWDYVRGMEVPDSLKEKMALFRHRGHVQRYKDGLFSPASWIAVFMGQDVTPQSYDRQADSLSNEALATYLKDLKRKIDANLAVLPSHAEFVAGHCFDPEAANV

SEQ ID NO: 84964 - protein, 498 aa, Alteromonas sp.
  REGION 1..498: note = tr|A0A495US61|A0A495US61_9ALTE Tryptophan halogenase; OS = Alteromonas sp. TK-46(2) OX=1276890 GN=CLW98_0585 PE=4; SV = 1
MNRPMNIVIAGGGTAGWMAANYFAHKWPSDKVKVTLVESPDIGIIGVGEGSTPTLKRFFEELKIKESDWMPKCNATYKVSIQFNGWSPSSGVKHYRHPFISQTDTFTQRAFEVNCRTRRLGLDTHVTPEDFLLNGVLAKQNKAPITPDNFPFRMEYGYHFDSALLGNYLRDVAVEKGVTHISAVISDVVLHLSGDISHLVTEKGNIEGDFFVDCTGFSSHLLQQTLGVKFNSYSDNLFNDSAVVLPTHAYETIPVETQSTALSNGWCWSIPLQNRTGNGYVYSASHLTKDKAEEELRRHLGLENSDVEARHLKMKVGQVAQHWQKNCLALGLSQGFIEPLEATALHLVQICIEYFSDTLEKSGFSSKESAAYNAFAKERFDRVRDYIVAHYKLNTRDDSEYWRANRNNMVLSDSLKSLISTWFQREDLTSEINRQNIGMHWDSVSWHCLFAGYGAFPPLEQNQPGRGDLYSEQKIERFIQGCALNFNHHNNVLQTQQS

SEQ ID NO: 84965 - protein, 490 aa, Asticcacaulis sp.
  REGION 1..490: note = tr|A0A2T5XHX8|A0A2T5XHX8_9CAUL Tryptophan halogenase; OS = Asticcacaulis sp. CF398 OX=2135738 GN=C8K45_3083 PE=4; SV = 1
MSEPAFRRIVIVGGGTAGWMAAAALSKTLGGAYDITLVESAEIGTVGVGEATIPAINQFNDLLGLDEDEFVRETHATFKLGIEFVGWRRADHTYFHPFGGYGQDRDGIPFQHFWHRHRADGGSVPHDDFNLETQAARAGVFTRDGLNYAFQFDAALYAKFLRGYAERRGVTRVEGEIVEVRQAVDGSVEAVTLKSGRTVRGDFFIDCSGFRGLLIEGALKAGYTDWSRWLPVNRAVAVPCVRSGALTPFTRATAREAGWQWRIPLQHRTGNGYVFSADFLSESEATEALMQRLDGEALAEPRVLRFTTGHRNRLWVKNVVALGLASGFLEPLESTSIHLVQVCLIRLIGMFPKDAINPHVVERFNRMAETEYAQIRDFLIAHYHLTQRQDTPFWNHVRTYDIPDSLKARLDIWRDTGQVMVDSAELFRENNWFAVLTGQGLATHGYHPIAGREGDGELRMWLSGLRQALSERRAAMPSHEDFIAAHCRAG

SEQ ID NO: 84966 - protein, 504 aa, Rhodanobacter fulvus
  REGION 1..504: note = tr|I4VVX9|I4VVX9_9GAMM Tryptophan halogenase; OS = Rhodanobacter fulvus Jip2 OX=1163408 GN=UU9_04377 PE=4; SV = 1
MGDNRIRKVVIAGGGTAGWIAASALAYQLQGQIELTLVESSKIATVGVGEATVPPVRNFHRFMNIDEQEFLRAVAGTFKLAISFENFVRPGHRYIHPFGNTGKGTLVAGFQQYWLESLRRGMKSDLGNFSLEAMAALEDKFALTENPEINYAYHMDAALYVEFLRKKFERYGINRIEGMIKEVRQNPDSGYVEALVLDDGQVIEGDLFIDCTGFRGLLIEQTLKTGYEDWNHWLPCDRAIAVQTRSVDPSPVPYTRAIAHEAGWRWHIPVQHRVGCGLVYDSRYMSDDEARAKLLHDVGAEPVRDPWQVKFRTGRRLKAWNKNVVALGLASGFIEPLESTSIHLAMSAVMLLVELFPSEGIPDSLVKRYNDVCRGELEHVRDFITLHYHANQRDEKMWKDCREMTLPDSLQIRIDAWRDRAHVWKDQGELFATTSWMHVLLGQEIMPNQHHPVTREISDADLRRLLDSIRGPIDRTLPLLPLQQEFIDRYCKSPDGIWDMHRLG

SEQ ID NO: 84967 - protein, 497 aa, unidentified
  source 1..497: note = Alteromonas mediterranea
  REGION 1..497: note = tr|S5C2M6|S5C2M6_9ALTE Tryptophan halogenase; OS = Alteromonas mediterranea UM7 OX=1300258 GN=I635_10320; PE = 4 SV=1
MMNKAVRNVVIVGGGTAGWISAAVIKRLIGAGVNVTLVESEEIGTVGVGEATIPPIITLNNVMGIDEKEFLRETNATMKLAIKFENWRIEGESYFHTFGAPGKSYAFCQFHHYFKRAQELGLADSIWEYDLNYLACKAGKFAHIKSPDPIIEMPYAYHFDASLYARFLRKKCEAMGVSRKEGIITDVKQDVDSGFISGVTLKSGEYIGGDLFIDCSGFKGLLTQQTLNTGYEDWSHWLPCDRAVAMPSERHEHTHPYTRSIAHSAGWQWRIPLQHRNGNGLVYSSNYYTDDQALDILSRNLDTKPLADPKFIRFKTGRRRKQWNKNVVAVGLSSGFLEPLESTSIHLIQSAVVRLIHLFPHDGFKQHQINEYNKQSQLEYEQVRDFIILHYHVNERTDSHFWKDLREMDVPDSLTHKIELFRESGNLFREQNDLFLESSWLQVLMGQGVFQKDHHPLANALSEQKLQELMQNIKRIKNEPIGKIASHDEFLKQFCGS

SEQ ID NO: 84968 - protein, 501 aa, Alteromonas sp.
  REGION 1..501: note = tr|A0A495UMP3|A0A495UMP3_9ALTE Tryptophan halogenase; OS = Alteromonas sp. TK-46(2) OX=1276890 GN=CLW98_2652 PE=4; SV = 1
MTVSGLDSSKNQTPVKNVVIAGGGTAGWMAATALSRLLGKSINVTLVESKDIGIVGVGEATIPPIRTFHKLLGIDEKAFMRATQATFKLGIEFENWRDQGHSYIHSFGITGRECWAGEFHHFWLRAKEYGFGGEFGDYCPELIAAKQSKFATSEAMPLNFAYHFDAVAYGRFLKSLACDAGVTHKEGDIEKVVVCPQSGNIQSLRLTSDEVINGDFFIDCTGFKGLLIEQALHTGYDDWRHYLFCDSAVAMQTELTAPPAPYTKSVAHKAGWRWQIPLQERMGNGLVFCSRFMSDEDAINTLKSQVTGAPINEPRVIRFTPGKRRRGWNKNCVALGLSSGFIEPLESTSIHLIMTGLIRLMRLFPFDGITQSAIDEYNNKFDSEMSSILDFIVMHYKVTQREDSPFWQQCQRMEIPPSLKHKLALFAESGRVFLDDGDIFRVDSWTQVLMGQGMTPSQYHRVADEMSEQSLKQFMAGLKQQVDNHVAKLPSHEAFLTQYLK

SEQ ID NO: 84969 - protein, 48 aa, unidentified
  source 1..48: note = Alteromonas mediterranea
  REGION 1..48: note = tr|S5C8C7|S5C8C7_9ALTE Tryptophan halogenase; OS = Alteromonas mediterranea UM7 OX=1300258 GN=I635_20365; PE = 4 SV=1
MKPQQYHRVADEMSEQSLKQFLAGLKQQVDNHIAKLPAHEVFLTQYLG

SEQ ID NO: 84970 - protein, 502 aa, Asticcacaulis sp.
  REGION 1..502: note = tr|A0A2T5XHR9|A0A2T5XHR9_9CAUL Tryptophan halogenase; OS = Asticcacaulis sp. CF398 OX=2135738 GN=C8K45_3033 PE=4; SV = 1
MDNGNIRRVVIVGGGTAGWMSAAFLSRVLAGTGIELTLVESAEIGTVGVGEATIPPIAFFNRILGIDEAAFLRETHGTMKLGIAFDGWRREGERYLHPFGSFGGSIDGVSLQAFVVRARQQGMDTDLWDYSLNSQAAFRDRFAPPEKDPKSPLSELAYAYHFDAGLYAQFLRRFAEARGVTRIEGRIEQVRLNADDGGVEAVQLSDGREVAGDFFLDCSGFRALLIGEALGVGYHDWSHLLPANRAVAVPDTRVGPPVPYTLSMARRAGWQWRIPLQHRTGNGYVYVSDFISDDEAASTLLSNLQGQPIAEPRFLRFTTGRRHQSRSRNVVAIGLSSGFLEPLESTSIHFIQHGLIKLAATFPQHRRDETAAALYNRIMAEELDQVRDFLIAHYHLNERVGEPLWDYVRHMEIPETLREKIALFRQRGFCAYPNQTIFQEANWLAILWGQTGMPDGYDPLADAVAPDLMNLRLDNLRRAYAEVAGRLPSHDAFLQRFTGQTA

SEQ ID NO: 84971 - protein, 496 aa, Alteromonas sp.
  REGION 1..496: note = tr|A0A495US79|A0A495US79_9ALTE Tryptophan halogenase; OS = Alteromonas sp. TK-46(2) OX=1276890 GN=CLW98_0586 PE=4; SV = 1
MYDKAVKKVVVVGGGTAGWISAAVIKRLIGTDLTVTLVESEDIGTVGVGEATIPPIITLNNVLGIDEKEFLRETNATMKLAIKFENWRVKGEDYFHTFGAPGKSYAFCHFHHYFKRAQKLGLTDSIWEYDLNYLACKAGKFAHIKSPDPIIEMPYAYHFDASLYARFLRKKCEAMGVTRKEGIIHDVTQDSESGFITGVTLKDGEHIEGDLFIDCSGFKGLLTQQTLNTGYEDWSHWLPCDRAVAIPSERLEKTLPYTRSIAHSAGWQWRIPLQHRNGNGLVYSSNYYTDEQALDILSNNLDTKLLADPNFIRFKTGRRRKQWNKNVIAVGLSSGFLEPLESTSIHLIQSAVVRLIHLFPHEGFKQRQIDEYNKQSKTEYEQIRDFIILHYHVNERTDSHFWKDLREMDVPDSLTHKIELFRESGNLFREQNDLFLESSWLQVLMGQGIVQGDYHPLANALSEQKLQELMQNIKRIKNEPIGKIATHDDFLKQFCG

SEQ ID NO: 84972 - protein, 499 aa, Asticcacaulis sp.
  REGION 1..499: note = tr|A0A2T5XQJ4|A0A2T5XQJ4_9CAUL Tryptophan halogenase; OS = Asticcacaulis sp. CF398 OX=2135738 GN=C8K45_0686 PE=4; SV = 1
MEPLRIVIVGGGTAGWMTAAGLSYACRDRIAQVTLVESEEIGTIGVGEASIPSLVTFNQFLKIDEREFMARTKATFKLGIEFRDWGALGDRYMHPFGPFGHSFGMAAFHHYWLKAQQNGDRTPLSDYNLNTALAGRNAFTPPSPDRSSPLSALVYAFHFDAGLYAQYLRSYAENFGVKRIEGKVVTVGQDAESGHITGVTLADGRTVEGDFFVDCSGFRGLLIEETLKAGYEDWTGLLPCDRAVAVPCENQYPLTPFTRATAHGAGWQWRIPLQHRTGNGLVYSSAHMSDDEAAGTLLSHLDGKPLTDPRLIRFRTGRRRTVWEKNCVAIGLSAGFLEPLESTAIHLTQRGVTKLITSLPRKGFDPVLARRFNEETRFEYEDVRDFLVLHYALTRRDDTAFWRESRARGVSDTLKARMDLFATSGRIQVGADELFKDASWLAVMDGQGLKPCDYDPLADMVDESDVRRSLDFIRTTFARIAEQTPPHDAFLTTHVGPLG

SEQ ID NO: 84973 - protein, 463 aa, Algoriphagus sp.
  REGION 1..463: note = tr|A0A2D8C7C6|A0A2D8C7C6_9BACT Uncharacterized protein OS=Algoriphagus sp. OX=1872435 GN=CL554_12990 PE=4; SV = 1
  VARIANT 121: note = Xaa can be any naturally occurring amino acid
  VARIANT 127: note = Xaa can be any naturally occurring amino acid
  VARIANT 142: note = Xaa can be any naturally occurring amino acid
  VARIANT 332: note = Xaa can be any naturally occurring amino acid
  VARIANT 340: note = Xaa can be any naturally occurring amino acid
  VARIANT 438: note = Xaa can be any naturally occurring amino acid
  VARIANT 455: note = Xaa can be any naturally occurring amino acid
MKIGIIGGGTAGLIASLILKRSCKKLNIEIVRSDKLGIIGVGEGSENTWNDFMSFVGIDPQDLIKNTDATFKFGVMFENWTKKPYFHSVDNNLENIENSYGYMIKNKYSFANMTVPFLWKXKVGTKXYPNQYHFNTFKLNTXLSNIAKSRGIKITNDEIKKVNTVKNKIKSLVGEKKKYSFDFYIDCTGFKRLLISSLGAKWISYSKYLCMNSAIAFPTKDTDEYNPYTLARAMSAGWMWRIPTFGRWGNGYIFNDKYITEAQAKKECEQYLGHSITIAKKIKFNPGRLDMSWINNCCALGLSSNFMEPMEASSIGTSIKQSFMLAEDILQXNNATINFXNKRLQTIVENIRDFIVLHYLCNKKDSVFWKDKPFEIPNTLQKYLDIWKVRLPNKNDFQENKLLFYQSNFILVLHGIGLISNKQLKYLFYQPNINEDIXHLLFFYGTTPVVSHKNXLKQIRLKI

SEQ ID NO: 84974 - protein, 482 aa, unidentified
  source 1..482: note = Alteromonas pelagimontana
  REGION 1..482: note = tr|A0A2A6B167|A0A2A6B167_9ALTE Tryptophan 7-halogenase OS=Alteromonas pelagimontana OX=1858656; GN = CA267_04540 PE=4 SV=1
MAAASLARYSESQPLKITLIESADIPTVGVGEATVPNIVEYNRQLGLDEIELIKATKATFKLGIRFIDWSKEGESFFHPFADYGVDFQNVGFHHYIRRLQQEGVDVAINDFCFAEALANKGLFAQPATPPVSPVADYAYAYHFDAALYARFLRDFSVQKGVSHISGHVAKVNLDGRKHIADVQLKSGEIIAGDLFIDCTGFDGLLIEQALQTGYEDWSQWLWCDTAVAVQSASTEPPLPFTRSIAREAGWQWEIPLQHRTGNGYIFSSKYIQADEATEKLLSTLKNEPLTAPRTLQFLPGRRKKIWNKNCFALGLASGFLEPLESTSISLIQTAIAKLLTFFPDMTFNQHDIDEVNRLHNEEVERIRDFLILHYVLNQREQGEFWHDYRHLAMPESLQHKVEVFKSRGHLVQYAHESFNASSWLAMYNGFYIRAARYDHRADVPSQQTLLAHMARIQQFIAQLSDGALSHQNFIKKHCQSGG

SEQ ID NO: 84975 - protein, 526 aa, unidentified
  source 1..526: note = Halieaceae bacterium
  REGION 1..526: note = tr|A0A2D9NM07|A0A2D9NM07_9GAMM Tryptophan halogenase; OS = Halieaceae bacterium OX=2026743 GN=CME49_01460 PE=4 SV=1
  VARIANT 472: note = Xaa can be any naturally occurring amino acid
  VARIANT 475: note = Xaa can be any naturally occurring amino acid
MAAGGQMTRALNQVVILGGGTAGWLTASTLAAEHGASLDITLVESPDIPIIGVGEGTWPSMRTTLQKIGVSERVLLKECDATFKQGTEFIGWRSESEAHAYYHPFSLPAEYASLNLAEHWLASSVTSDFCATVTPQAGVISASRAPKALGVPEFAFQFNYGYHFDAAKLSVLLRDHAVDALGVTHMLANLTEVEFSGSGAITALTLDNGTSLSGDVFVDCSGQRGLLIGEAMGVPTVSMGHVLPNDRAIATQVPYSNPDAQIASVTRSTAQASGWIWDIGLQSRRGVGYVHSAAHISEDEAVSSVLDYVKHSDDDVDLGQLNVRVIPFDASRRRQAWVKNCVAVGLSAGFIEPLEASSIALIEQAAHRLCQVLPLVADDYEAEARAFNEQMNRQWAQVEEFLQLHYVLSQRSDSAYWRDVRSEQRVLPELSEKLKKWRRHPVWHADAPRFDELFPSASYQYVLYGMLGRHIXPQXHRRSFQSVRDRADSVMHEVKERSKAVRSLPGNRELLNALLGKTTQTLESVA

SEQ ID NO: 84976 - protein, 399 aa, unidentified
  source 1..399: note = Campylobacter virus
  REGION 1..399: note = tr|I7JC76|I7JC76_9CAUD Putative tryptophan halogenase OS=Campylobacter virus CP21 OX=1190451; GN = CP21_168 PE=4 SV=1
MKVTVIGKGTAGILTTKSLRFNFPDLEIDWIYPESNKFIGVGEALVPASSKFLKTIGVDNKMILKDFRGSIKAGLKMIGWADKTFNLPFDNSVLLNRYMNKDLFPENFINFENVSHHFNTFSLQNLYVENINNINKTVTSFKDIDSDLIVDCRGFQDSDDFIEPGILKNNIALTTRIPVQNFLNPYSSFFARDFGWCWTIPLQDYISIGYVTNDSFINQASEDLKKHLQENFKTDLKDYNTIKFKTGYKKQQIAKIEGHNVFSVGLNAAFVEPLQSTGLWLASQQIQELINYIKNGDTNWNQRFEDMYNRVYQFILNHFILCKKSNEYWDYYKNFNFKDSLFTGSNGNNVFDGEFENFLYDSFQGKSVKYNIDKNIVGGKAALTKLKKFDELLRDYLSK

SEQ ID NO: 84977 - protein, 174 aa, unidentified
  source 1..174: note = Unknown
  REGION 1..174: note = tr|K7WDM1|K7WDM1_9ZZZZ Tryptophan halogenase (Fragment) OS=uncultured microorganism OX=358574 PE=4 SV=1
GVGEATVPHIRYFNKLLNLNENDFLRKTNATFKIGIEFVNWGEVGDRYFHSFSPYGVNMEGVHFHHFWLRHAMKEGAPPIDEYNLHYLASKANKFAHPKPELQGSPLSAIEYAFQFDASLYAKYMRGVAESRGVQRIEGKIVDVKQRAEDGFVDKVVLESGAEVAGDLFVDCSG

SEQ ID NO: 84978 - protein, 501 aa, unidentified
  source 1..501: note = Unknown
  REGION 1..501: note = tr|A0A160TL61|A0A160TL61_9ZZZZ Tryptophan halogenase; OS = hydrothermal vent metagenome OX=652676; GN = MGWOODY_Smn708 PE=4 SV=1
MSGNDIPTVAILGGTVAGWMAAATLARRLPRHRYRVMVIETDRDGDGIGDFGTTLAALPSIAPFHESIGIDENLLLRATRGSFALGIAFSGWAANEAAYFLPFGAVGAPLGPVAFHQLLTRLRREGRAVRAADYSIAAIAAQAGRFARPSTDGHSVLSHYAYGLHLDALGYLRAMRATAEAHGARAATALFRRAIMDASGGIAALELDNGDSLPALLFVDATGTDARLCGEALGVGFQSWRQWLPCDRAIAVRISDQSDPPPFGHVEAQATGWQSGTPLVGEASRLLCWSSAFGDASSGAGSNEPVHGIAFENGRRITPWHRNCVAIGAAACVLESLHPVAIHLVQSALARLVALFPDAAEAPVEAAEYNRMTINEMESARDFLVTQYVTNGRIGEPFWDVIRSVAPPDRVAYKLALFASGGRMPMYDDEVFEEADWIALLDAQGVRPRRHDALAGTVPTQRIEQHLARLREAIIAGVKAMPSHGEYLRRAHATSPRGAAA

SEQ ID NO: 84979 - protein, 327 aa, unidentified
  source 1..327: note = Unknown
  REGION 1..327: note = tr|A0A3B0R3U9|A0A3B0R3U9_9ZZZZ Tryptophan halogenase (Fragment) OS=hydrothermal vent metagenome OX=652676; GN = MNBD_ALPHA06-138 PE=4 SV=1
GRTLSGDLFLDCTGFAARLINHDKKNHFFDKTDMLFVDRAVTTRIPHKGVASINGYTTSTAQDSGWIWDINLQSRLGVGYVYSSRYCDDDTALATLANYLDKPVESFEARNLAMRIGYYQQQWRGNCIAVGLASGFLEPLESTGIYLAEMVNWALAEFIPRFMSGNNPQAQYNAAIAHHYENIVDFLKLHYCTTGRKDTPFWVDNTQPETIPDSLQAKLQAWETDCPSIYDFDRRIQCFSAPNYQFVLYGMGWKSHKRSDPSVTAPYTALMEQLKIRRERLKQFVLRDTLSNADIYQALANTTLPEGGITLEQNALPPSGASNFQLR

SEQ ID NO: 84980 - protein, 521 aa, unidentified
  source 1..521: note = Unknown
  REGION 1..521: note = tr|A0A3B0Z0I7|A0A3B0Z0I7_9ZZZZ Tryptophan halogenase; OS = hydrothermal vent metagenome OX=652676; GN = MNBD_GAMMA12-2238 PE=4 SV=1
MQGGSVKNITIIGGGSAGWMTAAYLSKKNPDIHITLIEASDVPVIGVGEATIAHLSRFLFTLGLKDKDWMPHCNGAYKYGIKFDNWHNIGDEYWHPFEALPYYNSKTNLATYWWYDRYKYNRKSSRESLYTDCFFSTEILKQNKIPRVPGAQDYSDNFNVKAGQDHVPVRVAYAYHFDAGLFGEYLKNHLAKPAGVDHIIDNITDIERAEDGNISALNTKNGLTLEADLFIDCSGFRSVLIGAALDEKFISFSDTLFCNKAMAMQIPYENIETELQPYTTASAISHGWVWNTPLTSRRGTGYVYCDNFVDQDTAEQDYRAFLGEKRVEAFDVRHIDIRVGKYKNTWVKNCVAIGLSSGFIEPLESTGLHFIHVAVEKLSVALEGGFYNAGDRLAFNRYMTLSMEEARDMLSIHYSLTNREDTDFWKAVKYDTKMSDSIADLLMLSKHRFPNDKQGYIFGNNSWICVLNGMNYMPSSDPFLNIQPAEVQKQMGLIKAYTALRKKVGHQFPNHYEYLTKQFFK

SEQ ID NO: 84981 - protein, 483 aa, unidentified
  source 1..483: note = Unknown
  REGION 1..483: note = tr|T1WBL0|T1WBL0_9ZZZZ Tryptophan halogenase (Fragment) OS=uncultured organism OX=155900 PE=4 SV=1
MDQAIRDILIVGGGTAGWMTAAALAAKLAGLPIAVRLVESAEIGTVGVGEATVPHIRHFNAALGLDEADFMRRTQATYKLGIEFRGWGKPDDSYIHPFGAYGAAIGGVGFHHHWLRARQGGDPTPLEAYSLPIVAARQGRFAPPSPDLSSVASTYNYAYQFDAGLYAAYLRAYAEGRGVVRTEGKVADVALRGEDGFIEAITMESGERIKADLFIDCSGFRGLLIEQALKAGYEDWTRWLPCDRAAAVPCGTVETSTPYTRCTADDAGWRWRIPLQHRVGNGYVYSSAHISDDNAAAALLAGLEGKAQADPRFLRFVAGHRRKQWSRNCVAVGLASGFLEPLESTSIHLIQVAITTLLELFPDRTCARADQDEYNRVMTLEFERIRDFLVLHYHANQRVGSPFWDDRRNLPIPDSLAYKMDLFRDRGVVVKYKDGFFLEPSWLAVYLGQNIVPDAYDVVSDSVPDAVLPQRLKAIRESVAGAA

SEQ ID NO: 84982 - protein, 177 aa, unidentified
  source 1..177: note = Unknown
  REGION 1..177: note = tr|K7W8W6|K7W8W6_9ZZZZ Tryptophan halogenase (Fragment) OS=uncultured microorganism OX=358574 PE=4 SV=1
GVGEATVPDLKATLRYLNIDEKEFMVRTNAGFKSAIKFVNWRDDPKEVGDHHFYHPFERPPIIRGLSFSDVWLLGRSNYGQADDFAYVAGLAPTLCDYYRSPKAPNNKPFQGECNYAYHLDAVLFGRYLRDIAKSRGVNHVVDMVTDVHLNENGFVRSVQTKENGELEGDLFVDCSG

SEQ ID NO: 84983 - protein, 188 aa, unidentified
  source 1..188: note = Unknown
  REGION 1..188: note = tr|K7WFV3|K7WFV3_9ZZZZ Tryptophan halogenase (Fragment) OS=uncultured microorganism OX=358574 PE=4 SV=1
GVGEATVPTFRTTMDFIGYSEEEWLPHVNGTFKAAIQYVNWVDPPEPGRDSHYWHPFPAYPDPLVQPLGNPWFVSIGEGASLIHYCLRKRLDGEKKSVAELICPATTLSEHMKSPKSFDDPTLTERYAYHMDAGLIGDFLRSRLTERGVKHLVDHVVDVALDERGFIQHVTTTDGRQLSADLFIDCSG

SEQ ID NO: 84984 - protein, 210 aa, unidentified
  source 1..210: note = Unknown
  REGION 1..210: note = tr|T1C7S6|T1C7S6_9ZZZZ Tryptophan halogenase (Fragment) OS=mine drainage metagenome OX=410659; GN = B1A_03167 PE=4 SV=1
MSSASDAPANSPLADIRYAYHFDASLYARYLRGYAEARGARRTEGKIRHVQLRGEDGYVESVTLENGTVIGGDLFIDCSGFRGLLIEQALHIGYIDYSQWLRCDRAVAVGCEKVGPPTPYTRVTARTAGWQWRIPLQHRTGNGHVYSSALISDDEATATLLANLDGKPLGEPRLLRFTPGMRKKFWSKTWWRWAWPAASWRRVESTSILP

SEQ ID NO: 84985 - protein, 119 aa, unidentified
  source 1..119: note = Unknown
  REGION 1..119: note = tr|T1BA82|T1BA82_9ZZZZ Tryptophan halogenase (Fragment) OS=mine drainage metagenome OX=410659; GN = B1A_13627 PE=4 SV=1
MYNEAPEPLQVTGRAPSSSTRGRRTVDEFRAEGLQRAHIVAVLDRGGGFSSADHADPECRTDVDHAVVKGRRRGIMSGQSVRRVVIVGGGTAGWMAAAVLIRTMAAHLEVCVVESDAIG

SEQ ID NO: 84986 - protein, 540 aa, unidentified
  source 1..540: note = Unknown
  REGION 1..540: note = tr|T0ZB13|T0ZB13_9ZZZZ Tryptophan halogenase OS=mine drainage metagenome OX=410659 GN=B1B_14140 PE=4 SV=1
MACRAWSKGMSAQPIERTVIVGGGTAGWMTAALLAKALGGTARIELVESEEIGTIGVGEATIPQIRHINAFLGLDENEVMRAARATFKLGIQFNDWLRPGHSYIHAFSDIGLPQGGVPFQHYWLRERTQGGTHALWDYSLNAQAAAAGRFARMEHVGSSPLTGVRWAYHFDAGLYAAHLRRVAEHLGVTRREGRIVDVDLRGEDGFIAAVKLADGTRVAGELFIDCSGFRALLIEGALHAGYDDWRQWLPCDRALAVASARVPPMRPYTQASARPAGWQWRIPLQHRTGNGHVYCSAFISDDEAAATLLANLEGEALGAPRPFRFTAGMRKQVWVRNCVALGLAAGFMEPLESTTIHLVQSGVDRLLKLFPDARFEPAVRDEFNRQTRFEYERIRDFLILHYTTSERCDTPFWRHCAAIARPESLQHKIDVFEASGQIFRAADELFTEVGWLQVLTGAGRRAAGLPPPGRRAAAGAVPGIHGQPARADPARGGRHARARRLRRRALQGGGCGLIRRCRVGGAGFGSPLELPCPPRPVPRC

SEQ ID NO: 84987 - protein, 40 aa, unidentified
  source 1..40: note = Unknown
  REGION 1..40: note = tr|A0A1B6NWS4|A0A1B6NWS4_9ZZZZ Tryptophan halogenase; OS = marine sediment metagenome OX=412755 GN=MGSAQ_000600; PE = 4 SV=1
MHQANSPLRRIVVVGGGAAGWLTASIIAVTHKHDDNIVSP

SEQ ID NO: 84988 - protein, 499 aa, unidentified; identical to SEQ ID NO: 83793
  source 1..499: note = Unknown
  REGION 1..499: note = tr|A0A160TZW3|A0A160TZW3_9ZZZZ Tryptophan halogenase; OS = hydrothermal vent metagenome OX=652676; GN = MGWOODY_Hyp2100 PE=4 SV=1

SEQ ID NO: 84989 - protein, 510 aa, unidentified
  source 1..510: note = Unknown
  REGION 1..510: note = tr|A0A160TPV4|A0A160TPV4_9ZZZZ Tryptophan halogenase; OS = hydrothermal vent metagenome OX=652676; GN = MGWOODY_Smn2049 PE=4 SV=1
MQDDRYHIVIVGGGTAGWMTAAGLVRQLPGADYAITLVESDEIGTVGVGEATLPHIKLFNDMLGLDEAQFMRETGATIKLGIEFCDWDRPGDRYIHPFGAFGEPWGGVEFQNHWLRARANGRPVAPLQAYSYAVAAARANAFELPNEDPKSIRSTYSYAYHFDAGLYAEFLRRWATGHGVTRIEGQVCDIGRDPASGAITEVTLKSGVSIRGDLFVDCTGFRSLLLAGQFDVGWEDWTPWLPCDRALAVPCAHGGELTPYTRATARRAGWQWRIPLQHRIGNGYIFSSAFCSQEEARETLLANLDGVALAEPRLLRFSPGRRACAWRGNCVAIGLASGFLEPLESTSIYLIQAAVIDLINLMPSPHAARDGIDPRLADEFNRLTVMQYERVRDFLVLHYVANRREGQPLWDYLRHMPIPDSLTHKLELFRARAMAPNYQYGLFARDSWLSVLIGQGIVPDGYDRLADTFDLDMLVARLDDFAGRIESSVSAMPSHADFIANYCAAGGVPA

SEQ ID NO: 84990 - protein, 530 aa, unidentified
  source 1..530: note = Unknown
  REGION 1..530: note = tr|A0A3B0SQT8|A0A3B0SQT8_9ZZZZ Tryptophan halogenase; OS = hydrothermal vent metagenome OX=652676; GN = MNBD_ALPHA05-1868 PE=4 SV=1
MAKPIGNITVVGGGTSGWLAASYLARLFEQRVKTGDLSITLIESPDVGIIGVGESTARPMGDLLRLIGINESEFIKRCNATFKLSGWFANWDIDEAGKPVSWVNPFFSQSDIHGLNPASLFASYGMHRGGGPTDEGFTEAMSVCPDIIRAHKGPRLLGGEDYKSEIPYSYHMDAIELAKMLMERGKELGVKQIIDHVNEVHLDDRGFVSELILRKNGAHPIEFVIDATGFASIIIGKTLKEPFEPYDKYLLNDRAAVAQIPYEDPTRIEPTSRATGMNAGWAFRVPLFNRVGSGYIYSSKFISDDEAIAEFKAHIGDGGREVEPRVIRMRIGKVRRAWVKNCLALGLSSGFVEPLEATAIYSVQVQLQWLFGYFPNSDFNPAVIKRYNQLINGFYDEIVDFIALLFCISNREDTPYWRAVRHDMEIPPRLAENLELWRANMPGDLDLRSMTFFSPSSYRSALMGKQFYKGREYAAASLFSEANWRQYLNMRRQKTKDLMAKLPDHYTLLRRIRGEDTSPSASVTPIYINS

SEQ ID NO: 84991 - protein, 467 aa, unidentified
  source 1..467: note = Unknown
  REGION 1..467: note = tr|T1W8W5|T1W8W5_9ZZZZ Tryptophan halogenase; OS = uncultured organism OX=155900 PE=4 SV=1
MTATVAVLGANLCGWIAAAALARRLPRESYRVVVIDDGTSGDGLGDFAPVIAVPPALAGFHADLGLDAATLVRMTGGGHALGVAFGGWRADGAAAFLSYGETGAPLEGIAFHQLAGRLRAAGHPVRLADHALSAVAAQAGRFAPGAPIAHALHLPVVPYEALLRGAALRAGAERASADFVDAEIAANGIVERLTLADGTAVQPWLVLDCSGTDARIASRTSPASEDWSGWLPCDRTHAETVPAQGAPPPYTQVDAQDTGWTATWPLDGADVRLTCSVGGTGKPFRAARRVEAWRGNCVALGAAAGLLEPLHPTGLTLLLRSLAQLIQLWPAGPQAPVEAAAFNRTAAGALEGARDFLIAHYAVAGCAGALWDDRRAVSLPGPLAAKHDLFAARGRLPMYDNEPFEEEDWAVMFDAMGLMPRRYDARADIVPLAAIERHLAVQRARVIAQVRALPPYAQAMAALRARA

SEQ ID NO: 84992 - protein, 508 aa, unidentified
  source 1..508: note = Unknown
  REGION 1..508: note = tr|T1W4A3|T1W4A3_9ZZZZ Tryptophan halogenase; OS = uncultured organism OX=155900 PE=4 SV=1
MTPQSIVIVGGGTAGWMAAVAFGRLLGPAGVRVTLVESDAIATIGVGEATIPPIRTFHAMLGIDEDAFLQATGGSYKLGIRFEGWSRPKDSYIHPFGQIGTDVVGVPFAAQWLRAHQAGMADPLAQYSLEARAAETGRFSRPIANGDSPLSRIGYAYHFDAGRYAAFLRTQAEQQGVVRREGTIERVETGPAGIAAVHLANGSRIEGDLFLDCSGFRALLIGGALGTGWVDWSEWLPCDRAVAVATSADAAPLPMTRAIAGPAGWRWRIPLQHRTGNGHVFSSRHVSEDEATAQLLAGVEGKTLGDPRVIRFATGHRERMWSGNCIALGLAAGFMEPLESTSIHLVQSGLQHLLRLLPTGKISMPAAAIVDRYNRVMTAEFVRIRDFLVAHYHLNARPERFWRERAIAPIPDGLADKLALFRAGGRIFREADELFNESSWLSLLTGQNAPVEGYDPICDAVPLHAAARRLSQIEQVVGASLNHMPPHADALSRITARESRRADHLAPL

SEQ ID NO: 84993 - protein, 539 aa, unidentified
  source 1..539: note = Unknown
  REGION 1..539: note = tr|T1W7K3|T1W7K3_9ZZZZ Tryptophan halogenase; OS = uncultured organism OX=155900 PE=4 SV=1
MNEHSIRRVVIVGGGTAGWMAAAAFARFLNNGYTQVTLVESEEIGTVGVGEATIPPLINFNQMLGLNENAFLAATAGTFKLGIEFVNWGGLGERYFHPFGKFGHDLQGVHFHQLWLREKARRPTEDIAAWSMSAIAAAHGTFGRAADDARSPVRDLFYAFHFDASLYARFLRDYAEKAGIARIEGKIAKVDQRAEDGYVTAVTLEDGQCIEGDLFIDCSGFRGLLIEETLNTGYESYAHWLPCDRAVAVPCALPNPAEPDPFTRSTAHQAGWQWRIPLQHRMGNGLVYCSQYLDDDAAEAQLLANLEAEPLAAPRRIRFAAGRRRHSWNRNVVALGLSSGFIEPLESTSIHLVQAAIQRLLALFPDKRFDPAERDEFNHQMKDLYEDIRDFIILHYKATRRDDSPFWNQVRTMEVPDSLQRKIDLFAGKGRLFREGYDLFTDPSWVAVFLGQGIVPQSWEPAADALDEQKVAIALEQMRRGYLDTAQRLPTHGDFLRRTALSPLAAPVPTPAPAATDDVPFFAFTAESPFDVNGGGSPL

SEQ ID NO: 84994 - protein, 104 aa, unidentified
  source 1..104: note = Unknown
  REGION 1..104: note = tr|T1BAY1|T1BAY1_9ZZZZ Tryptophan halogenase (Fragment) OS=mine drainage metagenome OX=410659; GN = B2A_01541 PE=4 SV=1
MVLVELSAKLLAEQMPACREVMDIVARRFNEVTAYRWGRIIDFLKLHYVLTRRTDTAFWRDNVDPATVPARLQDMLALWKYQSPWFFDELDRLEEVFPAASYQY

SEQ ID NO: 84995 - protein, 511 aa, unidentified
  source 1..511: note = Unknown
  REGION 1..511: note = tr|A0A160TPK3|A0A160TPK3_9ZZZZ Tryptophan halogenase; OS = hydrothermal vent metagenome OX=652676; GN = MGWOODY_Smn707 PE=4 SV=1
MSALVPVRSVVIVGGGTAGWMAAAALSRLVRTGVSVTLVESDSIATVGVGEATIPPIRNFNGLLGIDENDFLAKTQGSIKLGIDFVGWTREGHRYTHPFGEFGFDIEGVKFHHFWHKLHAAGQASWIEDYNLCATAQKLGRFTLPVADPASVLSRLTYAYHFDASLYALYLRAYAEARGVVRIEGKVEDVMLRSIDGHVEAIRLEGDRRIDGELFVDCTGFRGLLIEGALQTGFESWKQWLQCDRAVAVPSASPGRAITPFTQSTARRAGWQWRIPLQHRVGNGYVYCSTDISDDEATATVLANLDGEPLRDPMLIRFEAGRRKLAWNRNVVALGLASGFVEPLESTSIHMIQTGVSKLMALFPDRGFSPVERDEYNRQTQLQMEQIRDFVILHYHANERTEGDLWRRVRDMAVPETLARKLDLFRNRGRFFRYDDELFADSSWIAVLLGQNVMPAGWDPLADAVDPALVRQRLDRIREVFRRAAEAMPRHEEWIARNCPAPGTPVARKTA

SEQ ID NO: 84996 - protein, 500 aa, unidentified
  source 1..500: note = Unknown
  REGION 1..500: note = tr|A0A160TP28|A0A160TP28_9ZZZZ Tryptophan halogenase; OS = hydrothermal vent metagenome OX=652676; GN = MGWOODY_Smn2050 PE=4 SV=1
MSSQPNRIVIVGRDAALWLSATIFRHALAPAGISVTAIELPTDLGPAATYASLPPLEALHNKLGLEESALLRATGGSFSLGHNVVGPVPGMPPFLLAHGSYGAPIDGAGFFPYWLKARRFGLQAAFEDFCLTAMAARQGRMLVPDEETELFGRTDYGYHLPALPYVATLKARAAKLGITTHHSSTIGVEHQVETGSISAILLDDGMRVEGDIFVDASGPEGILADQMPDISRDDWRPAFVANRRLTARAARFASVPAYAEIRVGASGWTALHATQAATFVSYAFALEEQDDESALAAAGKLAGLTLSDPVVTSVEQGIRHQAWSANCVAIGGAACSFDPLLDVELHAIQLGIVHLLALFPAGAIFSAERSEYNRITRSAFDRVRDFQSAFYAANRFGPTGFWAAARGATTPATVGHKLAIFRARGDIAPMEDESFAPDLWQALFTGLGEIPESWPPAIDRTPPERMKDDFRRMLGFIRRKVLEQPTHDGYLASLGRSEAA

SEQ ID NO: 84997 - protein, 522 aa, unidentified
  source 1..522: note = Unknown
  REGION 1..522: note = tr|A0A160TM32|A0A160TM32_9ZZZZ Tryptophan halogenase, putative OS=hydrothermal vent metagenome; OX = 652676 GN=MGWOODY_Smn1552 PE=4 SV=1
MDKAVSSIVIVGGGTAGWLAACLIAARANPATRAPITVTLIESPDIPTIGVGEGTWPTMRRTLERIGISEAEFLVACDASFKQGSRFVGWRTGGDGDEYLHPFVPPIDGDPRDVMAAWRDQSPDLRFAEMVTPQARPCRLDLAPRQRTMPDYAGALNYAYHLDAAKLAALLTRHATERLGVRHVRDHVVGVERTEDGDIAEVRTRASHDIAGDLFIDCTGHAALLIGEQYGVGFLDRSGELFNDRALAVQVPVAADSAIASQTNATAHAAGWIWDIGLPTRRGVGCVYSSLHASDEAAEATLAAYLRHALPGAETERLSFRRLTFRSGHRERFWERNCVAIGLSAGFLEPLEASAIVLIELSLEALLDNFPATRDVMDIHAGRFNALFRYRWDRIVEFLKLHYVLSERDEPYWRDHRDPASIPPRLADLLRLWRDQPPSRADLPSAEEIFPAASYQYVLYGMGFPAPPIGQIRGAPGDGVTHQLRQVEQRARVLAASLPTNRAYLDALRAHQDMAPSMENTR

SEQ ID NO: 84998 - protein, 455 aa, unidentified
  source 1..455: note = Unknown
  REGION 1..455: note = tr|A0A3B0SB64|A0A3B0SB64_9ZZZZ Tryptophan halogenase (Fragment) OS=hydrothermal vent metagenome OX=652676; GN = MNBD_ALPHA06-248 PE=4 SV=1
MIRSILIVGGGSAGWITANLLQALLHQSAEQDIQITVLESPDIPKIGVGEATVPSIRRTLQTIGLDEKEFMRATDATFKNLIRFEGWNPGTSYDHPFDRRARPDSDSAIAAWLHRADMMDNGFAKQFSLLSHIANAGLAPKAQGWPGYASPFPYAYHLDAIKLAGMLAEHGRQTGIAHMLANVTDVEVDERGHIAAVRTDTDETCTADLYIDCTGFRSILHKQKLGVKQRDFSQYLLCDRAATMRVPYDIHQPASIKPYTTSSARSAGWSWDIALQGRRGLGYVYASAFQSEADAEAELRALEGPHCNDIAVQHIAFASQKSQASWVGNCIAIGLSDGFLEPLESSGLYLIEFAAQALGEMLPYAKADTTVIAKSFNRQMDGIYDEVLEFLNLHYCLSTRTDTDFWREVQKPEHVLDGLAEKLELWKLKPPGDMDFSSPLQLFSLQSHEYILFGM

SEQ ID NO: 84999 - protein, 202 aa, unidentified
  source 1..202: note = Unknown
  REGION 1..202: note = tr|A0A161K5L2|A0A161K5L2_9ZZZZ Tryptophan halogenase, putative OS=hydrothermal vent metagenome; OX = 652676 GN=MGWOODY_Smn871 PE=4 SV=1
MGPGMQDITPRRILFEPGYRERQWVKNCVAVGLSGGFLEPLESTGVLVIEAAIGMIAEMFPHNGPVDAPARRFNELIAARYDNIVNFLKLHYCLSQRSEPFWRDNTDPASIPDRLADLLDQWRHRPPGRFDFTLDLESFAFFNYQYILYGMEFRTDLAPSRSDFPNVGAAEKTFARIRNFGERATLDLPSHRALIQQINRAG

SEQ ID NO: 85000 - protein, 516 aa, unidentified
  source 1..516: note = Unknown
  REGION 1..516: note = tr|A0A3B0RTP3|A0A3B0RTP3_9ZZZZ Tryptophan halogenase, putative OS=hydrothermal vent metagenome; OX = 652676 GN=MNBD_ALPHA02-1374 PE=4 SV=1
MDKLCRKIVVVGGGSAGWLLASRLAKKLNVNDNAAFSVTVIESPDVSIVGVGEGTWPTMRQTLRKIGVKETDFMRECCAAFKQGTKFVGWRDGGDQDFYYHPFDAPCGSNSYNAGDLWHKYKRPHSPDSFCAAVSPQYHTCEQGLAPKTITHGEYQGFLNYAYHLDAVKLVGFLRRHATKNLGVRLIEGNVLGVKKDENGWVDHLITREHGDLSGDIFFDCTGFNALLMHQNLDVPYSRLDDTLFVDRALVMQVPYDSETAPLASTTISTAHDAGWIWDIGLSDRRGVGFVYSSNHMNDEEALAGLRQYVGHKASSLPDRQIKFQARRLDRFWEKNVIAVGLSAGFVEPLEAAAIMMIETTADWFCERFPSSRHVMTLQSRIYNETFSGYWDRIVQFIKFHYVLSKRRTDFWKDNKCESSIPQDLLEKLKLWQYCAPFSQDFLADSYVFSWQSFQYVYFGMGSSYDSASSNEYPEERVAFMKDFDMTKAMTKKALETLPSNRELLMKIRDFGLQQV

SEQ ID NO: 85001 - protein, 124 aa, unidentified
  source 1..124: note = Unknown
  REGION 1..124: note = tr|T0ZGS7|T0ZGS7_9ZZZZ Tryptophan halogenase (Fragment) OS=mine drainage metagenome OX=410659; GN = B1A_14326 PE=4 SV=1
DQDFKWVRDFLILHYHATERDDTEFWKHCRSMEIPDSLRETVELFRDSARITPTAEELFKTVSWAQVMIGQRIQPRRYPPVIDRLKDAELKTFINHVEEVIRSCVAVVPPQEAFIARHCKAPPP

SEQ ID NO: 85002 - protein, 201 aa, unidentified
  source 1..201: note = Unknown
  REGION 1..201: note = tr|T1BA74|T1BA74_9ZZZZ Tryptophan halogenase OS=mine drainage metagenome OX=410659 GN=B1B_05330 PE=4 SV=1
MSQSVKNIVIVGGGTAGWMAAAACAKVLGPSYAVHLVESEEIGTIAVGEATVPHLKQFNNLLEIDEVEFVKNVKGTFKLGIQFNDWGRLGDSYIHGFGQLGPDVGPLPFHQFWIKARHKGWAAPLGDYSINTAAAPRGKFMPSASDAPANSPLSDIRYAYHFDASLYARYLRGYAEARGVRRTEGKIRHVQLRARTVTSSR

SEQ ID NO: 85003 - protein, 229 aa, unidentified
  source 1..229: note = Unknown
  REGION 1..229: note = tr|T0ZQJ0|T0ZQJ0_9ZZZZ Tryptophan halogenase (Fragment) OS=mine drainage metagenome OX=410659; GN = B2A_07264 PE=4 SV=1
MSGQSVRRVVIVGGGTAGWMAAAVLIRTMAAHLEVCVVESDAIGPIGVGEATIPQIRNVNTFLGIEEDAMLRASDGTFKLAIEFNDWLRLGHSYLHAFGEVGLPLGALPFQHYWLRSRSDPAAPDLWAYSLNAAAARGHRMARIERVGQTPIGGIKYAFHFDAKLYGQMLRRYAEQRGAARTEGRVVEVKLRAEDGFIEAVVLESGARIEGDLFVDCSGFRALLIEGAL

SEQ ID NO: 85004 - protein, 502 aa, Sphingopyxis sp.
  REGION 1..502: note = tr|A0A0W1EIC0|A0A0W1EIC0_9SPHN Tryptophan halogenase; OS = Sphingopyxis sp. HIX OX=1759074 GN=ATE62_20640 PE=4 SV=1
MEGEPFNLVIVGGGTAGWMCAAACAAKLDPALYRVRLIESEEIGTVGVGEATLPQMKDFNDFLGLDEVEFMQATQASFKLGIEFVNWGRQGDRYVHPFGTFGRPIGEGDFFSYWVRAHNAGQAAPLFDYCFPIVAALQNRFMLPNGDKNDVRNAFAYAYHLDAFLYARYLRRWAEARGIARVEGRIVDVERDGRSGKVAAVTLASGTKVAGDMFVDCSGFRSLLLGGTLGVELEDWSRWLPCDSAQAVPSVRSPDFTPYTRSTRRPAGWQWRIPLQHRTGNGYVYSSADISDDEAAATLLANLDGEALAEPRVLRFKAGKREQAWAQNVVGMGLAGGFLEPLESTSIYLVQMAIMHMLTLLPPGADIDPALPAEFNRVMDVEYDRIRDFLILHYIANDADAPLWERVTTMDVPDSLAGKIDRFRHRAHVQAYRDGLFGPPSWQAVFVGQGVVPHAADRLADMLPGDQLAERLAGLHATIARGAASAPLHADFVAHYCPAPAP

SEQ ID NO: 85005 - protein, 499 aa, Sphingopyxis sp.
  REGION 1..499: note = tr|A0A0W1EYI0|A0A0W1EYI0_9SPHN Tryptophan halogenase; OS = Sphingopyxis sp. HIX OX=1759074 GN=ATE62_15270 PE=4 SV=1
MTPMRLIIIGGGTAGWMAAACLRRFLPQGWSVTLVESEAIGTVGVGEATIPQIRLFNEALGIDEDEFLRATQGTIKQGILFDGWARPGHRYMHAFGAIGRGLGLLPFHHYWLRGRSLGIAGSLDAYSLNESAAHAARFRRGAGVSAHAPAMPYAFHFDAALYAAFLRRRAEGWGVTRVEGKVVSVEQNENGDVAAVRLEGGRRVAGDLFVDCSGFRGLLIEGALATGYEDWSHWLPNDRAVAVPCGHGDAAQQPYTSAIARDAGWQWRIPLQHRIGNGYVYCSRFLGDDEAEAALLASLDGPAQAAPNRLRFTSGKRQKMWNRNVVALGLAAGFMEPLESTSIHLVQSGISRLLNLLPAGAPDPAIVAEYNRQSDFEWERIRDFIVLHYKATERSDTPYWRERAAMEIPDTLAAKLDQFRAQGLIVREHEELFTEPGWLQVLVGQGVMPRSWHPLADTLSESDLKGFLDTNRLVIEREVAAMPPYDAFLKSLSPTGVAA

SEQ ID NO: 85006 - protein, 196 aa, Nannocystis exedens
  REGION 1..196: note = tr|A0A1I1TY88|A0A1I1TY88_9DELT Tryptophan halogenase (Fragment) OS=Nannocystis exedens OX=54; GN = SAMN02745121_00816 PE=4 SV=1
MTVEHADCVVLGGGPAGSTFAAIARKYAPGAKIVLLEKCRFPRWHIGESTIPAANGVLEDLGVYQTMLASDFVKKMGVTFIWGRDRTPWTADYLTLKTISRAGGDASIIEVTGQDFEKLLGPGHTQRTPYSAFNVERSRFDELLLDNARRLGADVREGTKALGAQRVGNSSQHMITWEDDAGNSGSITADFVLDAT

SEQ ID NO: 85007 - protein, 502 aa, unidentified
  source 1..502: note = Rhodobacteraceae bacterium
  REGION 1..502: note = tr|A0A5C5GH25|A0A5C5GH25_9RHOB Tryptophan 7-halogenase OS=Rhodobacteraceae bacterium SM1903; OX = 2588711 GN=FHY64_12555 PE=4 SV=1
MGPSGAAQVGMSKRVVIVGGGTAGWLAALILSRAPGRRVTVVESSRIPTIGVGEGTTAVFRHMLKHLGLDERKFIAETGATVKYGIRHRDWRRKGHSYDGPIDEIAQVAGQGLDLYAVASGRPVGEAHLFRHLMEKRRAPYAEVKGREVAAGPFHFAYHFDQAKAGAWLKSQASGITLVDDVVEGLERDGETGSVKGLRLESGQVLEGDVFLDCTGFRRALIGPMGAEWQSYSDTLPVNRAMPFWIDLKPGEEIDPLTLAWAQGAGWMWKIPTSDRYGCGYVYSDAHTSPDEARAEIETALGHAIEPRNDIRIDAGRLKDAWIGNVIALGLSSSFLEPLEATSIHGTVVQCMWLDRWLDDPKGRDHYNAAVARQVDDFRDFIRLHYVSERNDTPFWRDVAASHPQTLRDRLAAWQTRMPERRDFTTLPGNFPHVQEQLYIPVLDGLGLLNRAAAKEALSRDPKRRATLRKTHEQLTKDYTRAAGKCLPHRAWLSSLTKEMAA

SEQ ID NO: 85008 - protein, 512 aa, Sphingopyxis sp.
  REGION 1..512: note = tr|A0A4P7S1C6|A0A4P7S1C6_9SPHN Tryptophan 7-halogenase OS=Sphingopyxis sp. PAMC25046 OX=2565556; GN = E5675_14165 PE=4 SV=1
MAEPYRIVILGGGTAGWMCASGLAGLLAASDYDITLIESDEIGTVGVGEATLPHLKSFNDMLGIDEAEFMRATRGTIKLGIEFTDWLRQGARYIHPFGTFGDRWGGADFQHHWARARLSGTDSRSLQDYSFAVAAARANGFEHPNTDPKSIRSTYSYAYHFDAGLYAAFLRTWATARGIRRLEGKVVDVVRDAQNGDVERLTLASGAEVAGDLFIDCSGFRSLLLGQTMGVPWLDWSAWLPCDRALAVPCASVEPLTPYTRATAQRGGWTWRIPLQHRIGNGYVFSSAFCGEDEARRTLLGALDGEALDEPRLLRFQAGRRAAGWAGNVIAVGLASGFLEPLESTSIFLIQAATVDLAALMPRRSERVDPRMAREFNRLFEIHYDRTRDFLILHYTANARAGEPLWDHVRTMALPDSLAHKIALFRESAAAPDYKLGLFSRDSWLSVLEGQGVLPSAASPLTHRLPAADLQARLDDLAERIAVNADDMTPHADFIAGYCAAGTAIQPATSAA

SEQ ID NO: 85009 - protein, 521 aa, Sphingopyxis sp.
  REGION 1..521: note = tr|A0A4P7RS52|A0A4P7RS52_9SPHN Tryptophan 7-halogenase OS=Sphingopyxis sp. PAMC25046 OX=2565556; GN = E5675_04520 PE=4 SV=1
MRGPGDTSGPLPGGEGRNRVGERRITKVVIVGGGTAGWMAAAALSRTMDHLSIRLVESDEIGTVGVGEATIPAIRLFNALIGIDENEFIRETGGTFKLGIQFHDWGRIGDVYMHAFGQIGRSLGMLPFQQYWLRGRNEGVAGRLGDYSLNETTGRQNRFARLPQIPNTSLDGIAYAFHFDAALYAAYLRKVSEAAGVERTEGKIAGVRRGGESGHVEAVVLENGTEIEGELFIDCSGFRALLIEDALETGFEDWTQWLPCDRAIAVPSENAGPARPYTQAIAHKAGWQWRIPLQHRTGNGHVFCSDFISEDEATAILLANIEGRPLADPRTLRFKTGMRKRAWNANVVALGLASGFLEPLESTSIHLIQNGIAKLLAHFPDRDFDAANIGAYNRRVRFDYERVRDFVILHYHANQRTDAPFWIRCREMGIPDTLAQKIALFKSQGQIVREGDELFIEIGWFQVLTGQNIMPDGYHPMADQLTRDELAGFFADIETIVARAASHLPTHEEFIAQHCAAGVPA

SEQ ID NO: 85010 - protein, 507 aa, Porphyrobacter sp.
  REGION 1..507: note = tr|A0A4Y6W0C5|A0A4Y6W0C5_9SPHN Tryptophan 7-halogenase OS=Porphyrobacter sp. YT40 OX=2547601; GN = E2E27_07685 PE=4 SV=1
MTSPTSSPVRVVVLGGGTVGWMTAAGIAKLLPGIANVQLVESEEIGIVGVGEATLPHIRGFVERLGIDEAAFMKATHATYKLGIDFRDFGRIGESYIHPFGSFGEEVQGVGFHHWWLELARHGKARDLGDYSLAVAAAKANRFRPPAGDDSLASTYGYAYQFDATLFGPFMRDFARGIGVERHEGRVVTVERDGASGDVTALILADGRRIEGDLFVDCSGFRSILLGQELGEAWEDWTHWLPCDRAAAMPCTHATEDVRPYTTATAMPAGWRWQIPLQHRMGNGYVFSSAHISEEQACEAIIASAEGTPLADPRILKFRPGRRAQSWSHNVIGIGLASGFLEPLESTSIYLAQMAITYLIELFPTTGTVDPRDRDEFNRLVEMEYDRVRDFLILHYHATTRDDSEFWNHVRTMQVPDSLAGKLELWRRAARIEKYSDGLFYDASWIAVYVGQGMLPEAHDPRAAMIAPDALARATERLRMAVTGEVAAMPGHRDYLMREAARLAEAA

SEQ ID NO: 85011 - protein, 543 aa, Luteimonas marina
  REGION 1..543: note = tr|A0A5C5U0W1|A0A5C5U0W1_9GAMM Tryptophan 7-halogenase OS=Luteimonas marina OX=488485 GN=FQY83_12645; PE = 4 SV=1
MEKNRIRRVVIAGGGTAGWVAACALTHQFRDLLDITLVESEQVGTVGVGESTIPTIRTFHKLLQIDEREFLSSVAGSFKLAISFENWIRPGSHYFHPFGTTGVNTWSVDFHQFWLESRRRGMQSELGDYCLETAAARKDRFALFNAGQNTQQWSMRWAKAATAMERSDVSYAYHFDAGLYAAFMRIKCEGSGLKRIEGKIAQVHQDPESGHVQSLVLEDGQVIEGDLFIDCTGARAVLSEQALHTGYEDWNHWLPSNRAVALQTEADGPAAPYTRAIAHEAGWHWKIALQHRIGCGIVFSDAHMSDDEATAKLLAENPAKPLRDPWIIPFRTGRRRKAWNKNVIALGLASGFIEPLESTSIHLTLSAVTRLVQFFPFEGISEAAVDRYNQVSRQELEHVRDFIVLHYHLNQRDEPLWKQCREMELPPGLAERIQVFRETGYAWQGEDELFRLDSWTHCMLGQGVVPQNHHPLTRALSDADLKRLLEGVRKPIDGAVAAMPSHQQFLDSYCKAPASAWEQMYARARQHERVTGKVAGVGGDLTR

SEQ ID NO: 85012 - protein, 492 aa, Sphingopyxis sp.
  REGION 1..492: note = tr|A0A4P7RWA8|A0A4P7RWA8_9SPHN Tryptophan halogenase; OS = Sphingopyxis sp. PAMC25046 OX=2565556 GN=E5675_14160; PE = 4 SV=1
MSGARAITLVGRDAPLWIAAAALRRALAPAGVTVRAVELPAEAGVADVYATLPAIEALHVQIGIDEAALLRSARGAFTLGQNFVDASGAGRPSFLHSYGAFGTGINGGDFFPHWVKARHHGLGVGLDDFSLTASAALGGRMFFPDTDSEVYGRSDYGYHLPAAAYAKSLKAIARHLGVELFETATIAVERGDDGIAALRLDDKRRIESALFADLTRERMLHGSRGFEAWDTPGDRLLRALAPRPAALPAYAEIRASAGGWTGLFPSLTHIHVEHVFSHASTTDEAARQTAEAACGLPLDAVTIRPFAAGVAAAPWTDNVIALGDAACVFDPAHGFALHGLQLGIVHLLAAYPANGAGYAARRAEYNRVLRSHFARVAEFQAAHHALQRYSGAFWDSARALPMPDELAHRIDLFSARGELPPLEDESLPPDSWRALLVGHGIMPQSWRPAADRLPPDEVKAHFRKMLGFVREAVLRQPTHDACLALILQPAHG

SEQ ID NO: 85013 - protein, 501 aa, Sphingopyxis sp.
  REGION 1..501: note = tr|A0A4P7RV70|A0A4P7RV70_9SPHN Tryptophan 7-halogenase OS=Sphingopyxis sp. PAMC25046 OX=2565556; GN = E5675_06795 PE=4 SV=1
MGDRFELVIVGGGTAGWMCAAACAAKLDLARFRVRLVESEEIGTVGVGEATLPQMKDFNDFLGLDEIEFMQATQATFKLGIEFVDWGAAGDRYVHPFGTFGRPIGEADFFSYWIRAHVAGTAAPLSDYCFPIVAALQNRFMLPSGDANDVRNAFAYAYHLDAFLYARYLRGWAEARGIERVEGRIVEVEQDSESGDIAAVKLASGTRVAGDLFVDCSGFRSLLLGGTLGVDLEDWAHWLPCDSAQAVPSARSDDFAPYTRSTRRKAGWQWRIPLQHRTGNGYVYSSADISDDEAAATLLANLDGEALADPRVLRFKAGKRQKAWAHNCIGMGLAGGFLEPLESTSIYLVQMAIMHMLTLMPAERAIDPALPCEFNRVMDVEYDRIRDFLILHYVANEADAPLWERVTAAQVPDTLADKIDRFRHRGHVQAYRDGLFGPPSWQAVFVGQGIEPRAADRLADVLPAATVDERLANLAATIADAAATLPSHADFIARYCPAPAP

SEQ ID NO: 85014 - protein, 517 aa, Sphingopyxis sp.
  REGION 1..517: note = tr|A0A4P7RUB9|A0A4P7RUB9_9SPHN Tryptophan 7-halogenase OS=Sphingopyxis sp. PAMC25046 OX=2565556; GN = E5675_08080 PE=4 SV=1
MNSAIEKVVIVGGGTAGWLTAARLASSPRAMAGRLSVTLIEAPDIPTIGVGEGTWPTMRATLGAIGIGEGEFLAACDGSFKQGSRFDGWVTGAVDDRYLHPFTAPPAAPTAELLAAWRSGAADLSFAAAMTPQTHVCDLNLAPRQRAMPDYQGAANYAYHLDAGKFAALLARRAVQQLGVRHVADHVTGIDADGAGGIASVATSRNGAVEGDLFIDCTGHASLLIGGHLGVDWIDRGDTLFNDRALAAQVPVTPGSPVASQTVSTAHEAGWIWDIGLPGRRGIGCVYASRFMDDDAAEAVLRAYIARVLPEAPEVPARRLSFPTGHRVRFWEGNCIAVGLSAGFIEPLEASAIVMIELSLNALIDNFPANRAALPIHAARFNELFRYRWDRIVEFLKLHYVLSRREEPYWLAQRDAAHIPSRLAEMLALWRDQPPSAWDFPRVDEIFSAESHQYILYGMGFPVPADLPTTGGRAEGLLADTRQRARSLAAALPANRDYLDTLRPGVQAAAARQEGIG

SEQ ID NO: 85015 - protein, 499 aa, Erythrobacter sp.
  REGION 1..499: note = tr|A0A2K1E6W1|A0A2K1E6W1_9SPHN Tryptophan halogenase; OS = Erythrobacter sp. SAORIC-644 OX=1869314 GN=BA950_09375; PE = 4 SV=1
MTESKPPRVVVLGGGSAGWITACLLHHRWHSRGGQVTVVESPEIGIIGVGEGSTPQLKAFFDHLGIDEADWMAACDATYKLGIRFTGWSERPGFESYFHSFPGPVDLHTEPGFVHNCALRRRGFDVPAHPDDWFLAEVLAREHRGPHPRDNFPFMPSYGYHFDAHKLGKFLRDWATERGVLHRLLKATDVEQGAQTEIAALLCEDGTRIEGDIFVDCSGFRSVLAQQTLGAQFIPFGNNLFNDRAVVLPSAHSTRFKPQTDSIAMRAGWRWSIPLTTRVGNGYVYSSKYVSDEDAEAELREAIGMQDEGEARILEMRVGRIAETWTGNCLAAGLSQGFIEPLEATALHIVIATALDFADAYEKGGYGSAHRDMFNQRIAAKYEGIRDYIVAHYRLNQRSDTQYWRDNAANDALSENLKGMITAWFTHKDLREVNLRQHDGNPHYASMSWHALFAGYGTFPPEAKMVPTPTGLVTAEVDHTRRMLSACATNFLRYAPLSD

SEQ ID NO: 85016 - protein, 517 aa, Sphingobium sp.
  REGION 1..517: note = tr|J2L9N1|J2L9N1_9SPHN Tryptophan halogenase; OS = Sphingobium sp. AP49 OX=1144307 GN=PMI04_01582 PE=4 SV=1
MTTDSSLPGRVVILGGGTAGWLAAAYLSRTLKVPNVTLVESSEIGIIGVGEGTFPTIRTTLAGLGISEAEFLVQADATFKQGVLFDGWATGSDSYFHPFNLPVGGEDEALLPHWIAAAGPNRPAWADAVTVQERVIRAGRAPKRPEDADFSGPMNYAYHFDAARFAAYLRAISVAAGVSRIEGTVGLVERHADGDIAALLLADGRRVEGDFFLDCSGFRALLIGQTLGSGFKSCADSLFNDRALAMQVPYATPDAPVRPYTLATAHEAGWTWDIGLSGRRGIGYVYSSRHCSDDEAEATLRRYVGSEGDSLTPRQLRFETGYRDTQWIGNCVAVGLSAGFFEPLESTGIMLIEAALKMIGDFLVPGDRAARDAAARSFNALMAARFARIVHFLKLHYCVTRRTDTAYWRDNADPASIPQELQDMLAQWCHRPPSRFDFLVDVETFLPPSYHYILYGMGFETALTAGADRYPGGAEARDIFTRVRGAQAGACAALPDHRTLLNHYHARAATIPAKVSR

SEQ ID NO: 85017 - protein, 533 aa, Rhodanobacter sp.
  REGION 1..533: note = tr|A0A154R6E7|A0A154R6E7_9GAMM Tryptophan halogenase; OS = Rhodanobacter sp. FW510-R10 OX=1524462; GN = RhoFW510R10_07650 PE=4 SV=1
MNDSRIRQVVIVGGGTAGWMAAALLAQALGAGVAMRLVESAEIGTVGVGEATIPQIRHINRFLGIDEDELLRFVHGTYKLGVQLNGFTRLGDSYLHAFGDLGLPLGLTPFHHYWLRAVQGRTSAASAGDGRDAGDRAMPGAIAECAGAAGRADAPDLWAYSLNAAAAAENRFAPLEKIPDSPLGGLRYAYHFDATRYAQYLRERIAPGAVQRIEGKVTEVRLREGDGFIESLRLDSGEIVEGDFFIDCSGFRGLLIEGALNTGYENWQHWLPCDRALAVASAPGGPMRPYTQASARTAGWQWRIPLRHRTGNGHVYCSRFISDDEAAAQLLANLETEPLGDPRPLRFVTGMRRLAWNRNCLALGLAAGFMEPLESTSIHLVQSGISRLLAMFPDRHCDSALVDEYNRQTRFEYEHVRDFLILHYKATERTDTPFWRQCGAMEIPPSLARRIELFRRTGMVFREGEELFAETGWVQVLLGQRIEPEHHHPLADALSDAQLEGFLADIRTLVGRAKNTLPPHHAFVARAAGSLVT

SEQ ID NO: 85018 - protein, 504 aa, Serratia fonticola
  REGION 1..504: note = tr|A0A1Q5V3A4|A0A1Q5V3A4_SERFO Tryptophan halogenase; OS = Serratia fonticola OX=47917 GN=BSQ40_26295 PE=4 SV=1
MLNFRNAKRFVILGGGTAGWFAAIAMRRVFSPNVEIRVIESSAIGIVGVGEGGLLNLAHALKRYQIPVDRFMAEVDATYKWGFCYEGWRTGKEDDRYFHLFAGGGKAEWAEYGFLPGFSALIGQQLPLPSYIRGFQAVARNVPQQDASQILAEGGADIQTSYHFDSYKTANFLKTIALERGIVHQDAIVDRVELDQSGNATALIIGEESLDVDFVIDASGFARKIVGNTLKAEWVSFKEHLLMDRAIPFYMPHPFENPLLVTRALAMNAGWMWQIPLVNRVGAGYVYSSKHISDEQALAEIEKTLGYEIVPHETLKFDPGCFKEVWQGNIMALGLSSGFVEPLEATSIGQMLEQLRNFERVLSAGQGIVSDKSIKEFNQANLRSWEGIRDFLRMHYDCPRRDNQFWCDVATSAMPDDYRNIKACWQERTPRMLDIENYAINGWGGIFHVTNWMFVAAPLGLISTQAANKEVLFMPQASRERVSQLLQELPSLLGPDWRPRSQQK

SEQ ID NO: 85019 - protein, 538 aa, unidentified
  source 1..538: note = Burkholderiales bacterium
  REGION 1..538: note = tr|A0A257LHD4|A0A257LHD4_9BURK Tryptophan halogenase; OS = Burkholderiales bacterium PBB5 OX=2015567; GN = CFE45_14815 PE=4 SV=1
MQTIQNILIVGGGTAGWLTAAFLARTLGTDAGGPVTITLVESSDIGIIGVGEGTFPSIRGTLAAIGLDEGRFIRECAATFKQGIRFNHWVRPPGAPGADHYLHPFSHPSQRPGGPDLLPYWLLGAAPPGMPLAQAVTLQQRVADAAHGPKRLADADFQGPLNYAYHFDAGRFATLLAEHARALGVGHVLATVERVELDEAGAIGAVHTRERGRLTADLYIDCTGFRATLIGQALGVPLRSVRDVLFVDRAVALQVPYDRPDAPIPSTTVSTAHEAGWTWDIGLQQRRGVGHVYASRYMDDPQAEQVLRRYIGPASDGLDARRLTLEVGYRERQWVKNCVAVGLSSGFLEPLEASGIGLIEIAAYLIGYLFPAHGDTAPAAQQFNAMMSARYERIVDFIKLHYCLSQRRDSAFWRDNADPRSIPATLQDKLAMWRCRPPHRLDFVSDFEMYPTSSWQYVLYGMEYATDLRHARAAHPRWDEARAEFDMIQQVSQRALADLPTHRDLVSHYSRRAPVARPVARPVAQARGGAVEPRSTSA

SEQ ID NO: 85020 - protein, 510 aa, Mitsuaria sp.
  REGION 1..510: note = tr|A0A2G9C7N5|A0A2G9C7N5_9BURK Tryptophan halogenase; OS = Mitsuaria sp. HWN-4 OX=2049333 GN=CS062_19160 PE=4 SV=1
MTPTPPAPSVPRQPVRRVVIAGGGTAGWMMAACIAKHLGKQLDIRLVESDEIGTVGVGEATIPTMLTFHQLLGLDEREFMAATQATIKLGIQFEGWRDRDATYIHAFGSTGIDHWTAGFQHFWMKGRERGLASDYGDYCLELRAAQQHRFAHLPGDGINYAFHLDASLYGAFLRRFSEGFGVRRIEGRIAEVLLRPDGDLRALKLQDGSEIEGDLFVDCTGMRSVLLGQTLGVGYQDWSHWLPCDSAIALQTASVRDAVPYTRAIAHPWGWQWQIPLQHRVGNGVVFSSRYTDDDTARAALLGNIEGEVLTPHRVIRFKPGQRDVVWRRNCVAVGLASGFLEPLESTSIHLIQRSAIRLLQMFPKEGIRQSDIDEYNAQMRHELEHIRDFIVLHYHLQQRTDSPMWRDLREMPVPASLRHRLDLFRETGRVFRGPNELFTENSWIQVMLGQGLMPEQHHPTADLMSDRELAGFLGGIKTRIDQTVQQMPGHQQYIARYAPGTQWRVPVPA

SEQ ID NO: 85021 - protein, 512 aa, Porphyrobacter sp.
  REGION 1..512: note = tr|A0A4Y6VYL5|A0A4Y6VYL5_9SPHN Tryptophan 7-halogenase OS=Porphyrobacter sp. YT40 OX=2547601; GN = E2E27_07700 PE=4 SV=1
MSVPPPVTRIVIVGGGTAGWMTAAALVRVLGQLPGLSVTLIESEAIGTVGVGEATIPQIIGFNRLLGLDEMTFMRETRATYKLGIEFVDWLRPGHAYVHPFGSFGIDMLGIEFQHFWLRGQAVGDSSRIDDYSIAAVAGKAGRFAWPRPDQPKSPLSKLSYAFQFDAGRYARFLRGFAESAGAMRVEGRIVSAQQDGESGFVTGVTLEDGREVTGELFIDCSGFRSLLLGQTLGVPFTDWSKWLPCDSAVAIPCELGGENVPLTRSTARSAGWQWRIPLQHRIGNGHVFSSAHIDRQAATDLLLANLDGAPLADPNHLAFKAGHRARAWEKNVVALGLAAGFLEPLESTSIHLVQSGIARLLALFPDTGFGAVERDRFNAETEREYINIRDFLVLHYRASERDDSEFWRYCRNLEAPDGLAEKLAMFRSSGRIIRENNELFTEDSWLSVMLSQGVTPRAYHPAAWMLDEAETRERLAHIRGVIAQTAGQLPTQAEFLRQNGGAIAAAEHLTA

SEQ ID NO: 85022 - protein, 538 aa, Burkholderia sp.
  REGION 1..538: note = tr|A0A1I0K1H0|A0A1I0K1H0_9BURK Tryptophan halogenase; OS = Burkholderia sp. NFACC38-1 OX=1566268; GN = SAMN03159335_03586 PE=4 SV=1
MSNPIKNIVIVGGGTAGWMAASYLVRALQQHTSITLVESAAIPRIGVGEATIPSLQKVFFDFLGIPEREWMPQVNGAFKAAIKFVNWRKSPERSRDDHFYHLFGTVPNCDGVPLTHYWMRKREQGFQQPMEYACYPQPGALDAKLAPCLSDGTRQMSHAWHFDAHLVADFLKRWAIERGVKQVIDEVEQVHLNERGYIASLSTKEGRTLEADLFIDCSGMRGLLINQALKEPFIDMSDYLLCDSAVASAVPNADARVGVEPYTSAIAMNAGWTWKIPMLGRFGSGYVFSSKFTSRDQATADFLNLWGLSDKQPLNQIKFRVGRNGRAWVNNCVAIGLSSCFLEPLESTGIYFIYAALYQLVKHFPDTSFDPRLADAFNAEIVHMFDDCRDFVQAHYFTSSRDDTPFWLANRHDLRLSDAIKEKVQRYKAGLPLTTTSFDDSTYYETFDYEFRNFWLNGNYYCIFAGLGLLPDRSLPLLQHRPESIDKAEAMFARIRREAERLRTSLPTNYDYLRSLRDGGAGLSRSQPGSTLTAPETL

SEQ ID NO: 85023 - protein, 509 aa, Porphyrobacter sp.
  REGION 1..509: note = tr|A0A4Y6W1D0|A0A4Y6W1D0_9SPHN Tryptophan 7-halogenase OS=Porphyrobacter sp. YT40 OX=2547601; GN = E2E27_09180 PE=4 SV=1
MGIDENVAIERIIIVGGGTAGWMAAAALSRIKRGRPVEIALIESESIGTVGVGEATIPPFVGFNELIGVNEAEMLAAVGGTFKLGIQFENWGKLGDSYIHPFGAYGYTMGGISFHHVWHRMVGAGDKRPIQVFNLETMAAYFGKFARSEDFKRDDLPPVNYAYHLDAGRYATFLRQLAESRGVVRHEGRIADVQLDGESGFVTGVTLEDGRAFQGDLFIDCSGFRGLLIEQALKTGYDDWSHYLPCDRAVALPCKRDDGGPPPPFTRATAHSAGWQWQVPLQHRNGNGHVYCAAYMDDQEALDILLGNIAGKPQAEPNWLRFVTGRRKKFWNKNVVALGLAAGFMEPLESTSIHLINTGIDKLISLLSLDGITQVQEDTFNRLTGREYARIRDFLILHYNATSRDDSDFWNYVRTMPVPDSLTEKVELFRANGQIFREEDELFTETSWAAVMMGQGIRMGGHNAMADALDPEETAREITEIEQSIRYLVQHMPGHGDYLARYCPAPMAA

SEQ ID NO: 85024 - protein, 415 aa, Pseudomonas synxantha
  REGION 1..415: note = tr|I4KWC5|I4KWC5_9PSED Putative tryptophan halogenase OS=Pseudomonas synxantha BG33R OX=96901; GN = PseBG33_0447 PE=4 SV=1
MPTVEMERRQVVVIGAGPSGAIAAALLKRKGHDVLIIEREHFPRFSIGESLLSHCIDFIEEAGMLDAVQAAGFQVKTGAAFAWGERYSAFDFGDTFSNGKPTTFQVQRGEFDKLLADQAALQGVEIRYGQSIVGVDFSGECRYLHVRRQNGSEYHIKAKFVLDASGYGRVLPRLLDLEAPSNFPLRQAVFTHIEDRIEHPGFDRSKILVTTHPTQRDIWFWTIPFSNGRCSVGVVAAKEHFDGRDSDLDACLRSFVDETPSLAAVLQNAAWDTPARSIGGYSANVKSLHGPGFALLGNAAEFLDPVFSSGVTIAMRSASMAAAVLHRQLNGETVDWQSEFAEPLKRGVDTFRCYVEGWYAGTFQDVIFHPGSSPEIRRMISSILAGYAWDERNPFVSEPKRRLRMLSDICASEAV

SEQ ID NO: 85025 - protein, 501 aa, unidentified
  source 1..501: note = Caulobacter radicis
  REGION 1..501: note = tr|A0A2T9J5V5|A0A2T9J5V5_9CAUL Tryptophan halogenase; OS = Caulobacter radicis OX=2172650 GN=DDF65_17665 PE=4 SV=1
MADNRIGRIVIVGGGTAGWMSAAMLARALGPAAQISLVESEAIGTVGVGEASIPQLRNFNAFLGLDEDAFLRATEGTIKLGIEFVDWLAPGHRYMHAFGPVGRPLGTTPFHHYWLDARRRGTAGDDFWAWSANALAARAGRFGRTPGEAGAEPLTWAFHFDAALYARHLRTYAEARGVQRIEGRIVGVDQDGESGFLRAVALEGDRRVEGDLFIDCSGFRGLLIEETLKSGYEDWRKWLPMDSAWAVPSRDDAPPVPYTRAWARDAGWQWRIPLQHRTGNGHVFSSAWTDKDAAARTLMANLEGQALAEPRLLTFVTGRRRKSWNRNVVALGLASGFMEPLESTSIHLVQSGLARLLALFPDRGFAPLLADEFNRQTEQEYACIRDFLVLHYKATQREDTPFWASRKAMEIPETLAARIALFAGSGRVFSRDEDLFKESSWVQVLLGQGVTPAAAHPMTAVVADAQVDGWLDDLARIAGRTAASLPTHAAFLGRAETRLAG

SEQ ID NO: 85026 - protein, 513 aa, Sphingomonas sp.
  REGION 1..513: note = tr|A0A2K8MIM2|A0A2K8MIM2_9SPHN Tryptophan halogenase; OS = Sphingomonas sp. Cra20 OX=1327635 GN=CVN68_02720 PE=4; SV = 1
MSGASGSQPLRRLVIVGGGSAGWMTAAAVSRMVATGLSVTLIESDEIGTVGVGEATIPPLLDFNAALGIDENEFVAATQGTFKLGIEFVDWGKLGERYIHPFGKYGRPMMGINFHQIWLRQHLLQRAVSDPGPISDYAIAIAAATRGRFARPATNPEAVLSGLSYAYHFDAGLYARFLRDYAGRAGVVRIEGKIATAEQSEPDGFLTAVVLADGRRIEGDFFVDCSGFRGLLIQGTLGVSYRSWQHWLPCDSAVAVPSSTAGPPVPFTRSTADRAGWRWRIPLQHRVGNGHVYSSGHIDDDAAREALLAGLEEPPIAEPRVLRFTPGRREKLWEKNCVAIGLSAGFIEPLESTSIHLIQSGIFRLMALFPDRGFSQVEIDEYNRALVAEYEHVRDFIVLHYHATERSDSDLWNYCRTMEIPDSLAQRIALWRGKGRIFRGSGELFTEESWIAVLLGQNIVPESADPLAAMLAVDETSRYLAHLRDIVKRTAEAMPTHAHYIAQHCAAARPVAM

SEQ ID NO: 85027 - protein, 511 aa, Xanthomonas campestris
  REGION 1..511: note = tr|Q3BQT8|Q3BQT8_XANC5 Tryptophan halogenase; OS = Xanthomonas campestris pv. vesicatoria (strain 85-10); OX = 316273 GN=XCV3144 PE=4 SV=1
MPQECAVTQAQIRKVVIAGGGTAGWIAACALSHQFRNLLDITLVESEQIGTVGVGESTVPPIRTFHRFLQIDEQEFLRAVAGTFKLSISFEHWRRQGERYIHPFGITGQSTLVCAFHHLWLESQRRGMAGSFGDYCLETVASRVDRFALHGEPAVNYAYHLDAALYAKFLRARSEACGVKRVEGRIQQVTVQPHSGDVASLVLEDGHVIEGDLFIDCSGFRGLLIEQTLHTGYEDWSHWLPCDRAVAVQTEALGPPVPYTRAIAHEAGWRWHIPLQHRVGNGLVFSSKHLSDDEAHAKLLRDVAAPAVKEPWMVPFRTGRRLKAWNKNVVSLGLASGFIEPLESTSIHLTISAVVRLLALFPAEGIAPSQVQLFNDVSRAEMEHVRDFVTLHYHATQRDEPLWQQCRQMELPESLALRLRAWRERAHAWQGADELFRVDSWTHVLMGQGIAPEQHHPLTRAFSDHDLRRLLDGIAQPIQHAVQQMPSQQDFIERYCKAGEQVWGMRSPVPA

SEQ ID NO: 85028 - protein, 446 aa, unidentified
  source 1..446: note = Burkholderiales bacterium
  REGION 1..446: note = tr|A0A257J025|A0A257J025_9BURK Tryptophan halogenase (Fragment) OS=Burkholderiales bacterium PBB5 OX=2015567; GN = CFE45_42895 PE=4 SV=1
FRQIGVAEADWMAACHATYKLNIRFEGWSPESGVPAYSHPFFSKIDSLNEQAFYVNCRTRRLGLDVTTLPDRFLLNGVLAAQGKGPSRPAHFPFDIEYGYHFDSALLGQYLARLAVSRGVNRVLANVRSAELNGQGDIAAVLGDDGLRIAGDLFVDCTGFNALLLQRLLGVAFKSFSSNLFNDCAVVIPTPAPPRASLPVQTVSRALSSGWAWHIPLTSRVGNGYVYSSAFLSADAAEAELRVTLGLADGQGEARHLKMKVGQVERHWHRNCLALGLSQGFIEPLEATALHLVQTCIESFMARYEEGQFTALHQPRFNDEVVERFERVRDYIVAHYKLNTRTDSAYWQANRDNDQLSDALGAVLQAWFDRSDIAEAIHRTQGRSHFGALSWHCLLAGYGAFPPIAPRQPGTGDLYAEEGIENFLDGCAMNFGSHEACLTGAWPLTS

SEQ ID NO: 85029 - protein, 480 aa, Sphingopyxis sp.
  REGION 1..480: note = tr|A0A0W1EYE2|A0A0W1EYE2_9SPHN Tryptophan halogenase; OS = Sphingopyxis sp. HIX OX=1759074 GN=ATE62_15290 PE=4 SV=1
MTACLFAKQWAGRASVTVIESPEIGIIGVGEGSTPQLKAFFDTLGIAESDWMPACDATYKIGIGFEGWGGAGAPGYFHPFPAPLDVHSQPAFVHNAALRRGGVDVPAHPDAFYLAPRLAAAGQGPHPAENFPFELSYGYHFDAYKVGAYLRDHAAGLGVAHRPRKVEHVRVGNEGLVEALLLDDGEAVEGDFFVDCSGFRALIAEQALGAKFLPFADNLFNDRAVVMPTPHRENTPLPVATGSSAMAAGWCWTIPLTTRVGNGYVFSSRYLDADAAEAELRTALGVGDEVVARHLPMKVGRLAESWTGNCLAMGLAQGFVEPLEATALHIVIATAQEFIAAFESGGFTPQHRVVFNQRIAARYEGIRDYIVAHYRMNRRADAGDYWRDAAAMEALSDDLKAMITAWFTRGDIDAVIAERGIGTYYGSISWHCLFAGYGVFPDAARMRAAAAGDGAADMAMIGDFLRRAALNFGEHRPPAR

SEQ ID NO: 85030 - protein, 500 aa, Erythrobacter sp.
  REGION 1..500: note = tr|A0A2K1E651|A0A2K1E651_9SPHN Tryptophan halogenase; OS = Erythrobacter sp. SAORIC-644 OX=1869314 GN=BA950_10820; PE = 4 SV=1
MSSDYKPRRIVVAGGGTAGWMTAAALAKTMGDAIDLTLVESDAIGTVGVGEATIPPLINFNRLLGINEAEFMRETQATFKLGIEFENWKRDGEKYFHSFGSTGRDHWSAGFQHFWGEGLLRGHEYSYDDYCLELCAAYAGKFAHLPDNRLNYAYHLNATAYAAFLRRIAEGAGASRVEGKIAHVELDGESGNIAAIGLENGQRLEGDIFVDCTGFRSLLIEGALHVGFDDWSHHLPCDSAIAVQTELSASPVPYTRAIAHDAGWQWRIPLQHRGGNGIVYCSRYLSKDAAHDRLMSTLEGKAISEPRAIPFTTGARRKQWHRNCIAIGLSSGFLEPLESTSIHLIQRAVIRLLRMMPAGEVSERDIAEFNDQQLTDMIQVRDFLILHYKATDRRDSAFWRQCATMDIPDSLTQKMELFRETGRVFRKNDELFVENSWVQVMLGQGILPQAFHPVAKKMSDEELSKFLEMLRTNVARTVQGLPAHHAYVAQFCGAKGVAAG

SEQ ID NO: 85031 - protein, 512 aa, unidentified
  source 1..512: note = Caulobacter radicis
  REGION 1..512: note = tr|A0A2T9IY07|A0A2T9IY07_9CAUL Tryptophan halogenase; OS = Caulobacter radicis OX=2172650 GN=DDF65_23105 PE=4 SV=1
MSEDVRNGRIRSIVIVGGGTAGWMAAASLRRHFGKAPIDITLVESSEIGTIGVGEATIPTIRNFYQSLGLDDLEVLRATQGTCKLGIRFKDWMAPGSAFIHPFSLYGQDLNGVPFQHYWLKARGVADVGEMGEYSLGASLAAAGKFTVPAANPPSSLSVFDWALHFDAALFAQLMRRVAEANGVRRIDAKVVKVNLRPEDGFVASLDLHTGTSIEGDLFIDCSGFRGLLIEEALQTGYEDWSRWLFCDRALAVQSQPPEGAEPPPYTDVTAHSAGWRWRIPLQHRYGNGYVYSSRHIDDEAARAELVAAVPDRLLHEPRLIRFTPGRRKQVWNRNVVALGLASGFLEPLESTSIALIETGIEKLKALFPDRGFDPAVVDEFNDWSRREMERVRDFVVLHYKAAQRGDTPFWRATRDADIPDTLARKVELFRSRGHIARYRWEMFQPPSWLAIFAGFDILPGGWDPALDGIDGAALAASLNQMRAGVARAVAQAPTHGDFLRRYVGQAPAAAE

SEQ ID NO: 85032 - protein, 509 aa, unidentified
  source 1..509: note = Caulobacter radicis
  REGION 1..509: note = tr|A0A2T9K8T5|A0A2T9K8T5_9CAUL Tryptophan halogenase; OS = Caulobacter radicis OX=2172650 GN=DDF62_03785 PE=4 SV=1
MANNLRKIVIVGGGSAGWITAAMISHYLKDSPCEIELIESEQIGIIGVGESTIPPFLQLIRSLGIDEKEFMQETQAAFKLAIRFENWRQKGEVYYHPFGLIGGLVDVHEFYQVWLRGKAEGHPSSLQDFAPASVMADRWKFMSPAMAPRTMLANANYAVHIDAALLAKFLRKFAEARGVKRTEGIVKDVATRPDGFIEKVILQDGREASGDLFIDCSGFRSLLSGKTLGTEFLDWSDVLLNDRAIAVQTANIQDPHPYTLAQAQDAGWRWRIPLQHRAGNGYVYCSQYCSDDEALATLMSQVEGEAVRDPWLVPFKTGMRKQLFNKNCVAIGLAGGFIEPLESTALHLIYRGVDYLLRFFPDRDCDPLLAAEYNRRMQVDYEEIRDFIVLHYFTTKRDDTPFWRAYQQVTPPESLRERIELFKASGVLRDGVDDMFRAPSWQSVMEGMGIRPKRYQQLVDTLPAGVVKGLLDKSAPMLSELVDTLPSHGDFLRQHCPAPVPEALLKKAG

SEQ ID NO: 85033 - protein, 506 aa, Xanthomonas campestris
  REGION 1..506: note = tr|A0A3E1KLB1|A0A3E1KLB1_XANCE Tryptophan 7-halogenase OS=Xanthomonas campestris pv. campestris; OX = 340 GN=D0A42_19945 PE=4 SV=1
MIPAPLRNIVIVGGGTAGWMAAAAFARVLGPSFNVQLIESEQLGTIGVGEATVPHIKAFNNLLGIDEAEFVRQTQGSFKLGIEFVDWQRPGTSYIHGFGTQIGHPLGLLPFHQYWIKQQRRGKAQPLGAYTLNTVAATRGKFMTSAGDVPANSPLANIAYAYHFDASQYARFLRGYAEQRGVTRLEGLIEQVQLDAHTGHVQSVQLASGQVVSGDLFIDCSGFRGLLIEEALHTGYHDFTHWLPCDRALAVPCEKVGPPTPYTRSTARAAGWQWRIPLQHRTGNGYVYSSAHISDDEAAATLLANLDGTPLADPRPLRFTTGRRKQFWNRNVVALGLASGFLEPLESTSIHLIQSGISKLLELFPREGISPVLVQRYNDRLAFEFDRIRDFLVLHYHATERDDSAFWRHCRTQPITPELQATLDLFRDSGRFYRNAEEMFAEISWVQVMVGQGILPQGYHPLVDQVPDTDAEGFLASVAQTISHCVDVMPTHQQFIDRYCRADPVR

SEQ ID NO: 85034 - protein, 500 aa, Brevundimonas subvibrioides
  REGION 1..500: note = tr|A0A258HM41|A0A258HM41_9CAUL Tryptophan halogenase; OS = Brevundimonas subvibrioides OX=74313 GN=B7Y86_05100; PE = 4 SV=1
MRQLSRILIVGGGSAGWMTAALLSRLFKGLYEITVVESREIGTVGVGEATIPAIKKFNELLGLDENEFLQRTQGSFKLGIQFNDWLRPGSSYIHGFGVIGRDLEWLRCHQYWLKANSQGRAADFANYSINTAAALGNKFMRADPRMAESPIAHLAHAFHFDAGLYAKYLSGYAQDRGVRRREGKVADVTLRSNDGFIQSVTMDDGEVIPADFFVDCSGFRGLLIEQAMKTGYEDWTHWLPCDRAIAVPCERSGDFTPYTRSTARPAGWQWRIPLQHRTGNGHVYSSQYMDDDEAERILCDNLDGAQRAEPLRLCFVTGKRKKIWNRNCVAIGLSSGFLEPLESTSLHLIQSAIIRMVRLLPDASFDQAGIDEFNRQTDFEYERIRDFIILHYKATERADTPFWRYCRDMEVPATLQRKIDLFRANGRIFREDEELFAEESWIQVFLGQGISPRGYDPLVDIKSDAQTVEFLDNIESVISKCVEVMPTHADYVARTCPAPE

SEQ ID NO: 85035 - protein, 518 aa, Porphyrobacter sp.
  REGION 1..518: note = tr|A0A4Y6W5W4|A0A4Y6W5W4_9SPHN Tryptophan 7-halogenase OS=Porphyrobacter sp. YT40 OX=2547601; GN = E2E27_07705 PE=4 SV=1
MRGNGIGNVSRLARVVIVGGGTAGWMAAAALSRFFNDGRRTVTLIESDAIGTVGVGEATIPPIRSFNAMLDIPEAEFLRETRGTCKLGIEFVGWGQQGDRYFHPFGTYGQDLHGIAFHQLWLREHARSGAAGAGAIGAYSMSTAAAAAGRFARPAAGAQSVVREIAYAYHFDAGLYAAYLRRLAERQGAVRIEGTITNVTRDGETGDVASVTLENGSTVAGDLFIDCSGFRGLLIEEALETGYEDWSQWLPMDRALAVPSRSPGPPDPFTRATAHSAGWQWRIPLQHRTGNGHVYSSGFMDEDEARRILLANLETEPLAEPRGLSFLTGLRRKAWNHNVVALGLSSGFIEPLESTSIHLIQNGIQRLFALFPDLPISPLERDEYNRGMHELYQDVRDFVILHYKATQREDSEFWRYVKHMAVPDSLARKIALWQHRGRVFRENAELFSLPSWVAVMLGQNIWPEAHDPIADTLDPDKVAAAMAQMRAAYADVAARLPAHGDFLRQSGSWHIAPEAAVA

SEQ ID NO: 85036 - protein, 466 aa, Sphingomonas sp.
  REGION 1..466: note = tr|A0A2K8MHC5|A0A2K8MHC5_9SPHN Tryptophan halogenase; OS = Sphingomonas sp. Cra20 OX=1327635 GN=CVN68_10685 PE=4; SV = 1
MSDRAIRSIAILGGGITGLSAAAAFARALPQLAITVIETPPDPAALADRLPGSTSAIHRFHASIGLDERDLLRAGAAVPRLGLRFENWSTGAATWYHVHGEHGAPTGAVAFHQLWARARREGRAEAWHRYAAAGVLAEASKFVHPQPGTPLATFDYALRLDPERYRPMLTALVDRLRVARFAGAFGTIERRADGGVAALMSADGRRVEADLYVDASGPAAPLADAVAQDFEDWGSVLPYDRVEIGEAPTSAADPNDTIIGGAGGWQFAASLPGKTLLGRVHADRGEGTSIAIRPGRRAAPWVQNILAIGDAAVALDPLHWPNLHLAQSSIARAIELLPGRDCHPVETAEYNRRARAEAERMRDFQALHYLRAGAKIEVPDSLARVVQQFEQRGRFVHQDEDGLLEEIWISALLGLGVVPGATDPLALAVSADAAASRMAEMRAGLATLPARLPGYADYLARCGMPT

SEQ ID NO: 85037 - protein, 501 aa, Sphingomonas sp.
  REGION 1..501: note = tr|A0A2A2SEH4|A0A2A2SEH4_9SPHN Tryptophan halogenase; OS = Sphingomonas sp. 1PNM-20 OX=1141887 GN=CKY28_08610 PE=4; SV = 1
MTNRPAPLRSICIVGGGTAGWIAAAMIAHLHPEIAVELVESDDIGTIGVGESTIPPFLQLIAKLGVSESEFVRECQASFKLGIEFRDWLRLGHSYFHPFGAIGMPIEGDFYQLWLRAAHGGYRRQLQDFAPASVMAREGRFVLPHAARRTPVGGAAYALHVDAKRVARFLRRFAEARGVRRTEGIVTDVATRPDGAVDRLILKDGRTVSAEFFIDCSGFRALLIGKTLGVGYTDWSHWLLCDRAIAVQTENVGPPPPYTLAHAQAAGWRWRIPLQHRTGNGHVFSSRHMSDDEATARLLDQVEGELVTDPMPVPFRTGVRDRIWNGNVLSIGLSSGFIEPLESTAIHLIYRGMEFFFRFMPDLAFAPELQAEYNRRMTADYEEIRDFIILHYCTTERDDTPFWRECAAMELPPTLAAKLALFRVNGTLADGVDELFRAVSWQSVMDGMGVRPRTHHPTLDRLPAPDLPGELDRAADSLARAVGQLPPHGRFIAENCAAPIP

SEQ ID NO: 85038 - protein, 495 aa, Sphingomonas sp.
  REGION 1..495: note = tr|A0A2A2SBR5|A0A2A2SBR5_9SPHN Tryptophan halogenase; OS = Sphingomonas sp. 1PNM-20 OX=1141887 GN=CKY28_16615 PE=4; SV = 1
MSALGEPIRDVVVAGGGIVGWSAAAALKRRLPWLGVTVFALPPPPDALADRIGPTLPSIHGFHGDLGLRDADAVVRSGSAFRLGTRFENWVADSPDYVHAYGEHGRPFGTASFHQHWVRAAKLGAAAPFDRHSPAAMLARAGRFARAADEPDAPLSGFEYGLHLDPPAYLAMIRAFALHCGVREHDGVLRSIRLRPDGFVEALELDGGEPLRADLFVDCTGPAARVRSALDDAWEDWRRWLPCDRILIADGPPAPEPAPLDRAVAVEAGWRWSADGLRRTSTGLVYGSAHWSDEQAARALGVREAAPVAIAAGTRPQPWLRNCVAVGDAATAIEPLEWTNLHLAHSAIDRLVAMLPDRDCAPVELAEYNRQCAAEAARVRDFAVLYYAASGRSEPFWRDAAAAEPPPTLLHTLTQFRERGRLPFHEEETFGRDSWLAVLLGQGVIPRRADPLIEVVPPAQSDAAMAGWRDALAQAVARAPTHAAFLQMLHRQVTR

SEQ ID NO: 85039 - protein, 500 aa, Sphingomonas sp.
  REGION 1..500: note = tr|A0A0A6D3W3|A0A0A6D3W3_9SPHN Tryptophan halogenase; OS = Sphingomonas sp. Ant20 OX=104605 GN=NI18_04330 PE=4 SV=1
MDTPPKTRVIIAGGGTAGWLAAALLTRQLGALVDVTLIESDEIGTVGVGEATIPTVQAFHALLGLDERAFMAATGATFKLGIAFEGWARPDDRYVHSFGDVGRSTWMGDFQHFWLEARANGLAGDFGDYCLELQAAEARRFTIGQQGPQLNYAYHFDAGRYARFLRERCETAGLTRIEGRIAGIDRSAETGHIDAVILADGSRVAGDLFLDCSGFRGLLIGDALGVGYEDWSHWLPANRALAVQTTSVEPARPYTRAIAHDAGWQWRIPLQHRVGNGIVYSSEYLSDDAARDRLLASVQGQPLTDPRLLRFTTGRRLRAWEGNCIALSLAGGFVEPLESTSIHLVMTALTRLLRAFPFDGISPAVVAQFNAQTRREIEGVRDFVILHYHLNQRSEPFWKACAAMPIPDTLAERIALFTDAAQAYQSPDDLFRVSSWTQVMLGQRLEPRDWHRLARMMPPERLGSSLAELKAGIAQQVDRLPAHQAFVDRYCAQAATEVAA

SEQ ID NO: 85040 - protein, 225 aa, Actinoplanes sp.
  REGION 1..225: note = tr|A0A428WMJ1|A0A428WMJ1_9ACTN Tryptophan halogenase (Fragment) OS=Actinoplanes sp. ATCC 53533 OX=1288362; GN = DMB66_52510 PE=4 SV=1
MPVEEFDVVVAGGGPAGSTVASLVAMQGHRVLLLEKEVFPRYQIGESLLPSTVHGVCRMLGVTEELAEAGFPTKRGGTFRWGARPEPWTFSFAVSSRMTGPTSFAYQVERARFDEILLRNAQRKGVEVREGCSVAGVIEGDERVAGLRYTDSDGGEHEVRARFVVDASGNKSRLYSSVGGTRNYSEFFRSLALFGYFENGKRLPAPNSGNILSVAFDSGWFWYIP

SEQ ID NO: 85041 - protein, 483 aa, Actinoplanes sp.
  REGION 1..483: note = tr|A0A428YMY8|A0A428YMY8_9ACTN Tryptophan halogenase; OS = Actinoplanes sp. ATCC 53533 OX=1288362 GN=DMB66_11555; PE = 4 SV=1
MTQPYDVVVVGGGPAGSTAATVVAMRGHRVLLLEKETFPRYQIGESLLPSTVHGLCRILGVADEVARAGFTLKRGGTFRWGRNPEPWQFAFAMSPRLPEPTSTAFQVERAKFDEILLRNAARVGVEVREGCQVRGILEADGRINGVEYEAADGSRHTARARYVVDASGSTSRIHGRVGGSRVYSDFFRNLAVFGYFAGGARLPEPNAGNIFCAAFDAGWLWYIPLRDNLTSVGAVIAPEHRAAVRGDPRAVWRSMIEACPEVASKLVGVPAATEAPYDQVRVRKDYSYWKQSFHVPGMLLVGDAACFVDPVLSSGVHLATYGALLAARSINACLAGAVPEERSLAEFEARYRREYGVFYEFLISFYDMQRDARSYFWQAKQVTAVDATETAAFAELVGGLLPGEEGVGVRFADAAADLDRAVGLLATADDRRNPLYTSRTVDETFRQGRNLQEEALYGAPLDDTDPPVPGGLPLAKDGLGWRS

SEQ ID NO: 85042 - protein, 495 aa, unidentified
  source 1..495: note = Aliikangiella marina
  REGION 1..495: note = tr|A0A545TCY0|A0A545TCY0_9GAMM Tryptophan 7-halogenase OS=Aliikangiella marina OX=1712262; GN = FLL45_08835 PE=4 SV=1
MSQKHILILGGGTAGWMAANLFAKKWPTEKAKITLVESPDVDIIGVGEGSTPSLKHFFESIDVQEKDWMPKCNATYKVNIRFDDWSPKSGVTSYRHPFTSQVDVFTARAFMVNTRTRRLGLDTHVNPESFLLNGQLAKTGKGPLTPANFPFITEYGYHFDSHLLGKYLSDLAVSRGVNYQQAHIEEVVLNEHGDIECLRTRENSAINADFFIDCTGFVSLLMQKTLKVPFKAFKENLFNDSAVVMPTKIDAEIPVETVSTALSAGWCWKIPLTNRYGNGYVYSADFISRDEAENEFRQHLGMLNSDEDVRHLKMRVGQLEKHWSKNCMAIGLSQGFIEPLEATALHLVQIAIDTFANYYEKGQFSNQYQSNFNHEISNRFEKVRDYIVAHYKMNTRDDSDYWIANRENKHLSDSLMRILNVWFKGEDLHAEIERQQLDSHFDAVSWHCLLAGYGAFPKLVAQQPGQGDLYQEQNIEKFIEGCSLNYKSHAECLYQ

SEQ ID NO: 85043 - protein, 513 aa, Pelagibacterium sp.
  REGION 1..513: note = tr|A0A1E4GH12|A0A1E4GH12_9RHIZ Uncharacterized protein OS=Pelagibacterium sp. SCN 64-44 OX=1660125; GN = ABS76_08320 PE=4 SV=1
MDKPAHFAIVGGGTAGWIAAFIIQDEARRRGLNIRLSVVESSRIPTVGVGEATTAAFRVLLKHFGIDEFEFFRKTDASFKLGIRHEDWRRKGFTYYGPIDDPHQVVAPPPGAPSDYLNVYAVAAGRPVQDMHLFQPLLEQKKAPYALKPDGSLIALGPFHHAFHFDQALVGKFFASKSQGVEKVDAMVAGIERDGETGDIGALVLDDNSRLEGDFFIDATGFRKQIIVKALEAPWVSYAHELPVNRALPFWVDVKPGEELANYTRAWAQSAGWMWQIPTRTRYGCGYVYSDKFSTPEQAKEEVERVLGHEIEVRGDIRFQIGRLEKAWIGNCVAVGLSSSFLEPLESTSIHGTIVQMMLFAQRYMDAPGKMNQDKRDDYNARVGRQVDDFRTFVNTHYVTERDDTPFWREVRANRIHPETRARLARWQQEMPRHEHFPSYLGGLPHIETQLHYPVLSGLGLLDRELARREMERDPKLRRFAQETFEGLVREYRAAANQALGHAEFLRIVQEMA

SEQ ID NO: 85044 - protein, 501 aa, Sphingomonas sp.
  REGION 1..501: note = tr|A0A4Q6XZV8|A0A4Q6XZV8_9SPHN Tryptophan 7-halogenase OS=Sphingomonas sp. 3-7 OX=2484750; GN = EWE75_16085 PE=4 SV=1
MSDIPHNHRVKRVVVAGGGTAGWVTATALVRHLGALIDVTLVESDEISTVGVGESTVPTFRSFHEFMGINEPRFMAATQATFKLGIEFKNWARIGDRYIHPFGTVGKTVSWMADFHHFWLHARANGYGGELGEYCLEWVAGEANRMSHKVAPGIGYAYHVDATRYARFLRGLAEPAGVKRIEGKIRNVEIDPSTGDIAALVLESEERIEGDLFIDCTGFRSLLLGQALGVEFEDWSQWVTTNSAVAVQSVSAPTSQPYTSAIAHEAGWRWKIPLQHRDGNGLVFCSEFMSDDEARAKLLAEIEGEPTVEPWLLRFKTGMRVKTWHRNCVGLGLANGFIEPLESTSIHLMMAGVTRLIQDFPFMGCHDGLTNHFNEKSRREFECIRDFIILHYHVTERDDSPFWRRCRDMDIPDSLAERLRLWREDARAYQLPYDLFRVDSWTTVLTGQRLWPAGYHAIAESMAPGELRKALDRMRSEVAAKALTMPTHPEFLRSYCPADLL

SEQ ID NO: 85045 - protein, 484 aa, Brevundimonas sp.
  REGION 1..484: note = tr|B4W8W7|B4W8W7_9CAUL Tryptophan halogenase superfamily OS=Brevundimonas sp. BAL3 OX=391600; GN = BBAL3_2793 PE=4 SV=1
MTAAALARLVAPSGVQITLVESEAIGTVGVGESTLPHIRAFNERLGIDEAAFMKATRATFKLGIQFENWGQIGGSYIHPFGDYGAPGGEAPFHHYWLRGRELGDVGPIDDYSLPVVAAREGRFAPPSDDPRSLLSTYRYAYQFDATLYARFLRGMAETEGVRRIEGRIQNVAQDGESGAITKVTLDDGRQIEGDLFVDCSGFRALLIEQTLKAGFTDWSHWLPCDRAVALPCESDQPTVPYTRATALEAGWQFRIPLQHRVGNGYVYSSAFIDDAAALDRLVGRLEGKPLKAPNVLKFTAGQRTRNWAANCVSVGLSSGFIEPLESTSIYLIQIAITKLIELWPTAVIDPATEAEFNRQMDLEYIRIRDFIILHYCATARNDTPFWDYVRTMPLPDTLSEKIELFRARGVVQDYREGLFLHPSWVAVYLGQDILPRRHHPLVDAVSATQLMSSLERLRRMVREASYKLPSQDDYIARYCAHLPL

SEQ ID NO: 85046 - protein, 238 aa, Xanthomonas oryzae
  REGION 1..238: note = tr|G7TJG8|G7TJG8_XANOB Tryptophan halogenase; OS = Xanthomonas oryzae pv. oryzicola (strain BLS256); OX = 383407 GN=XOC_4110 PE=4 SV=1
MTMPDTLPSDPQQRAVRRVVIAGGGTAGWMAAAAISKLLGRHLQITLVESDEIGTVGVGKATIPSLVTFHRLLEIDEAVFMATTQATIKLGIAFEHWRDVDRHYIHSFGHAGTDHGSAGFQHFWLKGQQRGVARDFGDYCLELRAAQEGRFAHLPNGGMNDAYHLDAGLYARFLRRFSEGFGVTRIEGRIGQVETDAESGFFTALTLQDGTRVAGDLFLRLHRLGRPADRQDAGRGQR

SEQ ID NO: 85047 - protein, 514 aa, Brevundimonas sp.; identical to SEQ ID NO: 83757
  REGION 1..514: note = tr|B4WBL9|B4WBL9_9CAUL Tryptophan halogenase superfamily OS=Brevundimonas sp. BAL3 OX=391600; GN = BBAL3_3331 PE=4 SV=1

SEQ ID NO: 85048 - protein, 506 aa, Pseudoxanthomonas indica
  REGION 1..506: note = tr|A0A1T5IJU3|A0A1T5IJU3_9GAMM Tryptophan halogenase; OS = Pseudoxanthomonas indica OX=428993 GN=SAMN06296058_0022; PE = 4 SV=1
MDTHDRIKQIVVVGGGSAGWMAAAALATYLGTQAKVRLVESEEIGIVGVGESTVPYMKTFNTQVLGIREADFVAKTQGTFKLGIQFNDWGRIGDSYVHGFGKIGHSMGPLPFHQYWLKQFLAGRAPDIGAFSLPTAAAPLNKFMVSPADAPAGSPLADIAYGYQFDAGLYARYLRELAESRGAQRIEGKIVEVLRRGNDGFIEAVVLENGQRIEGELFIDCSGFRGLLIEETLKTGYEDWSEWLPCDRAMAVPSESAGPLTPYTRVTAQSAGWQWRIPLQHRVGNGYVYSSRHISDDEAAATLLAGLNGKPLADPRPLRFIPGRRRKFWNGNVVAVGLAGGFMEPLESTSIYLAQSGIQRLLSLFPDRGFDPALAERFNRESAFEQERVRDFLVLHYNATERDDSAFWNHCRTMAIPEELRETIELFRRDGRYFRNGEDFFALPSWVQVMLGQRIIPQGYHPIVDELPEDKLVQLVDRVRHVVANCVESMPAHQQFLDTYCRAPTP

SEQ ID NO: 85049 - protein, 572 aa, Streptomyces peucetius
  REGION 1..572: note = tr|A0A2D3UF37|A0A2D3UF37_STRC0 Tryptophan halogenase; OS = Streptomyces peucetius subsp. caesius ATCC 27952; OX = 316280 GN=CGZ69_27150 PE=4 SV=1
MSPGPVQVPHQQVRPPRHMNCPAHVYTRIQAGTAPVQMPYKECGQADSMDSHIMRIVVVGGTAAGWTAAARLASAFRETVSVTVLETPSGADHQETGQVTALGPQIQRDLFDRLGVLEDEWMRACCASFNAAVRYVNWRTGGAAEIAARTTVSGGVDHFYNPCAGIPECEGSLLSEHWQYRRMNGETVEPFDYACFREPPLMDARKSPRWLDGRAAVPYGWHVDIHMFTQYLRNVATGRFGVRAVRGELLHAERDADGMITLLHTAEGRAVPGEFFLDCTGAEGLLIAGMLQEPFVEAQDRLLCDSAVTVTVPHDHTTHGIDPFTTATALPAGWAWKMPLPGRFGAGHVYARDWTEPDEAVGTLCALWGLRPGRTAVRHIALRTGRSRRAWVKNCVAVGPSACSLEPLAGDTLGGVLGALDRLVRDFPSRDDPEGPAARFNRAAETAHARARDFAQLLYRTAPRADTPFWRAQRELPLSAELAECLAAHRAGLAPDAHELAYAGVLAALAPGRSAPRAALAHRQDARDVADAHFLRIKRQQQILLETLPTAQHYLQRLHTRPMPQPAGAGPL

SEQ ID NO: 85050 - protein, 500 aa, Streptomyces hygroscopicus
  REGION 1..500: note = tr|H2JL05|H2JL05_STRHJ Tryptophan 5-halogenase; OS = Streptomyces hygroscopicus subsp. jinggangensis (strain 5008) OX=1133850 GN=SHJG_8627 PE=4 SV=1
MTASYLRAAFADRVDITVVESRRIGTIGVGEATFSTVRHFFDYLGLSEADWMPECNGTYKLAVRLENWRAPGTYFYHPFERMRVVDGVPLTDWWQKVGGTGSFDRDCFLIPWLCDAKASPRYLDHRLFEQDFDEDPDRPLYRTTLAEQNTQFPYAYHFDASLLADFLCRYAVGRGVHRIIDDVVDVRLDERGWIDRLVTREHADLTADLYVDCSGFRSRLLGDALGEPFVSFQDSLPNDRAVALRVPVDTAVRGIRPCTTATAQDAGWIWTIPLYDRIGTGYVYAADYCEPEEAERVLRDFVGPAAADLEANHIRMRIGRSHRAWVNNCVGIGLSAGFVEPLQSTGIFLIQHAIEQLVRYFPGTDRDPVLRDTYNLSTARAIEGVREFLILHYRGAARADNDYWRDAKKRPVPEDMAVRMEQWQSKLPDNDTTYPYYHAFEPYSYVCMALGLGGIPLRHPPALDLFDTRAARAELTRVREQARKLVDTLPSQVEYLSGLR

SEQ ID NO: 85051 - protein, 492 aa, Streptomyces sp.
  REGION 1..492: note = tr|A0A429FDX4|A0A429FDX4_9ACTN Tryptophan halogenase; OS = Streptomyces sp. WAC 04229 OX=2203206 GN=DMH12_09985; PE = 4 SV=1
MSVEEFDVVVAGGGPGGSTVATLVAMQGHRVLLLEKENFPRYQIGESLLPATVHGVCRMLGVSDELAAAGFPVKRGGTFRWGARPEPWTFHFGLSARMAGSTSYAYQVERARFDEILLNNAKRRSVVVREGCAVTDVVEDGDRVTGLRYTGPDGSERQVTARFVVDASGNKSRLYANVGGARNYSEFFRSLALFGYFEGGKRLPEPVSGNILSVAFDSGWFWYIPLSPTLTSVGAVVRREDADKVQGDREKAFNSLIAECPMISEYLSDATRVTTGTYGELRIRKDYSYQQTHFWRPGMILVGDAACFVDPVFSSGVHLATYSGLLAARSINSVLAGELDEKTVLTEFEARYRREYQVFYEFLMSFYQMNVNEDSYFWQAKKVTNSQTTTDIESFVELIGGVSSGETALTTADRIAERSAEFAAAVDQMAGGDQENMVPMFKSQVVRQAMQEAGQVQMKALLGADAEPELPLFPGGLVTSPDGMTWQPHRPA

SEQ ID NO: 85052 - protein, 506 aa, Xanthomonas arboricola
  REGION 1..506: note = tr|A0A2S6ZNR1|A0A2S6ZNR1_9XANT Tryptophan halogenase; OS = Xanthomonas arboricola pv. arracaciae OX=487851; GN = XaraCFBP7407_16470 PE=4 SV=1
MIPAPLRNIVIVGGGTAGWMAAAAFARVLGPGFKVQLIESEQLGTVGVGEATVPHIKAFNNLLGIDEAEFVRQTQGSFKLGIEFVDWQRPGTSYIHGFGTQIGHPLGLLPFHQYWIKQHARGKAQPLGAYTLNTVAAVRGKFMTSAGDVPANSPLANIAYAYHFDATQYARFLRTYAEQRGVTRIEGLVEQVQLHADSGHVQSLQLASGQVVSGDLFIDCSGFRGLLIEEALHTGYHDFTHWLPCDRALAVPSENVGPPTPYTRSTARAAGWQWRIPLQHRTGNGYVYSSAHISDDEAAATLLANLEGKPLADPRPLRFTTGRRKQFWNRNVVALGLASGFLEPLESTSIHLIQAGISRLLELFPREGISPVLVQRYNDRLAFEFDRIRDFLVLHYHATERDDSAFWRHCRTMPITPELQTTLDLFRDSGRFYRNAEEMFAEISWVQVMVGQGILPRGYHPLVDQVPDHDAERFLASVAQTIGHCVDVMPTHQQFIDRYCKAAAPR

SEQ ID NO: 85053 - protein, 501 aa, Sphingomonas sp.
  REGION 1..501: note = tr|A0A1G5TFZ8|A0A1G5TFZ8_9SPHN Tryptophan halogenase; OS = Sphingomonas sp. NFR15 OX=1566282 GN=SAMN03159340_01186; PE = 4 SV=1
MTDPIRIVVAGGGTAGWMAAATFARFLEVGFEIDLVESEEIGAVGVGEATIPQIRLFNDALGLDEDAFLRATQGTYKLGIEFVDWLRPGHRYMHAFGAVGRDVGLLPFHQYWLRARGLGAAGELTAYSLNNQAALAERMQRGPARTARLLPDMPSAFHFDAALYARHLRRYSEARGVNRVEGKIVRVEQDTTGDVSRLVLEDGTALGADLYIDCTGFHGLLIEQTLKTGYDDWSHWLPCDRAIAVPSARGGALTPYTRATAKAAGWQWRIPLQHRTGNGIVYSSAHLSEDEATATLLAGLDEEAIAEPRPIPFRTGKRRKMWNRNVVAIGLAAGFMEPLESTSIHLIQSAISRLMKLLPARSIAEADRAEFNRQSDFEYERVRDLIILHYHANDRSEPFWRACREMELPETLAAKIALWRGNGHITREHEELFTEVGWLQVLVGQGVMPAGHHPLADAVPAADLAEFMDTIDKLNAREVAQMPSHADFIAGHCAAPLPVAA

SEQ ID NO: 85054 - protein, 509 aa, Sphingomonas sp.
  REGION 1..509: note = tr|A0A2A2SEC6|A0A2A2SEC6_9SPHN Tryptophan halogenase; OS = Sphingomonas sp. 1PNM-20 OX=1141887 GN=CKY28_08165 PE=4; SV = 1
MTDRIERVVILGGGTAGWMTTTALAKSFGRRLRVTLLESDEIGTVGVGEATIPTIHWFNELIGLDEAEFFRATKASFKLGIEFVDWARPGHRYFHPFGHYGVQLPGVSFHHRWLKARADGLDLPLSAFSLATRLADENRFAKPQGDARSILSTLGYAYHFDAGLYARHLRTLAEADGVRRVEGKLRDVERHPETGHIAALTTERGERLEGDLFIDCSGFRALLIEGVMSAGYDEWSHWLPCDRAVAMPCARVAETTPYTRSTARAAGWQWRIPLQHRTGNGYVYASPFISDDEAAAALLAELDGEALAEPRFLRFTAGRRKRGWIGNVVAIGLSSGFLEPLESTSIHLIQSGIAKLLTLFPDRDMDPGLARRFDRVFGADMDDIKDFLILHYHATSGKSDALWTHCRHMAIPDTLAEKMAQYRRSGRLMIGTDDLFRDASWLAVLNGQGVEAEDYNPLADTLDPATNRAQLEQIAAVVARAAPTLPKHDEVVAQIIGGGAGTPARATAR

SEQ ID NO: 85055 - protein, 498 aa, Alteromonas sp.
  REGION 1..498: note = tr|A0A1J0RT14|A0A1J0RT14_9ALTE Tryptophan halogenase; OS = Alteromonas sp. Mex14 OX=1917157 GN=BM527_09305 PE=4; SV = 1
MNRPMNIVIAGGGTAGWMAANYFAHKWPSDKVKVTLVESPDIGIIGVGEGSTPTLKRFFEELKIKESDWMPKCNATYKVSIQFNDWSPSSGVKQYRHPFISQTDTFTQRAFEVNCRTRRLGLDTHVKPEDFLINGVLAKQNKAPLTPENFPFRMEYGYHFDSALLGNYLRNVAVGKGVNHVSGIISDVALHPSGDISHLVTDKGNIEGDFFVDCTGFSSNLLQQALGVTFHSYSENLFNDSAVVLPTQAQENIQVETQSTALSSGWCWTIPLQNRTGNGYVYSAAHLSKDKAEEELRRHLGLENSDVEARHLKMKVGQVEQHWQKNCLALGLSQGFIEPLEATALHLVQICIEYFSDMFEKGGFSNSEKTAYNAFAKERFDRVRDYIVAHYKLNTRDDSDYWRANRNNMVLSDSLKSIINTWFQREDLANEIKRQNIGIHWDSVSWHCLFAGYGAFPTLAQNQPGRGDLYKEQDIERFVQGCALNFKQHDVVLKTHQS

SEQ ID NO: 85056 - protein, 503 aa, Brevundimonas sp.
  REGION 1..503: note = tr|B4WB60|B4WB60_9CAUL Tryptophan halogenase superfamily OS=Brevundimonas sp. BAL3 OX=391600; GN = BBAL3_3001 PE=4 SV=1
MGADVRQLKTILIVGGGSAGWMAAALFSKLFKGLYDITLIESEAIGTIGVGEATIPAIKTFNELIGLDENDFMRRTQASFKLGIQFVDWDRVGSSYIHGFGVIGRDLKWLRCHQYWLKMRAEGKVSDLAAYSINTAAALQNRFMRADPKRPGSPLGHIAHAFHFDAGLYAKYLRGMSEAAGVRRREGKVVSVQLRPEDGFVDSVTLEDGAVVSADLFIDCSGFRGLIIEQAMKTGYEDWSHWLPCDRAMAVPCARTEPFTPYTRSTARPAGWQWRIPLQHRTGNGHVYSSRHMDDGEAEQILLSNLDGAQMAEPNRIRFVAGKRRQIWNRNCVAAGLASGFLEPLESTSLHLIQSVLIRLVRLMPDAGFDPATIAEFNRQTDFEYERIRDFIILHYKATERDDTPFWRYCRDMDVPVTLERKIDLFRANGRIFREDDELFAEESWIQVLLGQGIIPVGYDPLVDVTPEPDIERYLADVETVIGKCVALMPSHADYVAKACPAA

SEQ ID NO: 85057 - protein, 496 aa, unidentified
  source 1..496: note = Aliikangiella marina
  REGION 1..496: note = tr|A0A545T186|A0A545T186_9GAMM Tryptophan 7-halogenase OS=Aliikangiella marina OX=1712262; GN = FLL45_21875 PE=4 SV=1
MSNNRIQKVVIVGGGSAGWMAGAALAKLLGKNLDISLIESEEIGRIGVGEATIPPLRVFNQLLGINEQDFMRSCQATFKLGIEFQNWGERGDSYIHSFGATGKVCWAGEFQHFWLGGLERNIQNEFGDYCLELKAAKAGKFGFNKDIQLNYAYHIDAGLYAAYLKRFAMTNGLKWIEGRITQVHQNTENGYIESVELSNGQKIAGDFFIDCSGFAAKLIEETLEAGFESYQSYLPCDSAVPVQTVKHGDPKPYTQAIAHDFGWQWRIPLQHRVGNGLVYCSEFASDETAQETIMSNLESEAITDPVVLKYKTGTRKKGWVKNCVAIGLSSGFLEPVESTAIHLIMSAVLRLMRLFPHNEISQSNVDEYNRQYIEEMERIRDFIILHYKATEREDSSFWQYCKHMTVPETLAHRMRLFKDTGRVCITDTELFKIDSWTQVMLGQRVRPDNYHQIVDMMPDGELDRFLMILRNQVDSQLTNMPTHQQFIDHYCKANPI

SEQ ID NO: 85058 - protein, 504 aa, Sphingomonas sp.
  REGION 1..504: note = tr|A0A2A2SC23|A0A2A2SC23_9SPHN Tryptophan halogenase; OS = Sphingomonas sp. 1PNM-20 OX=1141887 GN=CKY28_16620 PE=4; SV = 1
MTDTGAQRVVIVGGGTSGWMAAAALAKLLPRRCSVHLIESEAIGIVGVGEATLPHIRAFNDRLGIAESDFMSWTRATFKLGIEFRNWGRIGDSYVHPFGTFGRGQGEVDFHHYWTRLRLQGLNPPPLERFSMACTMAREGRFTRPTTEPGRITTTFGYAYQFDAVLFAPYLRQLAESLGATRTEGKVVDVELNGETGHIRAIKLESGERIEGDLFVDCSGFRSLLLGEALGEPFQDWSRWLPADRAAAMPCRTETAVTPYTSAIAMPAGWRWRIPLQHRTGNGYVYSSAFVSDDEAASALAGAVEGDAIAQPRTLRFRAGRRERSWVGNCVAIGLASGFLEPLESTSIYLVQQAITALLELFPERGIAPSDRDEFNRIIDLEYDRIRDFLILHYHATERDDSEFWNYVRTMPVPDSLAEKMELFRRRGRIVKYREGVFLDASWVAVYLGQRVRPLGYDPRADLPPADALLRGMGELEAEVAAAAEAMPNHLDFIRGYCPMAAAA

SEQ ID NO: 85059 - protein, 510 aa, Sphingomonas sp.
  REGION 1..510: note = tr|A0A2A2SC41|A0A2A2SC41_9SPHN Tryptophan halogenase; OS = Sphingomonas sp. 1PNM-20 OX=1141887 GN=CKY28_16605 PE=4; SV = 1
MRADAIRRVVIVGGGTAGWMAAAGIARVAGELPGLEIELVESDEIGTVGVGEATIPQIALFNAMLGIDEADFVRATNATYKLGIEFRDWTRLGHSYVHPFGFYGLDMKGVQFHHHWLKGRTLGDPTPLDAYSLAVVAGLRERFAHPRPDQPNSPLSKIGYAFQFDAGLYARYLRRLAEGWGVRRTEGRVVDVTRDGETGHVSAIVLQSGARVAGDLFVDCSGFRGLLIEGVMGAGFEDWSAWLPCDRALAVPCESGGDRRPLTRSTARPAGWQWRIPLQHRIGNGYVYSSAHVSDDEAAATLLANLDGAPLAEPKPLRFKAGHRRRAWIGNVVALGLAGGFLEPLESTSIHLVQSGIARLMTLFPARGFDQLEIDRFNAETVEEYVDIRDFLVLHYKATERDDSDFWNYCRTLAPPEGLAYKLAMFRRNGRIFREHDELFTETSWLSVMVGQGVEATGYHPVADLLSDEETLRRLHHIRDVVGQTADAMPTQDEYLRRIGCDLTPLRRAS

SEQ ID NO: 85060 - protein, 509 aa, Sphingomonas sp.
  REGION 1..509: note = tr|A0A0A6D375|A0A0A6D375_9SPHN Tryptophan halogenase; OS = Sphingomonas sp. Ant20 OX=104605 GN=NI18_01520 PE=4 SV=1
MAEQSDISSICIVGGGTAGWMAAAALAAKLAGLPIAITLVESDEIGTVGVGEATLPHIRAFNLALGIDEAEMMRATEATYKLGIEFCDWGRRGDRYIHPFGDFGPTTNDVPFYQYWLKLRQSGDRSRIDEYSYPVIAAEQGRFRRPSGDLDAVESTFGYAYQFDAGLYARFLRGFAEKRGVSRTEGRVVRVVQDGETGFVRDVVLTNGTTLSADLFIDCSGFRGLLIETALQSGYDDWSAWLPCNRAIAVPTQSNGALRPFTRATARTAGWQWRIPLQHRVGNGHVYCSSFISDDEAHDQLVAGLDAPMQAEPRRLSFTTGRRREFWKKNVVAIGLAGGFLEPLESTSINLIQDGITELLAVFPDKGFAARDIAEYNRRIGLHYERIRDFLLLHYVATQRDDSEMWRHFRNLRLPDSLSERIDAWRTRGHLIQYEFGLFLSPSWVAVFLGQNLVPDRHDPRVESMSVDALTARAMDVRARVDAAVRRTPEHTAFIRESGGAARLAVAGA

SEQ ID NO: 85061 - protein, 509 aa, Brevundimonas sp.
  REGION 1..509: note = tr|B4WBL8|B4WBL8_9CAUL Tryptophan halogenase superfamily OS=Brevundimonas sp. BAL3 OX=391600; GN = BBAL3_2452 PE=1 SV=1
MDEIDDPRIRSVVIVGGGTAGWMTAAALVQHFRTAPLKITVVESSDIGTIGVGEATIPTIRRFYGQLGLRDDDVMRATQATCKLGIRFLDWSGPGSDFIHPFGLYGQDVKGIGFHHYWLKQRRAGDAAPLAAYSLGAALAAGGKFTLPSPHPPSQLSVFDWALHLDAGLFAQHLRAYAEAGGCARIDARIRSVELRPEDGFVRALTLDDGREVEGDLFVDCSGFKGLVIGEALGVGFEDWGRWLPCDAAYAVQSENRPGDAPAPFTRVTARSAGWQWGIPLRHRAGNGLVFSSAHLSDDQALAELMPHLLGDPLTEPRRIPFRPGRRSQAWAKNCVAIGLSSGFLEPLESTSIALIETGIERLKALFPDRRFAQPILDEFNDQTAREMERVRDFIILHYKLNRRTDTDFWRDCREMPVPETLERKIALWTARGQFVRYRWEMFHPASWLAIYDGFGLYPDHHDPAVDAMDPAYLARSLAEMRANIADLVARTPEHAQFLAGLDPAASAA

SEQ ID NO: 85062 - protein, 500 aa, Devosia geojensis
  REGION 1..500: note = tr|A0A0F5FU18|A0A0F5FU18_9RHIZ Uncharacterized protein (Fragment) OS=Devosia geojensis OX=443610; GN = VE25_08005 PE=4 SV=1
TAGWIAAFILQDSARAKKLDAKFTVIESSKVPTVGVGEATTAAFRVLLKYFGIDEFEFFRKTEASFKLGIRHQDWRRKGYTYYGPIDDPHQVVARPPGAPSDYLNVYSVAAGRPVQEMHLFQPLLEQHKAPYARKADGSLIPLGPFHHAFHFDQALVGRFFASKSKDVEIVDALVSGIERDPVTGDISALVLDTGEKLKADFFVDATGFRKQIIVKELNAPWISYAHELPVNRALPFWLPIEEGEEIANYTRAWAQEAGWMWMIPTQTRYGCGYVYSDEFRTPEEAKREIEGVLGREIEVRSDIRFSIGRLETPWMHNCLAVGLSSSFLEPLESTSIHGTIVQMMLFARLFLKAPGEMTDGDRADYNRRVGRQVDDFRTFVNTHYMTERDDTPFWREVRANRIHPETKERLARWRKEMPRREHFPDYLEGLPHIETQLYYPVLNGLGLLDREVARREMERDPKLRRFAQETVDSLVREYRAAANQALGHAEFLKIVREMG

SEQ ID NO: 85063 - protein, 496 aa, Sphingomonas sp.
  REGION 1..496: note = tr|A0A0A6D3C4|A0A0A6D3C4_9SPHN Tryptophan halogenase; OS = Sphingomonas sp. Ant20 OX=104605 GN=NI18_00770 PE=4 SV=1
MVIVGGGTAGWMAAAALARLIPTGASITLIESDAIGTVGVGEATIPPIRGFNAMLGIDEPEFLAATAGSFKLGIEFVDWGALGERYLHPFGGFGFDIEGVRFHQYWRRRRAAGVVEDIEAYSLCAVAARAGRFVPPSPDPASVLSQMAHAYHFDAGLYARFLRGRAERDGVVRVEGDVVNVALDGETGHVRHVTLAGDRVIEGDLFLDCSGFRGLLIEQTLGAGYEDWTHWLPCDRAVAMPTANAGAAITPYTRSTARAAGWQWRIPLQHRTGNGYVYSSAHCSDDEAAATLHAGVDGTPLAEPRLLRFTAGRRRKQWIGNVVALGLASGFTEPLESTSIHMVQTGISKLLALFPDQGFSPVEIDTYNRLAATQFDQVRDFLILHYHATRRDDSPFWRETRARAIPDSLSEKLALWRRRGRLFRWEDDLFAEASWVAVLLGQGIVPDGWDRLADAVDAREVDARFDRLRAMFADAASRMPRHEDYLARTCPARVRA

SEQ ID NO: 85064 - protein, 497 aa, Frankia sp.
  REGION 1..497: note = tr|A0A1X1MHB6|A0A1X1MHB6_9ACTN Tryptophan halogenase; OS = Frankia sp. KB5 OX=683318 GN=KBI5_23180 PE=4 SV=1
  VARIANT 472: note = Xaa can be any naturally occurring amino acid
MAVTDSAEFDVVVVGGGPAGSTLAALVAMQGHRVLVLEKEHFPRYQIGESLLPSTIHGVCRLTGAADELAKAGFPLKRGGTFRWGATPEPWTFAFSVSSRMAGPTSFAYQVERSKFDEILLRNARRVGAEVHEGCSATDVIEDGDRVVGIRYTDDGGNRREARASFVVDATGNKSRIYHRVGGTRQYSEFFRSLALFGYFEGGRRMPEPNRNNILCVAFDSGWFWYIPLSDTLTSVGAVVRSEMAEKVQGDSEQAMKALIEECPMISDYLAPARRVTTGQYGQLRVRKDYSYHQTTFWRPGMVLVGDAACFVDPVFSSGVHLATYSALLAARSINSVLAEIVDEKTAMQEFEARYRREYGVFYEFLVSFYEMHHSEDSYFWQAKKVTGNSQPELEAFVELIGGVSSGESALTDADALALRLQANTADFTTAVDALVANNSESMVPFMKSQVIRGVMHEGSQMQMRALLGEDXEPETPLFPGGLVSSADGMFWLPTDA

SEQ ID NO: 85065 - protein, 258 aa, Actinoplanes sp.
  REGION 1..258: note = tr|A0A428VXK0|A0A428VXK0_9ACTN Tryptophan halogenase (Fragment) OS=Actinoplanes sp. ATCC 53533 OX=1288362; GN = DMB66_60470 PE=4 SV=1
HGVCRMLGVTEELAEAGFPTKRGGTFRWGARPEPWTFSFAVSSRMTGPTSFAYQVERARFDEILLRNAQRKGVEVREGCSVAGVIEGDERVAGLRYTDSDGGEHEVRARFVVDASGNKSRLYSSVGGTRNYSEFFRSLALFGYFENGKRLPAPNSGNILSVAFDSGWFWYIPLSDTMTSVGAVVRREMAEKIQGDREKALQALIAECPLISEYLQDARRITTGRYGELRVRKDYSYLQTSFWRPGMILVGDAACFVDP

SEQ ID NO: 85066 - protein, 520 aa, unidentified
  source 1..520: note = Gammaproteobacteria bacterium
  REGION 1..520: note = tr|A0A1Z9AS02|A0A1Z9AS02_9GAMM Tryptophan halogenase; OS = Gammaproteobacteria bacterium TMED95 OX=1986771; GN = CBC55_01630 PE=4 SV=1
MTRPIKRIVIVGGGSAGWLTAGVIAATYTSGESEEGLRVTLIESPDISTIGVGEGTWPSMRKTLARIGISETDFLTRCDASFKQGTEFFDWQPGDGTAYTHPFSPPQGFDQFNPASTFLALPEQPRFDQTVCAQTTLFEQQQAPKQLTAPEYVGASNYGYHLDAGKFAELLQEHCVTHLQVEHVTANVCAITSASNGDIAALETDRTEPIEGDLFIDCSGTRGLLINEHYQIDFKPLDHFLFNNRAVATQVPYLDEQDPIASCTLATAQDAGWIWDIGLTSRRGVGYVFSSQHQSNDQAIDKLYQYIEKSLPTEAARRLTTRVIDFAPGHRRTFWHQNCVALGMAAGFIEPLEASALVLVELGAAMIADELPPDRLAMDRVSRRYNDRFSYRWARIIDFLKLHYILSKRPEPYWRDHSCEGSIPQTLVEQLDTWNYRSPWHNDQFHADEMFPSASYQYVLYGMGFRPNQTERPTRERDQQDKLGVQFFYKAAQEGKRLRQAMPSNRDLLTKIKAHGLKRI

SEQ ID NO: 85067 - protein, 415 aa, Burkholderia multivorans
  REGION 1..415: note = tr|B9BF47|B9BF47_9BURK Tryptophan halogenase; OS = Burkholderia multivorans CGD1 OX=513051; GN = BURMUCGD1_4592 PE=4 SV=1
MNEKKSNSVDVAIIGAGPSGAVAAALLRKCGRSVLVLERQHFPRFSIGESLLPQSMCYLEEAGMLQAVVEAGFQFKNGAYFVHRDRTSSFDFREKFSDGWGTAYQVERATFDDLLIRCAASQGADVRFGHTVRAFQAGDMPRLDVVDEAGSEYAVEASFVLDASGFGRVLPRLLGLEAPTGLPTRAAVFSHVQDSLPAGSTDRDKICIAVHPERRDVWFWMIPLTNGRSSVGCVADAAFLDVPEAQQESLLRELLQSEPTLARLVGSKPFVMPVRRIAGYASNVASLHGHGYALLGNAGEFLDPIFSSGVTIAMRSAHLAVAALERQLRGETVDWARDYDLALRKGIDTFRAFVERWYSGVLQDIVFHEDKASDVKRMVCSILAGYAWDEANPFVREPARGLDLLAEICRSNAAR

SEQ ID NO: 85068 - protein, 494 aa, Sphingomonas sp.
  REGION 1..494: note = tr|A0A1G5TJT0|A0A1G5TJT0_9SPHN Tryptophan halogenase; OS = Sphingomonas sp. NFR15 OX=1566282 GN=SAMN03159340_01371; PE = 4 SV=1
MNHAQTIRRVVIAGGGTAGWVAAAALSKHLGALLDIVLVESDEIGTVGVGEATIPTIRTFHRFLELDERDFMRATQATFKLGIAFENWARRGDRYVHGFGRVGQSIWMGDFQHMWLRGREAGIADDLGAYCLELAAAEAGKFATSDTGRINYAYHFDASLYAGFLRRFSEARGVTRLEGRIGGVRRNADTGDIEALYLADGREVAGDLFVDCTGFRGMLIEQTLKAGYEDWSHWLPTNRALAVQTTSVAPAVPYTRAIAHDAGWQWQIPLQHRVGNGLVYCSEYLSDDAAETTLRAQIQGEPITEPRLIRFVTGRRKRVWDHNCVALGLASGFVEPLESTSIHLIMIGVTRLIQSFPFGGIKPSLVKHYNDLAQAELERVRDFIILHYHLNQRGDDPFWERCRTMAIPDTLAQRIALFRESAMTPQTADDLFQADSWLQVMLGQRLEPTGYHRMGHMLSVEHLRRAFADVRDGIAGTVARMPTHHEFLEQYCAA

SEQ ID NO: 85069 - protein, 501 aa, Alteromonas sp.
  REGION 1..501: note = tr|A0A1J0RYQ5|A0A1J0RYQ5_9ALTE Tryptophan halogenase; OS = Alteromonas sp. Mex14 OX=1917157 GN=BM527_18870 PE=4; SV = 1
MTVSGLDSSKNQTPVKNVVIAGGGTAGWMAATALSRLLGKSINVTLVESKDIGIVGVGEATIPPIRTFHKLLGIEEKAFMRATQATFKLGIEFENWREQGHSYIHSFGITGRECWAGEFHHFWLRAKEYGFGGEFGDYCPELIAAKQSKFATSEAMPLNFAYHFDAVAYGRFLKFLACDAGVTHKEGDIEEVVVCPQSGNIQFLRLASDEVIDGDFFIDCTGFKGLLIEKALHTGYDDWRHYLFCDSAVAMQTELTAPPVPYTKSVAHKAGWRWQIPLQERMGNGLVFCSRFMSDEDAINTLKSQVTGAPINEPRVIRFTPGKRRRGWNKNCVALGLSSGFIEPLESTSIHLIMTGLIRLMRLFPFDGITQSAIDEYNNKFDSEMSAILDFIVMHYKVTQREDSPFWQQCQRMDIPFSLKHKLDLFAESGRVFLDDGDIFRVDSWTQVLMGQGMTPSQYHRVADEMSEQSLKQFMAGLKQQVDNHVAKLPSHAAFLTKYLG

SEQ ID NO: 85070 - protein, 483 aa, unidentified
  source 1..483: note = Aliikangiella marina
  REGION 1..483: note = tr|A0A545TAA1|A0A545TAA1_9GAMM Tryptophan 7-halogenase OS=Aliikangiella marina OX=1712262; GN = FLL45_13980 PE=4 SV=1
MTALYLNHRWKNKNIKVSLIESADIGIIGVGEGSTPSLKNFFDDIEIKESEWMPQCQATYKVGIRFDNWSTQPGFESYRHPFPSQVDKFSSDLFAKQLHIRRHGIDVEVHPDKFFIQSQLAMEKKGPIAPYHFPLENAYGYHFDSGLLGQYLAEIARLRGIGHIQAKVTDALLNNNGMISTLVTEENTQINADFFIDCTGFVGFLIQKKLQIPFISFSDNLFNDSAVVIPTPANKTINSETVSTALQHGWAWDIPLQHRTGNGYVYSSAYCDQTSAETELRKKLNLLDSDIGARHLKMKVGRVSQHWSKNCLAIGLSQGFIEPLEATALHLVQATILEFIIQFEKGNFTNQFQSQFNDTINNRFEGVRDYIVAHYRLNTRTDTQYWLDNANNPKISESLTRILQSWTGALGHDIEPEIIQQNIAGYFPVDSWRILLAGYGFFPALDHNHPQQGNIDHTEIENHQAFLKRCGVNFKTQNALLIN

SEQ ID NO: 85071 - protein, 196 aa, Xanthomonas oryzae
  REGION 1..196: note = tr|G7TJG6|G7TJG6_XANOB Tryptophan halogenase; OS = Xanthomonas oryzae pv. oryzicola (strain BLS256); OX = 383407 GN=XOC_4108 PE=4 SV=1
MWEKNCVALGLASGFLEQLESTNIHLIQRGIIGLLQTFPQVINAVDIAEYNRQAAQEITHIRDFVILHYHATDRRDTPFWRDCAAMDIPDSLRHRVERFRQSGRVFHQANGPFAENAWVQVMLGQGIVPQQHHPVADLMGDAELSRFLDTIRARVEAALVRLPAHADFLQRYCPAPPPPEPAARLPAPPVMATPAR

SEQ ID NO: 85072 - protein, 505 aa, Xanthomonas oryzae
  REGION 1..505: note = tr|G7TI74|G7TI74_XANOB Tryptophan halogenase; OS = Xanthomonas oryzae pv. oryzicola (strain BLS256); OX = 383407 GN=XOC_1412 PE=4 SV=1
MIQAQIRKVVIAGGGTAGWIAACALSHQFRGLLDITLVESEQIVTVGVGESTVPPIRTFHRFLQIDEQEFLRAVAGTFKLSISFEHWRAQGERYIHPFGITGQSTLVCAFHHLWLESQRRGMPGSFGDYCLETVASRVDRFALHGEPAVNYAYHLDAALYATFLRARSEACGVKRIEGKIQQVTVQPHSGDVASVVLEDGHVIEGDLFIDCSGFRGLLIEQTLHTGYEDWSHWLPCDRAVAVQTEAVGPPVPYTRAIAHEAGWRWHIPLQHRVGNGLVFSSKHLSDDQAHAKLLHDVAAPAVKDPWMVPFRTGRRRKAWNKNVVSLGLASGFIEPLESTSIHLTISAVVRLLALFPGEGIAPSQVQLFNDVSRAEMEHVRDFVILHYHATQRNEPLWQQCRAMELPESLALRLRAWRERAHAWQGADELFRVDSWTHVLMGQGIEPEQHHPLTRAFSDHDLRRLLDGIAQPIQHAVQQMPSQHAFIERYCKAGAQVCGMRSPVPA

SEQ ID NO: 85073 - protein, 528 aa, Shewanella sp.
  REGION 1..528: note = tr|A0A4Y5YGZ9|A0A4Y5YGZ9_9GAMM Tryptophan 7-halogenase OS=Shewanella sp. SM1901 OX=2588449; GN = FH971_13105 PE=4 SV=1
MQKPITQIVIVGGGTAGWITAGLLAAEHNVDKGVLAHDPKLTITLIESPDVATIGVGEGTWPSMRSTLSKIGIDENEFIRRCDASFKQGSRFIHWRHDSVNNNAQTQSDSYLHPFSLPHGHQELDLCPFWLSHADQVSFAEAVSSQEVLTQMGLAPKAISSPQYHFQNNYGYHLNAGKFSQLLSEHCTQKLGVKHIRDHVCQIVNNDQGDIDKLMTKEHGEISGQLFIDCTGAKSLLLGEHLEVPFLCQKSVLFNDNALAVQVPYEQADSPIASCTHSTAQRNGWIWDIGLPTRKGVGYVYSSSHTNDGDAEQTLLNYLGVNGVAADKLQPRKLSFNPGYRAKCWQNNCIAIGMAAGFIEPLEASALALIEWTASTLAQQLPPNRQVMDTISARVNQRYQLHWQQIIDFLKLHYVISQREVDGYWRDHRDNQSIPDSLQAQLELWRYQVPSQQDISYKEALFPAASFQYVLYGMGFNTQLPTHVKPSMQQLAQRLFNDNQQRTKALSNNLLSNRALLEKVAQYGFSKL

SEQ ID NO: 85074 - protein, 516 aa, Sphingopyxis sp.
  REGION 1..516: note = tr|A0A1L3JEQ1|A0A1L3JEQ1_9SPHN Tryptophan halogenase; OS = Sphingopyxis sp. LPB0140 OX=1913578 GN=LPB140_05345; PE = 4 SV=1
MIKNDSSFIGSAIKDIVIVGGGTAGWMAAAAFSRFLDNGNRNITLVESEEIGTVGVGEATIPAIINFNKMLEISENDFLRATQGTFKLGIEFVNWGQVGDSYFHPFGNYGQDLHGINFHQLYLREHALGDKRSISQYCMSAMAAQNGRFGRASANARSPVSEIFYAYHFDASLYAKMLREYAENNKVNRQEGRVVDVVRHAENGFVESVILDDGRKISGDLFIDCSGFRALLIGDALGEEYEDWSKWLPVDRAFAVPTTNIMSPVPFTRSTAHEAGWQWRIPLQHRTGNGHVYSSKFIPDDVAQQILMSNLEGEPLAAPKQLRFTTGRRKNSWSHNVVALGLSGGFLEPLESTSIHLIQNGIARLFALFPDKGFNPIEREEYNKGMSELYEDIRDFIILHYHATQREDSEFWRYVKNMSIPTSLERKMDLFKSRGRVFRENAELFGLPSWVAVMLGQNIWPYGWDTLADALDEGRVRDAMRQMRDVYAATAQALPTHEEFIKMSGAWAADDERMLK

SEQ ID NO: 85075 - protein, 504 aa, Sphingomonas sp.
  REGION 1..504: note = tr|A0A4Q6Y9L3|A0A4Q6Y9L3_9SPHN Tryptophan 7-halogenase OS=Sphingomonas sp. 3-7 OX=2484750; GN = EWE75_00090 PE=4 SV=1
MTAPAGPITSILIVGGGTAGWMTAAALARALPRHCAITLVESEEIGTVGVGEATIPPIRLFNQTLGIDEAEFLRETGGTFKLGIELVDWGRVGHRYFHPFGTHGKPFDLVAVHQHWLAARADGCGIAFDDLAMAWGAAQRGRFAMPMTDPRHVGSTFDYAYHFDAGRYAAFLRRYAEQRGVTRVEGKAVDVARDGETGLLSTVTLADGRTLAADLFVDCSGFRGLLIEGALAAGYETWTQWLPCDRAVAVPCASVGPPAPYTRSTADAAGWRWRIPLQHRTGNGYVYRSSDVSDDEAAATLLAKLDGEPLAEPRFLRFTTGRRRSFWTGNVVAIGLSSGFMEPLESTSIHLIQTGIAKLIALFPDRGFDPALIAEYNRIATTEFERIRDFLILHYKLTERRDTPLWRECAAMAVPETLQFKIDHFRRSGRHVPRELDLFGEASWTAVHLGQSNLPEGRDPLLGYAQDAAASRVFVERLAGAIQTAAESMPAHDQYIAHVLSRQH

SEQ ID NO: 85076 - protein, 527 aa, Shewanella sp.
  REGION 1..527: note = tr|A0A4Y5YE55|A0A4Y5YE55_9GAMM Tryptophan 7-halogenase OS=Shewanella sp. SM1901 OX=2588449; GN = FH971_08810 PE=4 SV=1
MNQNNIKNIVIVGGGTSGWMTAAMLIKLFKSQLNITLIESDAIGTIGVGEATIPPLQIFNSVLGISESDFIKATQATYKLGIEFENWYQQGDAYMHAFGNIGRDLGFTAFHHYWLSSRANNVKTNGSETNSPHAKYPEINRSQVEGSQYNPNDFWQYSLNYQAAKHNKFQPIQTISQAQMSGITHAYHFDANLYANLLHQYSDQRGVTRVEGTIASTELTIDGNIETVTLQNGQSIRGDLFIDCSGFSAILIGQALGVDYENWQHWLPCDSAYAVPCESVSPIIPYTKAIAHDTGWQWRIPLQHRTGNGIVYSSQFMTDEQAKQLLLTNLDGKSLAEPRKINFQTGRRTKQWHKNCVAIGLSSGFLEPLESTSLHLVQSAIIRLTKLFPQNGITLQHIDEFNRQSQTEFEQIRDFIILHYHLNAKQSADGEHGLWQQCRDMDIPESLQRRIDLFKSTATVFRHQDELFTEAAWVQVMLGQGITPTDFHPLTQAVRQIDLNDYLANIRKVIASTVDQMSSHEDYIAAL

SEQ ID NO: 85077 - protein, 509 aa, Xanthomonas oryzae
  REGION 1..509: note = tr|G7TC86|G7TC86_XANOB Tryptophan halogenase; OS = Xanthomonas oryzae pv. oryzicola (strain BLS256); OX = 383407 GN=XOC_4642 PE=4 SV=1
MIPAPLRNIVIVGGGTAGWMAAAAFARVLGPTFTVQLIESEQLGTVGVGEATVPHIKAFNNLLGIDEAEFVRQTQGSFKLGIEFVDWQRPGTAYMHGFGTQIGHPLGLLPFHQYWIKQHARGKAQPLGAYTLNTVAAARGKFMTSAGDVPANSPLANIAYAYHFDATQYAHFLRRYSQQRGVTRIEGLVEQVQLHPESGHVQSLQLASGQTVHGDVFIDCSGFRGLLIEEALHTGYHDFTHWLPCDRALAVPCEKVGPPTPYTRSTARAAGWQWRIPLQHRTGNGYVYCSAHISDDEAAATLLANLDGKPLADPRPLRFITGRRKQFWNRNVVALGLASGFLEPLESTSIHLIQSGISKLLELFPREGISPVLVQRYNDRSAFEFDRIRDFLLLHYHATEREDSAFWRHCRSMPITPELQTTLDLFRDSGRFYRNAEEMFAEISWVQVMVGQGILPQGYHPLVDQVPDRDAEGFLASVAQTIAHCVDVMPPHQQFIDRYCKAAALPCGG

SEQ ID NO: 85078 - protein, 513 aa, Streptomyces antibioticus
  REGION 1..513: note = tr|A0A0L8NA31|A0A0L8NA31_STRAT Tryptophan halogenase; OS = Streptomyces antibioticus OX=1890 GN=ADK77_39775 PE=4; SV = 1
MIKSVVIVGGGTAGWMSATYLKAAFGDRIDVTLVESDRVSSIGVGEATFSTVRHFFDYLGLDEREWMPHCAASYKLAIRFENWREVGDHFYHPFERLRMSDGFTLADWWLHEGDRSLRFDQACFVTPALCEAQRSPRMLDGSLFAQGLDESLGRSTLDEQRAQFPYAYHFDAGLLARFLAKYGTDRGVRHVVDDVVEVRTDERGWLTEVMTKQNGALAGDLFIDCTGFRGLLINQTLEEKFVSFQDVLPNNRAVALRVPQPDQAERGMRPYTTATAMEAGWIWTIPLYGRNGNGYVYSDEFCTPEEAERTLRAFAAPGQDDLEANHIRMRIGRNERSWVKNCVAIGLSSAFVEPLESTGIFFIQHGIEQLVKHFPDERWDPSLADDYNRRVARVLDGVKEFLVLHYVAAGRDDTPYWKEAKLRGLPDGLAEKLDMARSHLLDERAIYPYYHGFEQYSWITMLLGLGHEPRAARPALAHVDPTAARAELARLRSDADRLVRTLPSCHEYLTSIH

SEQ ID NO: 85079 - protein, 513 aa, Sphingomonas sp.
  REGION 1..513: note = tr|A0A4Q6XSC3|A0A4Q6XSC3_9SPHN Tryptophan 7-halogenase OS=Sphingomonas sp. 3-7 OX=2484750; GN = EWE75_16295 PE=4 SV=1
MQPIRNIVIVGGGTAGWLAAGVIAAKHQGRMPADFTVTLVESPNTPIIGVGEGTWPTLRTTLSKMGVSETDFFRECNASFKQGARFARWTTGEVDEGYYHPLMLPQGFQRVNMAAHWLADGHDQSFCDAVTPQGMLCDDGLAPKTIATPEFDAVANYAYHLDAGKFAGFLQRHCTAKLGVRHVLADVTHVNQAENGDITSVVTEQAGEIAGDLFVDCTGFAALLIGKTLGVPFKSCADVLFCDTALAIQVPYDSEDSPIASHTISTAQSAGWIWDIGLPSRRGTGHVYSSSHISDDDAERELRAYLGPVGATADVRKIKIRSGHRETFWKNNVVAVGLAAGFLEPLEASAIVLIEMSTKLIAEQMPVCREVMDIIAARFNATTHYRWGRIIDFLKLHYVLTKRTDSDFWRDNVRADTIPDRLRDLLTLWKYQPPWFHDEFDRVDEVFPAASYQYVLYGMQFGTEVSREALSAETRIAEQTRREAAVQTQRLRAGLPRHRDLIRKIIDHGLPAI

SEQ ID NO: 85080 - protein, 495 aa, unidentified
  source 1..495: note = Gammaproteobacteria bacterium
  REGION 1..495: note = tr|A0A1Z9ARX2|A0A1Z9ARX2_9GAMM Tryptophan halogenase; OS = Gammaproteobacteria bacterium TMED95 OX=1986771; GN = CBC55_01615 PE=4 SV=1
MNHQNPVSRVVIVGGGTAGWMTAAALSKLIGQTLAITLVESEEIGTVGVGEATIPTLLTLHKLLKIDEREFLKSVKGTIKLGIQFENWLRADHRYIHSFGYTGESCWAAGFQHFWLKSRSLGHDVLGYGEYAPELAAAKANKFGFLKPEPLNYAYHLEASGYAKFLRGIAEQHGVTRKEGKIVSVDQSDSGDIASVMLQDGQSVTGDLFIDCSGFAGLLIDKTLKVGFDDYSHHLPCDSAVAVQTQSVSDPVPYTRAMTHSAGWQWRIPLQHRVGNGLVYSSAFYSDDEAIARLTRNTEGEILTDPRVIRFKTGQRQHHWYKNCVAIGLSAGFIEPMESTSIHLIMRAIIRLMQMFPHHGSRDADIREFNRQMREEITFIRDFIVLHYHANEHQEAPFWTAMAHLDIPDTLAHRLELFRETGRVFQAQGDVFGENSWTQVMLGQGIMPQRYHHIVDMMSEPELRDFMSRQHNRVNQILDVLPNHQAFLDAYVGTQ

SEQ ID NO: 85081 - protein, 512 aa, Sphingomonas sp.
  REGION 1..512: note = tr|A0A0A6CZG7|A0A0A6CZG7_9SPHN Tryptophan halogenase; OS = Sphingomonas sp. Ant20 OX=104605 GN=NI18_14690 PE=4 SV=1
MTQLRRILIAGGGSAGWMTAAMFSRLFKGLYEIVLVESDAIGTVGVGEATIPAIKKFNELLGIDEDDFLRRTQGNFKLGIQFQDWLRPGSSYVHGFGVIGQDLEWLRCHHYWLKMHGEGRAREFDRYSINTWAALQNRFMRPRADMPDSPIGQIAYAFHFDAGLYAAYLADYARDRGVTRREGRIADVTLDPGSGFIRSVTMDDGEVIEAELFIDCSGFRGLLIEQALGSGYEDWSHWLPCDRAVAVPSERSANFTPYTRSTARPAGWQWRIPLQHRTGNGHVYASRWMDDDAAQAMLLDNLDMPAVGEPRRLRFVPGKRRSGWIKNCVAIGLAGGFLEPLESTGLHLIQSAILRLVRLLPDTGFDPANIAEYNRQTDFEYERIRDFIILHYKATERGDTPFWRHVRDMDVPETLARKIALFRANGRIFREDDELFAEESWIQVLIGQGIIPTAPDPLVDVTPADEIERFLSNIEGVIAKCTALMPSHADFIARTCQAPPLIVPRSRVAASR

SEQ ID NO: 85082 - protein, 553 aa, unidentified
  source 1..553: note = Minicystis rosea
  REGION 1..553: note = tr|A0A1L6LJW1|A0A1L6LJW1_9DELT Tryptophan halogenase, putative OS=Minicystis rosea OX=888845; GN = A7982_07450 PE=4 SV=1
MASSSDRPFTTPVMRELFTNHELLLREVSRPKGDAEGVRRVGILGGGTAGWFTALALRAQLPWLDVSVIESPSIPIIGVGEASVPSLVAFLHHYLKLDVLEFTREVQPTWKQGIRFEWGLPGDYVFQAPFDWEVNGIGMLGSMAETGNINRFTVEAILMARNVTPIVRTNGQLQSFLPLFPFAYHLDNQRLVRYLTRTALSRGVRHIDAKIAEAKLAEGSGGDGDPEIASLVTDDGRTLEFDLYIDCSGFRSFLLEKQLGTKFHSYASSLYTDSALAFNAPHGGKLKPYTTARTMENGWCWNIPMVEDDHLGYVYSSAYCSDDEALAEARRAFPDLHGERVVRFRSGRHERSWVGNVYAIGNAYAFVEPLESTGLLMIMRAITSLVRAFPIGRDHAVMKRFINATAARDWDRLRWFLAAHYKFNRKLDSRFWQEVRADADVSGIEAALSMFQACGPLSLLPRAIRTSLTEATEIFFYGLAGLDCILLGQKVPYPDLEREPPETWRARLQIAQELARRALTHAEALRAVKERPDLLLELVNHPQSWVTKAVPLL

SEQ ID NO: 85083 - protein, 515 aa, Sphingopyxis sp.
  REGION 1..515: note = tr|A0A1L3JB11|A0A1L3JB11_9SPHN Tryptophan halogenase; OS = Sphingopyxis sp. LPB0140 OX=1913578 GN=LPB140_05350; PE = 4 SV=1
MTQDDMIQRIVIVGGGTAGWMAAAAFSRVLGAMPGLLITLIESDAIGTVGVGEATIPDICLFNNLLGINENLFMRETGATYKLGIEFVDWYKKGHSYVHPFGNYGIDMLGIEFHHMWLRGLSIGDNSNIDEYSIATMAGKMERFMRPDVNQPNSPLSKFSYAFQFDAGRYAQFLRRRSQAQGVERIEGKIVDTLLDSQNGHVRHVQLEDGSKIEGDLFIDCSGFRALLIGGAMGVGFEDWTKWLPCDRAVAMPCAYPNGQSGADSEPLTRSIAQPAGWQWRIPLQHRIGNGHVYSSAHMNAQEAEKILRDNLDGEVLGEANHIRFTAGHRKKAWVKNVISLGLSGGFLEPLESTAIHLVQTGISRILTLFPTRKCNVKEIERFNQQSIEDYVTIRDFLILHYKATSRDDSEFWDYCRNLEPPSGLADKLAMFESSGRVFRENNELFTETSWLSVMVGQGVKAGGYHPAAHLISEVETKERLRHIRGVIKQTANAMPAQADFLRQQGAIMPQEEMK

SEQ ID NO: 85084 - protein, 497 aa, unidentified
  source 1..497: note = Hyphomonas chukchiensis
  REGION 1..497: note = tr|A0A062UA12|A0A062UA12_9RHOB Uncharacterized protein OS=Hyphomonas chukchiensis OX=1280947; GN = HY30_09815 PE=4 SV=1
MDGQTVKKVVIAGGGTAGWIVAAALSRQLGPLIDITLVESDEIGTVGVGEATIPTHRIFHHLLGVDERAFMRATKATFKLGIAFENWGQIGDRYIHSFGVVGKSTWMADFHHIWMQAREMGLASELGDYCFELKAAEANKFATSDTSQINYAYHLDASLYAGFLRQFAESFGARRVEGLIEAVEQNPETGFITVLVLKSGERIEGDLFIDCTGFRALLIDKTLNTGFTDWSHWLPTDRAIAVQTKATGPALPYTRAIAHDAGWRWKIPLQHRVGNGLVYSSAHLSDDEARSRLLAEIDGEPLTDPRIIRYRTGRREKVWVKNCISIGLSSGFVEPLESTSIHLIQIYASRLVQMFPFNGFSDALATRFNDMARVELERIRDFIVLHYKLTERTDSDFWKMMGAMNIPDTLRNRIDLFRDTGLAYQEKAELFQVDSWLQVMMGQRLHPQGRHHLGRLMSEDQIKMALNGLRTNIANAVARLPVHQDFLDQYMREPELS

SEQ ID NO: 85085 - protein, 501 aa, Sphingomonas sp.
  REGION 1..501: note = tr|A0A2A2SER3|A0A2A2SER3_9SPHN Tryptophan halogenase; OS = Sphingomonas sp. 1PNM-20 OX=1141887 GN=CKY28_08615 PE=4; SV = 1
MIERSPDRVRELVIVGGGTAGWMAAAAFARHFVGTGLKITLVESSGIGTIGVGEATIPTIRRFYAKLGMTDQSVMQATGATAKLGILFQDWHRVGEGFIHPFGLYGQDYGDVAFHHLWLRRRMEGDPRPITEYSLGASLAEHGRMALPQPNPPTPLAVYDWAIHLDASLFAKHLRSYAEASGVERIDAVVAEVEPGPAGVAALRLADGRRVEGDLFIDCTGFRSMLLGEAMGVGFEDWREWLPCDAAIAVQTGNAAADPPPYTRAHAKSAGWQWRIPLRHRAGNGLVYSSALMSEDEATATLMADLPGEPLIEPRRIPFRSGRRTQAWRGNVVALGLASGFLEPLESTSIALIETGIERLKELFPDRDMAPALADEFNDATAREMERVRDFIILHYKLTRRDDTPFWRHCQAMPVPETLRRKMALWDARGEFVRYRWEMFHPASWLAMYTGFDRLPASINPAVAGADMGRVSGALDRMRASVADAVRRTPTHAQFLQTLDR

SEQ ID NO: 85086 - protein, 533 aa, unidentified
  source 1..533: note = Labedaea rhizosphaerae
  REGION 1..533: note = tr|A0A4R6SGL3|A0A4R6SGL3_9PSEU Tryptophan halogenase; OS = Labedaea rhizosphaerae OX=598644 GN=EV186_102357 PE=4; SV = 1
MKAHRAPTYKLENVCDQGVCIVIRSVTIVGGGTAGWMTASYLKAAFGDRIDVTLIESAQVKRIGVGEATFSTVRHFFNYLGLDEAEWLPKCAGSYKLGIRFENWRKPGEHFYHPFERLRSVSGFSLAEWWLELGDRSEPFDRSCYITTALCEAARAPRMMDGSLFVSGLDGDLGRSTLDDQRDQFPYAYHFDADAVAGFLGEYGRGRGVRHIIDNVTEVQQDSRGWISGVRTAEHGVVTGDLYVDCTGFRGVLINKTLGEKFQSFEDDLPNNRAVALRVPREDATDMDPFTTATTMSAGWAWTIPLFRRNGNGYVYSDKFITPEEAETELREKVAPGRDDLEANHIRMRIGRNENSWVGNCVAIGLSSAFVEPLESTGIFFIQHGIEQLVKHFPDNGFDELRTAAYNRRINNAIDGVKEFLILHYRSADREDTPYWKETKSRPLPDALRERLALAETQLLDDETIYPYYHGFESYSWNTMNLGLGRVPAKARPALRHLDPAPAHAEFARLKAEADEMIATLPSCYEYLASIND

SEQ ID NO: 85087 - protein, 538 aa, Pseudomonas sp.; identical to SEQ ID NO: 82946
  REGION 1..538: note = tr|A0A2V3Z755|A0A2V3Z755_9PSED Tryptophan halogenase; OS = Pseudomonas sp. LAMO17WK12:I9 OX=1286370 GN=H160_01307; PE = 4 SV=1

SEQ ID NO: 85088 - protein, 485 aa, Streptomyces antibioticus
  REGION 1..485: note = tr|A0A124HKN4|A0A124HKN4_STRAT Tryptophan halogenase; OS = Streptomyces antibioticus OX=1890 GN=AQJ23_35020 PE=4; SV = 1
MTQEYDLIVVGGGPAGSTAATAVALRGHRVLLLERETFPRYQIGESLLPATVHGLCRILGVADEVQQAGFTLKRGGTLRWGRDPEPWQFSFAMTPRVPEPTATAFQVERSRFDEILLRGARRAGAEVREGSTVRRVVADEKRVRGVEFTDADGNARTAYARYVIDASGNTSRIHTGVGGGRVYSDFFRNLAVFGYFAGGARLPEPNSGNIFCAAFDAGWLWYIPLRDDLTSVGAVISPEHTQAVQRDARGAWRDMIEACPEVSRLVAGVPEATEAPYDQVRVRRDWSYWKQSFWKPGMALVGDAACFVDPVLSSGVHLATYGALLAARSVNAALDGSVPEEQGFAEFEARYRREYRVFYEFLIAFYDMERNEDSYFWSAKKITHVDLDEAAAFAELAGGLVSRDSAVVRTDWHTAAAQLDGAVSELAVADGRVNPLLSAPVVGETFRTGNDLQEQALYGGPLDDPGPAAPGGLAVTPDGLSWVKE

SEQ ID NO: 85089 - protein, 503 aa, Sphingomonas sp.
  REGION 1..503: note = tr|A0A2A2SJ51|A0A2A2SJ51_9SPHN Tryptophan halogenase; OS = Sphingomonas sp. 1PNM-20 OX=1141887 GN=CKY28_00430 PE=4; SV = 1
MVDTTGRTIVIVGGGTAGWMAAAALRRFSPPTTRIRLLESDRIGAVGVGEATIPQIRLFNAGLGIDEDEFVRETQGSFKLGIEFIDWSGRGSRYIHAFGTIGRGLGLVPFHHYWLRHAQAGGASRYWDYSPTALAASRNAFARDLGRPELPSGVAWAFHFDAGLYAAYLRRYAEARGVERTEGEVAHVSLHGETGHIEAVTLQGGERLAGDFFVDCTGFRGLLIEDALQAGYDDWRRLLPCDRALAVPSAAAGPLTPYTRATAREAGWQWRIPLQHRTGNGLVYSSAHLSDDRAAEILLANLDGAPLAEPKPLRFVTGRRRRAWVGNCVALGLAAGFLEPLESTSIHLIQSGIARLLELFPTDPVSPADVDEYNAQTEREWTAIRDFLVLHYHANARPEPFWAERRALAIPDTLRHRMELFRQTGRVTAREHDLFKEPAWIQVLLGQGVVPQGHHPLADALPADQLDQLLSLARAHAAQVAARMPAHQAFIAAHCAAPRKAAA

SEQ ID NO: 85090 - protein, 507 aa, Sphingopyxis sp.
  REGION 1..507: note = tr|A0A1L3JB80|A0A1L3JB80_9SPHN Tryptophan halogenase; OS = Sphingopyxis sp. LPB0140 OX=1913578 GN=LPB140_05365; PE = 4 SV=1
MNIQNPTKIVILGGGTSGWMSATALAVMLGAQVDVTLVESEDIGIIGVGEATLPHLRHFVETLGIDEADFMRATHATYKLGIDFRDFGKIGDSYIHPFGSFGDALAGVPFHHYWLAAQKNIGDVGSIGDYSMGVAAALANKFAPPASDNSLASTYGYAYQFDATLFGPFMRDFATAKGVKRVEGRVNNVQTNPENGNVETLILESGNQISGDIFIDCSGFRSMLLGQTLGAEWEDWSHWLPCDRAVAVPCTAENENEIEPYTRAIAMPAGWRWRIPLQHRIGNGYVYASQYLSDDEAKNALINAIEGKPLAEPKLLKFKAGRRKKSFIKNVIGVGLSSGFLEPLESTSIYLAQMAITNFIELFPKNGVIQQFDRDAFNQLVDMEYDRIRDFLILHYHATTRDDTPFWDHVRTMEIPHSLSEKMELWRQSGHVSKYSQGLFYEPSWVAVYLGQNIYPTGFDPRTEIGNQDGLFRALHSLKNAISKQVNNMPSHRAYLHNHAKRLADIE

SEQ ID NO: 85091 - protein, 439 aa, unidentified
  source 1..439: note = Salipiger bermudensis
  REGION 1..439: note = tr|Q0FWS6|Q0FWS6_SALBH Tryptophan halogenase, putative OS=Salipiger bermudensis (strain DSM 26914 / JCM 13377 / KCTC 12554 / HTCC2601) OX=314265 GN=R2601_02848; PE = 4SV=1
MRDMLRRFGLSERGVLAACDASFKHGIRFDDWSGPGSRCLHPFHRHALPRDIAARWLASSGEPPFAAIASAQAALIAHERAPRPAGAPEFTGPVPYAYHLDAEKFAEYLAGELTSRGVTRQSAHVTGVLREGETVTALRTEDGAPLSADLWVDCTGFAGLLLPEEGRDWVSYADRLLCDRAVTMRVPEDDPAYTPAPFTRARALEAGWCWDIGLRHRRGRGYVYSSAHLSDDEAEAALRAEEGQHSAELPARVIHFTPGRRAAPWQGNVVALGLAAGFLEPLESTGLFLADFAARALVEMFPAAPGLPMQPLARRYNALLAEMHDDLADFLALHYAVAQRRDTTFWRDAAKAALRSERLRELLELWQLRPPSFADFSYRYSPFSHTAWEFILLGMGWRPATAPAGTTPCAAPAEALTRQMLDALPDHGTLLRHLAQACR

SEQ ID NO: 85092 - protein, 532 aa, Sphingomonas sp.
  REGION 1..532: note = tr|A0A2A2SBZ3|A0A2A2SBZ3_9SPHN Tryptophan halogenase; OS = Sphingomonas sp. 1PNM-20 OX=1141887 GN=CKY28_16610 PE=4; SV = 1
MNEQTIRDVVIVGGGTAGWMTAAALSRFLDNGVTRVTLVESEEIGTVGVGEATIPPIITFNQMLGLNENEFLRETGGTFKLGIEFVDWGDLGERYFHPFGFHGRDLQGVHFHQLYLRERRRRPLPDISAWSMSAVAASMGKFGRPGANAQSAVKDLLYAFHFDAGLYARYLRRYAERGGVTRVEGKIVDVDTRGEDGHVEAVTLADGRRIAGDLFIDCSGFRGLLIDGALKTGYEDWTHWLPCDRAVAVPSAYEGEPDPFTRATARSAGWQWRIPLQHRMGNGLVYSSTYMDDAEAERLLMANLEGEPLAEPRRLSFTTGRRKQCWNKNVVALGLSSGFIEPLESTSIHFIQSGIAKLIALFPDRRFDPVERDEYNRQMRDLYEDVRDFIVLHYKATRRSDSPFWDRCRTMEIPDSLARKIDLFRAKGRVFRDGLELFATTSWVAVCFGQHVVPDEHEPAVDALDEDKVAQALEQMRRGYQEVAEQLPTHGEFIRRCGPSPFARPQPTQPESPVPTFSFESESPFAGQGFTL

SEQ ID NO: 85093 - protein, 343 aa, Actinoplanes sp.
  REGION 1..343: note = tr|A0A428XWB0|A0A428XWB0_9ACTN Tryptophan halogenase (Fragment) OS=Actinoplanes sp. ATCC 53533 OX=1288362; GN = DMB66_27130 PE=4 SV=1
YTDSDGGEHEVRARFVVDASGNKSRLYSSVGGTRNYSEFFRSLALFGYFENGKRLPAPNSGNILSVAFDSGWFWYIPLSDTMTSVGAVVRREMAEKIQGDREKALQALIAECPLISEYLQDARRITTGRYGELRVRKDYSYLQTSFWRPGMILVGDAACFVDPVFSSGVHLATYSALLAARSINSVLADDLDEKTALTEFEARYRREYGVFYEFLVSFYEMNVNEESYFWQAKKVTKNKRTELESFVELIGGVSSGEAALTTSGRITERSAEFAAAVDQMASSDDGNMVPMFKSQVVKQVMQEGGQVQMKAVLGEDAEPELPLFPGGLVASPDGMKWLPYHPA

SEQ ID NO: 85094 - protein, 500 aa, Sphingomonas sp.
  REGION 1..500: note = tr|A0A0A6D504|A0A0A6D504_9SPHN Tryptophan halogenase; OS = Sphingomonas sp. Ant20 OX=104605 GN=NI18_00765 PE=4 SV=1
MTGTLGSVVIVGGGTAGWMAAVAFGRLLGPAGTRVTLVESDDIATIGVGEATIPPIRTFHAMLGIDEDAFLRATGGSYKLGIRFEGWTRPGESYVHPFGQIGTDIAGVPFAAQWLRARQAGAAEALGAYSLEARASEAGRFSRPIANGDSPLSRISYAYHFDAGRYAVFLRAQAEAHGVIRREGRVDRVERGPAGIAAVHLADGSRVEGDLFLDCTGFRALLIEGALQAGWTDWSQWLPCDRAVAVPSAADAAPLALTRAIAEPAGWRWRIPLQHRTGNGHVFSSRHCSEDEATATLLAGLGGETLADPRVIRFATGHRTRFWSGNCIALGLAAGFMEPLESTSIHLVQSGLQHLLRMLPAGGPPAPAIVDRYNRTMTGEFVRIRDFLVAHYRLNARTEPFWRERAAAPIPDGLAEKLALFRAGGRIFREADELFNEVSWLALLTGQDAPVTGHDPICDALPIAIAAKRLAQIERVVATSLTHMPPHADALARLGQDRTI

SEQ ID NO: 85095 - protein, 512 aa, Glaciecola pallidula
  REGION 1..512: note = tr|K7A5S3|K7A5S3_9ALTE Tryptophan halogenase; OS = Glaciecola pallidula DSM 14239 = ACAM 615 OX=1121922; GN = GPAL_3950 PE=4 SV=1
MSDAIKTIAIVGGGTAGWLSAAIIAAHHKSKSGDRNASGIEIKLIESSDIPTVGVGEGTWPTMKNTLRDIGIKEADLFANCHAVFKQGGKFVDWVHGNGDFYYHPFTVPLGYGRIDLAPYVSDIEKYAVEANFQHHVCEAGLAPRTISESEYSGQCNYAYHIDAGEFAELLKHHCKSKLNVTHIVDTVNQVTLASDGSISSISLNKHADVEADLYVDCTGFAALLLGGKLNVPFIKMDDVLFNDSALAMHVPYDSKDSPIASHTIATAQNAGWIWDIGLTHRRGVGHVYSSKYLSDEEAEANLRKYIGEASKGLTARKISFESGHRERFWEKNCVAVGMAAGFVEPLEATAIMLVEISARYIAENLPPTKAIMPTVAKRFNQQMRYRWSRIIDFLKLHYMLTKRPEPYWQAHTNPKDIPESLKEDLSIWGYRGPTSGDFKSAIELFPAASYQYVIYGMGFKPDFSQQAHLYQEQQQADMIIQRNQKITEQMLQTLPLHREYIEKWLANTQMK

SEQ ID NO: 85096 - protein, 528 aa, Massilia flava
  REGION 1..528: note = tr|A0A562PK67|A0A562PK67_9BURK Tryptophan halogenase; OS = Massilia flava OX=871742 GN=IP92_04039 PE=4 SV=1
MHGAPALLPFHSQADMNQQIKHIVIVGGGAAGWITAGRIAARHARAESGITVTLVESPTIGPIGVGEGTWPTMRSTLMKMGISETDFMRECDATFKQGAKFARWVDGTADDFYYHPLMLPQGFGQMDLVPYWQTACAGRSFSDTVCLQEQVCEHGLAPKMITTPEYASVANYAYHLDAGKFVGFLTRHCVDKLGVKHVLGDVTEVKSAPNGDITAIVTAQQGEIAGDLFVDCTGFSSLLLGKHLEVPFVDKGDVLFIDKAIAAQVPYEHPDAPIATHTISTGQAAGWIWDIGLVNRRGIGYVYSTRYTSDDEAEAALRAYIGPAGKTVNTRRIPIRSGHRQLFWKNNCVAVGLAAGFLEPLEASALVLVELSADMLAEQLPASRDIVDIVARRFNDTFLYRWDRIIDFLKLHYILSKRTDNAFWTDNRAAETIPDSLQDLMRLWRYRPPGNCDFTSNNEVFPAASYQYVLYGMGFKTDPEFLRPSASEQRAAQEHLAQNSAAIKKALRMLPAHRELIAKIHAYGLPAV

SEQ ID NO: 85097 - protein, 533 aa, Streptomyces sp.
  REGION 1..533: note = tr|A0A4R9F2K6|A0A4R9F2K6_9ACTN Tryptophan 7-halogenase OS=Streptomyces sp. MZ04 OX=2559236; GN = E2651_09965 PE=4 SV=1
MEDHRIKRVVILGGGTAGWMSASYLGKALGSEVSITVLEAPQVPRIGVGEATVPNLHKTFFDYLGFTEEEWMRECNASFKMGIKFTNWRTPGAGEATPRTMSDGTGDHFYHLFGLLANSDNLPISHHWTHKKLAGQTDEPFDYACYREPPIMDQNLSPRFMDGTKWTNYAWHFDANLVADFLCRFAVQKQGAVHIKEKMTSAEVDERGYITCVKTETGRVVEGDLFIDCSGFRALLINGVMREPFLDMSDHLLNDSAVATAVQHDDEAEGVEPYTGAIAMSSGWAWKIPMLGRFGTGYVFSSRFQSRDDATLEFCKMWGLDPEKQPLNQIKFRVGRNRRAWVRNCVSIGLASCFLEPLESTGIYFTYAALYQLAKHFPDKRFDPILQNRFNAEIETMFDDTRDFLQAHFSYAPRNDTAFWRACKDLELADDIKEKVAMYQAGLPVNMPITDEATYYGNFDAEFRNFWNNSNYYCIFAGLNKLPDHTLPILAARPDMLDRAEPVFEGIKAKQKELAASLPSTYDYLRQLHGKTS

SEQ ID NO: 85098 - protein, 509 aa, unidentified
  source 1..509: note = Caulobacter radicis
  REGION 1..509: note = tr|A0A2T9JPE7|A0A2T9JPE7_9CAUL Tryptophan halogenase; OS = Caulobacter radicis OX=2172650 GN=DDF62_19935 PE=4 SV=1
METSAPLDIVIVGGGTAGWMVGTALVSGLRPHQARVRLVESDEIATVGVGEATIPAMRDYNRFVGIDEVEMMRETNGTFKLGIEFLDWGFKGSSYHHPFGVHGAAIGGAGFHHHWNRARLAGHDFDIEQFSYAIAAARDDRFEFPNPDPDKIDSTYSYAYHFDASLYAKYLRKVAEGRGLKRTEGKVVDVTRDPLSGDVASITLASGEVIRGDFFVDCTGFRGLLIGQTLNSPFEEWTDWLPCDRAWAVPCARADRFTPFTRSTAREAGWQWRIPLQHRTGNGYVYSSRYISDDEAAATLMANLDGEALAEPRQIRFKAGRRTASWTRNVMAAGLASGFLEPLESTSIYLVQIAVMNLLKLFPGKRVEPALVEEFNRRVDMEYDRVRDFLILHYHANTRTDGALWKHCREMEIPESLKHKLELFRHRGVAPNYHDGLFALPSWISVLLGQGVLPGGYDRMVDNVPLSQALAEMERQRSAITRRVPSMPTHADFVASHCAIPRPIAEAVA

SEQ ID NO: 85099 - protein, 516 aa, Sphingomonas sp.
  REGION 1..516: note = tr|A0A2K8MAX6|A0A2K8MAX6_9SPHN Tryptophan halogenase; OS = Sphingomonas sp. Cra20 OX=1327635 GN=CVN68_02715 PE=4; SV = 1
MAKRILIVGGGTAGWLTAGYLAKRLGADLPGGVSIQLVESRDIGILGVGEGTFPTIRRTLSTIGISETELVRRCGASFKQGTKFVHWRHAPGGAGPDHYAHPFQNAEARGGLELLPYWLLGVGGDVNWDEVANPQKKAADAHRAPKLPTHPDYVSPLNYAFHFDAVALAALLREHAVANGVRHLIDQVSEVRLDEDGAIAGVVTASGLLEADLYVDCTGFRAELIGKALGVPYRSCRDVLFCDSAVAIQIPYRDGSAPIASFTISTAQEAGWVWDIGLDRRRGIGHVYSSAHTDDARAEELVRAYVGADAEGIETRKFRFDAGYREVNWHKNCVAIGLSSGFFEPLEATGIVMSEVAAGLVASLFPWGGDFETSARQFNANMLQRYERARDFIKLHYCLSQRRDSAFWRDNVAENSIPHSLRERLERWRFRPPTELDVDPNVDIFTEASWQYVLYGMGWKTDVSARAGAYRYHDDARAAFEEVRRQAAFAVANLPSNRELIDYAINNRFGPVGAAA

SEQ ID NO: 85100 - protein, 511 aa, Nonomuraea sp.
  REGION 1..511: note = tr|A0A5C8JQV3|A0A5C8JQV3_9ACTN Tryptophan 7-halogenase OS=Nonomuraea sp. C10 OX=2600577; GN = FR742_08125 PE=4 SV=1
MINDVVIVGGGTAGWMTATYLKRAFGDRVSVTLVESPRIPTIGVGEATFSTVRHFFDYLGLDEREWMPQCSASYKLAIRFQNWRGDGTHFYHPFERLRVSNGFTLADWHLQLNGAAEPFDRHCYLTPWLCEARRSPRLLDGSLFASGLDGSLGRSTLDEQRAQFPYAYHFDAAQLAAYLTGIGVRGGVRHVLDDVTAVGRDERGWISHVSTKEHGDVTGQLFVDCTGFRGLLINQTLGERFRSFTDVLPNNRAVALRVPREEQELINPYTTATAMDAGWIWTIPLYGRNGTGYVYSDEYCSPEEAERTLRAFAAPGRDDLEANHIRMRIGRNERSWVGNCVAVGLSSGFVEPLESTGIFFIQHAIEQLVKHFPDERWEPRLIDGYNDRVARVIDGVREFLVLHYRAAARADTPFWKETKVRPIPEWLAGFLPVAATRLPDESTIYPYYHGFELYSWITMLLGLGHYKPGPRPALAHLDPAGARAEFADLRAGAQRMAAALPAAHEYLTSLR

SEQ ID NO: 85101 - protein, 518 aa, Rhodanobacter sp.
  REGION 1..518: note = tr|A0A4R8L6Y2|A0A4R8L6Y2_9GAMM Tryptophan halogenase; OS = Rhodanobacter sp. TND4FH1 OX=1907401 GN=BJV57_2623 PE=4; SV = 1
MNQTAIRDIVIVGGGTAGWMAAALLAKALGSQVKIRLIESDEIGIIGVGEATIPQIRHINTFLGIDENDMLRATQGTFKLGVQLNDFGRLGDSYLHAFSDIGLPLGLIGFHQYWLRAVQGRTSAAGAGCAGEAERPRHPDSDLWSYSLNTQAARAHRFAPMDRVGSSSLGGIKYAYHFDAGLYGQYLRRHCDPDVVRRTEGKVVDVQLRAHDGFIESVRLESGETINGDLFIDCSGFRGLLIEGTLKTGYESWQHWLPCDRAVAVASARTEPLWPYTRATARTAGWQWRVPLQHRTGNGHVYSSQFISDDEASAMLLANLDGEALATPRPLRFTTGMRRKAWQRNCVALGLAAGFMEPLESTSIHLIQSGISRLLAMFPDRHCEPVLMDEYNRQIRFEYESIRDFLILHYKATERDDTAFWRQCAAMDIPPGLARKIALFRGNGHLYREADELFTEMAWLQVLIGQHIEPAAHHPLADSISDAQLDGFLGDMRTLIGRATASMPDHARFVADHCHAPG

SEQ ID NO: 85102 - protein, 499 aa, Mycobacterium riyadhense
  REGION 1..499: note = tr|A0A1X2BMZ1|A0A1X2BMZ1_9MYCO Tryptophan halogenase; OS = Mycobacterium riyadhense OX=486698 GN=AWC22_00155 PE=4; SV = 1
MALTNPEEFDVIVVGGGPAGSTLAALTAMQSHRVLVLEKEFFPRYQIGESLLPSTIHGVCRLTGVADELAKANFPRKQGGTFKWGASPEPWAFSFSASPRMAGPTSFAYQVERSKFDEILLNNARRVGAEVREGCVVTDVITADGRVLGVRYTNGDGSPREARARFVIDASGNKSRLYQRVGGTRRYSEFFRNLALFGYFEGGKRMPEPNNNNILCVAFDSGWFWYIPLNETLTSVGAVVQREMAEKVQGDPETALKSLIEECPMISDFLCSAERVTSGQYGKIRVRKDYSYHQTTFWCPGMLLVGDAACFVDPVFSSGVHLATYGALLAARSINSALAGLVDEQTAMNEFEARYRREYSVFYEFLLSFYEMHHSETSYFWQAKKITKNDRPELEAFIELVGGISSGECALTNADALAERFQSQSAEFAGAVDKAGPNGSMVPMLKSSLVRRLMQALFEGSAQEQIQGLLGKDAPRDRPLFPGGLVASRDGMFWLPANQ

SEQ ID NO: 85103 - protein, 523 aa, Maricaulis sp.
  REGION 1..523: note = tr|A0A2D8BTE6|A0A2D8BTE6_9RHOB Uncharacterized protein OS=Maricaulis sp. OX=1486257 GN=CMF74_06850 PE=4; SV = 1
  VARIANT 350: note = Xaa can be any naturally occurring amino acid
MIKTNKIVIVGGGSAGWMTAATLIKVFPNKDITLIESANTPTVGVGESTLGQINSWMGLIGIKDEEFMAATDATYKLSIRFDEFYKKGGGHFHYPFGNPPIEDRRAGINDWWFKKELYPETQYHDFAEKYFPAMALVNNNKITDKLNQLKNWNFQTDTAYHFDATKFGLFLKSHHCLNKGVKYIVGDVTDVNVDDNGVKELLLDGSVPIKADLFIDCTGFKSLLLAGALKEPFESYADFLPNNSAWATKIKYKNAKKEIVPYTNCHAIENGWCWEIPLWHRWGTGYVFSDKYVSDEDALVEFKNHIKWRFPYADPEELEYKKIKMRVGLHERTWVKNVCAIGLSAGFIEXLESNGLYTTHEFLFKLIKTLDRDHVNKFDIDSYNMQNKWIFRNFAEFVGLHYALTGRDDTPYWRACQSRSYASKVMDNLEPTRIVGFSEAGYNKFYRNEFELGGFPLIAAGMRWAPVCKTDAIYNRVWLTEEDHKIMWKKMTENLDKRVEEWESMIKDCPNYYDYIKEKFHND

SEQ ID NO: 85104 - protein, 509 aa, unidentified
  source 1..509: note = Caulobacter radicis
  REGION 1..509: note = tr|A0A2T9JPF3|A0A2T9JPF3_9CAUL Tryptophan halogenase; OS = Caulobacter radicis OX=2172650 GN=DDF62_19925 PE=4 SV=1
MSEAIRDIVVVGGGTAGWMTAAALAQTVGTRRYSITLVESEQIGTVGVGEATIPMILLFNKVLGLDEDVFIRETNATFKLGIEFVDWRRLGHSYFHPFGLYGADMDGVGFQHFWLRWARESGDRNHDGFNAETLAAATGRFMRTPPAPNLPKINYAFQFDAALYAAFLRRYAEARGVVRVEGKIAGVERDGESGQVSRLVLDDGRTIGGDFFVDCSGFRGLLIEETMGAGYDDWSRWLPCNRAAAVPCERAGELTPYTRATAREAGWQWRIPLQHRSGNGYVFCDAFIGEDEAVRLLGERLDGAALADAKILKFTAGRRRKSWIGNVLAIGLSSGFLEPLESTSIHLIQAAIAKLLTLFPKTGFDPFVVDKFNREMALEYEQVRDFIIAHYKVGERDDTPFWRWCRDMVPPDSLAQRLEVFRARGEVLIDQKELFKETNWFAILVGQGLVPDGHHAVADAISSEELRSRMGRIRAAINERVAGMPPHDLYLEKAGLLGAAARAGRRVPA

SEQ ID NO: 85105 - protein, 499 aa, Sphingopyxis sp.
  REGION 1..499: note = tr|A0A1H6GAY4|A0A1H6GAY4_9SPHN Tryptophan halogenase; OS = Sphingopyxis sp. YR583 OX=1881047 GN=SAMN05428974_3947; PE = 4 SV=1
MSDKKPVQRIVIAGGGTAGWMMASAIARTMGKTVDLTLVESEQIGTIGVGESTIPPLVNFNRILGIPEPEFMRATQATFKLGILFDNWKHDGDSYFHSFGLSGKDHWSAGFQHFWLNARERGHQQPYSDYCLELVAGMQGKFAHLPEERMNYAYHVDATLYGRYLRKLAEADGCKRVEGKIARVELDGETGDIAALHLDGDRRIEGDMFVDCTGFRGLLIDGALHAGFEDWSHWLPNDSAIAVQSKHLGPPQPYTQAIAHDAGWQWRIPLQHRMGAGIVYSSGYLSRDAAYDRLMGSVGEPLIEPFDIKFKGGVRRKQWFRNCVAVGLAGGFVEPLEATTVHLIQRAVLRFIRLMPNGRVSERDAQEFNDQQRTDIEQIRDFVVLHYKVTNRRDSPFWRHVANMPVPDSLQQKIELFRETGRVFRKYEELFAENSWVQVMMGQGIEPQSYHPIADKLRDDEVERLFQSIRDNIAQTVATLPEHHAYVARYCGAEEPKAA

SEQ ID NO: 85106 - protein, 504 aa, unidentified
  source 1..504: note = Caulobacter radicis
  REGION 1..504: note = tr|A0A2T9JTI0|A0A2T9JTI0_9CAUL Tryptophan halogenase; OS = Caulobacter radicis OX=2172650 GN=DDF65_04920 PE=4 SV=1
MVDQRIRKVVVVGGGTAGWMAAAAFSRLLVGDAVSVEVVESEAIGTVGVGEATIPTIRNFNQTLGLDEVEFIRATQASFKLGIDFRDWGRVGHRYFHGFGDFGADHEAVQAHQLWRRLKALGDPSGLEDWSLPTAAAALNRFIPPSPDPRSPLHDYAYAYHFDAGLYAAFLRRYAEARGVTRTEGRIVDVALRGEDGFVEAVVLEDGRRVEGDLFVDCSGFRALLIEGALKAGFEDWSRWLPCDRALAVPCRLGGDGLTPYTRSTAREAGWQWRIPLQHRIGNGYVYSSAFVDDERAARTLMENLDGEALDDPRPLRFLAGRRRKFWDRNVVTVGLSGGFLEPLESTSISLIQNGVARLLEFFPDRRCDPLLADEFNRVSAQEYERIRDFIILHYCINQRDEPMWRQVREVELPDSLQAKIALYKARGHVAIHEGDGFGRPSWIAIYNGLGVVPEAYDPLADRIPEAELRKLMEHRRALIRHTAQSMPTQEAFIARHCAAPPLS

SEQ ID NO: 85107 - protein, 505 aa, unidentified
  source 1..505: note = Caulobacter radicis
  REGION 1..505: note = tr|A0A2T9JWW7|A0A2T9JWW7_9CAUL Tryptophan halogenase; OS = Caulobacter radicis OX=2172650 GN=DDF62_15520 PE=4 SV=1
MDRAIGSIAILGGGTAGWMAAAVLSQVLRGTKTTITLVESAEIPTVGVGEATIPPIIDFLRLLEIDQGQFMAATEGSFKLGIRFDDWRVVGERYWHPFGTFGPSVDRRPFHHMWHRLRAAGDDPRVEAYSLATALGDAGRMAFADGQGEGRGQGPLGGMRHALHFDAGLVARFLRTYSEQRGVRRLERRVEGATLKDDGFVEALVLDGGDRLAADLFIDCSGFRGVLIEGALKTGYEDWSAFLPCDRAVAGLTARDANPPPFTQAAARPAGWRWRIPLRHRTGNGYVYSSAHVSDDEALADLEREAGKLLTEPRVLRFTGGRRKAFWNRNVVALGLASGFIEPLESTSIHFVTSGLMKLLDHFPDKDFDGANIADYNKALIAEYEAARDFIVLHYQPTRRDEPFWRERAAAALPPDLAERLALYRGTGRIPHRPTELFTEPSWFYVLEGMGVRPDAYDPLVDLSNLSQVREGLAGWRRRVAEIVQASPLHDAALDVVAGRRRPAA

SEQ ID NO: 85108 - protein, 498 aa, Sphingomonas sp.
  REGION 1..498: note = tr|A0A2K8MJK8|A0A2K8MJK8_9SPHN Tryptophan halogenase; OS = Sphingomonas sp. Cra20 OX=1327635 GN=CVN68_20490 PE=4; SV = 1
MEQIRQILIVGGGSAGWMTAALLARLFQGLYQITLIESEEIGTIGVGEATIPAIKKYNELLGLDENDFLRRTQGTFKLGIQFVDWLRCGSSYIHGFGVIGQDLGWLRCHQYWLKMHGLGRASDFANYSINTAAALADKFRRADPKMAESPIGHIANAFHFDASLYAKFLRGFAEERGVVRREGKVTDVALDPENGFVRSVTMADGAVIEADLFIDCSGFRGLIIEQAMQTGYEEWTQWLPCDRAIAVPCARSDAFTPYTRATARSAGWQWRIPLQHRTGNGHVYSSRYVDDAEAEAMLLANLDGAQLAEPNRIRFVTGKRRKTWNRNCVAIGLAAGFLEPLESTSLHLIQSAVIRMVRLLPDARFDPATIAEFNRQTDFEYERVRDFIILHYKATERDDTPFWRYCRDMEVPDTLRHKIDLFAANGRIFREDEELFAEESWIQVLLGQGVIPRGYDPLVDIKSEPQIEQYLGNVERVIRKCVEVMPTHDDYVANTCPA

SEQ ID NO: 85109 - protein, 526 aa, Rhodanobacter sp.
  REGION 1..526: note = tr|A0A4R8L721|A0A4R8L721_9GAMM Tryptophan halogenase; OS = Rhodanobacter sp. TND4FH1 OX=1907401 GN=BJV57_2627 PE=4; SV = 1
MSRIQKILVVGGGTAGWLTACYLAKTLNSAASASIQVELVESPNIALLGVGEATFPSIRGTLAAIGLDERRFLAGANATFKQGIQYVNWLRPPGTAGADRFFHPFSQPSQRPGSPELLPYWLLGGAPEGTSFADAVTMQQRLIDHGRAPKRATDPDYQGPMNHAYHFDAACFAKVLAEHGQQLGITRHLATVERAELDDSGAIARIVTREIGDLKADLYVDCTGLRGALIGGAMQSPFHSRRDVLFVDRAVALQVPYQQPDAPILPFTRATAQEAGWIWDISLQTRRGIGYVYSSRHADATRAEDIIRRYVGEQAAGLEALHLKFETGYRPEHWRRNCVAVGLAGGFVEPLESTGIALVELGAYLITHLLPGDLDDMERSARHYNQMMVARYERIIDFIKMHYCLSQRRDHAFWIDNADAASIPQTLQDRLALWRHRPPHRLDFVTDLEMFMPASWQYVLYGMEFKTDLEPMRSAYTQMDAAQREFAMIQQMAGHALNDLPDHRALVEQLCREHAQHMERRVAVDA

SEQ ID NO: 85110 - protein, 493 aa, Maricaulis sp.
  REGION 1..493: note = tr|A0A2D8BYA6|A0A2D8BYA6_9RHOB Uncharacterized protein (Fragment) OS=Maricaulis sp. OX=1486257; GN = CMF74_15940 PE=4 SV=1
SILIYKLNPKIKISLIESKEIPIVGVGESTTGTISQLIDDHTHLGGIRNFLKETGATYKYGIRHVDWLRKNHSFVSPIGSSFERWKKYPTEDYDHIRIYHVAEKLNYVIPLQNQLMLQDKLYYVKHGDKYQMMHDLDDGLHIDAFKTSDYFRKKCLSTGRITRIEDTIQSFIKNDLGGVKTLKLKSGKELDADLFIDCSGWHKTLIKDMGVNFVSYENNLLTNRAILFPKKNKENDILKNHLTATARKYGWTFEIPLQERTGRGYIINRHMVSDEDAVKEMNECFNEEIEVKKTINFEVGRLNNFWIKNVLAVGLCSNFIEPLEATGLHTTIEQVEHFCDYYLNDTLDLYDYYLQKNYNDHITSFIDDIRDFILLHYQTKRTDTDFWIESSSKKRWTEEFKRKMYTWKKRMPRKHDYHHKGRLHGLSNALWLQVGHGYEIFDSEIAKKELEYYGLYDIAKQQLNEIGVFSKYCVDNAMTTNDFYKLLNNGKIN

SEQ ID NO: 85111 - protein, 534 aa, unidentified
  source 1..534: note = Dehalococcoidales bacterium
  REGION 1..534: note = tr|A0A2E9M8J4|A0A2E9M8J4_9CHLR Tryptophan halogenase; OS = Dehalococcoidales bacterium OX=2026733 GN=CL877_08920; PE = 4 SV=1
MQTNRVLIVGGGSAGWTAAAYLNATLNVGDQKVADISLVESPNVPRIGVGEATIPNINHTLAAIGIDELDFMKAVDGTFKQSIRYVNWLDNKGEFYHHPFSRFGTGAHDDAGRRWLMSDRSVPFMNTISAQPILCEMGLAPKVFERVDLGIPVGYAFHMDALKFADYLHAFATARGVTDYEDHVISVDMHENGNIAAVNTESGKRLEADLFVDCTGFAAQLIEKKLGVGFTDCSRWLLCDRAVTMNVPHDHYYPGYVRPYTTASALSAGWVWEIPLQTRRSLGYVHSSTHISDDEAERELRAFEGNHSDSLPTRIVDFVVGRREQPWTANCVSIGLSGGFIEPLESTGLYLAQAASALLAEHFPHTDDMAPLAFRFNRIMQDRFYEILDFINMHYCLTRRTDTEFWREVRRPEMINDRLQAKFDYWKIKPPSVSDFIDQFFTGQAGIFPTPGESVGDGRCPIDTGGLWNHHSYEAILYGMDFLRDECNERYGENRPRPFIHKKVIDAVDSARDKLPPHDVWLRRMVGMPDYTKG

SEQ ID NO: 85112 - protein, 507 aa, Brevundimonas subvibrioides
  REGION 1..507: note = tr|A0A258FFW9|A0A258FFW9_9CAUL Tryptophan halogenase; OS = Brevundimonas subvibrioides OX=74313 GN=B7Z01_12735; PE = 4 SV=1
MPEPIKSILIVGGGTAGWMAAAAIKRSVGPHAEVRLVESADIGIVGVGEATVPTIKDFNALIDLDEAEFMRETKATIKLGIEFNGWGKADSAYFHPFGTYGVGPTLGDFPGSYFALKERGKAGSLEAYSICAHAARRGRMGQRSPDPRSALSGFHTAYHFDANLYGQYLRKVCAGRGVERIEGEIVEVVQRPEDGFVDHVVLKDGRTLKADLFIDCTGFRGLLIEGALKAGYEDWSHWLPMNRALAVPCAKVRAVDPYTSSTAREAGWQWRIALQHRTGNGYVYCSDYIDDDAARETLLSNLDGEALADPRPLRFVTGRRKKLWDKNVVSLGLSSGFIEPLESTSIHLVQVGIIRLLQHWPDTGFSQTNTDGYNRRLGREIELIRDFVILHYHATDRDDTPFWRHVRDMPIPDSLIERVEMFRDRGLLFQVGADEYFSQGSWMAVMVGQEILPKTYNPLYAYQNLDQVAAGFEQIRKAWTATVDNLPTHEAFLKQQGMWAGETPAAA

SEQ ID NO: 85113 - protein, 505 aa, unidentified
  source 1..505: note = Caulobacter radicis
  REGION 1..505: note = tr|A0A2T9JQR0|A0A2T9JQR0_9CAUL Tryptophan halogenase; OS = Caulobacter radicis OX=2172650 GN=DDF62_17860 PE=4 SV=1
MSDQRVRSVVVVGGGTAGWMTAAALAKTLSAQGLKITLVESEAIGTVGVGEATIPPILTFNAMLGVDEREFMRATKASFKLGIEFVDWGAIGEMYHHPFGTFGLDLEGIKFHQVWRKFAGLAGPIGDYNLTEAAARRWRFSLPDPDPSKVMSSLRYAYHFDAGLYARFLRGFSEQRGVVRIEGRIGKVDQNGETGFVEAVVLEDGRRVEGDFFVDCTGFRGLVIGQALKVPYQDWGRWLPNNRAVAIGCELGGDGLTPFTRATAREGGWQWRIPLQHRIGNGYVYSSHHVDDQRALDTLLANLDGAPTDEPNFLRFTPGRRERAWEKNVCSIGLSAGFIEPLESTSIHMIQAGITKLLALFPGNGVDPLEIDEYNRLTAEQVDRIRDFVILHFHATRRDDTDYWRYLSSMTVPDSLARRMELFAHRGRWFPSEYDLFHEPNWLAVLLGQGIVPEEWDPLVDSLPDDQVRQRLSHLSALIARTAEAMPDHAQFVARYCGAAQGVAA

SEQ ID NO: 85114 - protein, 506 aa, unidentified
  source 1..506: note = Xanthomonas cannabis
  REGION 1..506: note = tr|A0A0B2C609|A0A0B2C609_9XANT Tryptophan halogenase; OS = Xanthomonas cannabis pv. cannabis OX=1885894; GN = OZ10_19210 PE=4 SV=1
MLPAPLRNIVIVGGGTAGWMAAAAFARVLGPTFNVQLIESDQLGTVGVGEATVPHIKAFNNLLGIDEAEFVRQTQGSFKLGIEFVDWQRPGTSYIHGFGSQIGHPLGLLPFHQYWIKQRARGKAQPLGAYTLNTVAAVRGKFMTSAGDVPANSPLANIAYAYHFDAALYARFLRGFAEARGVTRIEGMVEQVQLHPESGNVVALHLAAGQVIAGDLFIDCSGFRGVLIEDALHTGYHDFTHWLPCDRALAVPCEKVGPPTPYTRCTARAAGWQWRIPLQHRTGNGYVYCSAHISDDEAAATLLANLDGKPLADPRPLRFTTGRRKQCWNRNVVALGLASGFLEPLESTSIHLIQSGISKLLELFPREGISPVLVQRYNDRLAFEFDRIRDFLLLHYHATERDDSTFWRHCRQMPITPELHATLDLFRDSGRFYRNAEEMFAEISWVQVMVGQGIVPTGYHPLVDQVPDRDAEGFLASVAQTIAHCVDVMPTHQQFIDRFCKAPATR

SEQ ID NO: 85115 - protein, 520 aa, Xanthomonas campestris
  REGION 1..520: note = tr|A0A3E1KUM2|A0A3E1KUM2_XANCE Tryptophan 7-halogenase OS=Xanthomonas campestris pv. campestris; OX = 340 GN=D0A42_12785 PE=4 SV=1
MHAPAPSESQRLVRRVVIAGGGTAGWMAAAALSKLLGRQLQITLVESDEIGTVGVGEATIPSLVTFHRLLEIDEAQFMAATQATFKVGIAFEHWRDVDRHYIHSFGHTGTDHWSAGFQHFWLKARARGVARDFGDYCLELRAAQEGRFAHLPNGGMNYAYHLDAGLYARFLRRFSEGFGVQRIEGRIGSVQTDAHSGDIAALVLDDGTRIEGDLFLDCTGFRALLIGQTLGVGSEDWSRWLFADSALAVQTESVGAPVTFTRARADRAGWMWRIPLQHRVGNGIVYSSRYTDQDSAAQVLEHNLQGRALTTPRALRFTPNQRHRVWEKNCVALGLASGFLEPIESTNIHLIQRGIVRLLQTFPQVIDPVDIAEYNRQAAEEIAHIRDFVILHYHATDRRDTAFWRDCASMEIPDSLRHRMELFRQSGRVFHQGNELFAENSWIQVMLGQGIVPRHHHPVADLMGDAELSQFLEGIRQRVEATLARLPPHAEFLRRYCPAPAPPAPMPQPAPGTPLAAPAA

SEQ ID NO: 85116 - protein, 506 aa, Sphingomonas sp.
  REGION 1..506: note = tr|A0A2K8ME08|A0A2K8ME08_9SPHN Tryptophan halogenase; OS = Sphingomonas sp. Cra20 OX=1327635 GN=CVN68_09185 PE=4; SV = 1
MRASDALRKVCIVGGGTAGWIAAALMAHHFKGKLFEIELVESDDIGTIGVGESTIPPFMELIARLEINEQEFVRATQASFKLGIEFEDWRRKGESYFHPFGSIGQPVELSEFYQCWLKARQAGQPFELMDFAPAAAMARNGRFMLPFKAQKTPIGGAAYALHVDAKRVAQFLRAHAEERGVTRTEGMVADVRLDDRGFVDTLVLKDGREVTADFFIDCSGFRALLIEKTLGVGYEDWSQWLFCDRAIAAQTRNVGPPRPYTLAQAQDYGWRWRIPLQHRTGNGHVFCSEFLSDDEATRILLDQVEGEVVAGPMVVPFKTGVRDKIWHRNVLSLGLASGFIEPLESTAIHLVYRGMDFFFRYLPDRNCDPRLAGEYNRRMTADYTEIRDFIVLHYCATQRNDTPFWRKCHDMELPDSLRERIELFRVNGVLREGHDELFRAVSWHSVLEGMGIHPASYHPLVDRIEEGWLFEGMSQVRAQLAQVAGTLPTHQEFIDAHCRAEAVDLR

SEQ ID NO: 85117 - protein, 510 aa, Sphingomonas sp.
  REGION 1..510: note = tr|A0A2K8MC18|A0A2K8MC18_9SPHN Tryptophan halogenase; OS = Sphingomonas sp. Cra20 OX=1327635 GN=CVN68_05135 PE=4; SV = 1
MAEKREVLVVGGGTAGWITAAYLARFFEGRVGVTLLESPEIGIIGVGEGAFPTIRNTLKFLGIDESHFIRAASATFKQGIRFDDWLHAPASDGTRHHYLHPFEAPFQAEASGLVPYWLLQDEATRAPFAEAVTIQNRVAEAQRAPKRSGEGDYAGPLNYAYHFDAARLAEVIAARAVELGVRHLAGRLTHVELAEDGSVAGVVTDAHGALAADLYIDCSGFRAELIGNALGVPLKSVKHLLFTDRALACKIPYDRPDAPIASFTIATAHAAGWTWDIGLQGARGIGCVWSSAHMSDEDAAAVLRDYVGHDAFAARMIPFEPGYREAQWVKNCVAVGLSGGFLEPLESTGVVLIEAAVAMIAELFPLGGPADAPAARFNQLIAARYESIINFLKLHYCLSRRSEPFWRDNADPASIPPALQALLGEWRRRPPSRFDFLLDLESFAFFNYQYILYGMEFRTDLSGSRGDFPAMAAAEKLFARIRGFGERATADLPSHRTLIRQINEGLSLAG

SEQ ID NO: 85118 - protein, 490 aa, Sphingomonas sp.
  REGION 1..490: note = tr|A0A2K8ML05|A0A2K8ML05_9SPHN Tryptophan halogenase; OS = Sphingomonas sp. Cra20 OX=1327635 GN=CVN68_10690 PE=4; SV = 1
MIVVGGGTAGWMAASAIARMLPHAASVELIESAEIGIVGVGEATLPHLRAYLQTLGLDEAEFMAATHATYKLGIEFRDFGKPGDAYLHPFGDFGRPLNDVPFLHWWLRMHALGQGGEIADYCVANVMAAQKRFSPPAADPDALLSAYSYAYQFDATRFGPFLRGFAEARGVKRTEGKIVSVERDGGTGDVVALVLESGTRIEGDLFVDCSGFRSLLLGDALGEAWEDWSHWLPCDRAMALPCASPSGEIEPLTRATAMPAGWRWRIPLQHRVGNGYVYSSAHLSDDAASAAILGAIEGEPLADPRVLRFKAGRRKRSWSHNVIAVGLASGFLEPLESTSIYLVQIAIQQLVDLFPIGGIQAADRDEFNAQVDYEYDRIRDFLILHYHASTRDDSDFWRDVRHMPIPDSLADKIELFRRAGRIQRYSRGLFFAPSWIAVLIGQGVMPQGWDQRVDTANPHELGQALGRLRVQIASDVATLPGHRVALGLQA

SEQ ID NO: 85119 - protein, 500 aa, unidentified
  source 1..500: note = Caulobacter radicis
  REGION 1..500: note = tr|A0A2T9K5Z8|A0A2T9K5Z8_9CAUL Tryptophan halogenase; OS = Caulobacter radicis OX=2172650 GN=DDF62_07125 PE=4 SV=1
MADNRIGRIVIVGGGTAGWMSAAMLARALGPAAKISLVESEAIGTVGVGEASIPQLRNFNAFLGLDEDAFLRATEGTIKLGIEFVDWLRPGHRYMHAFGPVGRPLGTTPFHHYWLDARRRGTAGDDFWAWSANALAARAGRFGRVTPGGAEPLTWAFHFDAALYARHLRTYAEARGVVRVEGRIVGVDQDGDSGFLRAVALEDDRRIEGDLFIDCSGFRGLLIEEALKTGYEDWRRWLPMDSAWAVPSRDDAPPVPYTRAWARDAGWQWRIPLQHRTGNGHVFSSAWTDKDAAARVLMDNLEGEALADPRLLTFVTGRRRKSWNRNVVALGLASGFMEPLESTSIHLVQSGLARLLALFPDQGFDPLLADEFNRQTEQEYACIRDFLVLHYKATQREDTPFWASRKAMEIPETLAARMALFASSGRVFSRDEDLFKESSWVQVLLGQGVTPAAAHPMTAVVADAQVDGWLDDLARIAGRAASSLPSHAAFLARAETRLAG

SEQ ID NO: 85120 - protein, 506 aa, Maricaulis sp.
  REGION 1..506: note = tr|A0A2D8BQY6|A0A2D8BQY6_9RHOB Uncharacterized protein OS=Maricaulis sp. OX=1486257 GN=CMF74_02885 PE=4; SV = 1
  VARIANT 67: note = Xaa can be any naturally occurring amino acid
  VARIANT 71: note = Xaa can be any naturally occurring amino acid
  VARIANT 74: note = Xaa can be any naturally occurring amino acid
  VARIANT 80: note = Xaa can be any naturally occurring amino acid
  VARIANT 209: note = Xaa can be any naturally occurring amino acid
  VARIANT 298: note = Xaa can be any naturally occurring amino acid
  VARIANT 329: note = Xaa can be any naturally occurring amino acid
  VARIANT 333: note = Xaa can be any naturally occurring amino acid
  VARIANT 337: note = Xaa can be any naturally occurring amino acid
  VARIANT 341..342: note = Xaa can be any naturally occurring amino acid
MLKKDIIIVGGGSAGFMVAATLLKQLPESSITLIESPNTPTVGVGESTITGVKLWTKLLGINDKQFXKATXGIXKLSIKXTDFYKKGQSFHYPFGAPVLENNKAMLNDWWFKKILYPETPTSDYAETFYPVMSMIKNHTLDKNSGLPFNFDFDTAYHFDATKFAHWLKEEYCIPRGLKYIQEDIVSHEVDDNGIKSLNGKYSADLFIDXTGFKALLLGDIMKVPFESYNDLLPNDSAIATKIDYTDKERQMVPYTNCTAIENGWVWNIPLWSRIGTGYVYSSKFVDDNTALQQFEKHXNRKVESYKKINIKTGIHEKLWVKNVCAIGLXAGFXEPLXSNGXXTVIKFTLNFLRNVQRGEVSQWDKDNYTYQCKHEFKGFAEFVAMHYAFTHRQDTDYWKHQFNKTWTKSAEDLTPTGYEGLYRLMERRHNNFHFAHEGGTHCVAAGMNFSPTDYPALSFYNQETIMDMKSKWDPLITRLNKRKEYWDETAKKLKSYYQFMKDEIYV

SEQ ID NO: 85121 - protein, 501 aa, unidentified
  source 1..501: note = Sphingomonadaceae bacterium
  REGION 1..501: note = tr|A0A257DNB2|A0A257DNB2_9SPHN Tryptophan halogenase; OS = Sphingomonadaceae bacterium PASS1 OX=2015579; GN = CFE36_01750 PE=4 SV=1
MAIEHIIIVGGGTAGWMAAAALSRIRAGRPVAITLIESEEIGTVGVGEATIPPFLDFNRLLEIDERDMLSMVQGSFKLGIQFVNWGKIGDSYIHPFGNYGYQVDGISFHHVWHKYQQAGDKRPIQVFNVETMAAHFGRFARTEDYQRDDLPPVNYAYHIDAGRYARYLRNYAETRGVVRREGKISDVTLDNESGFVSSVTMEHGDVLKGDLFIDCSGFRGLLIEQALKTGYDDWSNYLPCNRAVALPCMREDGSGPLPYTRATAHSAGWQWQVPLQHRNGNGHVYCNEYMSDDEAHSILVNNIAGKPGAEPNFLRFVTGRRKKFWNKNVVALGLASGFMEPLESTSLHLVNTGINKLIALLSLDGVTQAQEDAFNRLTGKEYARIRDFLILHYNSTTRDDSPFWNYCRNMPVPDSLTEKVELFRQNGQIFREDDELFTETSWAAVMMGQGIKMGGHNAMADAVREPNTRREIDEMEKSIQFVVQHMPSHGEYLNRYCPAPA

SEQ ID NO: 85122 - protein, 512 aa, unidentified
  source 1..512: note = Sphingomonadaceae bacterium
  REGION 1..512: note = tr|A0A257DPI8|A0A257DPI8_9SPHN Tryptophan halogenase; OS = Sphingomonadaceae bacterium PASS1 OX=2015579; GN = CFE36_01640 PE=4 SV=1
MNQSDTAISDIVIVGGGTAGWMAAAAFGRFLNDGHRKITVVESDEIGSVGVGEATIPAILNFNRMLDIAENDFLRETQGTFKLGIEFVNWGKLGDAYFHPFGHYGQDLHGINFHQLYLREYARGDHRSISEYCMSAMAAKSGKFGRASANARSPVSELSYAFHFDASLYAKFLRRHAEANRVVRKEGKIVRVHRRDGDGFVESVELADGTKVAGELFIDCSGFRGLLIGDTLGVGYEDWSHWLPMDRAIAVPTANIGPPVPFTRSTARTAGWQWRIPLQHRTGNGHVYSSQYLDDESAEEMLMANLEGDALAAPRRLSFTTGRRDLSWSHNVVALGLSGGFLEPLESTSIHLIQNGIARLFALFPDKNFNPLERDEYNRGMRDLYLDIRDFIILHYKATQRDDTPFWRYVRDMDIPEQLVRKMELFKTRGRVFRENAELFSMPSWVAVMLGQNVWPEHWDTLADALDEKRVSEAMAQMRRGYAATADALPTHEEFLRKAGAWAAPDSRNAQP

SEQ ID NO: 85123 - protein, 482 aa, Erythrobacter sp.
  REGION 1..482: note = tr|A0A2K1E7I3|A0A2K1E7I3_9SPHN Tryptophan halogenase; OS = Erythrobacter sp. SAORIC-644 OX=1869314 GN=BA950_09355; PE = 4 SV=1
MAAALLARFLPPDYRVELVESEAIGTVGVGEATIPQIRHFNQALGIDEAEFLRETKGSFKLGIAFDGWRGEGHSYMHAFGPVGQSSGLIAFRHYWLRAKALGHAKDLAHYSPNEVAARNLRMPGPGGADLPYAYHFDASLYATFLRHYAETRGAVRTEGTIERVERDGETGDIAALVLDGDRRMEADFFIDCTGFRALLIEGAMEAGFDDWSNLLPCDRALAVPCASGGDFTPYTRAVARKAGWQWRIPLQHRIGNGYVFSSQFCSEADAADTLLANLDGSPDGTPRLLSFTTGKRRRQWIGNCLALGLAAGFMEPLESTSIHLVQSALARFLQLLPAGRSTPSTIDHFNAQADFEWSRVRDFLVLHYWANGREGDPFWDAMRALDLPATLQAKIDQWRDTGHIHREHEELFTEVAWFQVFAGQGVSANHYNPLADAMAEQDLLDFLASQEHALEQAAAAMPHHADTLGRLMARPAKRNTAA

SEQ ID NO: 85124 - protein, 522 aa, unidentified
  source 1..522: note = Xanthomonas cannabis
  REGION 1..522: note = tr|A0A0B2CE48|A0A0B2CE48_9XANT Tryptophan halogenase; OS = Xanthomonas cannabis pv. cannabis OX=1885894; GN = OZ10_12390 PE=4 SV=1
MAHTTSPDPTQRPVRRVVIAGGGTAGWMAAAALSKLLGRQLQITLVESDEIGTVGVGEATIPSLVTFHRLLEIDEATFMAATQATFKLGIAFEHWRDVDRHYIHSFGHTGTDHWSAGFHHFWLKGRQRGVARDFGDYCLELRATQEGRFAHLPNGGMNYAYHLDAGLYARFLRRFSEGFGVQRIEGRIGQVETDPHSGFLTALTLDNGSRVEGDLFIDCTGFAALLIGKTLGVGSDDWSRWLFADSALAVQTESVGPPVTYTRARADQAGWMWRIPLQHRVGNGIVYSSRYTDQDSARAVLERHLQGRALTEPRALRFTPNQRQRVWEKNCVALGLASGFLEPIESTNIHLIQRGIVRLLQTFPQVINAVDIAEYNRQAADEIAHIRDFVILHYHATERRDTPFWRDCAAMDIPDSLRHRMELFRQSGRVFHQGNELFAENSWVQVMLGQGIVPQQHHPVADLMGDAELSHFLESIRQRVDATVAGLPPHAQFLRHHCPAVPLPDPAARTPADVAAMAAPAG

SEQ ID NO: 85125 - protein, 501 aa, unidentified
  source 1..501: note = Sphingorhabdus sp.
  REGION 1..501: note = tr|A0A2D5DGM7|A0A2D5DGM7_9SPHN Tryptophan halogenase; OS = Sphingorhabdus sp. OX=1902408 GN=CMN74_02485 PE=4 SV=1
  VARIANT 41: note = Xaa can be any naturally occurring amino acid
MSVQTIVIVGGGTAGWMTAAALSKLVKPRGLSVTLVESEQXGTVGVGEATIPPFVDFNQLIGVDEAEMLAAAKGSFKLGIQFVNWGKIGDSYLHPFGNYGYEVDGVSFHNVWMRMRAAGDQRPLAYFSPETMAAQFGRFAKTDGDERGDLPPINYAYHLDAGLYARFLRQLAESRGVIRREGKVADVQLNGENGHVRSVTLEDGSVLEGDLFVDCSGFRGLLIEQVLETGYEDWTHWLPCDRAVAIPSSGGGKLPPYTKATAWKAGWQWQVPLQHRNGNGHVYCSAHMSDDEALSILTDNIEGEALAEPNFLRFTTGRRKKFWNRNVVALGLSAGFMEPLESTSIHLINTGISKLIALLSLDDISPMQEQAFNRLTAKEYARIRDFLILHYYATSRDDSDFWNYCRTMSVPDSLTEKIELFRLNGQIFREEDELFAQTSWIAVMMGQGIMPMGYSPMADALDDPGLPAEIDGIDQSIRYRVGQMPEHRAYVDAFCKNARAA

SEQ ID NO: 85126 - protein, 472 aa, unidentified
  source 1..472: note = Planctomycetes bacterium
  REGION 1..472: note = tr|A0A5C6EIS1|A0A5C6EIS1_9BACT Tryptophan halogenase; OS = Planctomycetes bacterium Poly59 OX=2528013; GN = Poly59_42650 PE=4 SV=1
MNEIDVAVIGSGFSGSILARVLASKGMTVAMIDPQMHPRFAIGESSTPIADAILRRLGTRYGLKDLISLSTWGSWQWDHADLDCGRKRGFSYFAHPKGQPFSESHIGERSLLAAASPEDDVADTHWFRADVDHYLCQQATTEGVALAAGFSVASIESSGDQWVLQLSGPDDSPKQLTMRARWVIDASGQSAALARLLGARDMADRLQTQTHSTFTHFHGVPSWQETLQASGIDGSEPFNCDDAAQHHLLGNGWMWMLRFVSGITSVGYTTTVGRPLEWSGYPSIEAMMKPAWLVRPGVGWQQTDRLQRWFDPICAERAIMLPTAALTMDPLHSTGIAHALAGVERVAGIILDDHSANDYATSFHRETMLLDRLVSTAYDVMDDFPRFTAACMLYFAGAIACEERLQKGETPTALWNADDPLFVAATDNACAMIADRSNDKYETQVRETIAPWNTAGLMDPAVNNRYAYTATK

SEQ ID NO: 85127 - protein, 423 aa, Niabella soli
  REGION 1..423: note = tr|W0F275|W0F275_9BACT Tryptophan halogenase; OS = Niabella soli DSM 19437 OX=929713 GN=NIASO_13510 PE=4; SV = 1
MQTEKTDVLVIGAGPAGTVAGAIVNKAGYKVRVVEKMKFPRFVIGESLLPRCMEALEEAELLDSVLEQSFQRKTGAKFVRDGVICDYSFSDQFTDGWDHAYQVTRADFDKALADGLEAKGVPIDYETTVTAIKFNDDGSSVTTITDAQGDEKQIEAKFIIDGSGYGRVIPRLFGLDKPSNLPPRKAVFVHTKDVNRQMDDEPDRITIVVHKPDIWVWIIPFATGITSVGFVGDPAFFEKYSGSPEEIMRSLIADEPYIAERMKGIEYLWEPRVLQSWSATTEKFFGNGFVLTGNVTEFLDPVFSSGVTLATVSSQIAGKLVVRQLQGEKVDWEKEYTEVMMQGVNTFRSYVMGWYDTTLHTIFFAKDQNPDIKKMICSVLAGYVWDTDNTYVREHDTALKKLAKTIKLRDSIEYINNGFKEKG

SEQ ID NO: 85128 - protein, 376 aa, Corallococcus sp.
  REGION 1..376: note = tr|A0A554GMQ9|A0A554GMQ9_9DELT Tryptophan halogenase; OS = Corallococcus sp. Z5C101001 OX=2596829 GN=FOF48_07755; PE = 4 SV=1
MSGAHCDVAVLGGGPAGAGLALALCARTPLSVTLVERAAHDTARVGETLPPHARRPLVKLGAWESFVRDGHLPSRGTASCWGSATVGYHDTLMSPLGPAWHLDRARFDAGLRAQVAERGGGVRTGTSLSGCEALGAWGYRLHLSHPVEGPSTLEARFVVDATGWKAAFATAQGARRRVVDRCFALYGDFHLRAGAAFSTQALVEACPEGWWYSALLPGGHVVVALVGDGESLRGVRPRDPAPWLSLLARTTATRERLEACEFTGEPPRAVPAPVGVLTPVHAAHWLAVGDAACTYDPLSSQGITKALDAALPATEALDQHLRGRPNALAAYEAQVRRGFVEHLRTRDHYYREERRWPDAPFWRNRRESLASAALAA

SEQ ID NO: 85129 - protein, 509 aa, unidentified
  source 1..509: note = Caulobacter radicis
  REGION 1..509: note = tr|A0A2T9IY10|A0A2T9IY10_9CAUL Tryptophan halogenase; OS = Caulobacter radicis OX=2172650 GN=DDF65_23110 PE=4 SV=1
MANNLRKIVIVGGGSAGWITAAMLSHYLKDSPCEIELIESEQIGIIGVGESTIPPFLQLIRSLGIDEKEFMQETQAAFKLAIRFENWRQKDEVYYHPFGLIGGLVDVHEFYQVWLRGKAEGHPSSLQDFAPASVMADRWKFMSPAMAPRTMLANANYAVHIDAALLAKFLRKFAEARGVKRTEGIVKDVATRPDGFIEKVILQDGREASGDLFIDCSGFRSLLNGKTLGTEFLDWSDVLLNDRAIAVQTANIQDPHPYTLAQAQDAGWRWRIPLQHRAGNGYVYCSQYCSDDEALATLMSQVEGEAVRDPWLVPFKTGMRKQLFNKNCVAIGLAGGFIEPLESTALHLIYRGVDYLLRFFPDRDCDPVLAAEYNRRMQVDYEEIRDFIVLHYFTTKRDDTPFWRAYQQVTPPESLRERIELFKASGVLRDGVDDMFRAPSWQSVMEGMGIRPKRYQQLVDTLPAGVVRGLLDKSAPMLSELVDTLPSHGDFLRQHCPAPMPEALLKRAG

SEQ ID NO: 85130 - protein, 505 aa, unidentified
  source 1..505: note = Caulobacter radicis
  REGION 1..505: note = tr|A0A2T9JB79|A0A2T9JB79_9CAUL Tryptophan halogenase; OS = Caulobacter radicis OX=2172650 GN=DDF65_14705 PE=4 SV=1
MDRAIGSIAILGGGTAGWMAAAVLAQVLRGTKTTITLVESAEIPTVGVGEATIPPIIDFLRLLEIDQGQFMAATEGSFKLGIRFDDWRVLGERYWHPFGTFGPSVDRRPFHHMWHRLRAAGDDPRVEAYSLAAALGDAGRMAFADGQGEGRGAGPLGGMRHALHFDAGLVARFLRTYSEQRGVRRLERRVEGATLKDDGFVEALVLDGGERLAADFFIDCSGFRGVLIEGALKTGYEDWSAFLPCDRAVAGLTVRDANPPPFTQAAARPAGWRWRIPLRHRTGNGYVYSSAHVSDEEALADLEREAGKLLTEPRVLKFTGGRRRAFWNRNVVALGLASGFIEPLESTSIHFVTSGLMKLLDHFPDKDFDAANIADYNKALIAEYEAARDFIVLHYQPTRRDEPFWRERAAAALPPDLAERLALYRGTGRIPHRPTELFTEPSWFYVLEGMGVRPDAYDPLVDLSNLSQVREGLAGWRRRVAEIVQASPLHDAALDVVAGRRRPAA

SEQ ID NO: 85131 - protein, 502 aa, unidentified
  source 1..502: note = Caulobacter radicis
  REGION 1..502: note = tr|A0A2T9JPH0|A0A2T9JPH0_9CAUL Tryptophan halogenase; OS = Caulobacter radicis OX=2172650 GN=DDF62_19930 PE=4 SV=1
MSRPVRTVVVVGAGAPLWLTALALRKAFGAGGLVVRAVETAPPTPGLSHAGLPAVGNLHQLLGLSDVELARRCGAVPSLGQRFAGFAGDGSAFLHPYDTHGHAVDYVDFVHHWVLARRRGLKTGLEDFSLGAAAAKQGRIVEGDDPGRLSSPGVGLHVDAMAYAALLRQRALTDGVSVEQGAVTEVEREGERIEALRLEGGAVVAGDLFVDVGDGALIGQMPGAGFEAWSAWLPFDRVLPMAGQRLNTLPAYAHIEAVDGGWVGLYPLQDHTAGLAVYDSQVADAQGMVRRAEGVSPLGWRQGEAMVLKPGMQTRPWIGNCVALGAAAIALDPSDAAPMHALQAGLSHLVTLFPADIDSGPEARAYGAAMAAHGRSLRDFQAMHYHLNRRSGLPWEAARRVEPPADLAYKLRLFGARGVVPTREDEAFQPANWAACLIGHGVIPQAHDPLAEGVSEAEQIQIFQKILGRIAADVGRMRPLEARLAAMAQRPAAQAPAPLRFT

SEQ ID NO: 85132 - protein, 505 aa, Pelomonas sp.
  REGION 1..505: note = tr|A0A5C7UZL5|A0A5C7UZL5_9BURK Tryptophan 7-halogenase OS=Pelomonas sp. OX=1909303 GN=E6Q67_11790; PE = 4 SV=1
MQDTQALVREVVIVGGGTAGWMAAAALSKLLKQQVQITVVESDEIGTVGVGEATIPMIQRFNQVLEIDENEFMRETQATFKLAIEFVNWGRVGDRYMHGFGRIGQTLNTVAFEHYWRKLHLQGRAGDLADYSITRAAALKNRFMRPVADAGNSPLGEIAYAFHFDAGLYARYLRRYAEARGVTRLEGRIVDARLSGLSGRVESLKLADGREVGGQLFIDCSGFRGLLIEQVLRTGFEDWSHWLPCDRAWAVPCESAGPLLPYTRSTAHSAGWQWRIPLQHRTGNGHVFSSSFMAEDEAQRVLMSQLDGRPTAEPRLLKFQTGMRRQAWTRNVVSVGLASGFMEPLESTSIHLVQTAIARLIEFFPTTHWDEADIAEYNRLSRFEYERIRDFLILHYHVNQREDAEFWRHCRHMSIPDTLAAKLALYQSRGRIVREGAELFAEVGWLQVMHGQGLQAQGYHPLADLIAERETEAYLQGVREVIANCVDVMPTHEQFIAQHCAAPRP

SEQ ID NO: 85133 - protein, 517 aa, Cellvibrio sp.
  REGION 1..517: note = tr|A0A1U9NAE2|A0A1U9NAE2_9GAMM Tryptophan halogenase; OS = Cellvibrio sp. PSBB023 OX=1945512 GN=B0D95_11360 PE=4; SV = 1
MSKSVLIVGGGTAGWICAAYMARMLAADTPGGVTITLVESDEIGILGVGEGTFPIIRKTMSRIGLDESELIREADATFKQGIRFNNWKKNPADDPHDTYFHPFQVASQHTDMDLLPYWLLGVAGDVPWAEACTVQERVVDAKLAPKLITHPNYNAPLNYAYHFDAGKLAQVVCRQAMAMGVKRLIDTIDDVKVDENGIASVQGRNHGELKADLYIDCTGFRARLIGEALGSEFTSYKDQLFCNRAVAMQVPYDRPDAPIPSCTYTSAQDAGWIWDIGLHNRRGVGYVYASDYCSDDEALATLKRYIGPAADNLQHRKLAFEAGFRKTQWHKNCIGVGLSVGFIEPLEATGISFAEVAALMLCNLFPWSGDYERSAQQFNQAMTKRFEHVIDFIKLHYYLSERTDTAFWRDNRAPASASDYLKGKLEQWRHRPPSFLDIDASHDIFDENSWQYILYGMGFKTDISARAGALRFYDDAKREFDSIRQQSNKAMAAVPSHRDLINEVVARGFRNASGGQR

SEQ ID NO: 85134 - protein, 498 aa, Xanthomonas campestris; identical to SEQ ID NO: 83595
  REGION 1..498: note = tr|A0A3E1LBZ3|A0A3E1LBZ3_XANCE Tryptophan 7-halogenase OS=Xanthomonas campestris pv. campestris; OX = 340 GN=D0A42_03840 PE=4 SV=1

SEQ ID NO: 85135 - protein, 512 aa, Saccharopolyspora sp.
  REGION 1..512: note = tr|A0A4R4Y863|A0A4R4Y863_9PSEU Tryptophan 7-halogenase OS=Saccharopolyspora sp. 7K502 OX=2530387; GN = E1288_36185 PE=4 SV=1
MLRNVVIVGGGTAGWMTATYLKEALGDQISVTLVESARVPTIGVGEATFSTVRHFFDYLGLAERDWMPACHASYKLAIRFENWREPGHVFYHPFERMAKVQGFTMADWWLKLGGERFDKDCMVIPELVDAKRAPKYSDGELFERSLHDGGDRKRQSTMSDQDTQFPYAYHFDASLLAEFLADFGTRRGIRRVRDDVLEVRQDERGWISHLVTREHGEITGDLFIDCTGFRGLLINQVLEEPFESYQEYLPNNRAVALRVPADVEQTGMRPCTTATAQDSGWIWTIPLSNRIGTGYVYADEFCSPEEAEKTLREFVGPEAADAEANHIRMRIGRNRNSWVRNCVAIGLSSGFVEPLESTGIFFIQHGVEQLVKHFPDANWEPELIASYNRAVARCLDGVRDFLVVHYRCAARADTPYWKATKERPLPPGLDERLEAWSVRLPDHTSVYPYYHGFEPYSYNVMLLGLGGHLPKRSLPALDFLDDTAARAEMARVREESARLVSSLPSQYEYLTS

SEQ ID NO: 85136 - protein, 486 aa, Maricaulis sp.
  REGION 1..486: note = tr|A0A2D8BZV0|A0A2D8BZV0_9RHOB Uncharacterized protein OS=Maricaulis sp. OX=1486257 GN=CMF74_18905 PE=4; SV = 1
MIEDRNIAILGGGNAGWLTALFCKQIFPKSNILVIENENIGPIGVGEATTPHFVDFLRDLNINLRELIKETSATIKNGISFENWNGDQKKYFHGFRETGVLDNFNVEPYFGNNCIDFYYKSLILKKLDLNEFTYPAKLSYNKKVNLNNLNFALHFDAGKMTNYLKRVGVRRGITYVNDNFKKVTCDSDQYINSIVCEKNKYFVDFVFDASGLNRLLIKNHFNVKWNSFRESLPMKKAIPFHLKSKEQINPYTSAIALPHGWMWNVPLQSRIGAGYVFDSNYIDENQAQKEVEEFLNEKVEVRKVIDFESGCFEKFWVNNCMAVGLASSFVEPLESTSLYLTVTQLKLIPFYVNHMFTKNNFGYDQFNSIMLNSMKDIVNFIYLHYCTQREDSLFWKEFKDKTKPPEKFSTLFNRIKNMDMNWMDFPIHEKAMAYFELYNFLQISNGLNHFENFNLKGYEEINPDIEKYKKLIDFTIDDSPFHKEVL

SEQ ID NO: 85137 - protein, 508 aa, unidentified
  source 1..508: note = Sphingomonadaceae bacterium
  REGION 1..508: note = tr|A0A257DPE1|A0A257DPE1_9SPHN Tryptophan halogenase; OS = Sphingomonadaceae bacterium PASS1 OX=2015579; GN = CFE36_01635 PE=4 SV=1
MNDNAIRKMVIVGGGTAGWMTAAAFSRVFGALPGLQIELVESDVIGTVGVGEATIPDICLFNSLLGIDENEFVRQTGATYKLGIEFVDWKRLGHRYIHPFGHYGIDMMGIEFHHFWLKGKGLGDNSLLDAYSMAAVAGKAGRFIRPQANQPNSPLSKFSYAFQFDAGRYAKYLRARAEAQGVKRTEGKITKVEQDNESGFVTAVVLENGTQVTGDLFIDCSGFRSLLIGDTLGVGFEDWTPWLPCDRAVAIPCTHREGGSSEPLTRSTARPAGWQWRIPLQHRIGNGHVYSSMHMSSDEATSLLLANLDGEPLADPNYIRFTAGYRHRAWEKNVVAFGLAGGFLEPLESTSIHLVQAGIARLMTLFPTREFRREGIDRFNRESIEGYSEIRDFLVLHYKATERNDSAFWDYCRTLEPPPGLADKLAMFRSSGRVFRENNELFTETSWLSVMVGQGIEASGYHPAADLLADDETMNRLAHIRSVIQGTADTMPTQSEFLIQQGSAMVKA

SEQ ID NO: 85138 - protein, 507 aa, Porphyrobacter sp.
  REGION 1..507: note = tr|A0A4Y6VZV9|A0A4Y6VZV9_9SPHN Tryptophan 7-halogenase OS=Porphyrobacter sp. YT40 OX=2547601; GN = E2E27_07150 PE=4 SV=1
MDRPEVRKLVIVGGGTAGWITAAAFARLLGERLTIELVESEAIGTVGVGEATIPQIIRLNTILGIDEHEFLRATSGTFKLGIEFVDWGSKGSRYLHTFGETGMVVGNVAFHHHWRRSAGAAGDPKGLWNWSLHQMAADQARFGKLDRVGNTPMAGLAYAYHFDASRYAQFLRAYAEARGVTRTEGIVQSVQRDGESGNICAITLQNGTVVAGDFFIDCTGFRSLLLGEELGVGYQDWSRWLPCDRALAVPSERLPTLVPYTRATAKDAGWQWRIPLQHRTGNGHVYSSGFTSDDAAADTLLTGLDTNALGDPRPIRFTTGRREAFWAHNCAAIGLSSGFLEPLESTSIHLIQSHVSRLIQLFPRAGDPSAMRDEYNRRCAAEFAQIRDFLILHYHRTDREDTEFWRYCKHMAVPDSLTHKLALFAASGRVGRDVDDLFREASWVQVMLGQGIMPADYDPMADRMSEGQLAEFLANLRTLMARAVAGLPTHEQYLARHCPVDAALLAA

SEQ ID NO: 85139 - protein, 441 aa, Actinosynnema mirum
  REGION 1..441: note = tr|C6W874|C6W874_ACTMD Tryptophan halogenase; OS = Actinosynnema mirum (strain ATCC 29888 / DSM 43827 / NBRC 14064 / IMRU 3971) OX=446462 GN=Amir_3184 PE=4 SV=1
MLDAIVMGGGPAGAVCASVLARQGRSVLVLERQEFPRFHIGESMLPYMVGLLERHGLLDAVREQGYVVKRGGEFIDPTGTKFFRAGVFRADFAKTGDGRHHETFQVERSHFDRVNLDQARAAGATVREGAQVVGLLEEGGRVVGVRYREGGVEREERARYVVDATGRAGVVANRFGLRRMIEDLRMVAVFHHRDGLDEAHNPGHEGDIQVGSHADGWIWAIPLSADRISVGTVMHRDRLRGRTPAEAFAEHVERVPRINQRLTGTTATSDFWVETDYSYHSDQVTGPGWVMVGDAGCFGDPMFSGGVLVGMATGAEAAEALGRALDSPADEEQALTGYSNFFKTGYDTYVRLIFSFYEGELLPALAEAHSEAGDLSEADMEMYVVRLLGGDFWSARNPVANALRANPAWSTFSPFEPVHRCPVYPELDVAELGGLAGAVGR

SEQ ID NO: 85140 - protein, 491 aa, Porphyrobacter sp.
  REGION 1..491: note = tr|A0A4Y6W129|A0A4Y6W129_9SPHN Tryptophan 7-halogenase OS=Porphyrobacter sp. YT40 OX=2547601; GN = E2E27_07690 PE=4 SV=1
MSDPREPLRRVVVVGGGQVGVLAAIAMRRALPGCEVLVIGTPPSPAAFADIASTAMPFTNKLHDRLGLDEADIVTRAGGSYRLITRYAGWGGAGQAGALAYGETLAPALKTAFARDWGAVRLPGAGAPPVGSLAQVLAEAGRFAPPPPGEPTPLSAVDYALRWNPAAYRALLIDTAEALGVGYIEGAIDRIEPGEGDTIAAVGLAGGGMIPADLFLDCSGPEASLIAAHPAFAFTDWSASLPTRRVYCSQPGAPMAALEDRITLTGLGWISEIAGRDGVQVMLGTPAHVPREDALALLRLPARAVIALTPGRAERPWIGNIVALGDAAARFEPLGPLHLDLAHRQLALLLEMLPGRAISPFEREEYNRRSGLMMEGVREVLALHFAGIEAQRVFGAVPLPGRVGAVIDQFLRRGRIPFREESPLLGQEQFALLVALGWVPGLPPAAQAADAAGESTARAAFEAEARAALDFAPPYDQWLARALGASRAPAG

SEQ ID NO: 85141 - protein, 502 aa, Rhodanobacter sp.
  REGION 1..502: note = tr|A0A0Q8M9S9|A0A0Q8M9S9_9GAMM Tryptophan halogenase; OS = Rhodanobacter sp. Root179 OX=1736482 GN=ASD82_08200; PE = 4 SV=1
MNDPRIRQVVIVGGGTAGWMTAALLAQALGPQLDIRLVESSEIGIVGVGEATIPQIRHVSQFLGIDEDELLKASRGTIKLAVQFNDWRRIGDSYLHAFSDIGLPLGLAAFQHYWLRGRELDPEAPDLWAYSINAQAANANRFARMDKVGDSPLTGIRYAYHFDAARFGQLLRRHAEQRGVKRTDGKVVDVALRGSDGFIESIRLDSGETIAGDLFIDCSGFRGLLTEGALKTGYDSWQHWLPCDRAVVVASEHGDTLRPYTQASAQQAGWQWRIPLQHLDSNGHVYSSSHLSDDEACATLLSHLEGPMIGEPRQLRFHTGIRKQVWNRNCIAMGLASGFIEPLESTSIHLMQSAVGRLLTMFPDKHFDPALIAEYNRQTRFEYERTRDFIALHYNATERDDTAFWRQCATMALPEGLAHRIELFRQSGHIFRDGEELFTPTGWLQVMIGQGIVPQRHSPLADGLPQAQLGEFLGNIRTLVDRAVASMPGHADFIARHFKAAD

SEQ ID NO: 85142 - protein, 521 aa, Sphingopyxis sp.
  REGION 1..521: note = tr|A0A1H6GDM3|A0A1H6GDM3_9SPHN Tryptophan halogenase; OS = Sphingopyxis sp. YR583 OX=1881047 GN=SAMN05428974_3950; PE = 4 SV=1
MTNKVERVVIVGGGTAGWLAASLIASSRRAKAAPLSITLVEAPDVPIVGVGEGTWPTMRTTLATIGLDEADFLAACDGAFKQASRFDGWVDGSAGDSYLHPFTTPPAVPTGELLAAWQASAPDQPFAAAMSAQAAVCNLHLAPRQRTMPGYQGAANYAYHFAAEKFAALLSAHATKNLGITHILDHVTGARRADNGDIAALTTGSGREVEGDLFIDCTGFKGLLIDGELGVEWIDRSAHAFNDRAIASQVPVPPGSPIASQTIATAHEAGWIWDIGLPSRRGIGCVYSSRFMDAERAEAILRNYIARELPGAVPEEGAFGAPFKHISFRTGHRARFWEKNCISIGLAAGFVEPLEASAIVLIELSLRALTDNFPADRAAMDIHSGRFNKLFRYRWDRIIEFLKLHYVLSRREEPYWRAHRDPGHIPPHLADLLTLWRDQPPSLSDFPYVDEIFSAQSHQYILYGMGFPAPAGWPASERAQAALAEMRQRARTLAAGLPTNRLYLDALAADLAAARQVEGTR

SEQ ID NO: 85143 - protein, 505 aa, unidentified
  source 1..505: note = Xanthomonas cannabis
  REGION 1..505: note = tr|A0A0B2CD12|A0A0B2CD12_9XANT Tryptophan halogenase; OS = Xanthomonas cannabis pv. cannabis OX=1885894; GN = OZ10_14730 PE=4 SV=1
MTQAQIRKVVIAGGGTAGWIAACALSHQFRNLLDITLIESEQIGTVGVGESTVPPIRTFHRFLQIDEQEFLREVAGTFKLSISFEHWLRQGERYIHPFGITGQSTLVCAFHHLWLESQRRGMRSSFGDYCLETVASREDRFALPREPAVNYAYHLDAALYARFLRTRSEACGVQRIEGRIQQVTQHPDSGDVASLVLEDGQAIAGDLFIDCSGFRGLLIEQTLHTGYEDWSHWLPCDRAVAVQTEALGPPVPYTRAIAHEAGWRWHIPLQHRVGNGLVFSSRHLSDDEAHAKLLRDVAAPAVKDPWMVPFRTGRRLKAWNKNVVSLGLASGFIEPLESTSIHLTISAVVRLLTLFPAEGIAPSQVQLFNDVSRAEMEHVRDFVTLHYHATRRAEPLWQQCREMELPESLALRLRAWRERAHAWQAADELFRVDSWTHVLMGQGLMPEQHHPLTRAFSDQDLQGLLNDIAQPIRHAVDQFPSQQAFIERYCQARPEVWGARKPAIA

SEQ ID NO: 85144 - protein, 516 aa, Nostoc sp.
  REGION 1..516: note = tr|A0A318BH26|A0A318BH26_9NOSO Tryptophan halogenase; OS = Nostoc sp. 3335mG OX=2204170 GN=DMC47_11325 PE=4 SV=1
MTRPISSIVIVGGGTAGWLAACLIAARSASGDTPPLSVTLIESPDIPTIGVGEGTWPTMRATLDRIGIAESDFLLACDASFKQGSRFDGWLTGAPGEHYYHPFVAPIDGDPRDVVAAWQSSQADRPFAEAVSAQPLACERDLAPRQRAMPDYAGALNYAYHLDAGKLAALLMRHATSKLGVRHLRDHVTGVDRADNGDISAVRTRSSGSIAGDLFIDCSGHAALLIAGEYGVSFVDRRGELFNDRALALQVPVPADSAVASQTTATAHSAGWIWDIGLPTRRGIGCVYASDFLSDDAAVDTLRDYVARTAPWAAAATLEPRRLSFRSGHRERFWEGNCLAIGLSAGFLEPLEASAIVLIELSLGALIDNFPVTREMMDIHAGRFNTLFRYRWDRIVEFLKLHYVLSHRDEPYWRAHRDPASIPDRLTELLQVWRHQPPSHHDLSMIDEIFPAASYQYVLYGMAFPPPVAGTRTPRSGNADAALRQVEHRARALASSLPDNRAYLSALRAAALQETI

SEQ ID NO: 85145 - protein, 518 aa, Roseateles sp.
  REGION 1..518: note = tr|A0A1H7T508|A0A1H7T508_9BURK Tryptophan halogenase; OS = Roseateles sp. YR242 OX=1855305 GN=SAMN05216359_11739; PE = 4 SV=1
MKAIDDILIVGGGTAGWLTAAFLAQQLGTAHGGVRITLVESSDIGIIGVGEGTFPSIRGTLSAIGIPEARFLQACSATFKQGVRFNHWVRPPGAEGSDHYFHPFSLPSQRPGAPELLPYWLMGEAGPERAFAEAVTLQKAVVEARHGPKRVTDGDYLGPLNYAYHFDAGRFAGLLAEQAQVLGVQRLIATVDRVDLDEQGAIAAVHTREAGVLRAGLYVDCSGFHARLIGEALGSPFTSLNDVLFVDRALAMQVPYDRPDAPIASCTLSTAQENGWIWDIGLQERRGIGHVYSSRHTDDDAAERELRRYIGSAAEALSPRKLTLNVGYRETQWVKNCVAVGLSGGFLEPLESSGIGLIETAAYLIAQLFPFDGDTAPVARHFNRFMADRYARIVDFIKMHYGLTQRRDTAFWRDNADPASFPDSLRDKLAMWRHRPPQRLDFITDVEMYLPASWQYVLYGMEYDTLLQGARHAWRRADEARREFSTIAQLGAHAVRDMPRHRDLIDQMLNRAGLKMAA

SEQ ID NO: 85146 - protein, 493 aa, Cellvibrio sp.
  REGION 1..493: note = tr|A0A1U9N8R1|A0A1U9N8R1_9GAMM Tryptophan halogenase; OS = Cellvibrio sp. PSBB023 OX=1945512 GN=B0D95_07915 PE=4; SV = 1
MQPIKKLVIIGGGTAGWLAAAAVGKIYQGQVSVTLIESDAIGVVGVGEATIPTMLAFHKLIGIPEVEMMRATHATFKLGINFKDWGEIGEDYIHSFGQVGRIFWAGEFQHFWARAKKNGLNIPFGAYCLEHEAARAEKFSISENPALNYAFHFDAGLYAKFLRKFSEGLGVVRHEGKIERVEQDVESGFVQRLHLDSGLTIDADFFIDCSGFRGLLIEETLKTGYENWQHWLPCDSALAVQTAKVKPATPYTTSTAREFGWQWRIPLQNRTGNGLVYSSQYADRIWAEKTLTENLEGEMLTAPRLIQFTTGRRKLGWHKNCVALGLASGFLEPLESTSIHMVTSGLIRFLRLFPLRGVQRVLVDEYNRQSKEEAESIRDFIILHYHATRRNDTEFWRHVRTMPVPDSLRHRIDMFTQSGMVFLGGDELFRTNGWTQVLIGQGFTPENYQPIVDNMSDMEFRAYMTGFRDHVANNISRLPGHEEFIAQYCAMEK

SEQ ID NO: 85147 - protein, 514 aa, unidentified
  source 1..514: note = Deltaproteobacteria bacterium
  REGION 1..514: note = tr|A0A355Q2P4|A0A355Q2P4_9DELT Uncharacterized protein OS=Deltaproteobacteria bacterium OX=2026735; GN = DDZ97_01525 PE=4 SV=1
MTDNSSIFEKKIVVLGGGTAGWLSAFLLQDFCRQHELSAKVTVIESSKIPVIGVGEGTTAIFKTFLDSFGLEEAEFLSETRGTIKYGIRHKDWRKLGHHYDGPIDDPHFLIPPAGEDGFEYLNSYCVAAGRSVSEAHLFQILLSKGLAPVKTQKDQLVPNHPFLHAYHIDNALVGQYLRKKSKGIRIVDGVVEEALRNSETGHITSLKMDDGDLIEGDFFIDCSGFRRILIEKTLGNEWVDYSAELPVNRAMPFFLDLDTSKEIPAYTLAWAQKSGWMWQIPTQDRLGCGYVYCDKYCSPEEAQEEIESVLGHPIEPRQDLRFQVGRLQDSWQSNCVAVGLSAGFLEPLEATSIHSTLVQLILFAKEYLSAALNGDYSGRKDFNQRIAHQFDDFRTFLNIHYRSERRDTPFWEFVHQECLGEESIGRLERWQKSLPKREHFEGFLSGLPHVETQLYFPVLDGLGLLSQGAARQEMSNRNLKRQAQEELKQLHSKYLEMIQGSLGHREYLSKVSA

SEQ ID NO: 85148 - protein, 489 aa, Nostoc sp.
  REGION 1..489: note = tr|A0A318B5M7|A0A318B5M7_9NOSO Tryptophan halogenase; OS = Nostoc sp. 3335mG OX=2204170 GN=DMC47_21590 PE=4 SV=1
MAAAALTKLIPTGVSVTLIESDAIGTVGVGEATIPPIRSFNALLGIDEADFLSKTQGSIKLGIEFVDWTREGHRYAHPFGEFGFDIEGVKFHHYWRKLVERGEASGIEDYNLCAAAMRAGRFIPPVTDPHDARSRLTYAYHFDAGLYARYLRSYAEARGVERVEGRIVDVALNGHSGVIESVALEGDRRITGELWIDCSGFRGLLIADALKTGWVSWRHWLQCDRAVAVPCAAAGAEITPYTRSTAREAGWQWRIPLQHRTGNGYVYCSDDIGDDAARQTLLATLDGAPLRDPQLIRFEAGRREAMWAKNCVALGLASGFIEPLESTSIHLIQSGISKLLALFPDRGFSPVERDEYNRLSILQLEQVRDFVILHYHANRRRTGDLWRRMREMAVPETLARKIDLFRGRGRFFRYEDELFAESSWVAVLLGQGIMPAGWDPLVDAIDSAAVRDRLERIRAAFARATDAMPPHHLWLARTAAARPDLKVPA

SEQ ID NO: 85149 - protein, 501 aa, Nostoc sp.
  REGION 1..501: note = tr|A0A318ALB4|A0A318ALB4_9NOSO Tryptophan halogenase; OS = Nostoc sp. 3335mG OX=2204170 GN=DMC47_43400 PE=4 SV=1
MSDTRIRRIVILGGGTAGWMTAAALSRALTGQQIAITLIESDAIGTIGVGEATIPTIHWFNQIVGLDETQFMAETKATVKLGIEFVGWNGPGSNYLHPFGTYGPPGDGVMFLHRLIRGRLDGDTTPSEAYSLTAQIARAARFTRPVSDPRSLLSTLGYAYHFDAGLYARYLRGIAEKAGVTRIEGKVSRIDRAPDTGFVTALATDTGAEVAGDLFIDCSGLRGLLIEETMGSGFDDWTHWLPCDRAWAAPSAVESQVTAFTRATAAEAGWRWRIPLQHRVGNGYVFSSRFQSEDEARASLIAGMDGPPSAEPRLIRFTPGARKRPWMGNVVAIGLSGGFLEPLESTSIHLIQSGIAKLLALFPARDCSPLLADQYNRVFGQEMQDVRDFLILHYHRTAGRTEPMWRERQAMDIPETLARKIAHFEQSGRIVLSTDELFRDASWFAVLDGQGVIPRGYNPMIDGAGGADNLRHLEAVRNAIRDSTGKIPTIPPRPGQDARAV

SEQ ID NO: 85150 - protein, 502 aa, Cellvibrio sp.
  REGION 1..502: note = tr|A0A1U9NB76|A0A1U9NB76_9GAMM Tryptophan halogenase; OS = Cellvibrio sp. PSBB023 OX=1945512 GN=B0D95_12915 PE=4; SV = 1
MKANAIHKVVIVGGGTAGWMTAAALSKILGKTLDISLVESDEISTVGVGEATVPPLINFHGLLGIKEQEFMSACQGTIKLGISFEHWKEQDDKYIHAFGKTGKDHWAAGFWHCWLKGLRNGIGDGYGDYCVEHLAARAGKFAILPRSRDGHNYQVNYAYHFDAALYAKFLRKIAENSGVKRAEGKITHVTTNADTGFIESVSLASGQLIEGDLFIDCSGFAALLIEQTLHTGYEDWSHWLPCDRAVAVQTTLVGPPVPYTRAIARDFGWQWRIPLQHREGSGLVYCSRYLSDDDAKKTLLQNVDGDPFFEPRVIKFRSGQRLKHWNKNCVALGLASGFIEPLESTSIHLVQQGILRLVSLFPSGGIQQFDIDEFNAQTKIETNNVRDFIILHYNTTQRTDTPFWRYCRNMTVPDSLKHKLELFRESGKIFKVPGELFGENNWVQVLLGQGIMPKQYHQIVDMMSDEELAAFLYGIKMSAQNLVKQLPSHSDFLESYCKASNM

SEQ ID NO: 85151 - protein, 504 aa, unidentified
  source 1..504: note = Metallibacterium scheffleri
  REGION 1..504: note = tr|A0A4S3KRY7|A0A4S3KRY7_9GAMM Tryptophan halogenase; OS = Metallibacterium scheffleri OX=993689 GN=B1806_02040; PE = 4 SV=1
MPTLQPVKNIVIVGGGTAGWMAAAACAKVLGAGYAVQLIESEEIGTIGVGEATVPHLKLFNNLLEIDEVEFVKTVKGTFKLGIQFNDWGRLGDSYIHGFGKLGTDISLLPFHQFWIKARQRGWAGPLGDYSINTAAAPRGKFMPSASDVPASSPLADIRYAYHFDASLYARYLRGYAEARGVRRTEGKIKHVQLRGEDGYVESVTLENGSVIGGDLFIDCSGFRGLLIEQALHTGYTDYSQWLRCDRAVAVGCEKVGPPTPYTRVTARTAGWQWRIPLQHRTGNGHVYSSALISDDEAAATLLANLDGKPMGEPRFLRFTPGMRKKFWNKNVVALGLASGFLEPLESTSIFLIQSGIARLLSLLPWNDFSEVVIDEYNAQLGFELERIRDFLILHYHATQRDDAPLWRECARMSIPDGLAHKMRLFADSGRFFRECEEMFGDLSWVQVLIGQNILPRTYHPLVEQMPDDQLRQFVQGVAQVIESCTGMMPPHQTFIDRRCAAPA

SEQ ID NO: 85152 - protein, 514 aa, unidentified
  source 1..514: note = Deltaproteobacteria bacterium
  REGION 1..514: note = tr|A0A3D5JA77|A0A3D5JA77_9DELT Uncharacterized protein OS=Deltaproteobacteria bacterium OX=2026735; GN = DGB85_04250 PE=4 SV=1
MSDNSSSSEKKIIVLGGGTAGWLSAFLLQDFCRQHQLSAEVTVIESSKIPVIGVGEGTTAIFKTFLDSFGLEEAEFLRETRGTIKYGIRHKDWRKLGHYYDGPIDDPHFLIPPAGEDGFEYLNSYCVAAGRSVTEAHLFQILLSNGLAPIKAKKNQLVPNHPFLHAYHIDNALVGQYLLKKSKGIRIVDGVVEDALRDSETGHVLSLKMDDGDIIEGDFFIDCSGFRRILIDKTLGNEWVDYSAELPVNRAMPFFLAHDRSKEIPSYTLAWAQKSGWMWQIPTQDRLGCGYVYSDEYCNPEEAQEEIESVLGHSIEPRQDLRFQVGRLKDSWRSNCVAVGLSAGFLEPLEATSIHSTLVQLILFAKEYLSAALNGDYSGREDFNQRIAHQFDDFKTFLNIHYRSERRDTPFWEFVGEECLGNDSKELLEKWRKSLPTRQDFNQFLSGLPHVETQLYFPVLDGLGLLSQGVARQEMSNRNLKRQAQEELKQLHNKYLEMTQGSLGHREYLSRVIA

SEQ ID NO: 85153 - protein, 531 aa, Rhodanobacter sp.
  REGION 1..531: note = tr|A0A1V3Q688|A0A1V3Q688_9GAMM Tryptophan halogenase; OS = Rhodanobacter sp. C03 OX=1945858 GN=B0E48_03650 PE=4; SV = 1
MPRLKKVLVVGGGTAGWLAACYLAKAMNAVHPDSVQVHLVESDHIGLLGVGEATFPSIRGTLAAIGLDERRFLVEATATYKQGIHYRHWVRSPGTPGSDHFFHPFSQPSQRPGGPELLPYWLLGAAPAGVSFADAVTMQSTLVDHGRGPRRPTDPDYQGPMNHAFHFDAACFAKVLAEHGQETLGVKRHVATVERAVLDEQGAIACVVTKELGELTADLYVDCTGLRSALIGGIMQSPFHSRRDVLFADRAVAMQVLYAKPDAPIPPYTISTAQEAGWIWDIGLQKRRGVGYVYSSRHTDAERAEEVFRRYLGAAGEGLTAMHIKFETGYRPEHWRKNCVAVGLAGGFVEPLESTGIALIELATYLLTHLLPGDTDNMESAARHFNEMMVARYDRIIDFIKMHYCLSQRRDSPFWIDNCDAASIPQTLQEKLAKWKLRPPHRLDFVGDLEMFMTASWQYVLYGMEFQTDLESMRSAYPHMEAARREFAMIRQAAARALDDLPDHRALVEQLCREHMQRIRPDADMAASASG

SEQ ID NO: 85154 - protein, 502 aa, unidentified
  source 1..502: note = Sphingorhabdus sp.
  REGION 1..502: note = tr|A0A2D5DLG3|A0A2D5DLG3_9SPHN Tryptophan halogenase; OS = Sphingorhabdus sp. OX=1902408 GN=CMN74_11395 PE=4 SV=1
MRERLEKLVIAGGGTAGWMAAAALARFAPPGSRIELVESEAIGTVGVGEATIPQIHLFNGALGMDEAEFLRETKGSFKLGIEFDGWLREGESYMHAFGNIGRGVGLLPFQHYWLRAKKLGIAKPLQRYSLNELAARTMRMQRGRPAPNLPEMPYAYHFDAGLYAAFLRRYAEARGVVRHEGRIASVERDGESGAVTALALDDDRRIEGDFFLDCTGFRALLIGEALGSPFEDWKHHLPCDRAVAVPCANGGEFTPYTRSIARKAGWQWRIPLQHRIGNGMVYSSDHLSDDEAAETLLANLDGAPQGDPRPIRFRTGMRREQWSHNCLAIGLAAGFMEPLESTSIHLIQSAISRFLSVMPNDAPDPAIVDWFNAQASFEWTRIRDFLVLHYVANERRGEPFWDAVRAQELPETLAAKIDQWKATGFIHREHEELFTEVGWFQVFAGQGVEARSYNPVADALPEKDLRALLGETEAALVEQVRPMDHHIDFLARMIRAGQGTPS

SEQ ID NO: 85155 - protein, 501 aa, Nostoc sp.
  REGION 1..501: note = tr|A0A318BKY3|A0A318BKY3_9NOSO Tryptophan halogenase; OS = Nostoc sp. 3335mG OX=2204170 GN=DMC47_12050 PE=4 SV=1
MNDARIRRIVIVGGGTAGWMAAATFARLLGPEYCEIALVESDAIGTVGVGEATIPQMATFNRMLGIDEAEFLRETRGSFKLGIEFVDWARIGHRYFHPFGSYGINMNGISFHAYWLRLHAMGEAPAIEPWSLQAMASAQGKFMRSIDAGNSPLSDIAYAYHFDAALYAGYLRRYAEARGVVRHEGRIDRVDLDGENGFVEAVVLEDGRRIEGDLFIDCSGFRGLLIERTLGAKFIDWSHWLPCDRAVAVPCAGSEAMAPFTRATARRAGWQWRIPLQHRIGNGHVFSSTHMSDDEATAILLDNLDGEPLGDPRFVPFRAGHRDRMWIGNCVAIGLSSGFLEPLESTSIWLIQSGLSRLMAMFPDRQFRSAEIERYNRILSTEYAEIRDFIILHYHATERDDSPFWRHCRTMEVPERLSEKMRVFRSHGRTFRENEELFNDTSWFAVMNGQGMRPAGYDPIAETLSLDETRARLAHIRDAIQASADYMPTHRAFLNEYCGVR

SEQ ID NO: 85156 - protein, 513 aa, Sphingomonas sp.
  REGION 1..513: note = tr|A0A4R1U8U4|A0A4R1U8U4_9SPHN Tryptophan halogenase; OS = Sphingomonas sp. PP-CC-3G-468 OX=2135656; GN = C8J41_101784 PE=4 SV=1
MHEIQNIVIVGGGTAGWLTAGVIAAKHQARRQHGFTVTLVESPNVPTIGVGEGTWPTLRSTLKKMGVSETELFRQCDASFKQGARFNRWTTGAPDDGYYHPLMLPQHFGQVNLAPHWLADEGSATFCDTVTPQGRICDEGLGPKTIATPEYDGHANYAYHLDAGKFSHFLQRNCCDTLGVRHVKADVTEVHLDDSGDIATLDTEQGVSIAGDLFIDCTGFAALLIGGAMKVPFRSCTDVLFCDTALAMQVPYDQPDAPIASHTISTAQSAGWIWDIGLPTRRGVGHVFSSSHISADAAEQELRDYIGPAARDLTARRLAIRAGHREQFWVRNCVAVGLAAGFLEPLEASAIVLIELSAKMIAEQMPACREVMDVVAHRFNDTAHYRWGRIIDFLKLHYALTKRTDTAFWRDNVRPESIPDRLAGLMELWRFQSPWVHDEFDRAEEVFPSASYQYVLYGMGARTAVMPGSIDDDVALARRARHDNQVQTQRLVSSLPGHRELIDRIKRHGLQPI

SEQ ID NO: 85157 - protein, 495 aa, Cellvibrio sp.
  REGION 1..495: note = tr|A0A1U9NAK8|A0A1U9NAK8_9GAMM Tryptophan halogenase; OS = Cellvibrio sp. PSBB023 OX=1945512 GN=B0D95_10445 PE=4; SV = 1
MSSKPVSHIVIAGGGTAGWMTAAYLANWLGNTNIRVTLVESELIGTVGVGEATVPGIHQFIKDLNIRESEFIKATNATFKLGIEFENWVAPNQSFFHPFAGYGVPIEDRPFHKTWWAAKQQGYSAALAEFCLCTQLAKAGRFAQPSFDPDSRLAWYNYAYHFDATLFAKYLRGYAEARRVKRIEGKINQVQLDPDSGFIHSLHLESGEQISGDLFVDCSGISALLIGKTLGVGYEDWSQWLLSDSALAVQTQSVAEPDPFTRSTARTAGWQWHIPLQHRVGNGYVFSSQFITEDQARAELRANLRGERVTEPRLIRFTTGMRQDFWHKNCVAIGLSSGFLEPLESTSISLIQTGINKLVAFLVDYEIQEKQVAEANRLNRLEYERIRDFIILHYKLNGRTEPLWQHVRDMEIPATLEEKIATFKAFGDIQLLEIESFTEHSWISMFAGFAVNPTGLTPSPEPGKMQAVMDKMRAAVGKGRDYAPSHAEFLQTLES

SEQ ID NO: 85158 - protein, 493 aa, unidentified
  source 1..493: note = Verrucomicrobia bacterium
  REGION 1..493: note = tr|A0A1Z8TLN5|A0A1Z8TLN5_9BACT Uncharacterized protein OS=Verrucomicrobia bacterium TMED56 OX=1986792; GN = CBC16_10720 PE=4 SV=1
MSSKNKKLIVLGGGTAGWLTALFLNKIFPKYETTLIESKQVGIIGVGEATTPNIIYMLDYLNINLSELISETKGSIKNGINFENWNGDGKKYFHGFYERLADFSVPPIFKGDCWNHYLNNLISKKLDFNTHTYITKLSYENKVDVHKTSYALHFDTNLLSEYLHKTGVDRGIKYVNGKLKKVHSSNLNDNINKITLTNNKSYSCDFIFDCSGFSRLLIGKHFGVKWKSYKQHLPMKKAIPFWLKQTGNIQPYTTALAMKYGWIWKIPLQHRIGSGYIFDSNYINDDQALKEAEKTLNTKLEVNKIIDFEAGRYESFWHENCIALGLASSFIEPLESTSIFLTIQQLFNLNHFLGDMFKENKNSKALYNEMSNKNMDETLNFVYLHYLTKRNDSPFWKNFRKDYPPPTNFRHVLSLIRSGNLRFLDIEEVKKTAAFPISSYLMVAYGLGLFNKKPNMIYYKNIVPTISQYLDAIKQATDQATPLNIFLDHVNYK

SEQ ID NO: 85159 - protein, 532 aa, Aquimonas voraii
  REGION 1..532: note = tr|A0A1G6VKQ9|A0A1G6VKQ9_9GAMM Tryptophan halogenase; OS = Aquimonas voraii OX=265719 GN=SAMN04488509_103142 PE=4; SV = 1
MADEARRIRRVVIAGGGTAGWVAACALSHQFRDLLDITLVESEQIGTIGVGESTIPTVRTFHRLLQIDEREFMRATAACFKLSIKFSDWGREGETYIHPFGRTGLGTWACEFHHFWLESLRRGQRSDLADYCLEAAASRADRFALTGAAQGSAASWSTRWELAQSGPGQGELSYAYHLDAAQYAAFLRRRAEQQGLVRVEGKIREARQHPVSGDVAALVLDSGQVIEGDLFIDCTGFRGLLIEQTLKTGYEDWTHWLPCDRAVAMQTESVGPAAPYTQASAHSAGWRWQIPLQHRVGNGWVFCSRYMSDDEASARLRAATQGAALRPPMVLPFVTGRRRQVWNRNVVALGLSSGFIEPLESTSIHLALSGVARLIHMFPFAGIDDSLVRRYNEASRAEAEHVRDFIILHYHANQRDEPMWRECRAMGLPDSLAQRIALFRDRAHAWQGEDELFRVDSWTHVMLGQGITPRAHHPLSRALPDADLAQLLAAIRQPIQRRVDSMPSHQAFLERYCPAERPPEMRTRPSAVLKNA

SEQ ID NO: 85160 - protein, 495 aa, Pseudoalteromonas sp.
  REGION 1..495: note = tr|G7G5P8|G7G5P8_9GAMM FADH2 O2-dependent halogenase I OS=Pseudoalteromonas sp. BSi20495 OX=386429 GN=prnA PE=4; SV = 1
MTKTNAVKNVVIAGGGTAGWMAAAALAKLVGNNINITLVESDDIGTVGVGEATIPPIRTFHKLLGINEQAFMKATQASFKLGISFENWGDENTHYIHSFGATGKECWAGEFHHFWLQGKALGINNPFGDYCYELQAAKAGKFAFNQQNPINYAYHMDATRYAQFLREFSEPLGVTRIEGKIQKVVKNTKTGHIESLILNNGEHINGDFFIDCTGFRGLLIEQALHTGYEDWSHLLPCNSAIAVQTKSTSETVLPLTRSIAHKSGWQWRIPLQNRIGNGLVYCSQYMDDEQAKALLLNNIEGEPLTEPRIIKFKTGRRLKGWNKNCLALGLASGFVEPLESTSIHLIMSGIIRFMRLFPFNGITNHAIDEYNKQLKSEIENIRDFIVLHYKVTNRDDSEFWQHCSAMEVPKTLQHKTDLFKQTGRVFLDDGDIFRVDSWVQVMLGQGIEPNQHHLIASMMSDEELARFLHGIKQQIEQRVSQLPPHHEFLKQYCPA

SEQ ID NO: 85161 - protein, 510 aa, Sphingomonas sp.
  REGION 1..510: note = tr|A0A430EFJ3|A0A430EFJ3_9SPHN Tryptophan 7-halogenase OS=Sphingomonas sp. ABOLE OX=1985878; GN = CA234_17250 PE=4 SV=1
MRDDHLRRIVIVGGGTAGWMAAAALGKLVGTLPGLQIALVESDAIGTVGVGEATIPHINLFNRMLGIDEAAFVRETRATYKLGIEFVDWLRLGTRYVHPFGVYGLDMLGVEFHHFWLKARTLGDTTPLDAYSIGIAAARRGRFAHPRPDQPHSPLARLGYAFQFDAGLYAGFLRRLAEGLGVHRTEGRIVEVRRDGESGHVAAVRLESGAEVAGDLFVDCSGFRGLLIEQTMGASFCDWTHWLPCDRAVAVPCAPGGERLPLTRATARAAGWQWRIPLQHRTGNGYVYAGEHLSDDEATATLLANLDGPALAEPRALRFRAGHRDRAWIGNVVALGLAGGFLEPLESTSIHLIQSGIGRLMALFPSRGFDAPEIDRFNRETAQEYADIRDFLILHYKATERDDTAFWRRCRDLAPPESLAERIALFRRNGRILHEQRELFQAPSWLAVMTGQGIAPAGYHPVADLLSDAETRERLNHIAQVIEETANTMPLHDDYLRQIGCALPQLRRAS

SEQ ID NO: 85162 - protein, 497 aa, unidentified
  source 1..497: note = Frankia casuarinae
  REGION 1..497: note = tr|A0A1X1PSN6|A0A1X1PSN6_FRACC Tryptophan halogenase; OS = Frankia casuarinae (strain DSM 45818 / CECT 9043 / CcI3) OX=106370 GN=UK99_18975 PE=4 SV=1
  VARIANT 344: note = Xaa can be any naturally occurring amino acid
  VARIANT 373: note = Xaa can be any naturally occurring amino acid
MAVTDSAEFDVVVVGGGPAGSTLAALVAMQGHRVLVLEKEHFPRYQIGESLLPSTIHGVCRLTGAADELAKAGFPLKRGGTFRWGATPEPWTFAFSVSSRMAGPTSFAYQVERSKFDEILLRNARRVGAEVHEGCSATDVIEDGDRVVGIRYTDDGGNRREARASFVVDATGNKSRIYHRVGGTRQYSEFFRSLALFGYFEGGRRMPEPNRNNILCVAFDSGWFWYIPLSDTLTSVGAVVRSEMAEKVQGDSEQAMKALIEECPMISDYLAPARRVTTGQYGQLRVRKDYSYHQTTFWRPGMVLVGDAACFVDPVFSSGVHLATYSALLAARSINSVLAEIVDXKTAMQEFEARYRREYGVFYEFLVSFYEMXHSEDSYFWQAKKVTGNSQPELEAFVELIGGVSSGESALTDADALALRLQANTADFTTAVDALVANNSESMVPFMKSQVIRGVMHEGSQMQMRALLGEDAEPETPLFPGGLVSSADGMFWLPTDA

SEQ ID NO: 85163 - protein, 516 aa, unidentified
  source 1..516: note = Caulobacterales bacterium
  REGION 1..516: note = tr|A0A1F8IMT8|A0A1F8IMT8_9PROT Tryptophan halogenase; OS = Caulobacterales bacterium RIFOXYB1_FULL_67_16; OX = 1797588 GN=A2352_07610 PE=4 SV=1
MDQPRRPLKKICIVGGGTAGWIAAALMAEHFKGRMAEVELVESDDIGTIGVGESTVPPFLEMLKKLGINEQDFIQQTQASFKLGIQFDDWTEKGESYFHPFGAIGVPVDVSDFYPVWLKARMNGYQRPLMDFASAARMAAHERFMLPFKAQRSPIGGASYAVHVDAKRVARYLRDFAEARAVKRTEGIVEEVMTRPDGFVSGLKLKSGQTVEADFFIDCTGFRALLIGKTLGVGYTDWSEWLMCDRAIAVQTENVGAPKPYTLAQAQDCGWRWRIPLQHRTGNGHVFCSRYMSDDEATARLLAQVEGRPVVNPMVVPFKTGVREKIWDRNVLSLGLASGFIEPLESTAIHLIYRGMDFFFRLMPDLDCDPKLATEYNRRMTVDYEEIRDFIILHYALTRRDDTPFWRACRDMALPEGLQHKLDVFRANGSLVEALDPLFRNVSWYAVMDGMGVTPRSYPPLVDRIDFAGLTAEMDRAADILNAFVKDLPSHQQFLQDNCPAPPVDLAPVALAAVPA

SEQ ID NO: 85164 - protein, 506 aa, Brevundimonas sp.; identical to SEQ ID NO: 84084
  REGION 1..506: note = tr|A0A069ITM8|A0A069ITM8_9CAUL Tryptophan halogenase; OS = Brevundimonas sp. EAKA OX=1495854 GN=ER13_11120 PE=4; SV = 1

SEQ ID NO: 85165 - protein, 500 aa, Cellvibrio sp.
  REGION 1..500: note = tr|A0A3D4PYB4|A0A3D4PYB4_9GAMM Tryptophan halogenase; OS = Cellvibrio sp. OX=1965322 GN=DIW64_04045 PE=4 SV=1
MTEHTAVNSIRKIVIAGGGTSGWLAAAAISKVLGKNLDITLIESPEIGRIGVGEATIPTLRVFHKLLGINERELMAHVQGTFKLGIEFSNWANKGDKYFHSFGLTGKDCWACQFQHFWLAGKKYGIDVPFGDYCPESKAARLEKCSGENDEINYAYHLDATLYADFLKIFSMKHGAKHVEGLIEKVIVSPENGFIKSLLLKDGREIEGDLFLDCTGFRALLIDGALNTPWVPYGHYLPCDSAIALQTELVRAPRPYTQSIAHDFGWQWRIPLQHRAGNGMVYSSRHVSDDEAMATLMKNLEGRPVTEPRVIKYKTGRRMKVWNKNCIAVGLTASFIEPLESTSIHLAMSAIYRLMRYFPQNEIVMSNVDEFNKQSAEETDRARNFVILHYHATQRDDTEFWRYCKNMEIPEALGHRVQLFKDTAAIALEEKELFLNDSWVQVMMGQGIMPTAYHPIADVMDEMELKKFLGYLSGSVGEKVSAMPSHQELINQYCKAIAPV

SEQ ID NO: 85166 - protein, 594 aa, Enhygromyxa salina
  REGION 1..594: note = tr|A0A2S9YSJ3|A0A2S9YSJ3_9DELT Tryptophan halogenase; OS = Enhygromyxa salina OX=215803 GN=ENSA7_22250 PE=4 SV=1
MADSFEVAILGGGLAAQCLARHLRRAGVTGPIVVIDRGALPIPATTLKLGESTVEAGAWYLGQRLGLHDRLLAEHEMKFGLRFFFSAGNNDDVGDRLELGPQHAARFRRGLRPPAYQLHRGRLEHMLTRLNEAAGVTMWPGTLVGEITLATTNERHRVELRDQASGRARTIHARWLIDASGRAGLLTRPQQLRRPLAHRVRVAHGWVAGRIDPERWTARPEFGDRIEPDLRWRSTVHLIGPGYSIWMIPVDPQITSIGVVARAGGGVLDPISDAATLNRWLAEREPQLAATIARSAWIDGPHFGDVEAHVSRVVVSPRRFAVCGEAAAHLDPLYSSGFDLLAIANELIVATVLDDAQARPLAPICEQRNVVFAQVARQLLSVYADAYRLLDAPRIATHKITWDIATYLGYLAPLIMSGTFAQAQPLADHIQIAARVVRLNRRMQQLFSSWRARAGRAGHEVPSVNLAHLPPVASCFARLGDMDPSDPPARWHQLLRDNLRLLEDQAIATFLDAAADLGLTLPDGRIDAHAISLEPRAWAADGLILREPTPHDTETAEQRVSATRRGMSGQGSLSSPLVLEPDTRSPSPADRSPA

SEQ ID NO: 85167 - protein, 538 aa, Burkholderia cenocepacia
  REGION 1..538: note = tr|A2W5K4|A2W5K4_9BURK Uncharacterized protein; OS = Burkholderia cenocepacia PC184 OX=350702 GN=BCPG_05662; PE = 4 SV=1
MTHPIKNIVIVGGGTAGWMSASYLVRALQHHANITLVESAAIPRIGVGEATIPSLQKVFFDFLGIPEREWMPKVNGAFKSAIRFVSWRKSADGSRGDHFYHLFGNVPNCDGVPLTHYWLRKREQGFQQPMEYACYPQTEALDGKLAPCLADGARQMSHAWHFDAHLVADFLKRWATERGVKRVVDEVEQVHLNDRGYIASLSTKEGRTLEADLFIDCSGMRGLLINQALKEPFIDMSDYLLCDSAVASAVPADDARDGIEPYTSAIAMNAGWTWKIPMLGRFGSGYVFSSKFTSRDQATADFLDLWGLSDKQPLNQIKFRVGRNRRAWVNNCVAIGLSSCFLEPLESTGIYFIYAALYQLVKHFPDTSFDPRLADAFNAEIVYMFDDCRDFVQAHYFTTSRDDTAFWRANRHDLRLSDAIKEKVERYKAGLPLTTTSFDDSTYYDTFDYEFKNFWLNGNYYCIFAGLGLLPDQSLPLLRHRPESIDKAEAMFARIRREAERLRASLPTNYDYLRSLREGDAGLSRSQPGPTLATPEIL

SEQ ID NO: 85168 - protein, 517 aa, unidentified
  source 1..517: note = Thalassotalea euphylliae
  REGION 1..517: note = tr|A0A3E0TU31|A0A3E0TU31_9GAMM Tryptophan 7-halogenase OS=Thalassotalea euphylliae OX=1655234; GN = DXX93_16365 PE=4 SV=1
MTNNTNSHQVPVSHETNVADNQQIRKVVILGGGTAGWISAALLKKLLGEAVAIELVESQEIGTVGVGEATIPPIQVLNTVLGINEAEFLRETKATIKLAIRFENWKQQGHQYYHSFGAIGKSMAFCHFHHLLKRAGGLEDESQLWQYDLNYLCAEAGKFAKIKTKDPIIDMPYAYHFDAGLYAKYLRKFSEKLGVVRTEGLVERVNQCADSGNIKELILKSGQVVAGDLFIDCSGFKGLLIQQTLRTGYEDWSQWLQCDSALAVPSERHEKTAPYTRSIAHSAGWQWRIPLQHRNGNGLVYSSRHYSEQEASDILLSHLDTKPLADPKPIRFQTGRRYQQWHKNVIAVGLSSGFLEPLESTSIHLIQSAVVRLVHLFPHCGITADVVDEYNKQSKVEFEQIRDFLILHYHVTERTDSQFWRDMRAMDIPDSLRHKIALFKENGRLFRDQNDLFLENSWLQVMVGQGILPKDYHPMANSMSLDYIEETLKKIKAIKADPVSKLPSHDEFLAHYCQLKK

SEQ ID NO: 85169 - protein, 499 aa, Brevundimonas sp.
  REGION 1..499: note = tr|A0A069IV68|A0A069IV68_9CAUL Tryptophan halogenase; OS = Brevundimonas sp. EAKA OX=1495854 GN=ER13_06290 PE=4; SV = 1
MRQLKTILIVGGGSAGWMAAALFSKLFKGLYDITLIESEAIGTIGVGEATIPAIKTFNELIGLDENDFMRRTQASFKLGIQFVDWDRVGSSYIHGFGVIGRDLKWLRCHQYWLKMRAEGKVSDLAAYSINTAAALQNRFMRADPKRPGSPLGHIAHAFHFDAGLYAKYLRGMSEAAGVRRREGKVVSVQLRPEDGFVDSVTLEDGAVVSADLFIDCSGFRGLIIEQAMKTGYEDWSHWLPCDRAMAVPCARTEPFTPYTRSTARPAGWQWRIPLQHRTGNGHVYSSRHMDDGEAEQILLSNLDGAQMAEPNRIRFVAGKRRQIWNRNCVAAGLASGFLEPLESTSLHLIQSVLIRLVRLMPDAGFDPATIAEFNRQTDFEYERIRDFIILHYKATERDDTPFWRYCRDMDVPVTLERKIDLFRANGRIFREDDELFAEESWIQVLLGQGIIPVGYDPLVDVTPEPDIERYLADVETVIGKCVALMPSHADYVAKACPAA

SEQ ID NO: 85170 - protein, 510 aa, Cellvibrio sp.
  REGION 1..510: note = tr|A0A3D4PW81|A0A3D4PW81_9GAMM Tryptophan halogenase; OS = Cellvibrio sp. OX=1965322 GN=DIW64_01140 PE=4 SV=1
MSESNALDNIKKIVIVGGGTAGWMAAAAFSKFFKNQFCEVVLVESDDIGTIGVGEATIPQIQVFNQSLNIDENDFIRKTQGSFKLGIEFVNWGAIGESYIHAFGGVGNDMDSIPFYHYWLKLNKQGGSADIGEYCFNSLASRKNKFMRSIDAGNSPLSNIAYAYHFDAGLYAKYLRGFSEKLGVQRTEGRISNVNLDEDSGYIKSVSLENGQEINGDFFVDCSGLHALLIGKALNVEYEDWSHWLPCDTAWAVPSQKLDPLPSYTRATAHAAGWQWRIPLQHRTGNGHVFSRRFTDVDTAKDLLLNNIQGEILAEPRLIKFVTGRRKQFWHKNCVAIGLSSGFMEPLESTSIHLVQSAIARIMSVFPRKTISQVEIDLYNEQVGFEYERIRDFLILHYKVTSRNDSEFWNYCRQMSVPDSLQQKIEVFKENAHVHRFNSELFNEISWVEVMLGQGLYPRGYHPLVDVVPAAELTRRMAHIKRVLDTAVDYLPAHAQYIAEHCAAQEVKNQ

SEQ ID NO: 85171 - protein, 503 aa, unidentified
  source 1..503: note = Alphaproteobacteria bacterium
  REGION 1..503: note = tr|A0A257JPG1|A0A257JPG1_9PROT Tryptophan halogenase; OS = Alphaproteobacteria bacterium PA3 OX=2015571; GN = CFE32_11055 PE=4 SV=1
MQGQSQKLERLVIVGGGSAGWMAAAAIANAAGRGCKITLIESDEIGTVGVGEATIPPIKVFNRSLGLDEKDFVVRTQGTFKLGIEFVNWGRQGHRYFHPFGTYGADFDMVPLHQYYLRARQTGRDPGSLDEFTMAWQVAKRGRFAPPTQDPRLIQSTFDYAYHFDAGLYAQFLRSYSEARGVVRMEGKIADVGLDGEDGRITHVKLEDGRKVEGDFFVDCSGFRGLLIEGALKAGYEDWSHWLPCNRAMAVPCEHGGEFTPYTRSTAREAGWQWRIPLQHRIGNGYVYSSGFISDEEVERTLLANLDGKALADPRPLRFTTGKRKKIWHKNCVAIGLAAGFMEPLESTSLHLIQTGITRFLALFPEKTVDPVLETEFNRLSTYEWERIRDFLILHYCATERDDTELWRYCASMSLPDTLTYKMAHFRKYGRMVSDGPELFLNPSWLAVYLGQFVEPEGYDPLVDTRTHVEADRHLASLKTLMAQTAETFPTHRDFINQTCRAG

SEQ ID NO: 85172 - protein, 496 aa, Cellvibrio sp.
  REGION 1..496: note = tr|A0A3D4PY42|A0A3D4PY42_9GAMM Tryptophan halogenase; OS = Cellvibrio sp. OX=1965322 GN=DIW64_04320 PE=4 SV=1
MSAKPVKKILIVGGGTAGWMTAAYLARWLEKVDIQVTLIESELIGTIGVGEATVPGIHQFIKDLGIKESEFIRATNATFKLGIEFENWAGIDKTFFHPFAGYGVPIEDRPFYKTWWAANKQGYTEGLDKFCLCTQLAHAGKFALPSFDEKSRLAWYNYAYHFDASLFAKFLRGYAEQRNVKRIEGKINHVQLDADTGFIQSVAMDSGQVVESDLFVDCTGMPALLIGKALGVGYEDWSHWLPCDSALAVQTTSVADPDSYTRSSARTAGWQWHIPLQHRVGNGYVYSSQFISHDHARDELLNNLTGERVTDPKLIRFTTGMRNNFWTKNCVAIGLSSGFLEPLESTSISLIQTGIAKMTGFLVNFEIDEKHVAEANRLNRLEYERIRDFIILHYKLNGRSNPFWQHVRAMTIPATLEEKMAVFRDSGDIKILEQESFQADSWVSMFYGFGQAPSVLAASTDTEKIHTIMQKMKSAIGKGAQLAPSHAEFIQTVGTT

SEQ ID NO: 85173 - protein, 506 aa, Cellvibrio sp.
  REGION 1..506: note = tr|A0A3D4PZM6|A0A3D4PZM6_9GAMM Tryptophan halogenase; OS = Cellvibrio sp. OX=1965322 GN=DIW64_07435 PE=4 SV=1
MNGKRVLILGGGTAGWITANLMATHWQDKGFDITLVESPDIGIIGVGEGSTPPLKHFMDVIGVDEHEWMAECKATYKTGITFKDWSIKPGFTEYFHPFLSQPDQFSAPAFFHNSHLRRNGVDLEGHPNHFFLATELARQKLAPIAPENFPFEINYGYHFDSALLGKFLSRVAARKGVKYIQATLQEVALAADGSISALNMRDGQQLSADIYVDCSGFNSELLQKALKVPFISCADTLFNDSAVVFPTPQQAQIEVQTLATAMKYGWAWKIPLTHRNGNGYVYSSRFCDKDKAETEFRAHLNLLDADVEARHLKFKVGRVAEQWHKNCLAVGLAQGFIEPLEATALDMVQETVARFIEAYNNGNYSDQYRQEFNDRINLRFDAVRDYIVCHYRISSRVDTDYWVENGRNEKISNSLRSILTSWMQGKNITDELERQKLDAYFPNVSWSCLLAGKGIYPTQAQLKPGNELAHQYDLNNIHRYIQGCALNFKPHMEQLAMLEKAAVQAA

SEQ ID NO: 85174 - protein, 512 aa, Herbaspirillum sp.
  REGION 1..512: note = tr|A0A542M1R6|A0A542M1R6_9BURK Tryptophan halogenase; OS = Herbaspirillum sp. SJZ107 OX=2572881 GN=FBX97_2588 PE=4; SV = 1
MYSVQMSIPTPIKRIVIVGGGTAGWMAAAALSRLLKNKYAICLVESDAISSVGVGESTIPMMRLFNNVLGINEDEFMRETKATFKLGIEFTDWGKIGERYMHGFGRFGQDLETVDFFQYWLKAHRAGQAPDLERYSINRMAAHANKFIRPSPEMANSPLADIVYAFHLDAGLYARYLRSYAEKHGVVRTEGKIVQVRQRLNGGPRDGFIESLALEDGSVVEGDLFLDCSGFRGLLIEQALNTGFEDWSHWLPCDRAWAVPCESGGELLPYTRASARPAGWQWRIGLQHRTGNGHVFSSRFMSDDEAAAILMKNLDGKPLAEPKLLRFTAGKRKKAWHKNVVAVGLSSGFLEPLESTSIFLIQSAISRLVSFFPDAGFHQADIDEFNRQCDFEVERIRDFIILHYHATERSDTPFWDHVRTMAIPDTLRRKLDLYGAHGRVVRENNELFTEIGWQQVLHGQGVQAAGYNPLVDLLSDKELADFLGNIERVVGKCVDVMPSHKEFIRAIATANR

SEQ ID NO: 85175 - protein, 522 aa, Cellvibrio sp.
  REGION 1..522: note = tr|A0A3D4Q058|A0A3D4Q058_9GAMM Tryptophan halogenase; OS = Cellvibrio sp. OX=1965322 GN=DIW64_09865 PE=4 SV=1
MADHITRVVIVGGGSAGWLAAGIIAATSPSHVQVTLIESPDVAAIGVGEGTWPTMRATLQSMGISETDFFRECDVSFKQGSKFSRWTSLAKDDDYYHPFTAPAKYHEINLAPFWLPFKNKIPFAHVVCPQAAICDSGFSPKQITTAEFGAVLNYGYHLDAGKFAPFLHKHCVEKLGVTYISANVTAINSHENGDIRSVDTDTQGEVAGDLFVDCTGLSSMLLGKHYSIPFVSQKNILFNDSALAVQIPYAGGADAIASHTLSTAQTNGWIWDIGLQSRRGIGHVFSSHYTTDELAERELRNYIAPTVGEKMAEELSVRKISFNPGHRKIFWHKNCVAIGLSAGFIEPLEATALVLIELSAKMIAEQFPANRNAMDIVAKRFNNTLSHHWEKIIIFLKLHYVLTRRVDTEYWRDNCLASTIPDSLHELLALWKVQSPWLYDEMLREEMFPSASYQYIYYGMKGKTEVMGVDSAGSNKHLYDKKLRKAEALFMENAQHIQQLKKVLQPNRELIEKIKQHGLQAI

SEQ ID NO: 85176 - protein, 503 aa, unidentified
  source 1..503: note = Unknown
  REGION 1..503: note = tr|A0A0N0K877|A0A0N0K877_9PROT Tryptophan halogenase; OS = alpha proteobacterium AAP38 OX=1523418 GN=IP70_18635; PE = 4 SV=1
MPSDNRIRELVIVGGGTAGWMTAASLANHFQGSGLKITLIESSAIGTIGVGEATIPTIRRFYQSLGLRDLDVLKATHGTVKLGIRFDGWLNKDSSFIHPFGVYGQDLRDIPFHQYWLRLRAAGEKVDLGDYSLAVALARGGRFTTPSPNPPSTLSVFDWALHFDAGLFAQLMRQTAEKLGVQRIDAKIEKVELNPANGHISGLLLDSGATVTGDLFVDCSGFQGLLIEGAMSAGYEDWGQWLLCDRALAAQGYAITPPPPFTRVTAHNAGWRWTIPLQHRTGHGYVYSSRHISDSDAEAELLAAVGGDLKMAPRRITFTPGRRKQAWKGNCVAIGLSSGFLEPLESTSIALIETGIDKLKQLFPGRDIDPLLVDEYNDWSRREMERVRDFIILHYWLNRREDTEFWRDCRAIDLPDTLTRKVEMWKRRGHMVRYRWEMFQPASWLAIYAGFDFLPDGYDPALDGFDVPSLSRGLAGMRKAIADTVADCPTHQEFIDRYAKVAP

SEQ ID NO: 85177 - protein, 589 aa, Microcystis aeruginosa
  REGION 1..589: note = tr|L8P3M2|L8P3M2_MICAE Tryptophan halogenase family protein OS=Microcystis aeruginosa DIANCHI905 OX=1235808; GN = C789_306 PE=4 SV=1
MQMTQDKEYDVIIMGAGFAGLCQARHLMLKIPNIKVALVDPRPEQRTDKDLKIGESTIEIAALFLAKELGLHDYLIENHAPKQGLNFHWPKNPAKTETIDDYYHAGSNRQVPIPSFQINRSKFEQDLLKMDKAMGINFYNGQVVDVDLTPGDAIKTVKIKVGDERMELQAKHVIDAAGRKFIIGRKTDNLLFSPENLMGLNTGSAWVRVKNVDRTIFHSGYDPLNASTSHYYSTNHYFGEGHWLWMIPIDTQTMELSIGVIHHHDVINSTQVNSREKFHDFLRNNHQILANIIDSGEAVDFHYWPRISHTSKTLFSPDNWYVLGDAAYIFDAFYSYGTTTIALAIEGITEIVRAKLAGEADAEQKRAAYNEFNLAYSRSVNCLYRGHAKQLGQASVMSWRIYFEYMWWFGVQVPMYVGKWHLDLTYIPIFLKTLNSNIDGLFADLNEQFTELADKDVNIGLMDCYRGDQLFKGYHTLKHFDDFLENTKFEPRRCNVFAGLKATCFYAALWYALFQWKGFGIQGCLNPRHIYHFLRLLGLSGQATIGELIYKFKTKGLPANSEIEAMRQEFKTYQYQPKLQPWLAEATNS

SEQ ID NO: 85178 - protein, 506 aa, Xanthomonas axonopodis
  REGION 1..506: note = tr|A0A0P6VF71|A0A0P6VF71_9XANT Tryptophan halogenase; OS = Xanthomonas axonopodis OX=53413 GN=XAXN_06620 PE=4 SV=1
MIPAPPRNIVIVGGSTAGWMAAAAFARVLGPTFKVQLIESEQLGTVGVGEATVPHIKAFNNLLGIDEAEFVRQTQGSFKLGIEFVDWQRPGRKYMHGFGTQIGHPLGLLPFHQYWIKQHARGKAQPLGAYTLNTVAATRGKFMTSAGDVPANSPLANIAYAYHFDATQYAHFLRLYSEQRGVTRIEGLVEQVQLHPESGHVQSLQLASGQVIKGDLFIDCSSFRGLLIEDALHTGYHDFTHWLPCDRALAVPCEKVGPPTPYTRSTARAAGWQWRIPLQHRTGNGYVYCSAHISDDEAAATLLANLDGKPLADPRPLRFTTGRRKQCWNRNVVALGLASGFLEPLESTSIHLIQSGISKLLELFPREGISPVLVQRYNDRLAFEFDRIRDFLLLHYHATGRDDSAFWRHCRHMPITSELQSTLDLFRDSGRFYRNAEEMFAEISWVQVMVGQGILPQGYHPLVDQVPDRDAEGFLTSVAQTISHCVDVMPSHQQFIDRYCKAAALP

SEQ ID NO: 85179 - protein, 509 aa, Pseudoxanthomonas sp.
  REGION 1..509: note = tr|A0A0Q8ENX4|A0A0Q8ENX4_9GAMM Tryptophan halogenase; OS = Pseudoxanthomonas sp. Root630 OX=1736574 GN=ASD72_20255; PE = 4 SV=1
MDSPDAPEGHIRKVVIAGGGTAGWLAACALSHQFRDRLQITLVESEQIGTVGVGESTVPPIRTFHRFLQIDEQEFLRAVAGTFKLSISFENWRRPGDRYIHPFGITGQGTWAAAFHHFWLDSLRRGMPSELGDFCLETVASRGDQFSLQTQPQVNYAYHFDAGLYARFLRRIAEGYGLLRVEGKIREVRQHAHDGSVQSLVLEDGQIIEGDLFIDCTGFRGLLIEQTLQTGYEDWNAWLPSDRAVAVQTESIGPPVPYTRAIAHEAGWRWHIPLQHRVGCGLVFSSRHMSDDEARAKLLHDVGAPAIRDPWLVPFRTGRRLKAWNKNVVALGLASGFIEPLESTSIHLAISAVVRLVQLFPFAGIAPSLVELYNEVSRAEMEHVRDFIILHYHATQRDEPMWKSCREMPLPESLEIRLRAWRERAHAWQDPDELFRVDSWTHVLLGQGIRPGPPHPLARALADDDLRRLLDSIRQPIARAVATMPSQQAFIDRYCKAGAEVWGGRRAPN

SEQ ID NO: 85180 - protein, 415 aa, unidentified
  source 1..415: note = Pseudomonas wadenswilerensis
  REGION 1..415: note = tr|A0A380T898|A0A380T898_9PSED Tryptophan 2-halogenase OS=Pseudomonas wadenswilerensis OX=1785161; GN = cmdE PE=4 SV=1
MPNTELQQRQVLIIGAGPSGAIAGALLKRNGHDVLIIERQRFPRFSIGESLLSHCIDFVEEAGMLPALEAAGFQRKNGAAFAWGDEYSAFDFGDTFSNGKPSTFQVQRAQFDQLLADQAAAQGVEIRYEEEIIAADFERPRPQVRVRRLDGSEYRVEAEFVLDASGYGRVLPRLLDLEAPSNFPVRQAVFTHIEDRIDHPAFDREKILITTHPQHRDIWFWTIPFSNGRCSLGVVAAAEHFAAAPADLDACLKDFVAQTPSLAKVLANAAWDTPARTIGGYSANVKTLHGPGFALLGNAAEFLDPVFSSGVTIAMRSASMAAGVLHRQLQGESVDWQSEFAEPLKRGVDTFRAYVEGWYNGSFQDVIYHPASSPEIRAMISSILAGYAWDQRNPFVSEPKRRLRMLAEVCARTVA

SEQ ID NO: 85181 - protein, 521 aa, Xanthomonas axonopodis
  REGION 1..521: note = tr|A0A0P6VVV6|A0A0P6VVV6_9XANT Tryptophan halogenase; OS = Xanthomonas axonopodis OX=53413 GN=XAXN_04135 PE=4 SV=1
MSDTTPLDPQPRPVRRVVIAGGGTAGWMAAAALSKLLGRHLQITLVESDEIGTVGVGEATIPSLVTFHRLLEIDEAAFMAATQATIKLGIAFEHWREVDQHYIHSFGHAGTDHWSAGFQHFWLKGRQRGVARDFGDYCLELRAAQEGRFAHLPNGGMNYAYHLDAGLYARFLRRFSEGFGVTRVEGRIGQVETDAQSGFLTALTLQDGTRVEGDLFLDCTGFAGLLIGKTLGVGSDDWSRWLFTDSALAVQTESVGPPVTYTRSRADQAGWMWRIPLQHRVGNGIVYSSRYMDQDGARAVLERNLTGRALTEPRPLRFTPNQRHRVWEKNCVALGLASGFLEPLESTNIHLIQRGIIRLLQTFPQVINAVDIAEYNRQAAQEINHIRDFVILHYHATDRRDTPFWRDCAAMDIPDSLRHRMELFRQSGRVFHQANELFAENSWVQVMLGQGIVPQQHHPVADLMGDAELSRFLETIRTRVEAALVRLPAHADFLQRYCPAPPLPEPAARVPAPPVMATPAG

SEQ ID NO: 85182 - protein, 498 aa, Pseudoxanthomonas sp.
  REGION 1..498: note = tr|A0A0Q8EPK2|A0A0Q8EPK2_9GAMM Tryptophan halogenase; OS = Pseudoxanthomonas sp. Root630 OX=1736574 GN=ASD72_03815; PE = 4 SV=1
MNETSSRDVKRVVIAGGGTAGWMAAAAISRVLGKTLDITLVESEEIGTVGVGEATIPTLLSFHRMIDIDEREYMAATQGTIKLGISFENWLDTDHRYIHSFGFSGKDRGASGFQHFWLRGRKEGLASGYEDYCLELKAALADRFAHLPHGGINYAYHMDASLYAKFLRQFSERHGAKRIEGKIADVVTDAASGFITALTMENGDSIEGDFFIDCTGFRALLIGKALGVGFTDWSHWLFNDSALATQTTAVRDAVPYTRAIAGKSGWQWRIPLQHRVGNGIVYSSRHISDDEARAEFLGGLEGDVIKQPWPIRFQPGQRQQCWEKNCVALGLAGSFIEPLESTTIHLIQRGIVHLLQNFPQVVTRPAIDEYNARLDEELQHVRDFVVMHYHLSNRRDSPYWREIAEMGIPSTLRHRIELFRETGTVFHVPGELFGENSWIQVMMGQGIVPKRYHPTADVISPAELQRFLDDIRASVQGNAQRMPAHMDYLRSYCPAPKP

SEQ ID NO: 85183 - protein, 528 aa, Sphingobium francense
  REGION 1..528: note = tr|A0A4Q4IXW5|A0A4Q4IXW5_9SPHN Tryptophan 7-halogenase OS=Sphingobium francense OX=332057; GN = EWH08_16720 PE=4 SV=1
MSVDIPSLFMGNFDMIHPVRNIVIVGGGTAGWLTAGVIAARHRSRIGNGFTVTLVESPNTPIIGVGEGTWPTLRTTLSRMGISETDLFRECDAAFKQGARFARWTTGTPDDGYYHPLMLPQNFGQVNLAPHWLAGEGDESFCDSVCSQGRICDDGLAPKTIATAEYDALANYAYHLDAGKFAPFLQRHCCEKLGVRHVLADVEQVLMKEDGDIRAIRTTQAGEIEGDLFVDCTGFKALLIEGAMKVPFRDCNDVLFCDTALAMQVPYDRPDSPMASHTISTAQSAGWIWDIGLPTRRGIGHVYSSNHISDEEAERELRAYIGPPAEGLSARKIAIRSGHRETFWKGNCVAVGLAAGFLEPLEASAIVLIELSAKIIAEQMPACREVMDIVASRFNATTYYRWGRIIDFLKLHYVLTKRTDSDFWRDNVREETIPDRLQELMLLWRYQSPWFLDEFDRVEEVFPAASYQYVLYGMGFRTEIDRPALARDAHLADRARRENAAMTAKLRAGLPRHRDLIDKIVTHGLQPV

SEQ ID NO: 85184 - protein, 519 aa, Cellvibrio sp.
  REGION 1..519: note = tr|A0A3D4PXX8|A0A3D4PXX8_9GAMM Tryptophan halogenase; OS = Cellvibrio sp. OX=1965322 GN=DIW64_04055 PE=4 SV=1
MNSLVKKIVIVGGGTAGWLTAGILAAEYKNKSALDIQITLVESPDINPIGVGEGTWPSMRATLRKIGISEADLVTQCAASFKQGSKFVGWKTGLEGDVYHHPFTIPNGYLECNLVAAWQTQFSDLPFADVVSVQNYVSESGCSPKQFTTPEYAGAVNYGYHLDAGKFGELLQKHCTAQLGVKHILDHVTHVISAPNGDIAAINTKEVGAIEGDLFIDCTGFACLLLGQHFGISFVDKKNFSLNDSALAAQVPYPEEISPIASSTIATAQSAGWTWDIGLSSRRGVGYVYSSTHISDDHAERELRAHIAKSVGVDAAEKVSTRKLAIRAGHREQFWYKNCVAIGMAAGFIEPLEASALALVELSANMIRDEFPLTSATMPLVAKRFNSVFQYRWERIVEFLKLHYVLTERRDTEYWRDMSSPDAIPEQLQQQLLLWAQRPPYINDLIQVEETFPSASYQYVLYGMGFKSNVNGVIRASDNVNLGLEKIKDNFERSRKYANLLPSNRELIVHIFKYGMQKI

SEQ ID NO: 85185 - protein, 528 aa, Sphingomonas sp.
  REGION 1..528: note = tr|A0A430EFI4|A0A430EFI4_9SPHN Tryptophan 7-halogenase OS=Sphingomonas sp. ABOLE OX=1985878; GN = CA234_17255 PE=4 SV=1
MNEHNIRDVVIVGGGTAGWMAAAAFSRFLNNGYTRITLIESDEIGTVGVGEATIPPILRFNQMIGLDENEFLAATGGTFKLGIEFVDWGGLGERYFHPFGNYAQDLQGVHFHQLYLRERARRAMPDIAEWSMSAMAASMGKFGRPSATAQTPVRELFYAFHFDAGRYAQLLRRVSEARGITRIEGKISDVTLRPEDGFVQSVTLADGRTVAGDLFIDCSGFRGLLIEEALQTGYEDWRHWLPCDRAVAVPCANVRDPDPFTRSTAREAGWQWRIPLQHRMGNGHVYCSEFLDDDTAEQQLMASLEGPALADPRRLRFTTGRRRESWSRNVVALGLSSGFLEPLESTSIHLIQSGIARLIALFPDKRFDPIERQEYNRQMRDLYEDIRDFIILHYKATTRTDTPFWNRVRTMDIPESLANRIALFQGKGRLFREGNELFTNTSWVAVCLGQHIVPREHEPAADALDENLVAQALEQMRQGYRETAQKMPTHAAFLARIAPQQAPPPPAEPLPVFSFAQDAPFAAPGSPV

SEQ ID NO: 85186 - protein, 514 aa, Brevundimonas sp.; identical to SEQ ID NO: 83757
  REGION 1..514: note = tr|A0A069J1Y0|A0A069J1Y0_9CAUL Tryptophan halogenase; OS = Brevundimonas sp. EAKA OX=1495854 GN=ER13_11125 PE=4; SV = 1

SEQ ID NO: 85187 - protein, 506 aa, Pseudoxanthomonas sp.
  REGION 1..506: note = tr|A0A0Q8EBI2|A0A0Q8EBI2_9GAMM Tryptophan halogenase; OS = Pseudoxanthomonas sp. Root630 OX=1736574 GN=ASD72_13110; PE = 4 SV=1
MDGNSIREVVVVGGGSAGWMAASALVRHLDRNCKVRLVESDEIGIIGVGEATVPHIRTFNAQALGLDEAEFVRATQGTFKLGIEFRDWARIGDRYMHGFGTVGHDPGPAAFHHYWLRLLLAGKNVGDIGSYQLQTAASREDRFLPGANDVPPTSPLASVAYAYHFDATLYARYLRGFAEGQGVERIEGKVVDVELRPEDGFVSAVVMADGRRVEGDLFIDCSGFRGLLIEQALKTGYEDWSHWLPCDRAVAVPCARVGDPTPYTRSTARTAGWQWRIPLQHRTGNGLVYCSRFLSDDEAANTLLSNLDGEAQAEPRPLRFVTGKRKQFWNRNVVAVGLASGFMEPLESTSLLLIQTAILRLLDMFPRQGIDPGLVARYNERTHFEYDHIRDFLILHYKAVERDEPFWRECREMPIPDTLQANIDLFRNSGRFYRDGEEFFALQSWIQVMLGQRIVPSAYSPLVDRLSEAEVEAFVANVRQTIDRCVQAMPKHQAFIERHCRAPAVG

SEQ ID NO: 85188 - protein, 504 aa, unidentified
  source 1..504: note = Unknown
  REGION 1..504: note = tr|A0A0N1BW50|A0A0N1BW50_9PROT Uncharacterized protein OS=alpha proteobacterium AAP38 OX=1523418; GN = IP70_04340 PE=4 SV=1
MTNLRRILIVGGGTAGWMAACALNQAVKRLGTVVELVESEEIGTVGVGEATVPTIRDFNRSIGLDEVAFMKATQGSFKLGIAFQDWRAKGTSFFHGFGDYIVNAGPYSTLNHWLVARHLAGQDAVGPFDDYHMAAVMAAAGRFAAPESDPRSPYAYFSYAFHFDASLYARMLRAKAEAEGVVRHEGRITRVDRHPETGFITQVHLADGRILAADLFIDCSGFVSLLVDKTLAEPWVDYSHWLPVDRAWAVPCAGNGTPAPFTRATALEAGWQWRIPLQHRTGNGYVFSSAHVTEDAARERLLAGLDGTVLAEPRLLRFRTGRRQRFWIGNCVAIGLSSGFVEPLESTSISLIQGGITRLVNLLPDLDFNPGLAAEYNRIQALEFDRIRDFIILHYALNGREDSEFWRERRRIPLPDTLAEKIETFRATGQVVLLNEETFVTPSWQALFIGLGLIPQRLDPLMAAQDRGEVLEALRLRRQSLAQAAARLPSHGDFINRFCKADPA

SEQ ID NO: 85189 - protein, 486 aa, Streptomyces sp.
  REGION 1..486: note = tr|A0A1S2Q4A1|A0A1S2Q4A1_9ACTN Tryptophan halogenase; OS = Streptomyces sp. MUSC 14 OX=1354889 GN=BIV25_06380 PE=4; SV = 1
MTSEYDLVVVGGGPAGATAATAVALRGHRVLLLERDTFPRYQIGESLLPATVHGVCRLLGVADEVARAGFTPKRGGTMRWGRDPKPWRFSFSMTPRLPEPTATAFQVERSRFDEILLRNAERVGVEVREGSPVRRVLSVGGRVRGVEYTDRDGTAHTAQARYVVDASGNTSRIHSRVGGARVYSDFFRNLAVFGYYAGGRRLPEPDSGNIFCAAFDAGWLWYIPLRDDLTSVGAVIAPEHLAAVQRDPRGAWQDMIKACPEVGRLLTDVPLATEPPYDRIRVRKDYSYWKTSLWVPGMALAGDSACFVDPVLSSGVHLATYGALLAARAVNSALDGSVPEERGFAEFEARYRREYGVFYEFLIAFYDMERGEDSYFWSAKKVTRVDLDEAAAFAELAGGLVSGDASVLAAERGAAVAELGEAVARLAVGPERVNPLLSTRIVADTFRTGNDLQEQALYGGPLDAPAAAGSLTVATDGLSWLGPAAY

SEQ ID NO: 85190 - protein, 533 aa, Myxococcus stipitatus
  REGION 1..533: note = tr|L7UDS2|L7UDS2_MYXSD Tryptophan halogenase; OS = Myxococcus stipitatus (strain DSM 14675 / JCM 12634 / Mx s8) OX=1278073 GN=MYSTI_03287 PE=4 SV=1
MDTAIREVVILGGGTAGWMTAAYLQKVFEGTVQVTLLEAATIPRIGVGEATVPNLQRVFFDRLGIPEDEWMRECNAAFKTAVKFVNWRKKEPGAPDNHFYHAFGLIPNVDNIPLSHYWVLRNEGGERVDEGVDYACYREPPMMDAKLAPRFRDGRPAVNYAWHFDAQLVADYLRRLSTGWGVKHVVDELSSVEKTPDGHIKALHTRGGRVLEGDLFVDCSGFRGLLINQAMEEPFLDMSDHLLCNSAVATAINHDDARFGIEPYTSAIASNHGWMWKIPMLGRFGTGYVYSSEFCSQDEAIREFSAKWGLDPEKTAFNRIRFRVGRNRRAWVKNCVSIGLASCFVEPLESTGIYFITASIYQLAKHFPDKGFNPVLMDRFNREVEMMFDDTRDFLQAHFLTSSRDDTAFWLANKNDLKLSDALKDKLETWKTGLTVNMPVSGEEAYYGNFETEFRNFWTNSSYYCVLSGMGWMPEQPLTTLKYRPSSVAHAEEAFQRVKLQQQALLQGLPTNHEFLQRLHRQNGMDLARTGTR

SEQ ID NO: 85191 - protein, 532 aa, Serratia sp.
  REGION 1..532: note = tr|L0MG20|L0MG20_9GAMM Tryptophan halogenase; OS = Serratia sp. FGI94 OX=671990 GN=D781_2597 PE=4 SV=1
MSKPIKNIVIVGGGTAGWMSASYLVRALQQQANITLIESEAIPRIGVGEATIPSLQKVFFDFLGIPEREWMPQVNGAFKAGIKFVNWRKPPSPSHNDYFYHLFGNVPNCDGVPLTHYWLRKREQGFQQSMAYACYPQPGALDGNLAPCLHDGSRQMSHAWHFDAHLVADFLKRWAVDRGVNRVVDEVVEVKLNEHGFISSLLTKEGRQLEADLFIDCSGMQGLLINQALKEPFIDMSDYLLCDSAVASAVPNDDTQEGVEPYTSSIAMNAGWTWKIPMLGRFGSGYVFSSKFTSRDQATSDFLNLWGLSDNQPLNQIKFRVGRNKRAWVNNCVSIGLASCFLEPLESTGIYFIYAALYQLVKHFPDTAFDPRLADAFNAEIVYMFDDCRDFVQAHYFTSSREDTAFWLANRHELRLSDAIQEKIERYKAGLPLTTTSFDDATYYDTFDFEFKNFWLNGNYYCIFAGLDMLPDRSLPLLQLRPESIDKAEAMFASIQHEAERLRTSLPTNYDYLRSLQKGYAEQSRPASPEIL

SEQ ID NO: 85192 - protein, 517 aa, unidentified
  source 1..517: note = Unknown
  REGION 1..517: note = tr|A0A0N1LJ64|A0A0N1LJ64_9PROT Tryptophan halogenase; OS = alpha proteobacterium AAP38 OX=1523418 GN=IP70_24195; PE = 4 SV=1
MRVQAAKRLRVVIVGGGTAGWMVASGLSKLLPADAYDLTLIESDEIGTVGVGEATLPHIKLFNDRLGIDEAEFMRATGATIKLGIEFVGWNQPTDRYIHPFGVFGEPWAGVDFQHHWARARLSGIEAGSLQDYSFAVALCRAGMFDHPAAVDTKSIRSTFSYAYHFDAGLYAEFLRHWATARGVTRVEGRIINVARDGESGHVTRLTLASGGGIEGDFFVDCSGFRSLLVGGAMQVPWCDWSHWLPCDRALAVPSGSVQPLTPYTRATARKAGWTWRIPLQHRIGNGYVFSSRWCGEDEARETLLSALDGPALAEPRLLRFAAGRRVRAWAGNCVAAGLSSGFLEPLESTSIFLIQAAMFDLVGLMPRPGGGIDPRLAAEFNRLFEIHYDRVRDFLVLHYVANSRHGEPLWDHVRSMEMPDSLLHKLDLFREGAAAPDYKLGLFSRDSWLSVFEGQGVMPGAYARLADHLPLPELERRLSDLRGRIRDGLSGMPAHADFIARHCAAPDHSGSRGNAA

SEQ ID NO: 85193 - protein, 513 aa, Streptomyces sp.
  REGION 1..513: note = tr|A0A1W7D4T7|A0A1W7D4T7_9ACTN Tryptophan halogenase; OS = Streptomyces sp. SCSIO 03032 OX=1109743 GN=CAG99_27180; PE = 4 SV=1
MIRKVAIVGGGTAGWMTASYLKAAFADRLDVTLVESEAVGRIGVGEATFSTVRHFFDYLGLDEADWLPKCEGGYKLAIRFENWAKQGHHFYHPFERLRKADGFSLAEWWLALGDHSQPFDRQCFVTSALCEAKRSPRMLDGSLFATGLDGSLGRSSLAEQRAQFPYAYHFDADKVAAFLAAYSKERGVRHIVDDVVHSALDDRGWISHVQTRGGLRLDADLFIDCTGFRGALINKLMGEPFESFQDVLPNNRAVATRVSRPEITDMNPYTTATAMDAGWMWRIPLFHRDGVGYVYSDEFASPEEAERTLRTQVGDLRGELDVNHIAMRVGRCRDSWVKNCVAIGLSSAFVEPLESTGIFFIQHGIEQLVKHFPDERWDPELTRNYNTRIAQAVDGVKEFLVLHYRGAARSDNDYWRAAKTRKAPDGLVERMEQALPHLIDEEATYPYYHGFEPYSWNTMLLGLGNQPARARPALAHMDPARARAEFDLLRAEANAVIEKLPSCYEYLERIHTP

SEQ ID NO: 85194 - protein, 507 aa, Frateuria terrea
  REGION 1..507: note = tr|A0A1H6T2B4|A0A1H6T2B4_9GAMM Tryptophan halogenase; OS = Frateuria terrea OX=529704 GN=SAMN04487997_1522 PE=4; SV = 1
MTDSSIKNIVIVGGGTAGWMAAAAFAKVLGGRYAIQLIESDEIGIVGVGEATVPHLKLFNNLLGIDEAEFVRRTQGSFKLGIQFDDWGRIGSRYFHSFGAIGHDLGLLPFHQYWLKARRQGKAAADIGAYSLNAVAAAQGKFMVSASDVAPTSPLANIAYAYHFDAGLYARFLREYAERLGVRRLEGRIVDVALHPDSGFVEAVTLASGVRVAGDLFVDCSGFRGLLIEQALRTGYDDFSRWLPCDRAVAVACEKVGPPTPYTHSIARGAGWQWRIPLQHRTGNGYVYSSAHISDDEAAATLLSNLDGRPLGEPRLLRFTAGMRRKFWNRNVVALGLASGFMEPLESTSIYLVQSGIAKFLNLFPWGDFDPVLTERYNEQSIFEYERIRDFLILHYHATERSDTPFWDACRRMSIPPQLAQTIRLFRDSGRFFRQGEEMFALVSWVQVMLGQGIVPESYHPLVDQVAQSDMEGYLASVGKVIANCVQAMPSHAAFIERCCAAVPVPA

SEQ ID NO: 85195 - protein, 532 aa, Colwellia sp.
  REGION 1..532: note = tr|A0A2N1C6W5|A0A2N1C6W5_9GAMM Tryptophan halogenase; OS = Colwellia sp. 75C3 OX=888425 GN=CXF85_05440 PE=4 SV=1
MYIMNKLTKKVVIVGGGIAGWLTAGRLAAKHKGNTKQGLNVVLIESANIPAVGVGEGTWPTMRSTLRALGISETDFIRECEASFKQGAKFAKWFDGTEDDFYYHPLVLPQGFGKTDLAAHWLAKQAQTKQKNSHVNSFSNDVCFQEAICEQGLAPKTIRHAEFADVANYAYHLDSAKFAVFLQKHCQEKLGVTHIVDDVIGVNSIDTEADNPTEKGDIISVSTEHNGDIGGELFVDCTGFSSLLLGKHYQVPFKKCDDILFIDTALAVQVPYESVDSPIASHTISTGQEAGWIWDIGLQHRRGVGYVYSSKHSTEAEARAKLAEYVGDKFSSLKVRKIPIVSGHRETFWQNNCVAVGLSAGFLEPLEASALVMVELAAQMISEQLPASREVMDVVAKRFNETALYRWDRIIDFLKLHYILSERTEPFWSDNRDPTTIPQSLQDLMTEWQYRAPADHDFTSNNEVFPAASYQYVLYGMGFKSDYCHTPYAIDDRDFADGQFKKNKVLIDKALSSLPSNRELLDKIKSYGLSRI

SEQ ID NO: 85196 - protein, 503 aa, Caulobacter vibrioides
  REGION 1..503: note = tr|A0A0V2FFW3|A0A0V2FFW3_CAUVI Tryptophan halogenase; OS = Caulobacter vibrioides OX=155892 GN=AS593_10970 PE=4; SV = 1
MDQRIRKVVVVGGGTAGWMAAAAFGRLLASDAVAVEVVESEVIGTVGVGEATIPTIRNFNEKLGLDEVEFIRATQASFKLGIDFRDWGRVGHRYFHGFGDFGADHAAVQAHQLWRRLRALGETGGLEDWSLPTAAGLLNRFIPPSPDPRSPLHDYAYAYHFDAGLYAAFLRRYAEARGVTRTEGRIVDVAVRGQDGFVEAVVLDDGRRVEGDLFVDCSGFRALLIEGTLKAGFEDWSRWLPCDRALAVPCRTGGDGLTPYTRSTAREAGWQWRIPLQHRTGNGYVYSSAFVDDERAARTLMENLDGEALDDPRPLRFLAGRRKKFWDRNVVAVGLSGGFLEPLESTSIALIQNGVARLLEFFPDRRCDPLLAAEFNRVSAQEYERIRDFIILHYCINQRDEPMWRQVREVELPDSLQAKIALYKARGHVAILEGDGFARPSWISIYNGLGVVPEAYDPLADRIPEAELRRLMDQRRALIRHTAQSMPTQAAFIARHCAAPPLG

SEQ ID NO: 85197 - protein, 512 aa, Streptomyces albus
  REGION 1..512: note = tr|A0A109B7V7|A0A109B7V7_9ACTN Tryptophan halogenase; OS = Streptomyces albus subsp. albus OX=67257 GN=ADL21_00195; PE = 4 SV=1
MIRSVVIVGGGTAGWMTASYLKAAFADRLDVTLVESPGVSRIGVGEATFSTVRHFFDYLGLDEAEWLPKCAGGYKLGIRFENWAGDGGHFYHPFERLRVVDGFSLADWWLELGDHSQPMDRQVFLTSALSEAKRSPRMLDGSLFVSGLDNHLGKSTLDEQRDQFPYAYHFDADQVAKFLASYAIRRGVRHVVDTVEQVVQDERGWISHVQTAERGILTGQLFIDCTGFRSLLMSKTLGTAFESFEDVLPNNRAVALRVPRETETDMAPYTTATTMNAGWRWTIPLFRRNGNGYVYSDKFISPEEAERELRAAVAPGRDDLEANHIRMRIGRHKDSWVKNCVAVGLSSAFVEPLESTGIFFIQHAIEQLVKHFPDESFDEQQIAAYNTRIGNAIDGVKEFLALHYKAARRNDTPYWKEAQVRVAPDGLAARMELAESRLLDDETVYPYYHGFESYSWNAMTVGLGHRPRRPHPALKHLDPSAALAEFERVRAEAREMVAALPSCHEYLASIND

SEQ ID NO: 85198 - protein, 504 aa, Herbaspirillum sp.
  REGION 1..504: note = tr|A0A542MEM0|A0A542MEM0_9BURK Tryptophan halogenase; OS = Herbaspirillum sp. SJZ107 OX=2572881 GN=FBX97_1729 PE=4; SV = 1
MEDNTIRRIVILGGGTAGWMAAAPLAQRLGNHASVTVVESPDIGTIGVGEATLPTIRFYNALLGIDQADFIARTRATFKLGIEFCDWGHLGNRFFHGFGDFGPPLAGRTAHMHWLRLARAFDRMPPLEDWSMPAVMAREFKFVLPNKSQPGVTDSFSYGFHFDAGLYANYLRDYAVARGARRVEGTVTAVEQHPETGFITALTLRDGRRIEGDLFIDCSGFRGLLIEDTLHAGYDDWSDQLPCNSALAVPCASAPRLTPYTRSTAKDAGWIWRIPLQHRTGNGHVYSNAFTSDERARDTLLQGLDGAALDEPRQLRFVTGRRRKSWIKNCVAIGLSAGFVEPLESTSINLIETAVGKLVELFPDRDFRPELADEFNRVMSVRYESVRDFIMLHYKLTARDDSEFWRYCAAMPIPDSLRHQIELFRETGRVTILDRDGFAEPSFVAMMTGLGVVPKRYDPMADGDDLRQVHGHFAALRDMIAAAVAKMPDHDTFVRTQSVSAKVA

SEQ ID NO: 85199 - protein, 511 aa, Cellvibrio sp.
  REGION 1..511: note = tr|A0A3D4PWV2|A0A3D4PWV2_9GAMM Tryptophan halogenase; OS = Cellvibrio sp. OX=1965322 GN=DIW64_01130 PE=4 SV=1
MGSHAMIKKYVILGGGTAGWMTAAAFARFLHAESVQIVLIESDAIGTVGVGEATIPHIRAFNDMLGIEESDFMQAVNATYKLGIRFSGWGSSDSDYYHPFGDHGFPIKGVGFHHYWLGAKNAGADIAPFDSYSMANVLAREKKFTYPSSDPDDVLSTFSYAYHIDATAYAKFLRSYSEGRVTRIEGEVVSVAKNTETGFIESLTLVSGECIEGDLFIDCSGFRSRLLGQELDVKFQSWKKWLPCDSALAVPTEGNLLKQPYTHSSAKKAGWCWKIPLQHRIGNGHVFSSDFTSRADALDELKNNLSGEMKKDPISIRFEAGVREKTWEKNCIAVGLACGFLEPLESTSIYLIEVAILKILELLPTDTKDCLLEEKEFNRQMENEYLKVRDFIILHYALNQRPEDFWKYCANMPLPDTLQEKIDVFKATAQIVEYDAGLFMPPSWLAVYLGQGLFPVNIDSRLTPKSIQEAMALLKEMPAHLNHIVSQIETQKQKIDSRPPVSRMSLYGVRR

SEQ ID NO: 85200 - protein, 497 aa, Cellvibrio sp.
  REGION 1..497: note = tr|A0A3D4PY83|A0A3D4PY83_9GAMM Tryptophan halogenase; OS = Cellvibrio sp. OX=1965322 GN=DIW64_05110 PE=4 SV=1
MQKPKRILIVGGGTAGWMAANLLASRWKDIEVCLLESTEIGIIGVGEGSTPHLKLFFDEVGIAESEWMPRCNATYKNGISFFDWSFLPGFKSYFHPFPAQTDDIFTVPAFFSNISARMQGYSANVHPDHYFLETYITQQNLGPIPTENFPFGVAYGYHFDSGLLGQYLAEKAVSSGVKRVFGTVTEVLMNQNGELASVRLDDDSLLPADFFIDCSGFKSLLLQGALKATYTSFKENLFNNAAVVMPTPMSAIIPPETKATALSNGWAWKIPLTNRYGNGYVYSADYITPEQAEMELRQHLGMLDSDVTARHLQMTVGRVEKHWEKNCVAVGLSQGFIEPLEATALALSFNTISGFIKAYEKGAYTNQFEDAFNKEINARFDGVRDYIVCHYKVNQRKDTDYWKDNAANPHVSETLNQILHFWQRGGDFAKNMYMNNLVGSYQPKSWACLLAGYGVFPPIESTAINTQYKSPHDMNQLADFIRRCGLNFKSHNELLAQ

SEQ ID NO: 85201 - protein, 467 aa, Cellvibrio sp.
  REGION 1..467: note = tr|A0A3D4Q103|A0A3D4Q103_9GAMM Tryptophan halogenase; OS = Cellvibrio sp. OX=1965322 GN=DIW64_09850 PE=4 SV=1
  VARIANT 190: note = Xaa can be any naturally occurring amino acid
MIGDQAVKNLVIVGGGTAGWMAAASFSKLLGKSISVTLIESDEISTVGVGEATVPPLILLNRYLEINEQEFLAFVKGSIKLGISFENWKNVNENYFHMFGTPGKDTWAASFQHFWLRGKELGVNYPLGDYSLEQKAAENNKFAHMPNASLNYAYHLDAGFYAKFLRNIAEKAGATRIEGKIVNVALDEDXQALHTGYEDWSHWLPCDSAVAVQTESVRDPVPYTRSIAHPAGWQWQIPLQHRVGNGLVYCSRYISDDEAKKVLLDNIQGRLITEPKIIKYRTGQRLKHWNKNCIALGLASGFIEPLESTSIHLIQRGITRLIQMFPHAGIRACDVDEYNEQMKVEILNVRDFIILHYHLTDRNDSSFWEYCKNMEIPESLEQRMRMFRETGKVFVKSYELFSESSWLQVMIGQGLIPENYHPVANEIPAEGLIKFLAGIRAQINQNLQKMPTHKDYLNFYCKASDWN

SEQ ID NO: 85202 - protein, 509 aa, Herbaspirillum sp.
  REGION 1..509: note = tr|A0A542MEQ2|A0A542MEQ2_9BURK Tryptophan halogenase; OS = Herbaspirillum sp. SJZ107 OX=2572881 GN=FBX97_1638 PE=4; SV = 1
MSNTIEHIVVVGGGSAGWLAAAVIAAEHRHLRVTLVESPGVPPIGVGEGTWPSMRDTLHRIGVSESAFFRECDAAFKQGSRFDRWVDGSAGDYYFHPFVLPQGYGDANLAAAWQAQRRHVPFADLASFQPHLCVGGRAPKQARTPEFAAVANYGYHLDAGKFGLFLRAHCVEKLGVRHVLDHVDAVVPHDNGDIAGLRLRDGGVLAGDLFVDCTGMQSLLLGGHYGVPLLHQRHVLFNDRALAVQVPYATPDAPIASQTTSTAQSCGWIWDIGLPTRRGIGHVYSSAHIGDDEAEDQLRAYVAASGGPSDIAPRKLRFEPGYRERFWQRNCVAIGLSAGFIEPLEASALALVEMSAAWLADDMPATRAQVDVVADRFNEAFAYRWERVIEFLKLHYVLSKRSDAPYWIDHRRPETIPARLQELLGLWRTRPPSRRDFPRIEEVFPSASYQYILYGMQTPFEGAPRASDLPQEADRHFREAARLTAQMLPALPSNRALLEHIRLHGLPRI

SEQ ID NO: 85203 - protein, 505 aa, Xanthomonas axonopodis
  REGION 1..505: note = tr|A0A0P6VQ44|A0A0P6VQ44_9XANT Tryptophan halogenase; OS = Xanthomonas axonopodis OX=53413 GN=XAXN_14840 PE=4 SV=1
MTQAQIRKVVIAGGGTAGWIAACALSHQFRNLLDIILVESEQIGTVGVGESTVPPIRTFHRFLQIDEQEFLRAVAGTFKLSISFEHWRRQGERYIHPFGITGQSTLVCAFHHLWLESQRRGMPGSFGDYCLETVASRVDRFALQGEPAVNYAYHLDAALYARFLRARSEACGVTRVEGRIQQVTVQPHSGDVASLVLEGGQVIEGDLFIDCSGFRGLLIEQTLHTGYEDWSHWLPCDRAVAVQTEALGPPVPYTRAIAHEAGWRWHIPLQHRVGNGLVFSSEHLSDDEAHAKLLRDVAALAVKDPWMVPFRTGRRLKAWNKNVVSLGLASGFIEPLESTSIHLTISAVVRLLALFPAEGIAPSQVQLFNDVSRAEMEHVRDFVTLHYHATQREEPLWQQCRQMELPESLALRLRAWRERAHAWQGADELFRVDSWTHVLMGQGIAPEQHHPLTCAFSDHDLRRLLEGIAQPIQHAVQQMPSQQTFIERYCKAGEQVWGMRSPVPA

SEQ ID NO: 85204 - protein, 538 aa, Pseudomonas sp.
  REGION 1..538: note = tr|A0A1X7NWL4|A0A1X7NWL4_9PSED Tryptophan halogenase; OS = Pseudomonas sp. NFIX51 OX=1566187 GN=SAMN03159362_1876; PE = 4 SV=1
MNKPIKNIVIVGGGTAGWMAASYLVRALQQQANITLIESEAIPRIGVGEATIPSLQKVFFDFLGIPEREWMPQVNGAFKAAIKFVNWRKSPGSSRDDHFYHLFGNVPNCDGVPLTHYWLRKREQGFQQPMEYACYPQAGALDGKLAPCLPDGTRQMSHAWHFDAHLVADFLKRWAVERGVKRVVDEVVDVHLNERGYISSLFTKEGRTLEADLFIDCSGMRGLLINQALKEPFIDMSDYLLCDSAVASAVPNDDAREGVEPYTSAIAMNSGWTWKIPMLGRFGSGYVFSSKFTSRDQATADFLNLWGLSDNQPLNQIKFRVGRNKRAWVNNCVSIGLSSCFLEPLESTGIYFIYAALYQLVKHFPDTSFDPRLSDAFNAEIVYMFDDCRDFVQAHYFTASREDTPFWLANRHDLRLSDAIKEKVQRYKAGLPLTTTSFDDSTYYETFDYEFKNFWLNGNYYCIFAGLGMLPDRSLPLLQHRPESIEKAEAMFASIRRETERLRTSLPTNYDYLRSLRDGDAGLSHSQRGPTLATQETL

SEQ ID NO: 85205 - protein, 409 aa, Myxococcus stipitatus
  REGION 1..409: note = tr|L7UDT8|L7UDT8_MYXSD Tryptophan halogenase; OS = Myxococcus stipitatus (strain DSM 14675 / JCM 12634 / Mx s8) OX=1278073 GN=MYSTI_03302 PE=4 SV=1
MKVEKTEVVIIGAGPSGSVAAGLLRKQGRQVLILEREQFPRFSIGESLLPQSMEYIEEAGMLQDVVEAGFQYKNGASFVRGTKYTEFDFREKFTQGWGTTYQVQRAHFDHVLALAAERKGATLRFRHTVESVDVSGATPELTVRSPEGEQYRVQARFLLDASGFGRVLPRLLSLETPSNFPVRGALFTHVEDRVAPGTFDRNKIRITTHPKHVHVWYWTIPFSNGRCSLGVVAKREYLEQFQGTETERLKAIVAEDPELTKLLKDAVWDTPARAITGYAANVKSLWGNGFALLGNAGEFLDPVFSSGVTIAVKSASLAARCIARSFAGETVDWERDYAVPLKSGVDTFRTFVESWYEGGFQDVIFHPNSSPEIRKMISSILAGYAWDKENPFVADSKRRLGVLEKLCAP

SEQ ID NO: 85206 - protein, 439 aa, unidentified
  source 1..439: note = Frankia casuarinae
  REGION 1..439: note = tr|Q2JBA4|Q2JBA4_FRACC Tryptophan halogenase; OS = Frankia casuarinae (strain DSM 45818 / CECT 9043 / CcI3) OX=106370 GN=Francci3_2065 PE=4 SV=1
MAENTEVVDVVVIGAGPAGAAAAATLAKAGRSVIVLERRTFPRFHIGESMVPFVNAAFEKLGILDRLKQQGYVAKHGAEFCQGEEDENVRVSFTTQGPGRHHVTFQVERAHLDNMLIQFAGECGARVIHEATVHDLITEGDRVVGVRYEHDGTAREVRAQYVLDAGGRASKIAKAFRLRKPVDRLKMVAVFRHLKGIDEARNPGFEGDIQVGAHEDGWLWAIPIWPDTMSVGAVMPQQVLRSGDPAALFDEHVSRVRRVRERVAGAHPVSDVQIETDYCYYSDQVAGPGWFLAGDAGCFFDPIFSGGVYLATSTGIRAGESIDAALREPLRAEELQNEYQRFYKTGYDMYARLIYMYYEEPDPDAYLASVGLDDCGDAFASNKWVVRFLCGDFFNARNKLAQEVVKERRWDTFAPFERVSECPYYAELNEAEDREPVEA

SEQ ID NO: 85207 - protein, 484 aa, Brevundimonas sp.
  REGION 1..484: note = tr|A0A069ITI8|A0A069ITI8_9CAUL Tryptophan halogenase; OS = Brevundimonas sp. EAKA OX=1495854 GN=ER13_04535 PE=4; SV = 1
MTAAALARLVAPSGVQITLVESEAIGTVGVGESTLPHIRAFNERLGIDEAAFMKATRATFKLGIQFENWGQIGGSYIHPFGDYGAPGGEAPFHHYWLRGRELGDVGPIDDYSLPVVAAREGRFAPPSDDPRSLLSTYRYAYQFDATLYARFLRGMAETEGVRRIEGRIQNVAQDGESGAITKVTLDDGRQIEGDLFVDCSGFRALLIEQTLKAGFTDWSHWLPCDRAAALPCESDQPTVPYTRATALEAGWQFRIPLQHRVGNGYVYSSAFIDEAAALDRLVGRLEGKPLKAPNVLKFTAGQRTRNWAANCVSVGLSSGFIEPLESTSIYLIQIAITKLIELWPTAVIDPATEAEFNRQMDLEYIRIRDFIILHYCATARNDTPFWDYVRTMPLPDTLSEKIELFRARGVVQDYREGLFLHPSWVAVYLGQDILPRRHHPLVDAVSATQLMSSLERLRRMVREASSRLPSQDDYIARYCAHLPL

SEQ ID NO: 85208 - protein, 492 aa, unidentified
  source 1..492: note = Frankia casuarinae
  REGION 1..492: note = tr|A0A1X1PVV1|A0A1X1PVV1_FRACC Tryptophan halogenase; OS = Frankia casuarinae (strain DSM 45818 / CECT 9043 / CcI3) OX=106370 GN=UK99_14060 PE=4 SV=1
  VARIANT 24: note = Xaa can be any naturally occurring amino acid
MSAPTAELFDVVVIGGGPGGSTVXTLTAKSGHRVLLLERERFPRYQIGESLLPSTVHGVARLLGVDQKLREAGFTRKQGGTFRWGSNPEPWTFSFAVSPRLAGPTSFAYQVERMKFDQILLDNARENGVEVRESCAVVDVTEDGERVTGVRYADPSGHERTVAARCVVDASGNKGRTYRHVGGERHYSEFFQNLALFGYFEGGKRLPPPSSGNILSAAFDDGWFWYIPLTPDLTSVGAVVHRDSAEKVQGDPEQALQSLIDSCPLIKEYLADAKRVTSGPYGELRVRKDYSYCNTRFWRPGMVLVGDAACFVDPVFSSGVHLATYSGMLAARSINSLFAGTVGEQEAFDEFERRYRREYGVFYEFLVSFYGMQANEQSYFWEAKKITNCPLSEFEAFVELVGGVASGEEKLAPGAVARHLATTSRSLADAAEELTEQRGTLHAAGVVANAMAEGVRVQAQAWLGAEAGDETPLFPDGLVSSLDGLRWVRPRS

SEQ ID NO: 85209 - protein, 177 aa, unidentified
  source 1..177: note = Rhizobium fredii
  REGION 1..177: note = tr|A0A0B7MTI5|A0A0B7MTI5_RHIFH Partial tryptophan halogenase OS=Rhizobium fredii (strain HH103) OX=1117943; GN = SFHH103_psfHH103d_311 PE=4 SV=1
MLDLTNAKRIGIIGGGIVGWLAAIALRRVFDVDVDVTVIEAPTVFPLGPGEGGSLNLIDTLCRNELDLDVFIGEAGATHKLGVLYENWRGGGIPDRYYRMFGGSGIPEIECRVGGFFPLLSARIAAGENLHTCIPGFELIIKKASQVEIDELLATGESGLYPSFHFNHAGFERYLRA

SEQ ID NO: 85210 - protein, 509 aa, Catenovulum agarivorans
  REGION 1..509: note = tr|W7Q833|W7Q833_9ALTE Tryptophan halogenase; OS = Catenovulum agarivorans DS-2 OX=1328313 GN=DS2_14834; PE = 4 SV=1
MANFTRPQHITIVGGGTAGWITASVLAKGLIEKGFKISVIESPDIPTVGVGEATIPPIIMLARFLQIDQLDLLKNIAGTFKFGIHFQHWSDIGDSYMHAFGKMQPNFHDNSFTQTWMAYQQELNLAPIHSFLPTAHAAYTGKFAYASKRPDNAPDNYFFPLTELFHAYHFDASLLAKYLKVYATKMGVNFIPATVTDVVCGTNGDIEKLHLNTGDTVPADFFVDCSGEQGLLIKKQLKAEFLHWRDYLPCDRAVVVQTENNQAPHPYTKSIAMSAGWRWQIPLTTRSGNGYVHASQFIEPQQAQDEFAQALSSDSKITDFRTLKFTTGCLKTPWVNNVAAIGLSSGFLEPLESTSIHMTHKFSLELMNAFRYGKNRQQEADTFNNNFYQDALATRDFLIAHYCTTNRTDSEFWCYVKNMPLPDSLTDKLNQFKQTGFIDLPEGSLFAFESWLQVLTGQKMQFNAPTLSQNYSDADVAFFFNNVKNAVSSEVQKLPSHIEFLAQIHQSKS

SEQ ID NO: 85211 - protein, 520 aa, Colwellia sp.
  REGION 1..520: note = tr|A0A2N1CAB7|A0A2N1CAB7_9GAMM Tryptophan 7-halogenase OS=Colwellia sp. 75C3 OX=888425; GN = CXF85_00755 PE=4 SV=1
MSQTNVIQKIVIVGGGTAGWLAANHLAKNLITNSVNSIEITLVESANIPTIGVGEGTVPMMRQSLQHLGISETEFILECDATFKQGIKFVDWTTNPVAGKPAYYHHIFDYPKTSELDLTAYWLKNMKGSGISYVDALSIQGKICDAGLAPKMITTPEFQGATSYGYHLDANKFSALLAKNAVKKLGVTHIQADVVSVLQHENGEISSLVIANGENIQGDFFVDCTGFKSLLLGEKLKVPFKDKSGTLFVDHAVAIQVPYEQADAPIASHTISTALTSGWVWDIGLKERRGIGHVYSSSHTSHEQAEQDLRAYIGPISDGVDSRLIPMKIGYREKFWHKNCVALGLSQGFVEPLEATGLLVFDATAKMLAEQFPSSKLDMPLIAKQFNERVALSWDNVIDFVKAHYCLSKRDDSQFWLDNRANDSIPDSLQERLERWKYQPPSPYDFSNKFGVFNLENYQYILYGMDFDTNLTHFQHRLSQDELASKVFADISNHSDLALNKLPKHRELIDKIYQYGLQKI

SEQ ID NO: 85212 - protein, 502 aa, Caulobacter vibrioides
  REGION 1..502: note = tr|A0A290MV12|A0A290MV12_CAUVI Tryptophan 7-halogenase OS=Caulobacter vibrioides OX=155892; GN = CA606_01220 PE=4 SV=1
MDPIRKIVIVGGGTAGWISASGLAAVLKGLPIAIELVESAEIGTVGVGEATVPHIRYFNARLGLDEADFMRKTQATIKLGIQFCDWGRKGEAYIHPFGAYGHAIDGLPFHQHWLAARARGEAGPIESYSLPIMASHARKFAPPSADPRSLGSTFNYAYQFDAGLYAQYLRAYSEARGVTRTEGKITSVQQRAEDGFVTGVTLENGRVIEGDLFIDCSGFRGLLIEGALQAGYEDWSRWLPCDRAVAAPCEAVESPTPYTRATADRFGWRWRIPLQHRVGNGHVYCSSYVSDDEATRALVENLDGKLQQDPRFLRFVTGRRKKQWFKNVVAVGLSSGFLEPLESTSIHLIQVAITTLVEMFPHRGFQQADQDEYNRVMDLEFERIRDFLVLHYHANQRDDSPFWIERREGPIPDSLAYKMALFRERGAVVGYKDGFFLEPSWLAVYFGQNILPHGHDPLVAASDPARTAKIMADLSTAVTRTVEAMPTHEAFLRAMAQTRSPA

SEQ ID NO: 85213 - protein, 504 aa, Pseudoalteromonas piscicida
  REGION 1..504: note = tr|A0A290TSP8|A0A290TSP8_PSEO7 Uncharacterized protein OS=Pseudoalteromonas piscicida OX=43662; GN = PPIS_a0855 PE=4 SV=1
MKNQKIVILGGGTAGWMAANMMAKSWADKAIEITVVESSSIGTIGVGEGSTPQFKGFMDYLGISEAEWMPACNATYKNGIRFIDWSTKPGFSSYFHPFPAQPDDYSAPAFFHNSFVRRKAIDVEGHPDHFFLATHLADLNKSPIAAESFPFEINYGYHFDSALLGQLLARKAAEFNVKHIDATITDVRKHLDGDIAALITSDGTEISGDIFIDCSGFKSLLLQHTLGVGFESFESNLFNDAAVVIPTKQLDTIRSETQSVARQFGWSWHIPLTNRIGNGYVYSQHYCDADQAETELRAALGLLDSEVEARHIKMKVGQVKAHWSKNCIAIGLSQGFIEPLEATALHIVQETVQSFIECYQDAGFTDGNRDKHNRALSERYQAIRDYIVAHYRVNSRTDTNYWLDNANNNHLSRSLYQILQTWVSGNNLSDELVRQNVEQYYPSVSWHCLLAGYGIYPEQAQLKSGNALANQHNIEKVNDFIRRCGLNFKDHRMELESFVANVHK

SEQ ID NO: 85214 - protein, 516 aa, Streptomyces sp.
  REGION 1..516: note = tr|A0A4U0NVN3|A0A4U0NVN3_9ACTN Tryptophan 7-halogenase OS=Streptomyces sp. jys28 OX=2571125; GN = FCH28_14170 PE=4 SV=1
MLNKVVIVGGGTAGWMTASYLKAAFGERIQITLVESGNVGTVGVGEATFSDIRHFFEFLGLKEKDWMPACNATYKLAVRFENWREKDHYFYHPFEQMRSVNGFPLTDWWLHQSPTERFDKDCFVMASVIDAGRSPRMLDGTLIDQPFDEGADEMQGLTMSEHQGKTQFPYAYHFEAALLAKYLTKYAVDRGVKHIVDDVKQVNLDDRGWISGVTTAEHGDLTGDVFIDCTGFRGLLLNKALEEPFISYADTLPNDSAVALQVPMDMEKRGIRPCTTATAQDAGWIWTIPLMGRVGTGYVYAKDYLSPEDAERTLREFVGPAAADVEANHIKMRIGRSRNSWVKNCVAIGLSSGFVEPLESTGIFFIHHAIEQLAKNFPGEDWNPTHRDLYNKAIGNVMDGVREFLVLHYVAAKRTDNQYWRDTKTRAIPDALAERIETWKTQLPDSETVFPYYHGLPPYSYMCILLGMGGIDLKPSRALALCDGSAAEREFSEIREKTRRLTEVLPPAYEYFAQHH

SEQ ID NO: 85215 - protein, 503 aa, Sphingomonas sp.
  REGION 1..503: note = tr|A0A196MQR0|A0A196MQR0_9SPHN Tryptophan halogenase; OS = Sphingomonas sp. TDK1 OX=453247 GN=A7X12_06900 PE=4 SV=1
MATAAPYRIVVAGGGTAGWMAAAALARFLGAGFTVTLVESDAIGTVGVGEATIPQIRMFNASLGIDEDAFVAATQASYKLAIEFVGWTKGGRYMHAFGDVGRDNGLLAFRHTWLRGLAEGVAEPLAAYALNNVAARANRMQRGPARTARVLPEMPYAFHFDAGLYARFLRDHAEAAGVVRHEGRIEAVSRNGEDGNVAALHLDGDRRIEGDLFLDCTGFHARLIGEAMGVGYQDWSHWLPCDRALAVPSARARDFTPYTRATAHDAGWQWRIPLQHRTGNGIVYSSRHLSDDEAAARLLSGLDEPALADPRPIRFHTGRRELAWAGNVIALGLASGFLEPLESTSIHMIQSAVERVLKLLPGGRAVTPLRDSYNRQAAHESERIRDFLILHYWANDRDERFWRERRETPLPDGLADKIALWREAGEIVREDSDLFSDVAWLQVLVGQGIIARRYHPLADQPPVAQIAEYLDLLAKLNAREVAQMLPHSDFVRAHGAAGAEIAA

SEQ ID NO: 85216 - protein, 499 aa, Hyphomonas sp.
  REGION 1..499: note = tr|A0A2D7B0U2|A0A2D7B0U2_9RHOB Tryptophan halogenase; OS = Hyphomonas sp. OX=87 GN=CME99_10465 PE=4 SV=1
  VARIANT 61: note = Xaa can be any naturally occurring amino acid
  VARIANT 324: note = Xaa can be any naturally occurring amino acid
  VARIANT 366: note = Xaa can be any naturally occurring amino acid
  VARIANT 470: note = Xaa can be any naturally occurring amino acid
  VARIANT 480: note = Xaa can be any naturally occurring amino acid
MSTQQVKRVVIAGGGTAGWIAAAALSRMLGPLLDITLVESDAIGTVGVGEATIPTHRTFHXLLGIDEREFMRATKATFKLGIAFENWGGVGDRYIHSFGQVGKPSWMGEFYNIWMYAQERGIGDALDAYCFELQAAEEDRFYTSEKANINFAYHLDASLYAKFLRTFSEAKGVKRVEGLIDTVEQDGESGFITALKLQSGERIEGDLFIDCTGFRGLLIEQTLKTGYEDWTHWLPTDSALAVQTRSVGPAIPYTRAIAHHAGWQWRIPLQHRVGNGLVFCSENMQPDEAQEFLLNNVDGEPLTEPRLIRYKTGRRRKVWNKNCXALGLSSGFVEPLESTSIHLIQIGATRLVQQFPFSGISEAIAXHYNEQAERELEKIRDFIVLHYKLTERDDSDFWRARRDMPVPDTLSQRIALFRENGLVYQASDDLFRVDSWLQVMMGQRLKPKGYHHMGHMMTDDQLTRALGGLXASIAQAVSKXPKHQDFIDTYCAAPETETA

SEQ ID NO: 85217 - protein, 545 aa, unidentified
  source 1..545: note = Chloroflexi bacterium
  REGION 1..545: note = tr|A0A2E7PC18|A0A2E7PC18_9CHLR Tryptophan halogenase; OS = Chloroflexi bacterium OX=2026724 GN=CL732_01780 PE=4; SV = 1
MNVTDLSADVVVIGGGPAGSAAATMLARKGWQVTVLERENFPRDHVGESLLPASIPILEELGALPAVEEAGFLPKPGATMVWGSGSSPWSWYFKETSQRYPHSYQVWRPQFDQILLDNARAAGVTVVEGAHVSEVIFDDGEAVGVEFTNADGVEGEAECRFIVDASGQSTLLARHLEYKQWDPFFQNLAVYAYFTGGDPLPEPDQNNIFIESYQHGWLWSIPLHTGRTSVGAVVDSKIGQEGIQKEGAKAFLESQLSQSTHTKNMLAKAAMDSEPTVLLDWSYTSEKLFGPGFILAGDAACFVDPLFSSGVHLALMSGVLAAAYVTTALNDPSLAEDAGQVYQELYLKEYNQFREMARLFYSSNLSAESYFWEARRITNASHYSPRESFIQAVAGQPPRGYERVVLERGHAPEEFTESIRAVETERRARTEWLAALAGDPQRNQLLNAIPLIAEGVKVEEKPVLAEGEFVRGHVLNTISQPEGTPCSPIVAAVITAVDGQKSVADIVDSLGQHLDQSAHAQLEEAVSRTIEILFVDGAITGLTTE

SEQ ID NO: 85218 - protein, 509 aa, Caulobacter vibrioides
  REGION 1..509: note = tr|A0A0V2FD61|A0A0V2FD61_CAUVI Tryptophan halogenase; OS = Caulobacter vibrioides OX=155892 GN=AS593_22400 PE=4; SV = 1
MANNLRKIVIVGGGSAGWITAAMISHYLKDSPCEIELIESEQIGIIGVGESTIPPFLQLIRSLGIDEKEFMQETQAAFKLAIRFENWRQKGEVYYHPFGLIGGPVDVHEFYQVWLRGKAEGHPSNLQDFATASVMADRWKFMSPAMAPRTMIANANYAVHIDAALLAKFLRKFAEARGVKRTEGIVKDVATRPDGFIEKVILQDGREASGDLFIDCSGFRSLINGQTLKTEFLDWSDVLLCDRAIAVQTANVRDPHPYTLAQAQDFGWRWRIPLQHRAGNGYVFCSQYCSDDEAMATLMSQVEGEAVRDPWIVPFKTGMRKQLFNKNCVAIGLAGGFIEPLESTALHLIYRGVDYLLRFFPDRDCDATVAAEYNRRMRADYEEIRDFIVLHYFTTKRDDTPFWRAYQQVTPPESLRERIELFKAGGVLRDGVDDMFRAPSWQSVMEGMGIRPKRYQQLVDTLPAGVVKGLLDKSAPMLSELVDTLPSHGDFLRQHCPAPVPEALLKKVG

SEQ ID NO: 85219 - protein, 505 aa, Rhodanobacter sp.
  REGION 1..505: note = tr|A0A1G3F6C1|A0A1G3F6C1_9GAMM Tryptophan halogenase; OS = Rhodanobacter sp. RIFOXYA1_FULL_67_6 OX=1802011; GN = A2211_01505 PE=4 SV=1
MTNQRIKNIVIVGGGTAGWMSAAALAKVLGPGHSIRLIESEEIGTIGVGEATVPHLSLFNKLLGIDEAEFVRETMGTFKLGVQFVDWLKPGKTYVHGFGTSIGLDIGMLPFHQYWLRAFKSGNASEIGNYSLNTLAAARGKFMVSAADAPPNTPLANIAYAYHFDAGLYARYLRRYAEARGVQRTEGKIRETLLRPSDGFVDAVVLESGEKISGELFIDCSGFRGLLIEQALHTGYEDWNHWLPTNRAVTVACERTAPPTPYTRATAQTAGWQWRIALQHRVGNGHVYASPYISDDEAAATLLRNLDGAPLGEPRLLRFVAGTRKKVWNRNVVAIGLASGFLEPLESTGIFLIQSAITRLLTLFPDRNFSEAVIDRYNALSRFELERIRDFLILHFHATQRDDTPFWNYCRTMEIPETLRSVMALFRESGQFIRNAEELFGLVSWVEVMLGQGIMPTAWHTGADQMSEKDLNEFVAHVQQVIATCVDAMPPHQAFIDRYCKAAGV

SEQ ID NO: 85220 - protein, 479 aa, Rhodanobacter sp.
  REGION 1..479: note = tr|A0A1G3FAF8|A0A1G3FAF8_9GAMM Tryptophan halogenase (Fragment) OS=Rhodanobacter sp. RIFOXYA1_FULL_67_6; OX = 1802011 GN=A2211_11400 PE=4 SV=1
MARIQRILVVGGGTAGWLTACYLAKVLNTAAPESVRVELVESPNIGLLGVGEATFPSIRGTLAAIGLDERRFLVGASATYKQGIQYVNWVRPRGEPGPDRFFHPFSLPSQRSGSPELLPYWLLGGAPDGMAFAEAVTMQQRLIEHGRAPKRATDPDYQGPMNHAYHFDAACFAAVLAEHGQSLGIRRHLATVERAELDESGAIARIVTREIGELSADLYVDCTGLRGALIGGAMQSPFHSRRDVLFADRAVALQVPYPRQDAPILPFTRATAQEAGWIWDIGLQKRRGIGYVYSSRHSGATRAEEVIRGYVGAAADGLDALHIKFETGYRPEHWRRNCVAVGLAGGFVEPLESTGIALVELAAYLITHLLPGDVDDMERTARRFNEMMVARYERIIDFIKMHYCLSQRRDSAFWIDNTAPASIPQTLQDRLALWRHRPPHRLDFVTDLEMFMPASWQYVLYGMEFGTDLEPMRSAYPQM

SEQ ID NO: 85221 - protein, 95 aa, Caulobacter vibrioides
  REGION 1..95: note = tr|A0A258D816|A0A258D816_CAUVI Tryptophan halogenase (Fragment) OS=Caulobacter vibrioides OX=155892; GN = B7Z12_09215 PE=4 SV=1
MTTTHPNALRKIVIVGGGSAGWISAAMLSHYFQNGGCAVELIESEEIGTIGVGESTIPPFLQLLASLGVDEREFIQATQASFKLGIRFEDWKQKG

SEQ ID NO: 85222 - protein, 498 aa, unidentified
  source 1..498: note = Planctomycetes bacterium
  REGION 1..498: note = tr|A0A517VW22|A0A517VW22_9BACT Tryptophan halogenase; OS = Planctomycetes bacterium V144 OX=2527964 GN=V144x_26700; PE = 4 SV=1
MQQFDVVILGAGFGGSLTALLLNQIGRNVALIDRGTHPRFSIGESSTPIADYLLESLSENYDLPQFQPFCKYGTWQERYPQLACGIKRGFSYFAHEPEQFFRQKSNHSSELLVTANLDEASADTHWFRADVDHFFAEEVQKSSVVYLDQTEVVLAQSDDWTIQAERRGERFDFRAQFLIDATGAMGVVPDFLGVERQTVFESCSTAVYGHFENVTPWSEILDQYEFDRSEYPFDCDQAALHHVLSEGWMWQLRFNNDITSAGFVLDSAKNALSAIELWQNLLSRYPSILSQFEGASIVSPEFGLCSTGRLQRGWKECAGPNWALLPHTAGFVDPLHSTGIAHTLCGIERLVMTLEQCWRNSDELSVALSHYSESIQAELKLIDALVACCYRSLKQFDLFTTSALFYFAAATSFEHQRCNEQKRPLFLCADDVDLSNIIGGWLNEVSQIQEKNVSNPDEIKQAILNAETKLKPWNRVGLFHPDVPNMYYYTAAPKPEPQ

SEQ ID NO: 85223 - protein, 495 aa, Alteromonas sp.
  REGION 1..495: note = tr|A0A4U0ZCI2|A0A4U0ZCI2_9ALTE Tryptophan 7-halogenase OS=Alteromonas sp. HB161718 OX=2565549; GN = E5672_06665 PE=4 SV=1
MNQTVKNVVIVGGGTAGWISAAVIKRLIGAGVDVTLVESEEIGTVGVGEATIPPIITLNNVLGIDEKEFLRETNATMKLAIKFENWRVQGESYFHTFGAPGKSYAFCHFHHYFKRAQTLGLTDSIWEYDLNYLACKNGKFAHIKSPDPIIEMPYAYHFDASLYARFLRKKCEAMGVTRKEGIISDVTQDADNGFVTGVTLKSGEHVEGDLFIDCSGFKGLLTQQTLNTGYEDWSHWLPCDRAVAMPSERLEKTLPYTRSIAHSAGWQWRIPLQHRNGNGLVYSSNYYSDDQALDILSSNLDTKPLADPNFIRFRTGRRRKQWNKNVVAVGLSSGFLEPLESTSIHLIQSAVVRLIHLFPHDGFKQRQIDEYNKQSQLEFEQIRDFIILHYHVNERKDSHFWKDLREMDVPDSLTHKIELFRASGNLFREQNDLFLESSWLQVLMGQGVVQKDYHPLANALSEQKLQELMQNIKRIKNEPIGKIATHDDFLKQFCG

SEQ ID NO: 85224 - protein, 534 aa, unidentified
  source 1..534: note = Chloroflexi bacterium
  REGION 1..534: note = tr|A0A2E2AN27|A0A2E2AN27_9CHLR Tryptophan halogenase; OS = Chloroflexi bacterium OX=2026724 GN=CL709_11620 PE=4; SV = 1
  VARIANT 440: note = Xaa can be any naturally occurring amino acid
  VARIANT 458: note = Xaa can be any naturally occurring amino acid
  VARIANT 484..485: note = Xaa can be any naturally occurring amino acid
  VARIANT 489: note = Xaa can be any naturally occurring amino acid
  VARIANT 516..517: note = Xaa can be any naturally occurring amino acid
MPDAVIIGGGPGGGTAATLLARRGYSVVLLEREIFPRAHVGESLLPASMPVLEELGVLGQIESENFPKKYGATMVWGRDDTPWSWYFRETNRTYPHAYQVSRPRFDQILLDNAKSSGVDVRENCNVFETLPDSESGAIHGVRYRRDSGIVESVEADFVMDASGQSALLARSMNLRTWDTFFQNLAVYGYYRGAKRLPSPDENNIFIESYGQGWTWTIPLKDGLTSVGAIVDSESAQAMLADIGPDEFLIQQISQTARTNDMLSDAELTGPPRVVRDWSYTTNHMVGDGWILLGDAACFVDPLFSSGVHLALMSAVMAAAYVHGAKTDPTLRVPAGQVYEQLYRKEYAHFRELASLFYASNRTEESYYWQARRLLGDSNVGARESFIRAVAGQPPRGYERSALSRGELPSEISEMFASVASDKRLRDATVAMGLSLNLVPXLAGEAKLERRPIFAEGEXQWSAVLSSATRPEGTPLSNFVAALVXXVDGXRNIGQILDRFTQGVEDSEQIEQAHESXXNAISILYVDGAIDSLMG

SEQ ID NO: 85225 - protein, 504 aa, Sphingomonas sp.
  REGION 1..504: note = tr|A0A196MT96|A0A196MT96_9SPHN Tryptophan halogenase; OS = Sphingomonas sp. TDK1 OX=453247 GN=A7X12_04745 PE=4 SV=1
MGGQQSLRVVIVGGGTSGWMTAAALARLLPARCSLHLIESEAIGVIGVGEATLPHIRSFVEKLGIPEADFMAWTRGTFKLGIEFRDWGKIGDSYIHPFGTFGRGKGEVDFHHYWTRLRRAGADVPSLEAFSYACMLARANRFDVPATDPAQLASTYGYAYQFDALLFAPYLRAIAEELGATRTEGKVVEVLRDGTSGNITAVRLDDGQLVEGDLFIDCSGFRSLLLGEAMKEPFEDWNHWLPADRAVAMPCRTETSVTPYTSAIAMPAGWRWRIPLQHRTGNGYVFASAFTSDDAAAQALTQAVEGAPLADPRFLRFRAGRRRRSWVNNCVAIGLASGFLEPLESTSIYLVQQAITALIELFPETRISPVDRDEFNRLIDLEYDRIRDFLILHYHATTRSDSEFWNYVRTMAVPDSLAEKIELFRRAGRVVKYREGVFLDASWIAVYVGQGIVPEGYDPRADLPDSDSLMRGMQALRAEIDATVAQVPEHLRYIDRHCAMAAAA

SEQ ID NO: 85226 - protein, 513 aa, Sphingomonas desiccabilis
  REGION 1..513: note = tr|A0A4Q2J211|A0A4Q2J211_9SPHN Tryptophan 7-halogenase OS=Sphingomonas desiccabilis OX=429134; GN = EO081_07955 PE=4 SV=1
MQQIQNIVVVGGGTAGWLTAGVIAAKHQGQRPHGFTVTLVESPNVPTIGVGEGTWPTLRTTLRRMGISESEFFRQCDAAFKQGARFNRWTTGAADDGYYHPLMLPQQFGKVNLAPHWLAEGGDESFCDTVTPQGRLCDEGLGPKTIATPEYEALANYAYHLDAGKFAQFLQRHCCNVLGVRHVLADVTEVKLAETGDIRSLDTAQGQTIAGDLFIDCTGFAALLIGKALGVPFRSCSDTLFCDTALAVQVPYDRPDQPIATHTISTAQSAGWIWDIGLPTRRGVGHVFSSSHVSADAAEQELRAYLGPAGHDLPIRQISIRSGHREQFWVRNCVAVGLAAGFLEPLEASAIVLIELSAKMIAEQLPACREVMDVVARRFNETTTYRWGRIIDFLKLHYSLTQRTDTEFWRDNLRPETIPDRLQGLMELWRYQSPWMHDEFDRAEEVFPSASYQYVLYGMGARTAVLPGTIDEDVEFARRARRENQIQTQRLVSSLPAHRDLIDRIVRHGLQPI

SEQ ID NO: 85227 - protein, 513 aa, unidentified
  source 1..513: note = Caulobacter rhizosphaerae
  REGION 1..513: note = tr|A0A561N2Q8|A0A561N2Q8_9CAUL Tryptophan halogenase; OS = Caulobacter rhizosphaerae OX=2010972 GN=FHW61_110117; PE = 4 SV=1
MTGKSIRKIVIVGGGTAGWMAAAGLSRALREHQPQPLKVEIQLVESEEIGTVGVGEATIPPLILFNQFLGVNEDEFVRATQATFKLGIEFVDWTRLNHRYLHPFGRYGADLASSAFHQYWLKLRSLGDPSDLGDYSLPTLAARLRRFDRPTANSASIMSTYSYAFHFDAGLYAKFLRGYAEARGVERVEGKVVDVSLRGEDGFIRSITLADGRVLEGDLFIDCSGFRGLLIEQALKTGYDDWSNWLPCDRAVAVQSQSVEDLTPFTRATAHAAGWRWRIPLQHRVGNGYVYSSPFISDDEAAATLLGELDGEPCIDPRFLRFTAGRRRRYWNKNCVALGLASGFMEPLESTSIHLIQTGITKLIQLFPDRTFSPVLLDEYNRLTDQEYEKIRDFLVLHYHANERTDSPLWRQVREMPIPDSLAHKMELFRETGRLASMGQDLFQEPSWLAVLIGQNVMPRAYDPLVDLMDAGVVEKNLRAMRIAMRQAAEAMPSHRDFIAAHCAAPDLPPRWK

SEQ ID NO: 85228 - protein, 533 aa, Streptomyces sp.
  REGION 1..533: note = tr|A0A2V2B1G8|A0A2V2B1G8_9ACTN Tryptophan halogenase; OS = Streptomyces sp. CG 926 OX=1882405 GN=BCL76_106124 PE=4; SV = 1
MTSSDTRLQKVVILGGGTAGWMTAAYLGKALQGTVDITVLEAPTIPRIGVGEATVPNLQRSFFDYLGIAEDEWMRECNASFKMAVRFVNWRTDGQGESAARELPGGGPDHFYHPFGLLPDYDQTPLSHYWFKRKYEGRTTEPFDYACFREPPVMDAMKAPRWLDGRPATRYAWHFDAQLVADFLRRFSTEKQGVNHVQDEMVRVEQDERGYVTTLHTKGGLALDADLFVDCSGFRGLLINQAMEEPFIDMSDHLLCDSAVATAVPHDDEANGVEPYTSAIAMSSGWAWKIPMLGRFGTGYVYSSKFTDQDTATREFADMWGLDVEETKFNHIRFRVGRNRRAWVKNVVSIGLSSCFLEPLESTGIYFITAAIYQLAKHFPDKTFNDGLINSFNHEIEVMFDDTRDFIQAHFFYAPRNDTPFWQANKKLTLPDNIQQKISAYKAGLPINSPITDESTYYGNFEAEFRNFWTNGSYYCIFAGLGLEPDAPLPSLAHRPDSVAGAEPLFDAVKRQQQNLLETLPSAYDYLRQLHGA

SEQ ID NO: 85229 - protein, 496 aa, unidentified; identical to SEQ ID NO: 84489
  source 1..496: note = Porticoccaceae bacterium
  REGION 1..496: note = tr|A0A2D6ZEG4|A0A2D6ZEG4_9GAMM Tryptophan halogenase; OS = Porticoccaceae bacterium OX=2026782 GN=CMK29_06895 PE=4; SV = 1

SEQ ID NO: 85230 - protein, 501 aa, unidentified
  source 1..501: note = Caulobacter rhizosphaerae
  REGION 1..501: note = tr|A0A561NPM3|A0A561NPM3_9CAUL Tryptophan halogenase; OS = Caulobacter rhizosphaerae OX=2010972 GN=FHW61_103217; PE = 4 SV=1
MTDHRLRKIVIVGGGTAGWMTAAALGRFLKDGHTRVTLVESEEIGTIGVGESTIPQINIFNRTLGLDENEFVRRTKATFKLAIDFVDWKEIGHRYYHPFGPYGLDMDGVSFHAYWLRLNAMGEAADLAEYSLQALASAQSKFMRANGQRNSPLGTLSHAYHIDAGLYALFLRDYAEARGVTRQEGRIVEIHQRAEDGFIEAVTLQGGQRIEGDLFIDCSGFRGLLIEQTLKTGFEDWSHWLLNDRAVAVPCELAGSRQPVTRATARPAGWQWRIPLQHRLGNGYAYSSAHISDDEATADLLAHLDGAPLRDPFTLRFTAGRRKKSWNKNVVAIGLSAGFMEPLESQSIHLIQVGIARLLAMFPDRRFQTPDIDRYNRVMRFEYETIRDFLILHFHATRRNDTPYWDYLREMPIPDYLADKIAVFQSYGRVFRENEELFTDTSWFAVMIGQGLEPRGHDPMADVMSDEDLRTRMANIHAVIAKSAQAMPDHMRFIAENCAAD

SEQ ID NO: 85231 - protein, 538 aa, Burkholderia cepacia
  REGION 1..538: note = tr|A0A107NYD7|A0A107NYD7_BURCE Tryptophan halogenase; OS = Burkholderia cepacia OX=292 GN=WL94_18755 PE=4 SV=1
MSNPIKNIVIVGGGTAGWMAASYLVRALQQHTSITLVESAAIPRIGVGEATIPSLQKVFFDFLGIPEREWMPQVNGAFKAAIKFVNWRKSPEHARDDHFYHLFGTVPNCDGVPLTHYWMRKREQGFQQPMEYACYPQPGALDAKLAPCLSDGTRQMSHAWHFDAHLVADFLKRWAIERGVKQVIDEVEQVHLNERGYIASLSTKEGRTLEADLFIDCSGMRGLLINQALKEPFIDMSDHLLCDSAVASAVPNADARVGVEPYTSAIAMNSGWTWKIPMLGRFGSGYVFSSKFTSRDQATADFLNLWGLSDKQPLNQIKFRVGRNGRAWVNNCVAIGLSSCFLEPLESTGIYFIYAALYQLVKHFPDTSFDPRLADAFNAEIVHMFDDCRDFVQAHYFTSSRDDTPFWLANRHDLRLSDAIKEKVQRYKAGLPLTTTSFDDSTYYETFDYEFRNFWLNGNYYCIFAGLGLLPDRSLPLLQHRPESIDKAEAMFARIRREAERLRTSLPTNYDYLRSLRDGGAGLSRSQPGPTLAAPEIL

SEQ ID NO: 85232 - protein, 506 aa, unidentified
  source 1..506: note = Novosphingobium kunmingense
  REGION 1..506: note = tr|A0A2N0HK55|A0A2N0HK55_9SPHN Tryptophan halogenase; OS = Novosphingobium kunmingense OX=1211806 GN=B0I00_1563; PE = 4 SV=1
MNGDTARRIVIVGGGTSGWMTAAALGRFLGPPWQVTLVESEEIGTVGVGEATIPMIRNFNLALGIDEAEFLAATQGTYKLGIQFEGWGGFGQTYMHAFGMVGRSLGLLPFHQYWLRGRAEGLAGPLGDYVLNAVIAGQNRFAHVERRPGSPLPAVPYAYHFDASLYARFLRRFAELRGVTRREGRIAEVARHGENGDVAAVILTDGTRIEGDLFVDCSGFRALLLGEALGVPYVSWAKWLACDRAVAVPSRRCDPLVPYTRSIAEPAGWRWRIPLQHRTGNGHVWCSDHMGEDEATTRLLAGLDAEPLADPRVLRFTAGRRERFWERNVVAIGLASGFIEPLESTSIHLVQTAINRLLDFLPSGAVAAADRDGFNRLAVWEIERIRDFVVAHYVCNGRAGEPFWDYLRTVDLPETLAERIAMFRATGRIVREGDELFDVVGWAQVLIGQGVIPDAWHPLADQPDRDQLAGFLDTLTTAYLRDAERMPAHADHVARFCPAGDIDVAA

SEQ ID NO: 85233 - protein, 522 aa, unidentified
  source 1..522: note = Porticoccaceae bacterium
  REGION 1..522: note = tr|A0A2E8UF56|A0A2E8UF56_9GAMM Tryptophan halogenase; OS = Porticoccaceae bacterium OX=2026782 GN=CMK38_03450 PE=4; SV = 1
  VARIANT 29: note = Xaa can be any naturally occurring amino acid
  VARIANT 71: note = Xaa can be any naturally occurring amino acid
  VARIANT 174: note = Xaa can be any naturally occurring amino acid
  VARIANT 195: note = Xaa can be any naturally occurring amino acid
  VARIANT 199: note = Xaa can be any naturally occurring amino acid
  VARIANT 201: note = Xaa can be any naturally occurring amino acid
  VARIANT 203: note = Xaa can be any naturally occurring amino acid
  VARIANT 217: note = Xaa can be any naturally occurring amino acid
MNDPQITDLVIVGGGSAGWLTAGIIAAEXLKTEQSSSRVKVTLVEAPNINTIGVGEGTWPSMRSTLKRIGXSETDFIRDCDVSLKQGTLFSGWTDGKDIYTHPFTVPHAYSQHNLSRDWQNKFSDLPFAEAVCPQSKLMLKNQAPKKISTPEYSFNVNYGYHLDAGKFAEKLRXHCTLELGVVHKKAEVIQVNSXENGXIXSXRLDTGESLTGDLFXDCSGSRCLLLGEHYGIPFKSIRDILFNDSAIASQVPYLSAGDSIASSTISTAQKHGWIWDIGLPSRRGIGHVYSSRYTDADNAEVTLFKHIEKLVGSKIAKKVKMRRISFSPGHRQKFWHHNCVAIGMAAGFIEPLEASALVLVELSASMIAEQLPQNRKVMDIVSKRFNEKFLYRWDSIIDFLKLHYVLSKREDSGYWRDNANKNSIPESLSEKVELWRWQGPYHKDTMHVDEMFPSASYQYILYGMGFKTNIGLSTKQSEVQTSKVAQELFDENLKYTNLLLNSMPSNRDFIEKVHQHGLQKI

SEQ ID NO: 85234 - protein, 502 aa, Sphingopyxis alaskensis
  REGION 1..502: note = tr|Q1GWR6|Q1GWR6_SPHAL Tryptophan halogenase; OS = Sphingopyxis alaskensis (strain DSM 13593 / LMG 18877 / RB2256) OX=317655 GN=Sala_0182 PE=4 SV=1
MTPMRIIIIGGGTAGWMAAACFTRFLPPGWSVTLVESDAIGTVGVGEATIPQIRLFNQALGIDEDEFLTATQGTIKLGIEFADWTRPGHRYMHAFGAIGRGLGLLEFQHYWLRARAAGVAGELGTYSLNETAAHARRMQRGAPRTSPHLAEMPYAFHFDAALYAAYLRRRAEAGGAQRVEGKVADVRLDGDSGNVAGVTLDDGRRIDGDLFIDCSGFRGLLIEGALATGYDDWSRWLINDRAIAVPCVHGATPQLPWTGATAREAGWQWRIPLQHRIGNGYVYSSHHISDEDAERTLLAHLDGAPQAQPNRLRFVSGKRRKLWNRNVVALGLASGFMEPLESTSIHLVQSGISRLLKMLPVGVADPAVAAEYNRQSDFEWERIRDFLILHFKATERRDTRYWQDRAAMPIPDTLAAKIDQFRAQGLIFREHEELFTESGWLQVLIGQGIEPRAWHPLADGIGEAELAKYMAGISLMIEREVAVMQSYDDFLAATRPAAGVAA

SEQ ID NO: 85235 - protein, 538 aa, Burkholderia cepacia
  REGION 1..538: note = tr|A0A0J5VZW4|A0A0J5VZW4_BURCE Tryptophan halogenase; OS = Burkholderia cepacia OX=292 GN=VL15_38060 PE=4 SV=1
MSNPIKNIVIVGGGTAGWMAASYLVRALQQHTNITLIESAAIPRIGVGEATIPSLQKVFFDFLGIPEREWMPQVNGAFKAAIKFVNWRKSPDRSRDDHFYHLFGSVPNCDGVPLTHYWLRKREQGFQQPMEYACYPQPGALDGKLAPCLPDGTRQMSHAWHFDAHLVADFLKRWAVERGVSRVVDEVVEVRLNDRGYISSLSTKDGRTLEADLFIDCSGMRGLLINQALKEPFIDMSDYLLCDSAVASAVPNADARVGVEPYTSAIAMNSGWTWKIPMLGRFGSGYVFSSKFTSRDQATADFLNLWGLPDNQPLNQIKFRVGRNGRAWVNNCVAIGLSSCFLEPLESTGIYFIYAALYQLVKHFPDTSFDPRLTDAFNAEIVHMFDDCRDFVQAHYFATSREDTPFWLANRHDLRLSDAIKEKVQRYKAGLPLTTTSFDDSTYYETFDYEFKNFWLNGNYYCILAGLGMLPDRSLPLLRHRPESIDKAEAMFARIRREAERLRTSLPTNYDYLRSLREGDAGRSRSQPGPTLATPEIL

SEQ ID NO: 85236 - protein, 516 aa, unidentified
  source 1..516: note = Porticoccaceae bacterium
  REGION 1..516: note = tr|A0A2D6ZEN1|A0A2D6ZEN1_9GAMM Tryptophan halogenase; OS = Porticoccaceae bacterium OX=2026782 GN=CMK29_07225 PE=4; SV = 1
MTMSTSANEGKISSIMIVGGGSAGWLTAGILAARYGQTMTITLVESPDVKIIGVGEGTWPTMKGTLKEMGISETDFFRECDASFKHGAKFAKWVSGDEADYYYHPLMLPQDFTKLNLAPYWLKNNGDRSFSESVCFQEALCERALAPKTVTMPEYNSAANYAYHLNAGKFTKFLTGHCTGKLNVKHKLATISEVLTSEDGDIRCVKTTDGQELVADLFVDCTGMASLLLGKTLGVEFIDKNDSLFIDRALAAQKPYESEEEPILPYTVSTAQKAGWIWDIGLTSRRGIGHVYSSKHTSEAEAEKALSDYIGPLFKDLSIKKISIRSGHREIFWKQNCVAIGLSAGFLEPLEASALMLIEISAKFVRDQLPETRNTMPIIARRFNKTMTYHWERIIDFLKLHYVLSKRDDSDFWIDNRCPSTVPDSLAELLELWRYHTPYRQDFSHKEEVFPAASYQYVLYGMGFQTEVSNRHVESTDDAYRAAVAENERMVSKAVELLPDNRQLLQKINRFGMSAF

SEQ ID NO: 85237 - protein, 493 aa, unidentified
  source 1..493: note = Porticoccaceae bacterium
  REGION 1..493: note = tr|A0A351Q5T5|A0A351Q5T5_9GAMM Tryptophan halogenase; OS = Porticoccaceae bacterium OX=2026782 GN=DCW94_05615 PE=4; SV = 1
MMKVVIAGGGTAGWMAAFSLSARLGSLLDITLIESDEIGTVGVGEATIPPMRNFHRIMNVDEQEFMRETQATFKLGIEFDNWGEIGDSYIHSFGEIGQRSWMAEFHEFWMEARAQGFGGSLEDYCLELKAAKAGKFATQIDDTRLNFAFHLDATRYAKYLRKKSEAAGVRRVEGLIKDVQKDPQSGDIKALLLDSGELIEGDLFVDCTGFRSLLLGESLGVEFEDWSHWLFSDRAIAVQTTSVDEPRLYTRAIAHTSGWQWQIPLQSRVGNGIVYSSRFMSDDEAKDTLLSNISGEMITEPRFIKYRTGRRQKSWHKNCVALGLASGFIEPLESTSIHLVMTAIIRLIRLFPFGDSSEALADRFNEESTTEIETVRDFIILHYKQTNRTDSDFWNAYRTMDIPESLAHRLEIFKKNGYVWADDVALFRVDSWVQVMMGQGLAPAGFHGAGKLTDKTVLQESLAKIKASIDEKVEKLPTHQQFIDHYCKAPSAD

SEQ ID NO: 85238 - protein, 572 aa, unidentified
  source 1..572: note = Planctomycetes bacterium
  REGION 1..572: note = tr|A0A5C6AS78|A0A5C6AS78_9BACT Flavin-dependent tryptophan halogenase RebH OS=Planctomycetes bacterium Pla52n OX=2528005 GN=rebH_1 PE=4 SV=1
MEPNSHTTAPPGTPPPDSLQGKSLREMHIAIVGGGTAGWMSAATLRRRLGCRVTLVESSDVASIGVGEATIPAMVDWIENMGIDEDEFLRRCGGTYKLAIRFDDWVTPEHQYWHPFGSCGRIKGHDLIHQWRRGIAEGWIDSNCQYTDFCLQKQLCQSRRSLRPARPSNNPAAMSTNWSDHDYGAVGMPRFDSPIVENYAFHLDAGLLAKFIQSIAVTDGVTHRVGHVCGVQRSENGDITCVEVRDQPAIHADLYIDCSGFASVLIEKSLQSDWTDWSDQLLCDRAVTARQPVDHQDDNVTENSPSSARNSGDSLDSFQQPSDAPFTICTGRTAGWTWRIPLMHATGNGYVYSSNHLSRDEAESEFLRYLSDDVELNSVRFRVGHRRQSWQNNCVAIGLSSGFIEPLESTGIFLIQRALDELVNCLPGSGSITSRPDLFNRRMTDVYEEIRDFVLLHYVLSDRDDTPFWRDARSVRLPDSLDATIQLYEQRGHVELPEHDPVFAEANHHFIFQGAERLPPVNDSASSSLLDRPHAVALMSSILQRHNEINTSLPSNRQLLQSIHIQCPTVYC

SEQ ID NO: 85239 - protein, 506 aa, unidentified
  source 1..506: note = Porticoccaceae bacterium
  REGION 1..506: note = tr|A0A2D6ZAW2|A0A2D6ZAW2_9GAMM Tryptophan halogenase (Fragment) OS=Porticoccaceae bacterium OX=2026782; GN = CMK29_00545 PE=4 SV=1
  VARIANT 286: note = Xaa can be any naturally occurring amino acid
  VARIANT 330: note = Xaa can be any naturally occurring amino acid
  VARIANT 391: note = Xaa can be any naturally occurring amino acid
  VARIANT 453: note = Xaa can be any naturally occurring amino acid
  VARIANT 467: note = Xaa can be any naturally occurring amino acid
  VARIANT 477: note = Xaa can be any naturally occurring amino acid
AITLLESPDIPRISVGEATIPSLRHLLAVIGIDETDFMRSTDATFKQSIKYVNWSQKDDTFYHHPFSRFRQAPLDQSGLQWFQSDRSIPYMETVSAQPVLCEMDRSPLMMGQWDMGAKLNYAFHMNAQKFADYLRDYSVARGVAHVQENLTEVNRRENGFIESIITDNASVIEGNLFIDCTGFRAKLIGEVMNVRVEDCSQWLLCDQAVTMHVPYESHYPGTVRPYTTATALSNGWIWDIPMQSQRSIGYVHSSHFISDDAAEREMRNYQGKDTESLNSRKIKFSXERRHKVWEGNCIAIGLSGGFIEPLESTGLYLSDLGAVAFAEHFXYEDKHIEAMAYRYNRVLANRFYEILDFINMHYCLTRRCDTDFWKTVQQPDHINDRLKAKLXYWEIKPPTPMDFEDQCFRGLSTEATGNTAFSHAPVDTAALWNHESYTCILAGMNFLAEEYEXESEIKRPRPHVYEXVLSRLREGNXKLPPHALWLQQKVGMKQYETASKPLGWVA

SEQ ID NO: 85240 - protein, 496 aa, unidentified
  source 1..496: note = Porticoccaceae bacterium
  REGION 1..496: note = tr|A0A2E6G9L9|A0A2E6G9L9_9GAMM Tryptophan halogenase; OS = Porticoccaceae bacterium OX=2026782 GN=CMK42_05055 PE=4; SV = 1
MDKPSVEKIVIVGGGTAGWLAAASISKLLGDNLQVTLIESDEIGTIGVGEATIPTMLVLHHLLKINEQEFMSAVNGSFKLGISFENWRALNEKYIHSFGLTGKGCWAAGFHHFWLKGKKLGLSDDFGNYCTELMAAKSDRFAISVDNEKLNYAYHFDAGLYAKFMRKIAEESNVKRIQGKIINVTTDETTGFISTLDLQSGEQIQGDLFIDCSGFAGLIIEKALNTKFDDWSEWLPCNRAVAVQTASTSEPAPYTRAIARDAGWQWKIPLQSRVGNGLVYCSRYISDTEAESLLLSKVDGSLLTKPRLIKFRTGQRKLHWNKNCIALGLAAGFVEPLESTSIHMVQKGIIRLLQMFPREGIKAADRNEFNYQMREEFLFIRDFIVLHYHLTERTDTSFWNHCRSMAIPETLRHRLDLFRESGRIFQKDRDLFAENSWAQVMLGQGLMPAHYHPIVNMMTDADLSSFLKDIEGRATRRVTQLPKHKQFIDRYCKAIV

SEQ ID NO: 85241 - protein, 538 aa, Burkholderia cepacia
  REGION 1..538: note = tr|A0A3P0X0Y2|A0A3P0X0Y2_BURCE Tryptophan 7-halogenase OS=Burkholderia cepacia OX=292 GN=DF038_17985; PE = 4 SV=1
MSNPIKNIVIVGGGTAGWMAASYLVRALQQHTSITLVESAAIPRIGVGEATIPSLQKVFFDFLGIPEREWMPQVNGAFKAAIKFVNWRKSAEHSRDDHFYHLFGTVPNCDGVPLTHYWMRKREQGFQQPMEYACYPQPGALDAKLAPCLSDGTRQMSHAWHFDAHLVADFLKRWAIERGVKQVIDEVEQVHLNERGHIASLSTKEGRTLEADLFIDCSGMRGLLINQALKEPFIDMSDYLLCDSAVASAVPNADARVGVEPYTSAIAMNSGWTWKIPMLGRFGSGYVFSSKFTSRDQATADFLNLWGLSDKQPLNQIKFRVGRNGRAWVNNCVAIGLSSCFLEPLESTGIYFIYAALYQLVKHFPDTSFDPRLADAFNAEIVHMFDDCRDFVQAHYFTSSRDDTPFWLANRHDLRLSDAIKEKVQRYKAGLPLTTTSFDDSTYYETFDYEFRNFWLNGNYYCIFAGLGLLPDRSLPLLQHRPESIDKAEAMFARIRREAERLRTSLPTNYDYLRSLRDGGAGLSRSQPGPTLAAPEIL

SEQ ID NO: 85242 - protein, 498 aa, unidentified
  source 1..498: note = Porticoccaceae bacterium
  REGION 1..498: note = tr|A0A2D8WR84|A0A2D8WR84_9GAMM Tryptophan halogenase; OS = Porticoccaceae bacterium OX=2026782 GN=CMK26_01670 PE=4; SV = 1
  VARIANT 30: note = Xaa can be any naturally occurring amino acid
  VARIANT 61: note = Xaa can be any naturally occurring amino acid
  VARIANT 86: note = Xaa can be any naturally occurring amino acid
  VARIANT 156: note = Xaa can be any naturally occurring amino acid
  VARIANT 425: note = Xaa can be any naturally occurring amino acid
MKANKKSINQIVIVGGGTAGWMTAASISAXIGKGLSVTLIESDQIGTVGVGEATIPTFFAXHQLLKIDESEFLSAVQGTIKLGISXENWHTLGESYIHAFGHTGKSCWAAGFHHFWLKGKENGFSEDYGCYSPELTAAKSEKFGFLKQNPLNYAYXLNAGLYAKFLRKIAEQNGVIRKEGKIVQVSKTDDENISNVALESGEIIGGDLFVDCSGFAGLLIDKALETPYTDWSNWLPCDRAVALQTQSTGAPVPYTRSIAHQSGWQWRIPLQSRVGNGLVYSSKYMEDKEALDVLMANVDGEILSKPNFIKFKTGQRVKHWSKNCVAIGLSAGFLEPLESTSIHLIQRAIIRLMQMFPSNGFTDSDRDEFNKQMSDEYEYIRDFIIMHYHVTKRDDSAFWRYCRTMDIPATLQHKLDLFLEAGRVXHGEGDVFAENSWTQVMLGQGLTPEQYHPIVNMMSNKELESFLANLKAMVDHSVGQLPSHDVFLSKYCPAPNIA

SEQ ID NO: 85243 - protein, 510 aa, Sphingomonas desiccabilis
  REGION 1..510: note = tr|A0A4V1QNT1|A0A4V1QNT1_9SPHN Tryptophan 7-halogenase OS=Sphingomonas desiccabilis OX=429134; GN = EO081_15085 PE=4 SV=1
MRPDPIRRVVIVGGGTAGWMAAAAITRVLGEMPGLSIELVESEEIGTVGVGEATIPQIVLFNKMLGIDEAEFVRETRATYKLGIEFVDWVRPGHRYVHPFGFYGLDMKGIEFHHFWLKGRELGDPTPLDAYSLGIVGGLQGRFAHPRPDQPSSPLSRLGYAFQFDAGLYARFLRRLAEANGATRTEGRIVDVERDPETGHVAAVVLQSGARIEGDLFLDCSGFRGLLIEGAMAAGFEDWTQWLPCDRAVAVPCANGGDRQPLTRSTARGAGWQWRIPLQHRIGNGYVYSSAHLSDEEAAATLLANLDGVPLADPRLLRFTAGHRRRAWIGNVVALGLAGGFLEPLESTSIHLVQSAIARLLTYWPTRRFDQLEIDRFNAAHVCDYLEIRDFLVLHYKATERADTPFWDYCRTLEPPPGLAGKLAIFGANGRIFREGNELFTETSWLSVMVGQGVEAGGYHPAADLLSDAETLTRLQHIRQVIADTASLLPHQDELLRQMGCGPVPLAAAS

SEQ ID NO: 85244 - protein, 504 aa, Sphingomonas desiccabilis
  REGION 1..504: note = tr|A0A4Q2IMN2|A0A4Q2IMN2_9SPHN Tryptophan 7-halogenase OS=Sphingomonas desiccabilis OX=429134; GN = EO081_15075 PE=4 SV=1
MPDGGCRVTMLDEPVRKVAVVGGGIVGWSAAVALKRRVPGLSVTIVPVAPPDNALADRMPQTLPSAIGFHDDVGLREEDAVLRTGGGWRLGTLFEDWVQGQPAYVHAYGSYGQPFGTASFHHHWTRAAQAGSAAPYDSHSPAAMLARAGRMLPPDPEPGSPFADIQAGLVLDIGRYRAMLEAFARHLGVGVREGAVAEVQLRGGDGFIERVALADGGSVEAELFVDASGPGGVVRGAIEAAWEDWRPWLPCDRLTHASAAATAPTTLDHVMALPAGWRWQSSLPGATLHGLCYASDFLSDEDASRLLAEASGVEALPVIGFHQGTRPEPWARNCVAIGDAAVVIEPLEWTNLHLAHSAIDRIVSAMPGRACHPLEIADYNRQAVAEGTRVRDFVLCHYATARRPEPFWQPHAALPESLARTLRLFAERGRLPFFEEETFARDSWLAILLGQGLIPRRIDPLIGTTPPQQSDAAMAGYRAAITRALLQFPTAAQHHAAQHARITR

SEQ ID NO: 85245 - protein, 558 aa, unidentified
  source 1..558: note = Chloroflexi bacterium
  REGION 1..558: note = tr|A0A2D9WMH7|A0A2D9WMH7_9CHLR Tryptophan halogenase; OS = Chloroflexi bacterium OX=2026724 GN=CL718_05940 PE=4; SV = 1
  VARIANT 110: note = Xaa can be any naturally occurring amino acid
  VARIANT 150: note = Xaa can be any naturally occurring amino acid
  VARIANT 355: note = Xaa can be any naturally occurring amino acid
  VARIANT 374: note = Xaa can be any naturally occurring amino acid
  VARIANT 425: note = Xaa can be any naturally occurring amino acid
  VARIANT 434: note = Xaa can be any naturally occurring amino acid
  VARIANT 446: note = Xaa can be any naturally occurring amino acid
  VARIANT 454: note = Xaa can be any naturally occurring amino acid
MADVCDIVVIGGGPGGSAVATFLADAGYAVTIVERERFPREHVGESLLPASIPILEQLGVMPEVEAAGFVVKHGATLVWGSDPDPWSWYFSDDPGQRPTSFQVVRSEFDXILLKNAATHGVDVQEDAQVLDVLFDEGRASGVRFLQDGTXSEITARFVVDASGQAAILSRKLGLLEWDTHFNNLAVYGYFKGGSHLESPNDGNIFIEAFEHGWLWKIPLHTGVDSVGAVVDKDIGHDRLRELGPEGFLQAQINEAPHVKEMLSDASFVGEPKVVRDWSYKSTAFSGDGYILVGDAACFVDPLFSSGVHLALGSASLASTYVQTVLKDPSASERAAATYRDIYEKQYQYFHLTAQXFYGTNRASDSYFWEARRIXGDDSKTPREAFVKVVGGQPPQGYERAVIERGEIPDGILDDVSRMEAHLKEXTAATERLTXNNGEDLLNGIPXLPRHIRLXQKPILSGSEYKQTFHLVVDSDKNLAHGYPLSPVMAGLIAKMDGSKTMSAVISEFEAEHGVAQPGAIRSLILKDLPPIITIGMLDVTPPGKTRAERRRFERLARK

SEQ ID NO: 85246 - protein, 447 aa, Thauera sp.
  REGION 1..447: note = tr|A0A0C3MM18|A0A0C3MM18_9RHOO Tryptophan halogenase family protein OS=Thauera sp. SWB20 OX=1572758; GN = PO78_1750 PE=4 SV=1
MAADGIVILGAGPAGAAVAIGLARMGEPVVLVGEPRRFAAVEGVSARVIDALRGLGLQRALTAFAPPSPRRAVWNGTYTEANVESLVDRQRFDQGLLEDLERLGVPVVRGRVTALHPAPGGHELEIDTDAGPRRMAAGFLVEARGRAAPGGGAPRVRGVETVSLLQYWQGPAGEAGSTVLSVEDGWMWMAALADGRRYLQLTVDVASADLPPKRALGDYCSARFHAVEAAAPFVRDAQPVGEPHARTSTAVLNESVAGDDWIRVGDAAMAVDPLSGNGIFQALSSALQAPAVVATLRHDRGRTALAQHFHTRRIEHLFHRFARIGRDFYAQEARWPQAPFWAARRGWPDALPLHAKVRPETVRVARGPVVCAGRIVEQDVVVTPDQPLGVWHLDGLAVAPMLAALRREGGDALEKAAGEALLCARFGLERARAAALLAWMRAQNWLD

SEQ ID NO: 85247 - protein, 498 aa, unidentified
  source 1..498: note = Porticoccaceae bacterium
  REGION 1..498: note = tr|A0A2D5YGJ9|A0A2D5YGJ9_9GAMM Tryptophan halogenase; OS = Porticoccaceae bacterium OX=2026782 GN=CMK23_08650 PE=4; SV = 1
MKANKKSINQIVIVGGGTAGWMTAASISALIGKGLSVTLIESDQIGTVGVGEATIPTFFALHQLLKIDESEFLSAVQGTIKLGISFENWHTLGESYIHAFGHTGKSCWAAGFHHFWLKGKENGFSEDYGCYSPELTAAKSEKFGFLKQNPLNYAYHLNAGLYAKFLRKIAEQNGVIRKEGKIVQVSKTDDENISNVALESGEIIGGDLFVDCSGFAGLLIDKALETPYTDWSNWLPCDRAVALQTQSTGAPVPYTRSIAHQSGWQWRIPLQSRVGNGLVYSSKYMEDKEALDVLMANVDGEIISKPNFIKFKTGQRVKHWSKNCVAIGLSAGFLEPLESTSIHLIQRAIIRLMQMFPSNGFTDSDRDEFNKQMSDEYEYIRDFIIMHYHVTKRDDSAFWRYCRTMDIPATLQHKLDLFLEAGRVFHGEGDVFAENSWTQVMLGQGLTPEQYHPIVNMMSNKELESFLANLKAMVDHSVGQLPSHDVFLRKYCPAPNIA

SEQ ID NO: 85248 - protein, 511 aa, unidentified
  source 1..511: note = Porticoccaceae bacterium
  REGION 1..511: note = tr|A0A356CJG2|A0A356CJG2_9GAMM Tryptophan halogenase; OS = Porticoccaceae bacterium OX=2026782 GN=DD440_03815 PE=4; SV = 1
MSDSGKIRSILIVGGGSAGWLTAGILAARYGQTMDITLIESPDVKIIGVGEGTWPTMKSTLKEMGVSETDFFRECDASFKQGAKFAKWVTGAEDDYYYHPLMLPQDFTQTNLAPHWLQDSGGRSFSESVCFQEALCEHALAPKTLAMPEYNAAANYAYHLNAGKFTTFLTKHCTEKLNVKHVLATIHDVKQRENGDIDYVVTTANDHLSADLFIDCTGMASLLLGKTLGVEFIDKSDVLFIDSAMAVQKPYDSEEEPILPYTVSTAQDAGWIWDIGLTSRRGIGHVYSSRHTTDEQAELALATYVGPRFKDLSVKKIPIRSGHRKEFWKNNCVAIGLAGGFLEPLEASALMLIELSARFVRDQLPETTSTMPIIAKRFNETLTYHWGRIIDFLKLHYVLSKRDDTAFWRDNRDAVTVPESLTELLRLWEFHTPYRQDFSHKEEVFPAASYQYVLYGMGFKTQVSSRVDNSHARACERAVQENEKIMDKALTLLPDNRQLLRKIHEYGMSSI

SEQ ID NO: 85249 - protein, 533 aa, Streptomyces diastatochromogenes
  REGION 1..533: note = tr|A0A233SRJ3|A0A233SRJ3_9ACTN Tryptophan halogenase; OS = Streptomyces diastatochromogenes OX=42236; GN = BEK98_05005 PE=4 SV=1
MTDTDSRIRKVVILGGGTAGWMTAAYLGKALQGTVDIQVLEAPAIPRIGVGEATVPNLHRVLFDYLGIPEEEWMRECNASFKMAVRFVNWRTPGQGEPEARTLEDGRPDHFYHPFGILPDHDNTPLSHYWFKNKHEGRTDVPFDYSCFREPPAMDAKLSPKWLDGTPSTRYAWHFDAALVADFLRRFATDKQGVEHVQDEMVSVEQDERGYVTALHCKSGRVLEADLFVDCSGFRGLLINKALGEPFLDMSDHLMCDSAVATAVPHDDEANGVEPYTSAIAMSSGWAWKIPMLGRFGSGYVYSSKFTSQEEATREFCELWNLDPAETKFNHVRFRVGRNRRAWVNNVVSIGLASCFLEPLESTGIYFITAAIYQLAKHFPDRTFNPALVDSFNHEIEVMFDDTRDFIQAHFYYAPRNDTPFWQAQKKLTLPENIQQKISAYKAGLPINSPIADESTYYGNFEAEFRNFWTNGSYYCIFAGLGLEPDAPLPALAHKPESVAGAEPLFEQVRQQQEHLLQTLPSAYDYLRRLHGK

SEQ ID NO: 85250 - protein, 498 aa, Hyphomonas sp.
  REGION 1..498: note = tr|A0A2E7B7E7|A0A2E7B7E7_9RHOB Tryptophan halogenase; OS = Hyphomonas sp. OX=87 GN=CMF02_10470 PE=4 SV=1
  VARIANT 66: note = Xaa can be any naturally occurring amino acid
  VARIANT 71: note = Xaa can be any naturally occurring amino acid
  VARIANT 83: note = Xaa can be any naturally occurring amino acid
  VARIANT 429: note = Xaa can be any naturally occurring amino acid
MVQSILVVGGGSAGWITANLLNAHIRRAGRPTTVTLVESPDIPTIGVGEATVPTIRRTLSDIGLPXQDLLXSAEATFKTLIRXRDWNPGESYDHPFDRRQRPHTDAAVRGWTVQNGQAFDRAFSALTQLADFNIAPKSPHAPQYRGNFPYAYHLDAIKLAKRLSEFGQARGIRHKLANITDVKVSPEGLISSVETDQGETLTADLYVDCTGFRSALLGKALDVPMKSYAKYLLCDRAVTMRVPYEVYKPERILTYTLATAREAGWQWDINLQTRRGIGYVYSSQFLSDDAAETALRGFEGPHSDGLEARHIKFTSGKRETSWKGNCVAVGLSDGFLEPLESSGLYFIEFAALAIASMLEDYAAAPEATVRYYNRISNELFQEILGFINLHYVTSKRRDTPFWQAATADEAILDDLRDRLELWKRRSPTXFDFPGADRLFAQDSYEFILHGMKYVEGPAGTAPMPPDLSGMVAKSRSELPEHEAFLALVQKAAAARPAG

SEQ ID NO: 85251 - protein, 503 aa, Caulobacter vibrioides
  REGION 1..503: note = tr|A0A258D3V1|A0A258D3V1_CAUVI Tryptophan halogenase; OS = Caulobacter vibrioides OX=155892 GN=B7Z12_12120 PE=4; SV = 1
MREAIQSIVILGGGSAGWMAAALLNAALGKKCAVTVVESAEIGVVGVGEATIPAIRQFNAMVGLKEPAFMRVTRATLKLGIEFVDWGCSGERYLHPFGVLGGQPTLGVFPQHFLRLMAADPDANLEDYSVCALAARLGRAGPTATDLTSPLSQLMSAYHFDAVLYGRFLRRLAEGRGVRRIEGEVVAVDQRPEDGFVERLRLKDRREVEGELFIDCSGFRGLLIEGALAAGYDDWSRWLPVDRAIAAPCAKVGPAAPYTQSIAQEAGWRWRIPLQHRTGNGYVYSSAFTDDDRAETVLRDGLDGALEAEPRKLRFVTGRRRAAWKANVVALGLASGFIEPLESTSLHMVHSGLQALLKFFPDRSFSPVLRAGYNAAVKAEGELIRDFIILHYHATRRAGDPFWDYVRTMPVPDSLSERVALYAERGILVSGGDELFSPSSWLAVMHGQGIRARRASPLYDGVNPAALATEYAATARRLRRSVEALPLHEAYLADAGAWAEPEA

SEQ ID NO: 85252 - protein, 490 aa, Brevundimonas subvibrioides
  REGION 1..490: note = tr|D9QNK3|D9QNK3_BRESC Pyridine nucleotide-disulfide oxidoreductase OS=Brevundimonas subvibrioides (strain ATCC 15264 / DSM 4735 / LMG 14903 / NBRC 16000 / CB 81) OX =633149 GN=Bresu_2932 PE=4 SV=1
MQETDPGAIRSIAIVGGGTAGWMSAVLLGHALRGSDVRITVVESAEIGIVGVGEATIPPILDFLDLVGIDREAFIRETEATLKLGIRFQDWKTVGEHYWHPFGTFGVAIDRRPFHHHLQRAAAWDEPRGVVDFSLAAALAEAGRFTPPDPREGPARAGLRYALHFDAALVARTLRTVAERRGVRRLDRTVVDVTRTPAGHVDELLFREGDRLGADLFIDCSGFRGLLIEGAMAAGYEDWTRWLPCDRAVAGPTALNGEPQLYTLSHARDAGWRWRIPLQHRAGNGYVYSSRHIDDQAALDDLTRQVGGTFLAEPRQLRFTTGRRKAFWKGNVVALGLASGFLEPLESTSIHLVTSGLYKLLDHFPDRTFDPANIAAYNASLIEEYETIRDFIVAHYGLSARRDTPFWRDVTGQSLPDSLQSRIDLYRATGRCRARPGDLFADVNWFYVLHGLGLRPRHPDPLTGMSDAAAVRGVFDQVARDVAAGVSAAR

SEQ ID NO: 85253 - protein, 538 aa, Burkholderia cepacia
  REGION 1..538: note = tr|A0A1Z3YL57|A0A1Z3YL57_BURCE Tryptophan 7-halogenase OS=Burkholderia cepacia OX=292 GN=CEQ23_04965; PE = 4 SV=1
MSNPIKNIVIVGGGTAGWMAASYLVRALQQHTSITLVESAAIPRIGVGEATIPSLQKVFFDFLGIPEREWMPQVNGAFKAAIKFVNWRKSPERSRDDHFYHLFGTVPNCDGVPLTHYWMRKREQGFQQPMEYACYPQPGALDAKLAPCLSDGTRQMSHAWHFDAHLVADFLKRWAIERGVKQVIDEVEQVRLNERGYIASLSTKEGRTLEADLFIDCSGMRGLLINQALKEPFIDMSDYLLCDSAVASAVPNADARVGVEPYTSAIAMNSGWTWKIPMLGRFGSGYVFSSKFTSRDQATADFLNLWGLSDKQPLNQIKFRVGRNGRAWVNNCVAIGLSSCFLEPLESTGIYFIYAALYQLVKHFPDTSFDPRLADAFNAEIVHMFDDCRDFVQAHYFTSSRDDTPFWLANRHDLRLSDAIKEKVQRYKAGLPLTTTSFDDSTYYETFDYEFRNFWLNGNYYCIFAGLGLLPDRSLPLLQHRPESIDKAEAMFARIRREAERLRTSLPTNYDYLRSLRDGGAGLSRSQPGPTLAAPETL

SEQ ID NO: 85254 - protein, 510 aa, Sphingomonas sp.
  REGION 1..510: note = tr|A0A1I5GTA6|A0A1I5GTA6_9SPHN Tryptophan halogenase; OS = Sphingomonas sp. OK281 OX=1881067 GN=SAMN05428984_3819; PE = 4 SV=1
MIDGLGQHIVILGGGTAGWMTACLIAHRWRDRGVRVTLVESPEIGIVGVGEGSTPQLKHFFDTLGIAEAEWMPACDATYKLGIGFEGWSDREGYERYFHPFPTALDGHTVPQFFYNARAKRTGRDVDAHPDQFLLPARLAAAHCAPQPADNFPFEVSYGYHFDAYKVGVFLAAHATETLGVVHLQRRIASVERTQFGNVAALIDTNGERIAGDVFVDASGFRSTIFSALEMPFISYVDALFNDRAVVMPTAHAPGAPIPSQTRATALSAGWAWHIPLTSRNGNGYVYSSRHLTEAQAEAELRANIGGEAGEARHLKMRVGRVRDSWSHNALAVGLAQGFLEPLEATALHLVIATVEAFLDMVEQGGATSAVRTAFNARIAARYDGVRDYIVAHYRLNQRHDDPTGYWAEARSVDALSDDLKMLMSTWFTGADMVAAIDRAGLDRYYSAISWHCLFAGYGTFPDAARLIPPGADIDPIDLPKIDDFLTRCASNFGSHASRLRAAADHKDHV

SEQ ID NO: 85255 - protein, 505 aa, Sphingopyxis alaskensis
  REGION 1..505: note = tr|Q1GUN9|Q1GUN9_SPHAL Tryptophan halogenase; OS = Sphingopyxis alaskensis (strain DSM 13593 / LMG 18877 / RB2256) OX=317655 GN=Sala_0915 PE=4 SV=1
MGTSIHNVVIVGGGTAGWLSACVLAARRPDLSIILIEAPGIATIGVGEGTWPTMRETLATIGIEETEFLRECDASFKQGSLFVGWVTGAPEDRYLHPFSAPPPIDMRDVLAAWRADENARSFAAAVTPQAAICERDLAPRHPAMPDYAGTLNYAYHLDAGKFAQLLARHATERLGVTHVAAEVTGIIADGDGDIAALALHDGTAIGGELFIDCSGQAALLIGGHHGVEWIDRSDVSFNDRALAVQVPTQAESAIASQTIGTAHRAGWIWDIALPTRRGIGCVYAARFMSEAEADTVLRNYIAAHMPEADAGNLTPRALSFRTGYRARFWQKNCVAIGLSAGFIEPLEASAIVMIELSVRALADNFPASRAIMDIHAQRFNTLFRYRWERIVDFLKLHYALSQRQEPYWKAHRDPATIPSRLAEQLALWRDQPPSAWDFPQVDEVFSAASQQYVLYGMRPGETVSLSRPRSEACVRLAEISERARALVAALPENRAYFSALRAHAA

SEQ ID NO: 85256 - protein, 496 aa, Sphingomonas sp.
  REGION 1..496: note = tr|A0A1I5B6N5|A0A1I5B6N5_9SPHN Tryptophan halogenase; OS = Sphingomonas sp. OK281 OX=1881067 GN=SAMN05428984_0253; PE = 4 SV=1
MTPAPQTPPPRKRVVIAGGGTAGWVAATALIRQLAGLIDVTLVESDDIGTVGVGESTIPTIRTFHHFIGVDEDAFIRATNATFKLGIAFEGWDRTDARYFHAFGSVGRSTFVADFQHFWMEARRHGFAGDYGDYSLELQAAAQHRFALDRDETLAYAYHLDATAYARFLRSIAEPAGVRRVEGRITQVQQAADDGRITALVLESGERIEGDLFIDCTGFRALLIEQTLKTGFDDWSHWLPTDRAFAVQSTATEAPVPFTRAVAHGEGWRWKIPLQHRVGNGLVYSSAHLSDDEARARLLAGIDGEPLFEPRLLRFTTGMRRQVWNGNCLSLGLASGFVEPLESTSIHLVMVAVTWLIQHFPFGDDSAALAERFNARSRREWEQVRDFIILHYHLTHRDETPFWQSRRTLDIPDSLATRIALFRESAMAYQDQDELFRTDSWVEVMLGQGILPNAHHRLPSTMPAAQLQTALTDLKRGIAAKVGGLPKHADFLRRYA

SEQ ID NO: 85257 - protein, 394 aa, Brevundimonas sp.
  REGION 1..394: note = tr|A0A258JK89|A0A258JK89_9CAUL Tryptophan halogenase (Fragment) OS=Brevundimonas sp. 32-68-21 OX=1970328; GN = B7Y85_03340 PE=4 SV=1
MDDPRIRSVVIVGGGTAGWMTAAALVQHFRTAPLKITVVESSDIGTIGVGEATIPTIRRFYGQLGLRDDDVMRATQATCKLGIRFLDWSGPGSDFIHPFGLYGQDVKGIGFHHYWLKQRRAGDAAPLAAYSLGAALAAGGKFTLPSPHPPSQLSVFDWALHLDAGLFAQHLRAYAEAGGCARIDARIRSVELRPEDGFVRALTLDDGREVEGDLFVDCSGFKGLVIGEALGVGFEDWGRWLPCDAAYAVQSENRPGDAPAPFTRVTARSAGWQWGIPLRHRAGNGLVFSSAHLSDDQALAELMPHLLGDPLTEPRRIPFRPGRRSQAWAKNCVAIGLSSGFLEPLESTSIALIETGIERLKALFPDRRFAQPILDEFNDQTAREMERVRDFIIL

SEQ ID NO: 85258 - protein, 559 aa, unidentified
  source 1..559: note = Chloroflexi bacterium
  REGION 1..559: note = tr|A0A2E7R341|A0A2E7R341_9CHLR Tryptophan halogenase; OS = Chloroflexi bacterium OX=2026724 GN=CL729_04115 PE=4; SV = 1
MTDSCDILVLGGGPAGSASATMLSDAGYKVVILEREKFPREHVGESLLPASIPILEQIGVMPEIERAGFVTKHGATLVWGADPEPWSWYFADDPGQRPTSFQVVRSEFDDILLKNASKHGVEVIEEAQVLDVIFENERATGAVYLHEGSEKQVSARFVVDASGQAALLSRKLGLLEWDTHFNNLAVYGYFKNARHLDSPNDGNIFIEAFEHGWLWKIPLHIGMDSVGAVVDKDVAHERLRELGSDGFLLKQIEDAPHVSELLESAELVGESKVVRDWSYKSTQFSGDGYILVGDAACFVDPLFSSGVHLALGSASLASTYVQTVLKDPSSRSQADQTYRDIYEKQYQYFHLTAQLFYGTNRTADSYFWEARRILGDDSKTPKEAFVKVVGGQPPQGYERAVIERGEVPDGILNDVKRMESYLEERKNTTERLTQDGGKELLESIPSLPNHIRLVQKPILSGQEYKQVSHLVVDGQDTLTHGYPLTAVMADLISRIDGGTILSDIIGQFESDHGVADKGAMNAVVLKTLPELITIGMIDVTAPGATRAERRRFERQLQKK

SEQ ID NO: 85259 - protein, 480 aa, Burkholderia pseudomallei
  REGION 1..480: note = tr|A0A0E1U0D8|A0A0E1U0D8_BURPE Putative tryptophan halogenase OS=Burkholderia pseudomallei 576 OX=557724; GN = BUC_1980 PE=4 SV=1
MHLPNRTQVLVIGGGPAGATGAAFLAREGVEVTLVDKEVFPRYHIGESLLPSCLEILTLMGARDTFDRHGFQRKPGAYFNWKGETWKLDFGELGGTYRYSYQVRREEFDHLLLQHARAVGAQVHEGVSVREILFDDGRPCAALCVAQSTEEASTVEFDYLVDASGRNGLMSTRYLDNRKFHEIFRNVAAWGYWEGLSWPDDCAPGSILVSSIPDGWWWAIPLADRPTSVGVVMHRDAFVAARRTGTLEQVYAQALALSPVMANLTEHARLVTPLKTEQDYSYTCDSFAGNGYFLSGDAACFLDPLLSTGVHLAMYSGMLAAASLASILRAEVTEREAAAYYRDSYRQAYLRFLVFVQTFYEAHGKLGYYSKADELSHYMIEAGDIRRAFLNLVSGLEDIADAEQATSHLMGEMSRRIDQNLALRKDKRALSSAIGSTQVEDNARFFDAIEGLPCLSANMALDGLYVSTRPRLGLQRVAAM

SEQ ID NO: 85260 - protein, 501 aa, Alteromonas sp.
  REGION 1..501: note = tr|A0A4U0Z9F7|A0A4U0Z9F7_9ALTE Tryptophan 7-halogenase OS=Alteromonas sp. HB161718 OX=2565549; GN = E5672_12080 PE=4 SV=1
MTVSGLDSSKNQTPVKNVVIAGGGTAGWMAATALSRLLGKSIKVTLVESKDIGIVGVGEATIPPIRTFHKLLGIDEKAFMRATQATFKLGIEFENWREQGHSYIHSFGITGRECWAGEFHHFWLRAKEYGFGGEFGDYCPELIAAKQNKFATSEAMPLNFAYHFDAVAYGRFLKSLACEAGVMHKEGDIEKVAVCPQAGNIQSLQLASGEVINGDFFIDCTGFKGLLIEQALHTGYDDWRHYLFCDRAVAMQTELTAPPVPYTKSVAHRAGWRWQIPLQERMGNGLVFCSRFMSDEDAINTLKSQVTGVPINEPRVIRFTPGKRRRGWNKNCVALGLSSGFIEPLESTSIHLIMTGLIRLMRLFPFDGITQSAIDEYNNKFDSEMSAILDFIVMHYKVTQREDSPFWQQCQRMEIPPSLKHKLALFAETGRVFLDDGDIFRVDSWTQVLMGQGMTPSQYHRVADEMSEQSLKQFMAGLKQQVDNHVAKLPLHEAFLTKYLR

SEQ ID NO: 85261 - protein, 499 aa, Brevundimonas sp.; identical to SEQ ID NO: 85169
  REGION 1..499: note = tr|A0A258JHU2|A0A258JHU2_9CAUL Tryptophan halogenase; OS = Brevundimonas sp. 32-68-21 OX=1970328 GN=B7Y85_03145; PE = 4 SV=1

SEQ ID NO: 85262 - protein, 374 aa, Caulobacter vibrioides
  REGION 1..374: note = tr|A0A258D7B2|A0A258D7B2_CAUVI Tryptophan halogenase; OS = Caulobacter vibrioides OX=155892 GN=B7Z12_10120 PE=4; SV = 1
MRRVLIVGAGIDAWMTAAALAKASQGLAEVVVAETGPPPAGRIAALPSLQGLHARLGISDEILAQATRTRPRLAARYGDGLEPFGETGVAIDGVAFHHYWLAAGRPGPLSDWCLAAQAAVRRRFAPPSPDPRSPLSSLSYGLTLDAAGYAELLKRIAVTAGAKVVEGRPDADLKVDASGDQRLLVAHAPWTDWSAWLPTGVTLAEDGLISTFAPTPARTGHIIEAMTGDTVAVGAAYGVIGAGDGGDLHLLQGDVSRLIALFPTGPAAVAEYNRLAESALERARDMAILRWGDLSNPPEPLARKIEQFASRGRVVTYDDEAWPESAWIHAMLARGIIPTRWDPLADRVPPERIREMLSRMKAMLEQTAEAMPRV

SEQ ID NO: 85263 - protein, 516 aa, Caulobacter vibrioides
  REGION 1..516: note = tr|A0A290ML11|A0A290ML11_CAUVI Tryptophan 7-halogenase OS=Caulobacter vibrioides OX=155892; GN = CA606_10600 PE=4 SV=1
MTTTHPNALRKIVIVGGGSAGWISAAMLSHYFQNGGCAVELIESEEIGTIGVGESTIPPFLQLLASLGVDEREFIQATQASFKLGIRFEDWKQKGQRYYHPFGAIGGPIGPHEFYQCWLRAKANGHPSNLQDFAPGTVMADQWKFIPPMKAQRTLIAGASYALHVDARLVAKFLRDYAEARGVKRTEGIVTDVVTHPDGSVAKVIMKDGREVEGDLFIDCTGFRSLLIGKTLDVPFNDWSDMLLCDRAVVVQTENVGAPHPYTVSKAEDAGWRWRIPLQHRAGNGYVFSSRHLSDDAARATLVQNVEGQMLMNPMFIAFKTGMRQRLWHKNVVAVGLAGGFIEPLESTALHLIYRGMDFLLRFFPDRDFDPALAAEYNRRMTADYEEIRDFIVLHYCTTQRDDTPFWRDVRNAPIPDSLKERMALFQAQGVLREGVDDMFRNPSWQSVMEGMGVRPRRYQQLVDTAPYDVIAQTLDQSAPILAAQVAGLPSHGEFLEKHCPAPKPEAVVAPFGAVA

SEQ ID NO: 85264 - protein, 503 aa, Hyphomonas sp.
  REGION 1..503: note = tr|A0A350ZRC7|A0A350ZRC7_9RHOB Tryptophan halogenase; OS = Hyphomonas sp. OX=87 GN=DCY26_06785 PE=4 SV=1
MAPQIRRIVILGGGTAGWMTAAAISHVLAARKADITLIESEEIGTVGVGEATLPHIRFFNQRIGLDEPELMRATQATMKLGIQFVDWARKGDAYIHPFGDYGQPAGGVDFLQIWARLHAAGRTSRICDYSLPVVMAEAGRFGFPVEDPASVMSTFSYAYQFDAGLYARYLRRVSEGRGVVRVEGKVTSVRQNPETGHVEALSLGEGREVEGDLYIDCSGFRAMLIDEAMGSGFEDWSRWLPCDRAIAIPTENAGPPVPYTRATARTSGWQWRIPLQHRVGNGHVYSSAFLDDQSAEDELLRHLDAPAMRQPNRLKFRAGQRRQQWVGNVVAIGLASGFLEPLESTSIHLIQQGITTLMELFPDGPLDARDIAEFNRVMSLEYDRVRDFLVLHYHATEREDSEFWNHVRTMDVPGSLDEKITMFRERGIVMKYRDGLFLLPSWIAVFVGQRVIPRHWDPRADALPMEQTAESLARMKRHIAEVVEALDTHDAALARYCPAEVMA

SEQ ID NO: 85265 - protein, 503 aa, unidentified
  source 1..503: note = Massilia phosphatilytica
  REGION 1..503: note = tr|A0A2S8H9Z5|A0A2S8H9Z5_9BURK Tryptophan halogenase; OS = Massilia phosphatilytica OX=2026176 GN=C5614_09630 PE=4; SV = 1
MENNNQQDRGRPIRRVVIAGGGTAGWMAAAALARTLGKVVDIKLVESDDIGTVGVGEATIPSLVHFHRLLDIGEQEFMAATQATFKLGISFEGWRARGEDYIHSFGMTGTDHWTAGFQHFWLKGRERGLASDYGDYCLELVASQEKRFGHLPNQGINYAYHLDATRYARYLRRFSEHFGAERIEAKIARVDTDPATGHITALVLDSGSRVEGDLFIDCTGFRSLLLGQTMGVEYEDWSQWLFNDCAIAVQTESTGPAVPLTRSMAHDWGWQWRIPLQHRTGNGIVFSSRHTDEATARATLLGNIEGKVLTEPRVIRFTPGQRKQVWAGNCIGLGLASGFLEPIESTSIHLIQRGIVRLLQIFPTHGIQQSDVDEYNAQAEEDIRTIRDFIILHYKVTNRRDTPYWHDAATMPVPASLQHRIDLFRDGGRVFREGNELFAENSWVQVMLGQGLTPERWHPSADLMGDDELRGFLDGIRNGVRRTVSQLPPHQQYVERYCPAGKP

SEQ ID NO: 85266 - protein, 511 aa, Pseudoalteromonas piscicida
  REGION 1..511: note = tr|A0A2A5JPS0|A0A2A5JPS0_PSEO7 Tryptophan halogenase; OS = Pseudoalteromonas piscicida OX=43662 GN=CEX98_13240; PE = 4 SV=1
MINSYVVVGGGTAGWLTACILAKKLSEYSDKTVTLIESPDIPPIGVGEGTVPSIRETLKMIGISETDLFSKCDATFKQSIKFESWLKPGADNSQHYYHHLFDFPFPFGESLSPLWQNLKQSGVDTPSFASLASIQEYQAELGRAPKRITDPEYTGISDYAYHFDALKFARLLKEHGTSNLGIRHVTDNVVTVNKKSDGSILNLNMQSGITLEFDFFVDCTGFKSVLLGDALEVPFIPKSDVILTDKALTIQVPNLSEDIPPYTISKAHRCGWIWDIALTSRRGVGFVYSSKHLSDDDAINEFGNYLGMKLNADDVRVVDMRIGFREKFWYKNCVAIGLSQGFIEPLEATAILLSDFSANLFCNKLPQAHDDLEVLSERFNERVSSAWNSVVDFVKLHYCISDRDDSQFWLDNRNDSTIPDSLLEKLALWKLHGPTKDDFTNNFEVFRLENYLYVLLGMEYSAKYNPVSENQLKRLQEQAERVKSTAEQVAQQTQKQLKVIEAIKQYGLSKC

SEQ ID NO: 85267 - protein, 495 aa, Pseudoalteromonas piscicida
  REGION 1..495: note = tr|A0A2A5JLG9|A0A2A5JLG9_PSEO7 Tryptophan halogenase; OS = Pseudoalteromonas piscicida OX=43662 GN=CEX98_18480; PE = 4 SV=1
MKKIHSLTILGGGTAGWMCAAYLAKHQPNLSITVIESPSIGRIGVGEGSTPHLQHFMQSLGVHESDWMPACQASYKTGIYFDNWNGDNGSYFHPFFSEMDAKTAEVYFVNANARRRGSEYIDKPEHYFLAAVLANKQQAPQPQRSLPRTLEYGYHFDAQKLADWLREFSLTRHVKHLQSTVNSVQHHAQEVIGLTLESGEQVKSDFYVDASGFNALLIEKALEVPFISFTDQLLNDSAVAIAGDIINPLPSSTSAIAMPCGWRWQIPLQDRTGHGYVYSSAHITAKQAETQLRQAAQLDKGQAKHLTMRVGMMARSIEGNVFAIGLAQSFIEPLEATALMVTSHSIELLNRLLSQQLEAEAINQQLSDLVLGIKEYVLAHYATSKRVDTRYWQDAKVAALNVSELDALLTHWRGGGDFDAWLHQYRQQSPYIRPSWYCLLGGMDHRDSSCHMHFDQAPQHIEQAAKAYLEKLCDEHFIDHTNALEQLQRTQAFSA

SEQ ID NO: 85268 - protein, 504 aa, Sphingomonas desiccabilis
  REGION 1..504: note = tr|A0A4Q2IQX1|A0A4Q2IQX1_9SPHN Tryptophan 7-halogenase OS=Sphingomonas desiccabilis OX=429134; GN = EO081_15070 PE=4 SV=1
MAGPDRQRVVVVGGGTSGWMTAAALVKLLPDRCHVHLVESEAIGIIGVGEATLPHIRAFNERLGIVEAEFMATTRATFKLGIEFRNWARIDDSYIHPFGTFGRGAGDVQFHHYYARLLHAGVQLPPIEAFSMACTLARANRFAPPSPDPRQIASTFGYAYQFDAVAFAPYLRHLAEGLGAERTEGRIVHVERNGETGDVTAVLLEGGRRIEGDLFVDCSGFASLLLGKALEEPFQDWSRWLPADRAVALPCRTVTEVTPYTSAVAMPAGWRWRIPLQHRTGNGYVFSSAFLSDEHAADALTAAVEGVPMASPRVLRFTAGRRERSWAHNVVAIGLSGGFLEPLESTSIYLVQQAITALVELFPERRISAVDRDEFNRIVDMEYDRVRDFLILHYHATERNDSEFWNYVRTMTVPDSLAEKMALFRRRGRIVKYREGAFLDASWVSVYLGQRVTPAGFDPRAAGPTLESLVAGMKQMRAEIQAAASAMPDHLSYLGRYCPMAAAA

SEQ ID NO: 85269 - protein, 510 aa, Caulobacter vibrioides
  REGION 1..510: note = tr|A0A0V2FBJ3|A0A0V2FBJ3_CAUVI Tryptophan halogenase; OS = Caulobacter vibrioides OX=155892 GN=AS593_01870 PE=4; SV = 1
METSTPLDIVIVGGGTAGWMVGTALVSGLRPHQARVWLVESDEIATVGVGEATIPAMRDYNRFVGIDEVEMMRETNGTFKLGIEFLDWGFKGSSYHHPFGVHGVGIGGAGFHHHWNRARLAGHEFDIEQFSYAIAAARADRFEFPNPDPDKIDSTYSYAYHFDASLYARYLRKVAEGRGLTRTEGKVVDVTRDGQTGDVASITLASGEVIKGDFFVDCTGFRGLLIGQTLNSPFEDWTDWLPCDRAWAVPCARADRFTPFTRSTAREAGWQWRIPLQHRTGNGYVYSSRYISDDEAASVLMANLDGEALAEPRLIRFKAGRRTASWTRNVMAAGLASGFLEPLESTSIYLVQVAVMNLLKLFPGKRVEPALVEDFNRRVDMEYDRVRDFLILHYHANTRTDGELWKHCREMEIPESLKDKLELFRHRGVAPNHRDGLFAQPSWISVLLGQGVLPGGYDRMADNVPLSQALAEMERQRAAIARRVPAMPSHADFIARHCAVTQRPVAEAMA

SEQ ID NO: 85270 - protein, 508 aa, Frateuria terrea
  REGION 1..508: note = tr|A0A1H6U2T0|A0A1H6U2T0_9GAMM Tryptophan halogenase; OS = Frateuria terrea OX=529704 GN=SAMN04487997_1859 PE=4; SV = 1
MGEDSDTRVRDIVIVGGGTAGWMTAALLSRALGDQVHIRLIESDEIGTVGVGESTIPSIRLVNGFLGLDEDDLLRSVQGTIKLGIQFNDWHRIGQSYLHAFGDIGLPLGLLPFHPYWLRSQRDPAAPDLWAYSLNARAIAAHRFARMERIDGTPLAGLRWAYHLDAGRYARYLRQHAAQGVQRTEGKVIKVDLRAADGFIESVQLASGETIAGDLFVDCSGFRGLLIEDALKTGYEDWRHWLPCDRAVVAPSSRVEPLRPFTQANARPAGWQWRIPLQHRSGNGHVYCSQFTGDDEAAALLVENIEGELLEQPRLLRFTSGMRRQSWNRNCVALGLAAGFMEPLESTSIHLIQSGVQRLLSLFPDRHCDTALVAEYNRQTRFEYERIRDFLILHYRAIERRDTPFWQHCAHIAMPEPLERKLALFRSGGRIVRDGDELFAEPAWLQVMLGQGIEPDGHHPLAGALPQAQLDEFLSHIRTLLDRAVGSMPEHAQFIARHCAAGDTVVAA

SEQ ID NO: 85271 - protein, 506 aa, Colwellia sp.
  REGION 1..506: note = tr|A0A2N1CAD4|A0A2N1CAD4_9GAMM Tryptophan halogenase; OS = Colwellia sp. 75C3 OX=888425 GN=CXF85_00590 PE=4 SV=1
MNKNKIENIVIVGGGTAGWMTASLLAKVLGKTVNITLIESDKIGIVGVGEATIPPIVSFNKAIGVDETEFIKATQGTIKLGIEFNNWYQDGDSYMHAFGNIGKNFPFCDFHHFWLRHQQNTNNSSGSSSGSTPSYWDYSLNYQAARYNKFSPLRSIPNTNLPGLTHAYHFDAGLYAKFLHKHAVGLGTKRIEGKIVQVQQNHDSGFIESVLLENGTAVTGDLFIDCSGLAALLTEKTLSTGYEDYSHWLPCDRAIAVPCEKVEPIEPYTRSTAHKVGWQWRIPLQHRTGNGLVYSSKHMSDEEAKELLLNNLDGKPLAEPRVISFKTGRRLKQWHKNVIAIGLSSGFFEPLESTNIHLVQTAALRLLDFFPHNGINIEEVEEFNRQSKVELEGIRDFIILHYKLNNRGDSEFWRACQRMEIPESLLNKIELFKKTGKVFCKPDDLFTEIAWQQVMIGQGNIPEDHHPLVDTLSKEQLIDLMASLTTLINRTVDKLPSHDEFLQLLK

SEQ ID NO: 85272 - protein, 495 aa, Pseudoalteromonas piscicida
  REGION 1..495: note = tr|A0A290TUK5|A0A290TUK5_PSEO7 Uncharacterized protein OS=Pseudoalteromonas piscicida OX=43662; GN = PPIS_a3547 PE=4 SV=1
MKTIQSLTILGGGTAGWMCAAYLAKHQPNLSITVIESSSIGRIGVGEGSTPHLQLFMQSLGVKERDWMPACQASYKTGIYFDNWNGDNGSYFHPFFSEMDAKTAEVYFVNANARRRGSEYIDKPEHYFLAAVLADKQQAPLPQRPLPRALEYGYHFDAQKLADWLRAFSLARGVMHIQSTVSSVQHHAKEIIALTLESGAQVKSDFYVDASGFNALLIEKTLEVPFISFADQLLNDSAVAIAGDKINPLPSSTSAIAMPCGWRWQIPLQGRTGHGYVYSSAHTTTEEAEAQLRQAAQLDKGQAKHLTMKVGMMTRSVEGNVFAIGLAQNFIEPLEATALMVTGYSIELLNRLLSQQLEVQAINQQLSDLVLGIKEYVLAHYATSKRADTQYWHDAKVAALSLSELDELLTHWRSGGDFDAWLNQHRMYSPYIRPSWYCLLGGMDHRDSTCQMPFDQAPQHIEQAAKAYLTKLSDEHFTAHTTALEQIQRAQAFRA

SEQ ID NO: 85273 - protein, 437 aa, Nostoc sp.
  REGION 1..437: note = tr|A0A2L2N4J5|A0A2L2N4J5_9NOSO Tryptophan halogenase; OS = Nostoc sp. 'Peltigera membranacea cyanobiont' N6; OX = 1261031 GN=NPM_2040 PE=4 SV=1
MNIPQQCDVVIIGGGPAGSTAATFLSQKGYDVVLLERHKHPRHHIGENTIPQFWKYTDLAQVSDKIAAEGFIQKAGGTTFWNGRIRQVDFKDFGYSRQALHVERDRFDLILLENAREKGVQIFEEVSVLSVDLQDGQQEQSLTYRLLKDKSLGKITCRFIVDASGQNAVIAKQMGIRTIDKDFRFMSLWGYFKNSKYIGLNGKAHSVENLRTILPTTFICSFAETGNWGWSWHIPLRESTSVGLILPLEFMKTVQLNGGSWESYFRQKCCEIPILEDLLANAQFCEGSFAKIQDYSYRSTQLAGPGFFLIGDAAGFIDPIFSIGIVLGMYSAYTATWAIDRSFKNPSSLVHNQALFSSQLQGRLEVARSLALPHYQSGDRACDLAKTTIQMERALEQELMATWSTMTTRPENFQAIASSLKGREINSNKFRVIEEMI

SEQ ID NO: 85274 - protein, 504 aa, Pseudoalteromonas piscicida
  REGION 1..504: note = tr|A0A290TNC6|A0A290TNC6_PSEO7 FADH2 O2-dependent halogenase I OS=Pseudoalteromonas piscicida OX=43662; GN = prnA PE=4 SV=1
MNITKIAIVGGGTAGWLAANHLGLALSSNSNVEITVIESLDIPSIGVGEGTVPYIVKSLKKFGISEAELLGSCDATFKQGIRFVSWLDEKVHGAHNFYYHPFEAPYPEGLDITNIWLNLGKKIPFDYVGIQSRVCESGLAPKLKTDGNYQGVLPYAYHFDAAKFAKLLKRNALDRFNVRVLNGTVDESKLDQTGHIESLCMTNGDILHFDFYVDCTGFSAKLISSVSNDSFQDKSEQLLVDTALVQQIERDDPSSLNPYTTATAHKAGWMWEIPLTSRTGTGFVYASKYMSHKEALETYARMLNVDSVNPRKIEMRVGYRNQSWSKNCVALGLAQGFVEPLEATSILLTDFSAEFLSKNFPLSRAEISVFSDHYNDAVNCAWESTIDFIQLHYILSDRVDSDFWVEYRSEVKLSDSLERKLAKFKLRSPQQMDFWSRFELFNEKNFLYVLYGMKFNTHPQTTSQAEFDIGLKLLDKNNEQLRRAKGALLDHGEWLKQLKQYMSS

SEQ ID NO: 85275 - protein, 499 aa, Hyphomonas sp.
  REGION 1..499: note = tr|A0A355K964|A0A355K964_9RHOB Tryptophan halogenase; OS = Hyphomonas sp. OX=87 GN=DHV57_03185 PE=4 SV=1
METQNIRRVVIAGGGTAGWIAAASLSRLLGPLLDITLVESDAIGTVGVGEATIPTHRTFHHLMGIDERDFMRATKATFKLGIAFEEWGGLGDRYIHSFGQVGKSNWMGEFYNIWMYAQERGIGAELDAYCFELQAAEAGRFFTSDKANINYAYHLDASLYAKFLRTFSEAKGVKRVEGLIEEVEQDGESGFITALKLQSGERIEGDLFIDCTGFRGMLIEQTLKTGYEDWTHWLPTDSALAVQTRSVGPAQPYTRAIAHHAGWRWRIPLQHRVGNGLVFCSENMQPDEAKEYLLGHVDGEPLTEPRLIRYKTGRRKKVWNKNCVALGLSSGFVEPLESTSIHLIQVGATRLVQQFPFAGISEAIANHYNEQAERELEKIRDFIVLHYKLTERDDSDFWRARRDMPVPDSLAQRISLFRENGLAYQATDDLFRVDSWLQVMLGQRLKPKGYHHMGHLMTDDQLMTALGGLEANISKAVSQMPSHQDFIDQYCAVPESETV

SEQ ID NO: 85276 - protein, 552 aa, unidentified
  source 1..552: note = Chloroflexi bacterium
  REGION 1..552: note = tr|A0A432KDL3|A0A432KDL3_9CHLR Tryptophan halogenase; OS = Chloroflexi bacterium OX=2026724 GN=DSY78_02020 PE=4; SV = 1
MSTASKPDSNLDLNADVIVIGGGPAGSAAATMLARKGWQVTVLEREKFPRDHVGESLLPASIPVLEELGALPAVESAGFLPKYGATMVWGSGDAPWSWYFKETSQRYPHSYQVWRPQFDQILLDNAKAQGVTVLEGHHVTEVIFDGGEAVGVEFTSANGETGEGQARFIVDASGQSTLLARHLESKEWDPFFQNLAVYAYFTGAKPLPEPDQNNIFIESYRYGWLWTIPLHTGRSSVGVVVDSDTGKEGIQQNGAKAFLEAQLAQSSHTRAILENAMMDSEPTVVMDWSYTAGKMYGPGYILAGDAACFVDPLFSSGVHLALMSGVLAAAYVTTALNTPSMAEEAGEVYQELYLKEYNQFREMARLFYSSNLSAESYFWEARRITNSDEYSPRHSFIQAVAGQPPRGYERVVLERGQAPEKFIESVKTVETERLARTQWLAALAADPQRNQILNAVPRLAEGVQVQRKPVLAEGEFVPGQVLNTVSQPEGTPCSPLVAAVIGEIDGQKSVADIVDGMGQHLDQAAHAQLEEAVSRTIEILYVDGTVAGLVTD

SEQ ID NO: 85277 - protein, 485 aa, unidentified; identical to SEQ ID NO: 84820
  source 1..485: note = Porticoccaceae bacterium
  REGION 1..485: note = tr|A0A2D6ZE12|A0A2D6ZE12_9GAMM Uncharacterized protein OS=Porticoccaceae bacterium OX=2026782; GN = CMK29_06150 PE=4 SV=1

SEQ ID NO: 85278 - protein, 509 aa, Caulobacter vibrioides
  REGION 1..509: note = tr|A0A258D843|A0A258D843_CAUVI Tryptophan halogenase; OS = Caulobacter vibrioides OX=155892 GN=B7Z12_10115 PE=4; SV = 1
MTPSPIRNVLIVGGGTAGWMTAAALAKALPKTIAVTLVESEQIGTVGVGEATIPPINTFNQILGLDEAAFMRATKASFKLAIEFVDWMGPGHRYLHPFGSFGLDIEAVKFHQVWLRAHHEGWAPPIDAFNLSAQAAHLNRFAPPSKDPGQVLSSLKYAFHFDAGLYAKFLRDYAEPRGVTRVEGKVASVQQHGETGFVTSVTLDDGRVLEADLFVDCSGFRGLLIEQTLKAGYDDWSHWLPNDRAVAMPCVTGGDGLTPYTRATADAAGWRWRIPLQHRTGNGYVYSSRDISDEDAVARLRATLDGEPLAEPNFLRFQAGRRKAAWVKNVVAIGLSSGFLEPLESTSIHLIQAGITKLLALFPDRGFDPIEIAEYNRLTALQVELIRDFIILHFKANARSEPYWVRAREMDIPESLQRKIDLFAASGRLFPSDLDLFAEPSWIAVLLGQGVMPRRHDPLVDAFDEAFLKSQLSRLAGLIRQTAQALPTHEQFIARYCAAPHASRPEFKA

SEQ ID NO: 85279 - protein, 491 aa, Caulobacter vibrioides
  REGION 1..491: note = tr|A0A0V2FBD6|A0A0V2FBD6_CAUVI Tryptophan halogenase; OS = Caulobacter vibrioides OX=155892 GN=AS593_01880 PE=4; SV = 1
MTAAALAQTVGTQRYSITLVESEQIGTVGVGEATIPMILLFNKVLGLDEDVFIRETNATFKLGIEFADWRRLGHRYFHPFGLYGADMDGVGFQHFWLRWARQSGDWDHGAFNAETLAAAGGRFMRTPPAPNLPKINYAFQFDAALYAAFLRRYAEARGVVRAEGKITTVERDGQSGHVSRLVLDDGRAIGGDFFVDCSGFRGLLIEETLGAGYDDWSRWLPCNRAAAVPCARAGELTPYTRATAREAGWQWRIPLQHRTGNGYVFSDAFIGEDEAVRLLGERLDGAALADAKVLKFTAGRRRKSWIGNVLAIGLSSGFLEPLESTSIHLIQAAIAKLLTLFPKTGFDPWVVDKFNREMALEYEQVRDFIIAHYKVTERDDTEFWRWCQAMVPPDSLAQRLEVFRTRGEVLVDQKELFKETNWFAILAGQGLLPDDYHAVADKISPEELSLRLGRIRAAIKERAAGMPPHDLYLEKAGLLGAAAKAARIVTA

SEQ ID NO: 85280 - protein, 501 aa, Pseudoalteromonas piscicida
  REGION 1..501: note = tr|A0A0F4NSC7|A0A0F4NSC7_PSEO7 Tryptophan halogenase; OS = Pseudoalteromonas piscicida OX=43662 GN=TW75_19250 PE=4; SV = 1
MKTHLPMKTIQSLTILGGGTAGWMCAAYLAKHQPNLSVTVIESSSIGRIGVGEGSTPHLQLFMQSLGVKERDWMPACQASYKTGIYFDNWNGDNGCYFHPFFSEMDAKTAEVYFVNANARRRGSEYIDKPEHYFLAAVLADKQQAPLPQRPLPRALEYGYHFDAQKLADWLRAFSLARGVRHIQSTVSSVQHHAKEIIALTLESGEQVKSDFYVDASGFNALLIEKTLEVPFISFADQLLNDSAVAIAGDKINPLPSSTSAIAMPCGWRWQIPLQGRTGHGYVYSSAHTTPEEAEAQLRQAAQLDKGQAKHLTMKVGMIARSVEGNVFAIGLAQSFIEPLEATALMVTGYSIKLLNRLLSQQLEAQAINQQLSDLVLGIKEYVLAHYATSKRADSPYWQDAKIAALSLNELDELLTHWRSGGDFDAWLNQHRMHSPYIRPSWYCLLGGMDHRDSTCQMPFDQAPQHIEQAAKAYLTKLSDEHFTAHTTALEQLQRAQAFRA

SEQ ID NO: 85281 - protein, 420 aa, Caulobacter vibrioides
  REGION 1..420: note = tr|A0A258DAC1|A0A258DAC1_CAUVI Tryptophan halogenase (Fragment) OS=Caulobacter vibrioides OX=155892; GN = B7Z12_05800 PE=4 SV=1
RYYHPFGAIGGPIGPHEFYQCWLRAKANGHPSNLQDFAPGTVMADQWKFIPPFKAQRTLIAGASYALHVDARLVAKFLRDYAEARGVKRTEGIVTDVVTHPDGSVAKVVMKDGREVEGDLFIDCTGFRSLLIGKTLDVPFNDWSDMLLCDRAVVVQTQNVGAPHPYTVSKAEDAGWRWRIPLQHRAGNGYVFSSRHLSDDEARATLVKNVEGQMLMNPMFIAFKTGMRQRLWDKNVVAVGLAGGFIEPLESTALHLIYRGMDFLLRFMPDRDFDPALAAEYNRRMTADYEEIRDFIVLHYCTTERDDTPFWRDVRNAPIPDSLKERMALFQAQGVLREGVDDMFRNPSWQSVMEGMGVRPRRYQQLVDTVPYAVITQTLDQSAPILAAQVAGLPSHGEFLEKHCPAPKPQAVVAPFGAVA

SEQ ID NO: 85282 - protein, 551 aa, unidentified
  source 1..551: note = Chloroflexi bacterium
  REGION 1..551: note = tr|A0A2E2V599|A0A2E2V599_9CHLR Tryptophan halogenase; OS = Chloroflexi bacterium OX=2026724 GN=CL753_01765 PE=4; SV = 1
  VARIANT 153: note = Xaa can be any naturally occurring amino acid
MLTNNSGSYRTSALIVVVGGGPAGTTVATMLARKGLSVILLERAKFPRDHVGESLLPASMPVLKELGVITEVEQSGFLPKYGATMLWGSQPDPWSWYFSETNHQYPHAFQVWRPTFDNILLENSRKNGVDVRESHQVTSVDFLDTGSVTVNYXHEVDKKGSIDADFIVDASGSNCLLARQLDLREWDQFFQNLAVYGYFKGGSTLPDPDQTNIFIESTTNGWIWNIPLHTGVASVGAVVDSTYGQTQISQIGIKDFLLQNINQSKYTAKMLKDAELVSKPLVIKDWSYTNNPMAGDNYILVGDAACFIDPLFSSGVHLAFMSGILAAAHITTAMKDKDLEKESRRVYTNLYSQEYQHFRELAKLFYSSNRTVDSYFWEARRLLGVDTSYDSRKSFIHAVAGQPPRGYERAVMERGQLSEELLKEINEVSEIRSSRKLEADSLLSAMNISSPSISQLTPILIAGTKIEVKPVLGDGEFRWGYVLITPDRPEGTECSRLVSELVSLMLTKSSLDTIWNNLRNKFENIESQRLEGDILNTINILYTDGTITKFI

SEQ ID NO: 85283 - protein, 499 aa, Caulobacter vibrioides
  REGION 1..499: note = tr|A0A290MZP8|A0A290MZP8_CAUVI Tryptophan 7-halogenase OS=Caulobacter vibrioides OX=155892; GN = CA606_10410 PE=4 SV=1
MEPQTIRKVVIAGGGTAGWMAAAALARQLGPLLDITLVESEDIGTVGVGESTIPTARTFNALLGIDEAEFMRTTQATFKLGISFENWGEIGDRYIHSFGQVGKSTWMGGFHHFWLQAVAQGFGGDLGDYCFELKAAEGQRFYTGEESPLNYAYHLDAGLYGQFLRRMAEADGARRIEGKIASVRQRETDGFVEALVMESGQVVEGDLFIDCTGFRGLLIEQTLKAGYEDWSHWLPTNSALAVQTRSTEPAVPYTRAIAHRAGWRWKIPLQHRVGNGLVYCSDHISDDEAMAMLTSQIEGETLISPRLIRYRTGRRRKTWDKNVVALGLSSGFVEPLESTSIHLIMIGITRLMQLFPFGGISQAAIDRYNRQADDELEKIRDFIILHYKVTERSDSTFWDQVRTMDIPDSLAHRIALFQESAQVFQAPGELFQVDSWLQVMLGQRIMPRTYHHMGRLMPPQQLKQALDDLKRNIAGAVSRLPQHQAFLDHYCAPPVSKSA

SEQ ID NO: 85284 - protein, 510 aa, Alteromonas sp.
  REGION 1..510: note = tr|A0A4U0ZBI8|A0A4U0ZBI8_9ALTE Tryptophan 7-halogenase OS=Alteromonas sp. HB161718 OX=2565549; GN = E5672_15920 PE=4 SV=1
MNHSSNTSQKQRIVIVGGGTAGWLTAAIVAAKHKVAMGECGLDITLVESSDIPTVGVGEGTWPTMRNTLKDIGLSEKEVFRRCSAAFKQGGKFVNWVNGDGDFYYHPFTVPLGYGRVEMAPYVGDIANFANATNFQQHVCERNMAPRTLNEQEYSSAQSNYAYHLDAGAFADMLRDFSKTELGVKHIVATVEDVAATSNEHIESVTLNNGMVLKADLFVDCSGFRSLLLGETLGESVVSTDGVLFNNSALALHVPHEEDFEIKPYTQATAQEAGWIWDIGLSSRRGVGHVYSTEFTTDERAEEVLRQYVGDKHGDLKARTIRFNSGYKKRIWKGNCIAVGLSAGFVEPLEATALMLIEISARYIAEQMPLPESAMPIVSQRFNKQMNYRWQRIIDFLKLHYIFNQRSEPYWVANRDPSTIPDSLKEDLEIWKYRGPQIADFSAAIELFPAASYQYVLYGMGFSPDFSLQSHFYNERDLADKVIQQNQLITQQKLSSLPNHRDYIEQWLAS

SEQ ID NO: 85285 - protein, 500 aa, Hyphomonas sp.; identical to SEQ ID NO: 84374
  REGION 1..500: note = tr|A0A350ZRK7|A0A350ZRK7_9RHOB Tryptophan 7-halogenase OS=Hyphomonas sp. OX=87 GN=DCY26_07200 PE=4; SV = 1

SEQ ID NO: 85286 - protein, 545 aa, unidentified
  source 1..545: note = Chloroflexi bacterium
  REGION 1..545: note = tr|A0A2E6XD99|A0A2E6XD99_9CHLR Tryptophan halogenase; OS = Chloroflexi bacterium OX=2026724 GN=CL759_04675 PE=4; SV = 1
MNVTDLSADVVVIGGGPAGSAAATMLARKGWQVTVLERENFPRDHVGESLLPASIPILEELGVLPAVEEAGFLPKPGATMVWGSGSSPWSWYFKETSQRYPHSYQVWRPQFDQILLDNARAAGVTVVEGAHVSDVIFDDGEAVGVEFTNADGVEGEAECRFIVDASGQSTLLARHLEYKQWDPFFQNLAVYAYFTGGDPLPEPDQNNIFIESYQHGWLWSIPLHTGRTSVGAVVDSKIGQEGIQKEGAKAFLESQLSQSTHTKNMLAKAAMDSEPTVLLDWSYTSEKLFGPGFILAGDAACFVDPLFSSGVHLALMSGVLAAAYVTTALNDPSLAEDAGQVYQELYLKEYNQFREMARLFYSSNLSAESYFWEARRITNASHYSPRESFIQAVAGQPPRGYERVVLERGHAPEEFTESIRAVETERRARTEWLAALAGDPQRNQLLNAIPQIAEGVKVEEKPVLAEGEFVRGHVLNTISQPEGTPCSPIVAAVITAVDGQKSVADIVDSLGQHLDQSAHAQLEEAVSRTIEILFVDGAITGLTTE

SEQ ID NO: 85287 - protein, 506 aa, Xanthomonas campestris
  REGION 1..506: note = tr|G0CAT9|G0CAT9_XANCA Tryptophan halogenase; OS = Xanthomonas campestris pv. raphani 756C OX=990315; GN = XCR_4464 PE=4 SV=1
MIPAPLRNIVIVGGGTAGWMAAAAFARVLGPSFNVQLIESEQLGTIGVGEATVPHIKAFNNLLGIDEAEFVRQTQGSFKLGIEFVDWQRPGTSYIHGFGTQIGHPLGLLPFHQYWIKQQRRGKAQPLGAYTLNTVAATRGKFMTSAGDVPANSPLANIAYAYHFDASQYARFLRGYAEQRGVTRLEGLIEQVQLDAHTGNVQSVQLASGQVVRGDLFIDCSGFRGLLIEEALHTGYHDFTHWLPCDRALAVPCEKAGPPTPYTRSTARAAGWQWRIPLQHRTGNGYVYSSAHISDDEAAATLLANLDGTPLADPRPLRFTTGRRKQFWNRNVVALGLASGFLEPLESTSIHLIQSGISKLLELFPREGISPVLVQRYNDRLAFEFDRIRDFLVLHYHATERDDSAFWRDCRTMPITPELQTTLDLFRDSGRFYRNAEEMFAEISWVQVMVGQGILPQGYHPLVDQVPDTDAEGFLASVAQTISHCVDVMPTHQQFIDRYCRADPMR

SEQ ID NO: 85288 - protein, 496 aa, Sphingomonas sp.
  REGION 1..496: note = tr|A0A196N4D2|A0A196N4D2_9SPHN Tryptophan halogenase; OS = Sphingomonas sp. TDK1 OX=453247 GN=A7X12_22275 PE=4 SV=1
MDVQKFRVVIAGGGTAGWVAAAALVRHLGPSLDITLVESDAIGTVGVGESTIPTAWTFHKLLGINEQVFLRETNATFKLGISFENWRREGDRYFHPFGSIGRGLPLCDFQHFWLEARRRGFGGALGDYSLETQAALAQKFATGDPMPLAYAYHLDATAYAAFLRSLAEPAGVRRVEGRITEVEQADNGDIAALVLEGGLRIEGDLFIDCTGFRALLIEETLKTGFDDWSHWLPTNRAFAVQSETTEAPVPYTRAIAHGAGWRWRIPLQHRMGNGFVYASDHLSDDEAREQLLAAVPGRALFDPRLIRFTTGMRKKAWSRNCVALGLASGFIEPLESTSIHLVMIAVTRLLQNFPTRHDMAALAARFNAQSRAESEHIRDFIILHYKLNDRPEPFWREHAARAVPDSLSARIALFREGAVAYQEGTDLFRTDSWNAVLLGQGVTPRDHHPMPSQIPDADLQRAFADLRAGIAAQLAQLPGHAEFICRYAAAKVPAAA

SEQ ID NO: 85289 - protein, 518 aa, unidentified
  source 1..518: note = Thalassotalea sp.
  REGION 1..518: note = tr|A0A099KG89|A0A099KG89_9GAMM Uncharacterized protein OS=Thalassotalea sp. ND16A OX=1535422; GN = ND16A_2274 PE=4 SV=1
MSNELKHIVIVGGGSAGWIAAGTLAANHHANQPGGIKITLIESPDVKTIGVGEGTWPTMRNTLRNMGVSETDFMRECDASFKQGAKFAKWVTNSDDDFYYHPLVLPQGYFDVDLFKPWKMAKSPVSFSNAVCYQEQLCERDLAPKLISTPEYAAVANYAYHLDAGKFADFLKNHCTKNLGVHHILDHVSAVNSAENGDIASVSSRSHGDIAGDLFIDCTGFSALLIGKHYNVPSVCKKDILFIDTALAVQVPYDSADSPIASHTISTAQESGWIWDIGLPTRRGIGHVYSSKHSSQERAEQLLRDYLAESIGDKAKDLNFRKIDINPGVREKFWVNNCVAVGMSAGFLEPLEASALVMIELACASISEQLPANRETMDIVAKSYNDKIQYNWDRVIDFLKLHYVASKRDDSAFWRDNRDPQTIPESLQELMALWQHRSPSEYDFPRKREMFSAASYQYVLYGMDYNHSTETGFVSDDVQRKAAKMFAENQQLTKRYVTALPSNRELINKVCQFGFQKV

SEQ ID NO: 85290 - protein, 538 aa, unidentified
  source 1..538: note = Chloroflexi bacterium
  REGION 1..538: note = tr|A0A2D9WMU1|A0A2D9WMU1_9CHLR Tryptophan halogenase; OS = Chloroflexi bacterium OX=2026724 GN=CL718_06165 PE=4; SV = 1
  VARIANT 19: note = Xaa can be any naturally occurring amino acid
  VARIANT 31: note = Xaa can be any naturally occurring amino acid
  VARIANT 59: note = Xaa can be any naturally occurring amino acid
  VARIANT 84: note = Xaa can be any naturally occurring amino acid
  VARIANT 87: note = Xaa can be any naturally occurring amino acid
  VARIANT 109: note = Xaa can be any naturally occurring amino acid
  VARIANT 137: note = Xaa can be any naturally occurring amino acid
  VARIANT 149: note = Xaa can be any naturally occurring amino acid
  VARIANT 151: note = Xaa can be any naturally occurring amino acid
  VARIANT 211: note = Xaa can be any naturally occurring amino acid
  VARIANT 250: note = Xaa can be any naturally occurring amino acid
  VARIANT 355: note = Xaa can be any naturally occurring amino acid
  VARIANT 360: note = Xaa can be any naturally occurring amino acid
  VARIANT 379: note = Xaa can be any naturally occurring amino acid
  VARIANT 418: note = Xaa can be any naturally occurring amino acid
  VARIANT 444..445: note = Xaa can be any naturally occurring amino acid
  VARIANT 525: note = Xaa can be any naturally occurring amino acid
  VARIANT 531: note = Xaa can be any naturally occurring amino acid
MPLEAEYHTVVVGGGPAGXTTAALLAMKGLXVLLLERELFPRAHVGESLLPASLPIFDXLGVRDSIDNAGFVKKYGAAMVWGNXRSXWSWLFAETKGPYSHSYQVTRPXFDMILLENAREKGVHIRQKCQVLGPLFXENDSTVAGVEFXNXDGNHEKITAQIVIDASGQQTLFANQFDLKDWDTAFKHLAIYGYYSGGEHLPAPDHGSILXESFENGWVWKIPLHDGSTSVGVVMDAAWAQHEIRKSSVXQVFKTQVGLTNEISNLISQATFKEETHLIKDWSYVTTKMTGDGYVLVGDAACFIDPLFSSGVHLALQSGVLAAAYAATAISSPDLAKSAARQYEATYRRRYGYFXELARXFYGSNKSLDSQFWQDRALXEENWSDTSREEFINVVAGNAPEGYERVVIDQGHAPENFXSAIEEAESSRVNRATRSQQFGNDELXXRSPRLIDQARLVKGATLGDGIYELGYLLQTSARPEGYPVIPPIALLLNLMDKERSVATLAKEVASNLDLDDAITEELVLXAIRNLXADGLIEL

SEQ ID NO: 85291 - protein, 501 aa, unidentified
  source 1..501: note = Alphaproteobacteria bacterium
  REGION 1..501: note = tr|A0A257EQ77|A0A257EQ77_9PROT Tryptophan halogenase; OS = Alphaproteobacteria bacterium PA4 OX=2015572; GN = CFE37_02695 PE=4 SV=1
MPQGPLQEIVIVGGGTAGWMTAAALSRFLEGACRIRLIESDAIGTVGVGEATIPQIRLFNAGLGIDEDEFIRETQGSYKLGIEFVDWHHVGSRYMHAFGSVGRDIGLLPFHHYWLAGRNAGTAADFGAYSFNAAAARANRYNRGAPSVAGLPELVHAYHFDAGLYARYLRRYAEARGVVRHEGRITRVERDGESGDVRQLTLEDGSVIAGQLFIDCTGFRGLLIGETLGTGYEDWSQWLACDRAYAVPCASADFTPYTRATARAAGWQWRIPLQHRTGNGHVYSSAHISDDEAAATLLAHLDGEALGEPRPLRFTAGRRERMWAHNVVAIGLASGFLEPLESTSIHLIQSGIARLLTLLPDAGMAPALRDEFNRQSAWEIARIRDFIILHYKATARDDTPFWRRARDMAIPDDLADRIRLFAETGRVRRDHDELFTEIGWTQVFLGQGIVPAAPHPLAGLVAPADLAGFLAQLQGAITREVASLPDHAAFIRRHNAANRQV

SEQ ID NO: 85292 - protein, 504 aa, Caulobacter vibrioides
  REGION 1..504: note = tr|A0A258CU86|A0A258CU86_CAUVI Tryptophan halogenase; OS = Caulobacter vibrioides OX=155892 GN=B7Z12_18495 PE=4; SV = 1
MAQEPIKAVTIVGGGTAGWISAALLSRTLGQSVAITLVESDEIGIVGVGEATIPAIRLLNGLLGLDENDFLAATHGTIKLGIEFVDWRTVGHSYLHAFGPIGRPLGMAPFHHYWLRRRQAGHDESLWDYSLNARAAKAGRFDRVTQVGGGYLEGLVYAFHFDAALYAQYLRRYSEAQGVTRIEGRIVSVDQDPESGFVTGLTLQDGRKVGGEFFIDCSGFRGLLIEETLKSGYEDWRAWLPMDSAIAVPCASVTPLTPYTRATAHGAGWQWRIPLQHRTGNGHVFCSDYIDAAQATDVLMANLDGAPLAEPRQLRFTTGRRKQFWNRNVVALGLASGFMEPLESTSIHLVQSALSRLLALFPDRGFNPVEIAEYNRQTALEYEYIRDFLVLHYKATTREDTPFWQAVRRMDMPDSLKARIALFSQSGRLFSQDDDLFKEASWIQVLIGQGVIPEAFHPLTGVVTDAQLDEYLANLRQIMSRAVEGLPRHDDFIAKTCASRPAGG

SEQ ID NO: 85293 - protein, 511 aa, Sphingomonas sp.
  REGION 1..511: note = tr|A0A196MSM0|A0A196MSM0_9SPHN Tryptophan halogenase; OS = Sphingomonas sp. TDK1 OX=453247 GN=A7X12_04815 PE=4 SV=1
MSRHIESICIVGGGSAGWLTAALIAAKHGPDLQVTLVESVRLSIIGVGEGTWPTMRNTLRKIGISETDFLRACKASFKQGAKFAGWRTGAADDFYYHPLVLPEGFPSIDLAPFWNAQADAAGTPSFSDAVCFQEFLCEHHLAPKQITSPEYGGIANYAYHLDAVRLGEMLREHCVGKLGVRHVDDDIIEVQQAENGDVTAVIGQRHGGIAADLFVDCSGFSSLLLGQTLGVPFIDCSDVLFIDRALAVQVPYESEDAPIVSHTVSTAQDHGWIWDIGLQNRRGVGYVYSSRHAGADRVEEALAAYVGPAFAGLTPREITIRSGHRETFWKNNVVAVGLAAGFLEPLEASALVLSELSADYIASAMPATRGAMDIVARRFNDMTRYRWDRIIEFLKLHYMLSQREDTAFWRDNRDPATIPQPLQDLLELWRHTPPGEHDFASAHEMFPAASYQYVLYGMGFRTAPRAGALAARDAAEDAFERVAAMKRRLVAAMPTNRALLDKLAQYRFQPV

SEQ ID NO: 85294 - protein, 505 aa, Caulobacter vibrioides
  REGION 1..505: note = tr|A0A0V2FCF5|A0A0V2FCF5_CAUVI Tryptophan halogenase; OS = Caulobacter vibrioides OX=155892 GN=AS593_16625 PE=4; SV = 1
MDRVIGSIAILGGGTAGWMAAALLARVLAGTPTTITLVESAEIPTVGVGEATIPPIVDFLRLLEIDQGQFMAATEASFKLGIRFDDWGAIGERYWHPFGTFGPSVDRRPFHHIWHRLRAAGDDPRVEAYSLATALGDAGRMAFADSPGHGQGQGPLGGLRHALHFDAGLVAKFLRTWSEQRGVRRLERRVEGASLRDDGFVEALVLDGGERLAADLFIDCSGFRGVLIEGALSTGYEDWSAFLPCDRAVAGLTVRDANPPPFTQAAARPAGWRWRIPLRHRTGNGYVYSSAHVSDDEALADLEREAGKLLTEPRVLKFTGGRRKAFWNRNVVALGLSSGFIEPLESTSIHFVTSGLMKLLDHFPDKGFDAANIADYNNALIAEYEAARDFIVLHYQPTRRDEPFWRERAAAALPPDLAERLALYRGTGRIPHRPTELFTELSWFYVLEGMGVRPAAHDPLVDLSNLSQVREGLAGWRQRVAETVRSAPSHDAALDRVAGRARPAA

SEQ ID NO: 85295 - protein, 538 aa, unidentified
  source 1..538: note = Chloroflexi bacterium
  REGION 1..538: note = tr|A0A2E6HSM1|A0A2E6HSM1_9CHLR Tryptophan halogenase; OS = Chloroflexi bacterium OX=2026724 GN=CL771_03730 PE=4; SV = 1
MSTDFDAIIIGGGPAGSTAASLLAIEGKHVLLLEREVFPRAHVGESLLPASLPIFDALGIREKISNAGFVEKYGAAMVWGNTREIWSWLFAETKGPYEHSYQVTRPEFDQILLENAGSKGAVVKESCQVIKPLVDDTGTVTGVEYFDEQQNLQMASAPITIDASGQQTLFANFFGLKNWDNDFRHLALYGYYIGGDHLQPPDQGSILIESYENGWAWKIPLHNGKSSVGLVLDESWGQEKIKQFGTDALFAGEIDKLVEIKNLLRSATFDGETILIKDWSYLTKQMTGDGYILVGDAACFIDPLFSSGVHLALQGGVLAAAYAVTLLEDPQLARSAARQYEATYRRRYGYFHELARLFYGSNSSLKSQFWTERTISADDWSTQSREEFVNIVAGNSPEGYERVVIEQGHAPETFVTAIQTAEIERVNRATKSQDLNNQQLVEGIPQLIEGARLVKGAVLGSHKYELGYILQTDQRPEGYPVITPIALLLNLCDGKRTVEQIAEEMQDHLSPDGNEIVTMVVEAVRNLLADGLVHLAAD

SEQ ID NO: 85296 - protein, 507 aa, Caulobacter vibrioides
  REGION 1..507: note = tr|A0A290MSI6|A0A290MSI6_CAUVI Tryptophan 7-halogenase OS=Caulobacter vibrioides OX=155892; GN = CA606_05625 PE=4 SV=1
MKPLKKILIAGGGSAGWMTAALCSRLFQGLYEIVLVESEEIGTVGVGEATIPAIKKFNELLGLEEDDFLRKTQGSFKLGIQFRNWWRQGESYLHGFGVIGQDLGWLRCHQYWLRMRELGRAGDFDNLSINNAMALSNRFMRARADMAESPIGHIAHAFHFDAGLYAKHLSTYAQARGVTRREGKIVDVTLRAEDGFVQSVTMDDGEVITADLFVDCSGFRGLIIEQALKTGYEDWTHWLPCDRAVAVPCDRSEHFTPYTRSTAHTAGWQWRIPLQHRTGNGHVYSSQYIDDDEAERVLLANLDGAQRADPLRIRFKTGKRKKIWNKNCVAIGLASGFLEPLESTSLHLIQSAVIRMVRLLPDAGFDQATIDEFNRQSDFEYERIRDFIILHYKATERDDSPFWRYCRDMEIPATLQRKMDLFRANGRVFREDDELFTEESWIQVFLGQGVFPRAYDPLVHVQSDEEIARFLGNIETVVGKCLNVMPSHAEFVAHACQAPPLAPVPTS

SEQ ID NO: 85297 - protein, 531 aa, Colwellia sp.
  REGION 1..531: note = tr|A0A2N1C8H9|A0A2N1C8H9_9GAMM Tryptophan halogenase; OS = Colwellia sp. 75C3 OX=888425 GN=CXF85_02225 PE=4 SV=1
MSKSLKHVVIVGGGSAGWITAGRIAAMHNSKSAQGVKVTLIESPDVNIIGVGEGTWPTMRGTLQKMGVSETDFMRECDVSFKQGAKFAKWVTGDEDDFYYHPLVLPQGYFDIDLFKYWQQNNQQPSNSQNSEQSSQPKSFSAAVCFQEQLCENGLAPKLITSPEYAAIANYAYHLDAGKFAAFLKSHCINKLGVEYVSDHVGTINSTDSGDIASVNTNNHGDISGDLFVDCTGFSSLLIGKHFQVPLISKKDVLFIDTALAVQIPYEKGDDAIASHTISTAQDAGWIWDIGLPSRRGVGHVYSSKHTSQGDAENALRKYLKSSIGEKSEDLTFRKIDINPGIREKFWVNNCVAVGMSAGFLEPLEASALVMIELAATTISEQLPANRECMDIVAKHYNERFSYNWDRIIDFLKLHYIASKREDTAFWRDNKDPETIPESLQELMTLWKHRSPSEYDFSQKREVFSAASYQYVLYGMDYEFTQSNSEKDEKEQNLAQRMFAENEKITVKYSAALPSNRELIEKIAQFGFSKV

SEQ ID NO: 85298 - protein, 498 aa, Colwellia sp.
  REGION 1..498: note = tr|A0A2N1CA86|A0A2N1CA86_9GAMM Tryptophan halogenase; OS = Colwellia sp. 75C3 OX=888425 GN=CXF85_00595 PE=4 SV=1
MQPKSIVIVGGGTAGWMAANLMAKKWRNSNIDITLVESPDIGIIGVGEGSTPQLKAFFDKMDIAEHEWMPQCNATYKLGINFKNWSTKKGFEQYFHPFDSALDLHTRKKFILNCYGRRLGDDVKTLPNDFFIAAYLAKQNLGPHANSNFPFPVNYGYHFDSHLLGKFLCDKAIELGVEHISGNVTDVALHLNGDIEKLSVDSVGWLSADFFIDSTGFRSLLLQNTLKVPFVNFKENLFNNSAVIIPSPSSNKRPPQTTSTALKNGWAWDIPLTNRTGNGYVYSSDFCSSEEAEIELREKLNLLDSDVEARHLKMKVGRVEQHWAKNCLAVGLSQGFIEPLEATALHLVQETIEHFISAWDKGNFTNTHAAAFNKNINQRFDGIRDYIVCHYKLNSRTDSEYWQQNARNTKTSGSLAEIINVWLNREDLAQYWEQSTQAKSYSVVSWHCILSGYGIFPELNQKINTQAMSVNMDEVHQFLSQCSRNFPDHTQQLNNLLK

SEQ ID NO: 85299 - protein, 552 aa, unidentified
  source 1..552: note = Chloroflexi bacterium
  REGION 1..552: note = tr|A0A432JJV2|A0A432JJV2_9CHLR Tryptophan halogenase; OS = Chloroflexi bacterium OX=2026724 GN=DSY79_03275 PE=4; SV = 1
MSTASKPDSNLDLNADVIVIGGGPAGSAAATMLARKGWQVTVLEREKFPRDHVGESLLPASIPVLEELGALPAVESAGFLPKYGATMVWGSGDAPWSWYFKETSQRYPHSYQGGRPQFDQILLDNAKAQGVTVLEGHHVTEVIFDGGEAVGVEFTSANGETGEGQARFIVDASGQSTLLARHLESKEWDPFFQNLAVYAYFTGAKPLPEPDQNNIFIESYRYGWLWTIPLHTGRSSVGVVVDSDTGKEGIQQNGAKAFLEAQLAQSSHTRAILENAMMDSEPTVVMDWSYTAGKMYGPGYILAGDAACFVDPLFSSGVHLALMSGVLAAAYVTTALNTPSMAEEAGEVYQELYLKEYNQFREMARLFYSSNLSAESYFWEARRITNSDEYSPRHSFIQAVAGQPPRGYERVVLERGQAPEKFIESVKTVETERLARTQWLAALAADPQRNQILNAVPRLAEGVQVQRKPVLAEGEFVPGQVLNTVSQPEGTPCSPLVAAVIGEIDGQKSVADIVDGMGQHLDQAAHAQLEEAVSRTIEILYVDGTVAGLVTD

SEQ ID NO: 85300 - protein, 505 aa, unidentified
  source 1..505: note = Massilia phosphatilytica
  REGION 1..505: note = tr|A0A2S8H7T4|A0A2S8H7T4_9BURK Tryptophan halogenase; OS = Massilia phosphatilytica OX=2026176 GN=C5614_10830 PE=4; SV = 1
MSDKAIRKIVIVGGGTAGWMTAAPLALKLGGSCEIVLVESPEIGTVGVGESTLPTIRYYNHALGIDGADFVRRTKATFKLGIDFRDWGHLGNRFFHGFSDFGPTIENRPAFMYWLRLARDNPNMPSYEEWSISTAMAHQNKFVPPHGDQPGPTNAYTYAFQFDAGLYALYLRDYATARGVQRVEGTVGNVEQHPETGFITALQLQDGRRIEGDLFVDCTGFRGLLIEGVYKAGYEDWSAMLPCNSAQAVPSALADRLTPYTRSTAKTAGWQWRIPLQHRNGNGHVYCNAFMSDEEAGRVLLAGLDTEPLDTPRQLRFTTGRRRKSWIKNCVAVGLSSGFLEPLESTSINIIELAVGWLIQYFPDRDCNPELADEFNRLITQRYEFVRDFIVLHYKLTNRTDSEFWRYCANMPIPDTLQHQIDLFRTTGRITIYDREGFQADSHAAIMLGHGIRPERTDPLIDRMDLARMADHFRKVRATIRDVVGTMPTHEALVGQIAMESMRKS

SEQ ID NO: 85301 - protein, 538 aa, Streptomyces sp.
  REGION 1..538: note = tr|A0A2S6WLC8|A0A2S6WLC8_9ACTN Tryptophan halogenase; OS = Streptomyces sp. 46 OX=1777322 GN=BV882_19555 PE=4 SV=1
MTDIGTNDTDSRIRKVVILGGGTAGWMTAAYLGKALQGTVDIQVLEAPAIPRIGVGEATVPNLHRVLFDYLGIPEEEWMRECNASFKMAVRFVNWRTPGRGEPGARTLDDGRPDHFYHPFGILPDHDNTPLSHYWYKNRHEGRTDEPFDYACFREPPVMDANKSPKWLDGTESTRYAWHFDAALVADFLRRFATDKQGVEHVQDEMVRVEQDERGYVTALHTKSGRVLDADLFVDCSGFRGLLINKALGEPFVDMSDHLMCDSAVATAVPHDDEANGVEPYTSAIAMSSGWAWKIPMLGRFGSGYVYSSRFTSQDEATAEFCEMWGLDPAETQFNHVRFRVGRNRRAWVNNVVSIGLSSCFLEPLESTGIYFITAAIYQLAKHFPDRTFNPALVNSFNQEIEMMFDDTRDFIQAHFYYAPRDDSPFWRAQKELKLPENIQRKIDAYKAGLPVNSPIADESTYYGNFEAEFRNFWTNGSYYCIFAGLGLEPDTPLPALAHKPESVAGAQPLFDKVKQEQQHLLDTLPSAYDYLRRLHGK

SEQ ID NO: 85302 - protein, 511 aa, unidentified
  source 1..511: note = Massilia phosphatilytica
  REGION 1..511: note = tr|A0A2S8HA16|A0A2S8HA16_9BURK Tryptophan halogenase; OS = Massilia phosphatilytica OX=2026176 GN=C5614_09645 PE=4; SV = 1
MMSKPIEHVVVVGGGSAGWLTAAVLAAEHPRLTVTLVESPGVPPIGVGEGTWPSMRETLQRIGVSEAAFFRECDAAFKQGSRFDRWVDGSDDDTYFHPFSLPQGYGEANLVAAWQQAHRDVPFADLVSYQPHLCVQGRAPKQPQTPEFAGVANYGYHLDAGKFGVFLQKHCVEKLRVRHVLAHVVDIVSHEDGDIAALRTREAGVVEGDLFIDCTGMASLLLGRHYGVPLVSQRDVLFNDRALAVQVPYPADDTPIASQTTSIAQSHGWIWDIGLPTRRGVGYVYSSAHVDDDAAEQTLRAYLARTGSDAGIPAPRKIAFDPGYRARFWERNVVAIGLSAGFIEPLEASALALVELSAAWLADDLPATRAQMDTISARFNEAFTYRWERIIDFLKLHYVLSKRTDTAYWLDHRAPRTQSPRLRELLALWRTRAPSRRDFPRIEEIFPSASWQYILYGMGFRPELTARASDLPERADHYFREAARLTARMLPQLPPNREMLHHIRQYGMPPG

SEQ ID NO: 85303 - protein, 505 aa, Caulobacter vibrioides
  REGION 1..505: note = tr|A0A0V2F6C1|A0A0V2F6C1_CAUVI Tryptophan halogenase; OS = Caulobacter vibrioides OX=155892 GN=AS593_00745 PE=4; SV = 1
MSDQRVRSVVIVGGGTAGWMTAAALAKTLGAQGLKITLVESEAIGTVGVGEATIPPILTFNAMLGIDERAFMRATKASFKLGIEFVDWGALGETYHHPFGTFGLDLEGIKFHQAWRKFEQAAGPIGDYNLTEAAARRWRFALPDPDPAKVMSSLKYAYHFDAGLYARFLRGFSEQRGVVRIEGRIGRVDQNGETGFVEAVLLEDGRRVEGDFFVDCSGFRGLVIGQALKVPYQDWGRWLPNNRAVAIGCELGGDGLTPFTRATAREGGWQWRIPLQHRIGNGYVYSSHHVDDQRALETLLANLDGAPTDEANFLRFTPGRRERAWEKNVCSIGLSAGFIEPLESTSIHMIQAGITKLLALFPGNGVDPLEIDEYNRLTAEQVDRIRDFVILHFHATRRDDTDYWRYLSSMTVPDSLARRMELFAHRGRWFPSEYDLFHETNWLAVLLGQGIVPQEWDPLVDSLPESEVRQRLAHLSALIARTAEAMPSHAEFVARYCGAPQGVAA

SEQ ID NO: 85304 - protein, 507 aa, unidentified
  source 1..507: note = Massilia phosphatilytica
  REGION 1..507: note = tr|A0A2S8GWA8|A0A2S8GWA8_9BURK Tryptophan halogenase; OS = Massilia phosphatilytica OX=2026176 GN=C5614_30855 PE=4; SV = 1
MQQNPIRKIVIVGGGTAGWMAAAPLAQRMGKRCEIVLVESPDIGTIGVGEATLPTIRFYNAALQLDHADFIKKTQATFKLGIEFKDWGHVGNRFFHGFGDFGPPLNGIQAHHYWLRLARTFDQMPAMENWSMASIMARENKFTMPHDAQPGVTDAYSFGYQFDAGLYAAYLRDYAMARGAKRVEGTITSVDQHPETGFVTAVRLADGRTLDGDLFIDCSGFRGLLIEGTLKAGYEDWSEHLPCNSALAVPSARVEPLTPYTRSTAKGSGWLWRIPLQHRTGNGHVYSNAFTTDDKARQDLLDGLDGAALDEPRQLRFVTGKRKKSWVKNVVAIGLSAGFVEPLESTSISLIETAVGTLIEQFPDRDFRPELADEFNRIIGGRYESIRDFIVMHYKLTKRDDTEFWRYCANMAIPDSLAHQIELFRETGRVAILDRDSFLLPSFVSMLVGLGVEPKRYDPFVDDVDMRQLHGHFAGLRDLIAQTVAKMPGHGAYLEKNAKGAPLGKVA

SEQ ID NO: 85305 - protein, 499 aa, unidentified
  source 1..499: note = Thalassotalea sp.
  REGION 1..499: note = tr|A0A099KES2|A0A099KES2_9GAMM Uncharacterized protein OS=Thalassotalea sp. ND16A OX=1535422; GN = ND16A_2636 PE=4 SV=1
MNQDKIQNVVIVGGGTAGWVTAALLSRVLGKTLNITLVESEQIATVGVGEATIPPIITINNALGITEKEFINATSATIKLGIEFENWKQQGDSYMHAFGGIGKNFPFCDFYHYWLKAKELGDKSDFWDFSLNYQAAKHNKFSKAAKIEGTNLPGLTYAYHFDAGLYAQFLRKFSEAKGVKRIEGMVCKVNLNDDNGYVDSIELKDGNIIRGDLFVDCTGLAGLLIEKALNTGYVDWSHWLPCDRAMAIPCESVTPISPYTKSIAHDSGWQWRIPLQHRIGNGLVYSSKYMSDQQAKQLLLNNLDGKPLAEPKIIPFRTGRRRKQWHKNVVSIGLSSGFLEPLESTSIHLIQTAAIRLIKLFPHNGIKANEVVEFNRQAKIEIEQIRDFIILHYKVNEREDSQFWRECQRMDIPESLQRKIELFRSTGKLFREQDDLFTEIAWQQVLIGQGIMPEDHHALADALTDQQITELMQNLKILIDRSVDNMPGHDDFINRTKAM

SEQ ID NO: 85306 - protein, 534 aa, unidentified
  source 1..534: note = Chloroflexi bacterium
  REGION 1..534: note = tr|A0A2E3AKB4|A0A2E3AKB4_9CHLR Tryptophan halogenase; OS = Chloroflexi bacterium OX=2026724 GN=CL749_00740 PE=4; SV = 1
  VARIANT 452: note = Xaa can be any naturally occurring amino acid
METTDIVVIGGGPAGSTAASMSARAGLSVVLLERERFPRDHVGESLLPASMPILEELGVYSRIADAGFPPKYGATMVWGKDNTPWTWRFAETNNTYKHSYQVSRRDFDLILLNRSRELGVDVREECTVNKILLDGDRIVGVEYQDREDNRVSLMARFVIDGSGQSAIISRLKGARKWDKNFRNLAVYAYFKGIARLPSPDQNNIFVESYADGWIWNIPLKDGLSSVGAVVDAKKATKVLKHQSIQEFFENQISATSHNREMIKIAEQVGHPTVVRDWSYISEEMAGPGWASAGDAACFIDPLFSSGVHIALMSGILSSAYAVTSLESPDMSEPTAAVYQEMILREYSLFRELANLFYESNRSVDSYFWEARRIAGTREDTDARSAFVRAVSGQSVRGYERAVLERGDLPNTVSLALDGVAKELKMRQDVLHNIGSSIPDAVPVLHPDARIVXKPVLSEGRFEYGVLLYSPGRIEGTVCSRFVEMLVNYIDGRSTVNQITKRLAKEAENTSEETLRDYVKEAIKILYFEGAIQRL

SEQ ID NO: 85307 - protein, 374 aa, Caulobacter vibrioides
  REGION 1..374: note = tr|A0A290MMN1|A0A290MMN1_CAUVI Tryptophan 7-halogenase OS=Caulobacter vibrioides OX=155892; GN = CA606_01215 PE=4 SV=1
MKRVLIVGAGIDAWMTAAALATATKGLAEVVVAETSPPPAGRIAALPSLQGLHARLGISDEVLAQATNARPRLAARYGDGLEPFGETGVAIDGVAFHHYWLAGGRPGPLTDWSLAAQAAVRGRFAPPSPDPRSPLSSLSHGLTLDAAGYAALLKRIALAAGAKRVEDRPDADLKVDASGDQRLLAPQEPWTDWSAWLPTGVALAQDGLISTFAPTPVRTGHIAEAMTGDTVAVGAAYGAIGAGDGGDLHLLQGDVSRLIALFPTGPAAVAEYNRLAEAALERARDMAILRWGDLSDPPQTLARKIEQFESRGRVVTYDDETWPESAWIHAMLARGIIPTRWDPLADRVGAERTREMLSRMKAMLEQTAEGMPRV

SEQ ID NO: 85308 - protein, 534 aa, unidentified
  source 1..534: note = Chloroflexi bacterium
  REGION 1..534: note = tr|A0A2E4H4Y1|A0A2E4H4Y1_9CHLR Tryptophan halogenase; OS = Chloroflexi bacterium OX=2026724 GN=CL744_02035 PE=4; SV = 1
MPDAVVIGGGPGGGTAATLLARRGYSVVLLEREIFPRAHVGESLLPASMPVLEELGVLGQIENENFPKKYGATMVWGRDDTPWSWYFRETNRTYPYAYQVSRPRFDQILLDNAKSSGVDVRENCNVFETLSDSESGAIHGVRYRRDSGIVESVEADFVMDASGQSALLARSMNLRTWDTFFQNLAVYGYYRGAKRLPSPDETNIFIESYGLGWTWTIPLKDGLASVGAIVDSESAQAMLADIGPDEFLRQQISQTARTNDMLSDAELTGAPRVVRDWSYTTNRMVGDGWILLGDAACFVDPLFSSGVHLALMSAVMAAAYVHGAKTDPTLRVPAGQVYEQLYRKEYAHFRELASLFYASNRTEESYYWQARRLLGDTNVGARESFIRAVAGQPPRGYERSALSRGELPSEISEMFASVASDKRLRDATVAMGLSLNLVPRLAGEAKLERRPIFAEGEFQWSAVLSSATRPEGTPLSNFVAALVNLVDGKRNIGQILDRFTQGVEDSEQIEQAHESMINAISILYVDGAIDSLMG

SEQ ID NO: 85309 - protein, 483 aa, unidentified
  source 1..483: note = Thalassotalea sp.
  REGION 1..483: note = tr|A0A099LF06|A0A099LF06_9GAMM Uncharacterized protein OS=Thalassotalea sp. ND16A OX=1535422; GN = ND16A_3203 PE=4 SV=1
MSDERINHVVVVGGGTAGWLTAANLAKQFNSNNSNSVQVTLIESPDIPTIGVGEGTWPTMRKTLAKLGISETTFLRRCNASLKQATKFVNWQQAPKAGVDNHYYHLFTSIFDPSDFNLAPYWQLGKIGDNLSYADSVSVQGQICEMNLAPKAITSKEFEGIQNYAYHLDAGLFTDLLREHATEQLGVKHISANVTGVNLDDDGYIQSITTDTNGTIDGGFFVDCTGFKSLLLGEALNVPFKSVANTLLTDHAVTMQVPYENEEVDVASCTISTAQAAGWTWDIALSNRRGTGYVYSSKHTSHEDAEQLLRDYIGPQAENLVARKIKMNVGYREKFWHKNCLAVGLSAAFVEPLEASAIFLIEAAANMLSELFPKNRKSMPLIEQKFNDSFQFRWQKTIDFIKMHYLLSKRSEPFWQDNKHPDTIPATLLQSLERWQEQALTDYDFDNVYEPFPLESYQYVLYGMGFEQNLTYKQSAFDMADTA

SEQ ID NO: 85310 - protein, 501 aa, Pseudoalteromonas piscicida
  REGION 1..501: note = tr|A0A3B6Y692|A0A3B6Y692_PSEO7 Tryptophan 7-halogenase OS=Pseudoalteromonas piscicida OX=43662; GN = D0N37_18400 PE=4 SV=1
MKTHLPMKTIQSLTILGGGTAGWMCAAYLAKHQPNLSITVIESSSIGRIGVGEGSTPHLQLFMQSLGAKEHDWMPTCQASYKTGIYFDNWNGDNGSYFHPFFSEMDAKTAEVYFVNANARRRGSKYIDKPEHYFLAAVLADKQQAPLPQRPLPRALEYGYHFDAQKLADWLRAFSLARGVKHIQSTVSSLQHHAKEIIALTLESGEQVKSDFYVDASGFNALLIEKTLEVPFISFADQLLNDSAVAIAGDRINPLPSSTSAIAMPCGWRWQIPLQSRAGHGYVYSSAHATPKEAEAQLRQAAQLDKGQAKHLTMKVGMMARSVEGNVFAIGLAQSFIEPLEATALMVTGYSIELLNRLLSQQLEAQAINQQLSDLVLGIKEYVLAHYATSKRADTQYWQDAQIAALSLSELDELLTHWRSGGDFDAWLNQHRKHSPYIRPSWYCLLGGMDHRDSTCQMPFDQAPQHIEQAAKVYLTKLSDEHFTAHTTALEQLQRVQAFRA

SEQ ID NO: 85311 - protein, 430 aa, Burkholderia vietnamiensis
  REGION 1..430: note = tr|A4JRJ4|A4JRJ4_BURVG Tryptophan halogenase; OS = Burkholderia vietnamiensis (strain G4 / LMG 22486); OX = 269482 GN=Bcep1808_5972 PE=4 SV=1
MNEMKSNSVDVAIIGAGPSGAVAAALLRNAGRSVLVLERQHFPRFSIGESLLPQSMRYLEEAGMLQAVVEAGFQFKNGAYFVHRDRMSSFDFRDKFSDGWGTAYQVERAAFDDLLIRCAEKQGAQVRFGHAVRAFHAGDTPRLDVVDEAGHEYSVQASFVLDASGFGRVLPRLLGLEAPTGLPTRAAIFSHVEDRLPAGSTDRDKICIAVHPERRDVWYWMIPLTNGRSSVGCVADAAFLDVPEAEQEALLRELLQTEPTLSRLVGSKPFVMPVRRICGYASNVESLHGHGYALLGNAGEFLDPIFSSGVTIALRSAHLAVATLERQLRGETVDWARDYDVALRKGIDTFRAFVERWYSGALQDIVFHEDKASDVKRMVCSILAGYAWDETNPFVREPARGLDILAQLCCPTGASGNAAQAATPDGARRR

SEQ ID NO: 85312 - protein, 515 aa, Colwellia sp.
  REGION 1..515: note = tr|A0A2N1CAG9|A0A2N1CAG9_9GAMM Tryptophan 7-halogenase OS=Colwellia sp. 75C3 OX=888425; GN = CXF85_00750 PE=4 SV=1
MVSEQVKSIAIVGGGSSGWMTALYLNKLYNHSQATVAITLIESPEIPTVGVGEATVHSIRSYFAAMGLDEKELLQATNGTLKTGIMFRNWMKPNEDGSTHEYFHSFDQQNIARSIDISSAWFLSKGYNKQRFDEATSISPHLIKDKLSPKHANSRPYEGVVPYGYHLDAIKMAAFMAKKGVAAGITHVKAVVDDVEVEGENIVRVRTSKGSFTADLFIDCTGFKGLLINSVKERKDNWQSFEDALPCNKAVAVQLAYSDDQEPKPYTEATALSNGWAWQIDLMNRRGTGYVYDGNRLSKDEAETELLNYLNEGNGREKEVLRTVHLDMNIGCLKEFWVGNCLALGLSGGFIEPLESTGLHLVNTSARLLGTHLTGTNTAQAVRDSYNKIMNSTYQDLKHFIVLHYCLTDRDDTEFWREVGETVQYCDGLKQKLATWQHKVCEFMDIGGGYTTMFSDSNYRSVLYGMKHYPQLNLAVDKDENNKMFHEFDNRVTHVSNIVMPYRDYLKNLHKPQKL

SEQ ID NO: 85313 - protein, 503 aa, Caulobacter vibrioides
  REGION 1..503: note = tr|A0A290MRW1|A0A290MRW1_CAUVI Tryptophan 7-halogenase OS=Caulobacter vibrioides OX=155892; GN = CA606_01205 PE=4 SV=1
MTNDHRLRRIVIVGGGTSGWMTAAALGRFLKDGYTKVTLVESEAIGTVGVGESTIPQINIFNRMLGLDENDFVKKTKATFKLGIDFVDWQRIGHTYHHPFGPYGVDMEGVSFHAYWLKLRAMGLDDDLGAYSLQTVGARQSKFMRPNGQANSPLGQIAYAFQFDAGLYAKFLRDYSEARGVTRQEGKIASVQQDGQSGHVTSVTLESGQVIEGDLFIDCSGFRGLLIEQTLKTGYEDWSQWLLNDRAVAMPCTLGGSMSPVTRATARPHGWQWRIPLQHRLGNGYAYSSQHVSDDEALADLLSQLDGEPLADPNLIRFTPGRRKKSWNGNVVAIGLSAGFMEPLESQSIYLIQVGISRLLAHFPDRHFRAAEIDRYNRTMAFEYEKIRDFIILHFKATARNDTPYWNYLREMPIPDYLTDKIDLFKGSGRVFRENDELFNDTSWFAVFIGQGIFPDGYDPMVDNMDEGLFKARMAEIKSVIAKSAEVMPGHMAFIRENCAAEG

SEQ ID NO: 85314 - protein, 506 aa, Hyphomonas sp.
  REGION 1..506: note = tr|A0A350ZRC9|A0A350ZRC9_9RHOB Tryptophan halogenase; OS = Hyphomonas sp. OX=87 GN=DCY26_06795 PE=4 SV=1
MNSPHTLSHIVIAGGGTAGWVAAAALSRLTNNGETRITLVESEEIRTVGVGEATIPPIAMFLRLLGIDLSEFMRETQATIKLGIEFEGWLREGHRYIHPFGDYGRDINAVRFYQYWLKLRAFGKDVGEIEEYCLAAMAARHQRFAPPDPDPRTVQSSMAYAFHFDAALYAAYLRRYSEARGVRRVEGKIADVTLRSEDGYVSSLKLADGREIEGDLFIDCTGFRALLIGKAMGVPYVDWSHWLPMNSALAVQSERVADPLPYTRSTARPAGWQWTIPLQHRTGNGHVYCSDYMNDEDAGKILLASISGRPLTAPSQLRFTTGRRAEFWSRNVVALGLSSGFMEPLESTSIHFIQAGVTKLIALLPDKRFNPIERDTYNRLSIMQFEQTRDFLILHYKATERTGPFWDYVRNMDIPDTLAQKIELFRSNGRLFRFEDELFGEANWQSVLMGQGIMPERWDPMADALDVNVVAKQVQGIREAVRETALRLPTHQEFLTRFCAAPEPVD

SEQ ID NO: 85315 - protein, 519 aa, unidentified
  source 1..519: note = Thalassotalea sp.
  REGION 1..519: note = tr|A0A099LG66|A0A099LG66_9GAMM Uncharacterized protein OS=Thalassotalea sp. ND16A OX=1535422; GN = ND16A_3201 PE=4 SV=1
MSKVINNVLVVGGGTAGWLTASILAKQLNSVSKDAVQVTLVESPNIPIIGVGEGTWPTLRTTLQNLGVDEGEFMRECDATFKQGSQFVNWAETPEKDKSESYYHPLSAVFHSSYDFNLAPYWLLGKAGDKNYDKAVASQSHVCDLGLGPKKITTPAYDAIQNYSYHLNANKFAGFLAKHSTAKLGVKQIKANVTDVNLDNDGYIVSVDTDTAGTINADFFVDCSGAKALLINGALDIDWLKIDDVLFNDTAIAMQVPYESADTPIATHTIATAHEAGWTWDIGLHNRRGVGYVYSSDYTSDERAEQVLRDYAGPMSTGIEIRKIPLNLGYREKFWHKNCVAIGMSAAFIEPLEASAIFLVEAGANMLADQFPRTIDAMQYVEQKYNTTFRLRWDKSVDFVKLHYCISKRQDTPYWLDNCKPESIPATLKQRLGHWKSHPPTKYDFDYAYEPFVLDSYLFVLYGMKFDVDIDLNRSAFSCDRQAKALFDNVEQMNELLTKELPGHRELIEKVYKYGMPKL

SEQ ID NO: 85316 - protein, 504 aa, Pseudoalteromonas piscicida
  REGION 1..504: note = tr|A0A0F4P8U6|A0A0F4P8U6_PSEO7 Tryptophan halogenase; OS = Pseudoalteromonas piscicida OX=43662 GN=TW75_03835 PE=4; SV = 1
MKSQKIVILGGGTAGWMAANMMAKSWADKAIEITVVESSSIGTIGVGEGSTPQFKGFMDYLGISEAEWMPVCNATYKNGIRFIDWSTKPGFSSYFHPFPAQPDDYSAPAFFHNSFVRRKAIDVEGHPDHFFLATHLADLNKSPIAAESFPFEINYGYHFDSALLGQLLARKAAEFNVKHLDATITDVRKHVDGDIAALITSDGTEIAGDIFIDCSGFKSLLLQHTLGVGFESFESNLFNDAAVVIPTKQLDTIRSETQSVARQFGWSWHIPLTNRIGNGYVYSQRYCDADQAETELRAALGLLDSEVEARHIKMKVGQVKAHWSKNCIAIGLSQGFIEPLEATALHIVQETVQSFIDCYQDADFTDGNRDKHNRALSERYQAIRDYIVAHYRVNSRTDTNYWLDNANNNYLSRSLYQILQTWVSGNNLSDELVRQNVERYYPSVSWHCLLAGYGIYPEQAQLKSGNALANQHSIEKVNDFIRRCGLNFKDHRMELESFVANVHK

SEQ ID NO: 85317 - protein, 535 aa, unidentified
  source 1..535: note = Chloroflexi bacterium
  REGION 1..535: note = tr|A0A2E2YKU2|A0A2E2YKU2_9CHLR Tryptophan halogenase; OS = Chloroflexi bacterium OX=2026724 GN=CL752_03010 PE=4; SV = 1
  VARIANT 61: note = Xaa can be any naturally occurring amino acid
  VARIANT 69: note = Xaa can be any naturally occurring amino acid
  VARIANT 82: note = Xaa can be any naturally occurring amino acid
  VARIANT 86: note = Xaa can be any naturally occurring amino acid
  VARIANT 95..96: note = Xaa can be any naturally occurring amino acid
  VARIANT 153: note = Xaa can be any naturally occurring amino acid
  VARIANT 270: note = Xaa can be any naturally occurring amino acid
  VARIANT 292: note = Xaa can be any naturally occurring amino acid
  VARIANT 336: note = Xaa can be any naturally occurring amino acid
  VARIANT 467: note = Xaa can be any naturally occurring amino acid
  VARIANT 497: note = Xaa can be any naturally occurring amino acid
  VARIANT 500: note = Xaa can be any naturally occurring amino acid
MEKFDVIVIGGGPAGSTAATLIARQGKSVILVEKDYFPRDHIGESLLPASLPILETLGVHXEIKAAGFXKKFGATMVWGASXDPWXWYFSETNRXXTHSYQVVRSTFDQILLNNSIKAGVDVREGHQVTKIHHENNHISGIEIKTPDNTTIDXAAPITIDASGQSAIIARNMNLLEWDHFFQNLAVYGYFNNAKRLNKPDENNIFIEAHSEGWNWLIPLHNGSVSVGVVVDSGKAAEHVHGANLEAFLNKYIAYSPHIADLLSNAILNTXPQAVRDWSYAADSFIGDGYILXGDAACFIDPLFSSGVHLAMNAGVLASAYVNTLFSDSALALESRXIYTKLYRQQYEHFRELAKLFYSSNRTTNSYFWETRKLTPEAFDLPARTAFINAVAGQPAQGYERVVIEQGEAPDFVMTAIKEVEDSRSQRQLEIETSMQNFSNYIPKLDTKVALKNEPVLDDDKFIKNYVXYTENRTIGYPVSNLIAASFPFINGKDSVEXIVXKISNEYDIDRNTIFPAITDAFKIMYIDGIIESFIL

SEQ ID NO: 85318 - protein, 499 aa, unidentified
  source 1..499: note = Alphaproteobacteria bacterium
  REGION 1..499: note = tr|A0A257EMP8|A0A257EMP8_9PROT Tryptophan halogenase; OS = Alphaproteobacteria bacterium PA4 OX=2015572; GN = CFE37_07565 PE=4 SV=1
MVIVGGGTAGWLTACILAARHPAMAITLVESPDIATIGVGEGTWPTMRETLAAIGIAESEFLTACDASFKQGSRFDGWVTGAADDSYLHPFSLPPAGDMAALLHGWAQTAPDRAFAAAMTAQAAVCAQHLAPRQRAMPDYAGALNYAYHFDAGKFAQLLARHGTTRLGITHIAATMVGTSAAENGDIAQLQLDDGRCLAADLFIDCTGLAARLIGGHCAVDWIDRSDVSFNDRALAVQVPVLPGSAIAAQTIATAHRAGWLWDIALPTRRGIGCVYSTRFMADAEAETILRAHVAAQVPGADAAALVPRQLAFATGHRARFWQGNVVAIGLSAGFIEPLEASAIVLIELSARAIAEALPASPATMAIHARRFNTLFRTRWDRIIAFLKLHYVLSRRSEPYWQAQRDPATIPERLAEDLALWREHPPSARDFPLQDEMFPAASQQFILYGMGYPLPPAPPAAPIADAAMRIAEVQGRARHIAAALPDNRSYFAALAAQAA

SEQ ID NO: 85319 - protein, 520 aa, Xanthomonas campestris
  REGION 1..520: note = tr|G0CK89|G0CK89_XANCA Tryptophan halogenase; OS = Xanthomonas campestris pv. raphani 756C OX=990315; GN = XCR_0306 PE=4 SV=1
MHAPAPSESQRLVRRVVIAGGGTAGWMAAAALSKLLGRQLQITLVESDEIGTVGVGEATIPSLVTFHRLLEIDEAQFMAATQATFKVGIAFEHWRDVDRHYIHSFGHTGTDHWSAGFQHFWLKARARGVARAFGDYCLELRAAQEGRFAHLPNGGMNYAYHLDAGLYARFLRRFSEEFGVQRIEGRIGSVQTDAHSGDIAALVLDDGTRIEGDLFLDCTGFRALLIGQTLGVGSEDWSRWLFADSALAVQTESVGAPVTFTRARADRAGWMWRIPLQHRVGNGIVYSSRYMDQDSAAQVLEHNLQGRALTTPRALRFTPNQRHRVWEKNCVALGLASGFLEPIESTNIHLIQRGIVRLLQTFPQVIDPVDIAEYNRQAAEEIAHIRDFVILHYHATDRRDTAFWRDCAGMDIPDSLRHRMELFRQSGRVFHQGNELFAENSWIQVMLGQGIVPRHHHPVADLMGDAELSQFLEGIRQRVEATLARLPPHAEFLRRYCPAPALPAPMPQPAPGTPLAAPAA

SEQ ID NO: 85320 - protein, 504 aa, Caulobacter vibrioides
  REGION 1..504: note = tr|A0A0V2FBW1|A0A0V2FBW1_CAUVI Tryptophan halogenase; OS = Caulobacter vibrioides OX=155892 GN=AS593_14160 PE=4; SV = 1
MAENRIDRIVIVGGGTAGWMSAAMLARALGPGVAIRLVESEAIGTVGVGEASIPQLRNFNAFLGLDEDAFLRATEGTIKLGIEFVDWLRPGHRYMHAFGPVGRPLGVTPFHHYWLDARRRGTAGEDFWAWSANALAARAGRFGRTPPHPAQPGGEPLTWAFHFDAALYARHLRAYAESRGVERIEGRVTGVDQHGETGFLRAVTLEGDRRVEGDLFIDCSGFRGLLIEEALKTGYEDWRKWLPMDSAWAVPSRDDAPPVPYTRAWARDAGWQWRIPLQHRTGNGHVFSSAWTDKDAAVRVLMDNLEGEALAEPRLLTFTTGRRKASWNRNVVALGLAAGFMEPLESTSIHLVQSGLARLLALFPDKGFDPVLTAEFNRQTADEYACIRDFLVLHYKATEREDTPFWADRRAMEIPQTLAERMALFAGPGRVFSRDEDLFKEGSWVQVLLGQGVTPAASHPMTAVVADDQVDGWLDDLSRIAARTAAALPSHAAFLDRAETRLAG

SEQ ID NO: 85321 - protein, 416 aa, Myxococcus stipitatus
  REGION 1..416: note = tr|L7UDF1|L7UDF1_MYXSD Tryptophan halogenase; OS = Myxococcus stipitatus (strain DSM 14675 / JCM 12634 / Mx s8) OX=1278073 GN=MYSTI_04793 PE=4 SV=1
MNKVRIGQVVIVGGGVAGSTLAIYLARAGRDVLIVDRPLKLDLLVGESLLPPATTILQDLGIEEQVKACSTLKQGVAFVMRTGRVLLLNLQRLTGLSASYAYNVPRPQFDQLLRTRAQEVGVRVVQHAARLRVEGGRVELDAETLEACGLKGQPDLVIDATGRARMFGRAMELPGVAGKRNDTCHFAHYENVDLGVSLSGCAVITAMKTGWAWRIPLPDRMSVGVVQDTAHLTAYGSTPEERLENALRDDPIMAAALREGRRLTSVRVYNNYQWRYERFRGPNWILVGDAAGFVDPTLSSGVLLSLQGASGLAQALTADDVSSALTRWEATYRENIATWQELVDSFYDGRLFAMIMQGEDFARNNEMLGPFNRHMERNVAGAVLGARTTHWYGKRLVRMIINHGLVRYQPGEWAIR

SEQ ID NO: 85322 - protein, 508 aa, Sphingomonas sp.
  REGION 1..508: note = tr|A0A196N4E3|A0A196N4E3_9SPHN Tryptophan halogenase; OS = Sphingomonas sp. TDK1 OX=453247 GN=A7X12_22330 PE=4 SV=1
MNPMRRILILGGGTAGWLTAAYLARYLDIAHQQRFAITLLESPALGIVGVGEGGFPTIRETLQFLGIDERRFVRQTRATFKQGIRFDDWLYAPLPDGTRHRFLHPFEAPFHTEGAGLVPYWLLQPEARRTPFAEAMTIQNRVAANGRAPKRAEEAGFGGPLTYAYHFDAVRLAQLLRDRAIELGVTHLEGEVFSAHTDAEGAIDRIETREHVSLTADLYIDCSGFEPALIGKALGAPFTSVRHQLFTDRALACKLPYADPEAPIATTTVAAAHEGGWTWDIGLQHARGIGCVYSSAHLCDDRAAEILDAHLGGAPHEARLIKFEPGYRRTPWVKNCVAIGLSGGFLEPLEATGVVLIEAAAAMIAELFPHAGPVDAPAARFNALMTARYERIVDFLKLHYCLSRREEPFWRDNRDPASIPETLQALLEQWRHRPPSRFDFLLDVESFAFFNYQYILYGMDFRTDLSGARDGFPHAEAAARQFARIRGFGEQAVADLPAHRELIRQLAG

SEQ ID NO: 85323 - protein, 587 aa, Microcystis aeruginosa
  REGION 1..587: note = tr|L8P1B4|L8P1B4_MICAE Tryptophan halogenase family protein OS=Microcystis aeruginosa DIANCHI905 OX=1235808; GN = C789_307 PE=4 SV=1
MNTTQALHYDVVIMGAGFAGLCQARHLMLNIPNIRVALIDPRPENRPDTDLKIGESTVEIAALLICKELGLHDYMIENHPPKAGLNFHWPKNPAETDSIDDYYHVWINRQPPIPTFQINRAKFERDLLKMNKEMGAIFYNGRVVDVDLTEGDQLKTVTVKLEDTTIEITAKHIVDAAGRRFIIGKKTDNLIFGSDQLLGVNNGSAWVRIKDVDRTIFHSGYHPAGTTVSHYYATNHYFGPGHWLWMIPIDRDSKELSLGVIHHHDVIPAATINTQEKFTAFLKANHTVLYKLLQNSELVDFHYLHRVAHKSKVMFSPDNWYVVGDSACIFDAFYSLGTTMIAIAVESITEIIRAKLTNEANAEEKRAVYNDFNLAFTDSVNTFMQEHQKQLGHASIMSWRIYFEYMWWFGVLVPMYIGKWHLDPAFLKQFTGPFRTFLNGLFVDVYQDCNQLVERGVNMGLMDAIRADQLIGSYYTFKHFEDFLENSKLEPQRCNIFTSMKNTFFYVAIWYAMFQWKGFGWRGLLKPRNLAHFSYLLAQSGLSALGEMQHNFLTRSLPDNSEIEEMRQEFKEYRYQGKLQPWSAELS

SEQ ID NO: 85324 - protein, 501 aa, Hyphomonas sp.
  REGION 1..501: note = tr|A0A350ZSA9|A0A350ZSA9_9RHOB Tryptophan halogenase; OS = Hyphomonas sp. OX=87 GN=DCY26_08500 PE=4 SV=1
MDGAKKQKVVIAGGGTAGWMTAAALGKVLEKVCDVTLVESDAIGTIGVGEATIPTLVTYNRLLGVDEAKWMAAVRGSFKLGIAFENWTDLGHRYIHSFGITGKDHWTAAFIHFWHRGKELGLAEDFGNYCLELIAAEQERFAHLPDLGLNYAFHIDATAYAGLLRGLAEHHGVKRREGKIAEVRRNEEGDLESLVLEDGSVIEGDLFVDCTGFRALLIGETLGVGYHDWSHWLPCDRAIAVQTLSTRHPRPYTRSIAHEAGWRWQIPLQHRTGNGIVFCSRYMSEDEAKAKLLADIDGEVLTEPRVIRFRTGSRRMHWHRNCVAVGLSSGFIEPLESTSIHMIQRSVMRLMQMIPRGRVEQSSVDEFNRQTAYEMEHIRDFIILHYHLTNRTDTPFWRHCRTMHVPENLRHRMKLFKETGRVFRANDELFAENSWTQVMLGQGLMPCSHHPVADVMSEEEVRRFLSHITENVNRTAAGLPMHQDYLNKYCPADVAVSNRSN

SEQ ID NO: 85325 - protein, 510 aa, Caulobacter vibrioides
  REGION 1..510: note = tr|A0A290ML19|A0A290ML19_CAUVI Tryptophan 7-halogenase OS=Caulobacter vibrioides OX=155892; GN = CA606_10605 PE=4 SV=1
MQDNRIRKLVIVGGGTAGWMAAAALRRHFHGGPLEITLVESEDIGTVGVGEATIPTIRGFYQQLGLSDIEVMRATQATCKLGIRFNGWLREGAAFIHPFGHFGQDLRGVPFHHYWRKLAQAGEPTDIADYSLGASLAAAGKFMAPPRNPTSTLSVFDWALHFDAGLFAQLMRRVAEDNGVRRIEGKITKVNLRPEDGFVASLDLEGGARVEGDLFIDCSGFRGLLIEEALHTGYESWSDLLFCDRAWAVQSEGQGDPPPYTDVTAHSAGWRWRIPLQHRYGNGYVFSSRHISDEDALAELKAAVPDPLLHEPRLIRFNPGRRKQVWNKNVIALGLASGFLEPLESTSIALIETGVEKIKALFPDRDFALELADEFNDWSRREMERVRDFIILHYWANKRGDTAFWRDCNAVTLPDTLQRKIDLFVGRGHFVRYRWEMFAPPSWMAIYAGFELLPSAVDPSLDGVDPKALSAPLAEMRKAVREVVASAPPHQAFLDQYCRPAQTQASSAAE

SEQ ID NO: 85326 - protein, 513 aa, Sphingomonas sp.
  REGION 1..513: note = tr|A0A196MS25|A0A196MS25_9SPHN Tryptophan halogenase; OS = Sphingomonas sp. TDK1 OX=453247 GN=A7X12_06630 PE=4 SV=1
MKRVRNIVIVGGGTAGWLTAGVIAARHQGRMPGGFTVTLVESPNTPIIGVGEGTWPTLRTTLAKIGVSETDFFRECDAAFKQGALFARWTTGAEDDAYYHPLMLPQGFHQLSLVPHWITDSKGRSFCDTVTPQGRICDAGLAPKTIATPEYDGQANYAYHLDAGKFAPFLTRHCTTKLGVRHVLADVRAVERAENGDIVAIDTEQAGRIEGDLFVDCTGFRSLLLGETMGVGFKDCGDVLFCDAALAAQIPYSEENAPIATHTLSTAQDAGWIWDIGLPTRRGTGYVYSTRHTSDDQAEATLRAYLGPAGADVPVRRIPIRSGHREIFWKNNVVAVGLAAGFLEPLEASAIVLIELSAKLIAEQMPAVREVMDVVAKRFNATTLYRWGRIIDFLKLHYVLTKRTDSAFWRDNLRPETIPERLQELLTLWRYQPPWFHDEFDRVEEVFPPASYQYVLYGMGFHSEVEAEALSGDQRLAERAMRENAAQTEKLCGGLPRHRDLIRKIHEHGLQPV

SEQ ID NO: 85327 - protein, 539 aa, unidentified
  source 1..539: note = Chloroflexi bacterium
  REGION 1..539: note = tr|A0A2D9LPY0|A0A2D9LPY0_9CHLR Tryptophan halogenase; OS = Chloroflexi bacterium OX=2026724 GN=CL698_05025 PE=4; SV = 1
  VARIANT 157: note = Xaa can be any naturally occurring amino acid
  VARIANT 224: note = Xaa can be any naturally occurring amino acid
  VARIANT 332: note = Xaa can be any naturally occurring amino acid
MSESFDVVVIGGGPSGSCAASMAAKAGLSVVLLERHKFPRDHIGESLLPASMPILRELGVEAEIAAAGFPVKHGATMVWGSGSEPWTWSFSETNQEYTNAYQVNRPEFDTILLNKARVVGVDVREENQVIEVIFLDERAVGVRCNNRLGTELFIESXMVIDCSGQSSLISRAKNLRQWDDSFQNLAIYGYFENSTPLPKPNENNIFIESFSEGWIWNIPLKENXASVGIVLDSKKASQELQSRDVEDYFQVNLSYAKESSRMLQSAKLLKPPQVVKDWSYTSSQIAGLSWVLAGDAACFIDPLFSSGVHMALMSGVLASAYAVTVLSDPDMXIATARVYEDMIRREYSLFRELAQLFYQTNRSVDSYFWEARKILGRGGISTGREAFIKAVSGQSVRGYERAVLEKGELPESFKYALESQQNDRDSRRRELEMYVNDWNHLVPYLHEDTYVVRKPVLSAGRFEWGLVLHSPERQDDTDCSSFVALLLDLIDGEANMRLISERVRDKVNSPDKTVINEYLKKTVEILYVEGAISKLQLVK

SEQ ID NO: 85328 - protein, 419 aa, unidentified
  source 1..419: note = Verrucomicrobia subdivision
  REGION 1..419: note = tr|A0A5C9DHT6|A0A5C9DHT6_9BACT Tryptophan halogenase; OS = Verrucomicrobia subdivision 3 bacterium OX=2052186; GN = FD140_2740 PE=4 SV=1
MNSENTYDAIVIGGGPSGSSSSYILSEHGHRVLLLEREKFPRYHIGESMIPFTYGPMERLGLIPRMRQSHFVKKYSVIFISPNGKVSTPFYFFNRYDRDTVAQTWQVLRSELDQMLLDHTRSKGTTVKEETTVKELLREDGRVVGVRAQHKDGSVVEYRAPITLDCTGKEAFAAVRNGWRTPDPYLNKVAVWTYYKGSKREPGIDEGQTAVAYVPEKGWFWHIPQHDDMVSVGVVAEGKYLTRGGVREPKDIFHREVEQNVWIKEHLATGQQVGPYYLTSEYTQHARHCGSAGLLLVGDAFAFLDPVFSSGLMLALKSGVFAGDEVHQAIVAKDFSPARFTHYATTMRQGVENMRKLVYAFYEPKFSFKDVIVKYPEAAGEITDCLSGDVNKDFEPLWRKIREFVPLPDDLPLGQPLAN

SEQ ID NO: 85329 - protein, 499 aa, unidentified
  source 1..499: note = Unknown
  REGION 1..499: note = tr|A0A0N1BXT2|A0A0N1BXT2_9PROT Tryptophan halogenase; OS = alpha proteobacterium AAP38 OX=1523418 GN=IP70_06785; PE = 4 SV=1
MAGNLPGSILIVGGGTAGWMAAAALARAVGRHTRIQLVESSAIGTVGVGEATIPAIRGFNHMLGLDEADFLRHTQGTYKLGIEFRDWTRLNHSYFHPFGVHGASLDANYTHQYWLRLNAMGEGGRLEDYSLCTIMAEQGRYMAPVTDPRNIMSVVGSAYHFDASLYADYLRRYAERLGVIRLDRKVVDVALRGEDGFVEAVICDGGERLAADFFIDCTGFTGLLIEKALKAGYEDWTHWLPCDRAWAVPSSGDGRITPFTRSTAREAGWQWRIPLRHRVGNGHVFSSAHVSEERAREVLLANIDGQALAEPKLLRFVTGRRKQAWVKNCLSLGLASGFLEPLESTSIHLIQTGITKLLDFFPGRQIDGAEVREYNALAQGEFEAVRDFLILHYHVTERSDSAFWNHCRTMDIPDSLKSRIELFRRRGRVSTRTRALFTDTSWIAVMIGQGIMPETYDPLVDLHPLPAVRDRMATMRARIRQAADSMPTHEAFLGKQAAA

SEQ ID NO: 85330 - protein, 522 aa, Colwellia sp.
  REGION 1..522: note = tr|A0A2N1C9B2|A0A2N1C9B2_9GAMM Tryptophan halogenase; OS = Colwellia sp. 75C3 OX=888425 GN=CXF85_03720 PE=4 SV=1
MNKVVKSVVIVGGGTAGWLTAGIIAAEHQANSAQGIELTLIESPDIKPIGVGEGTWPTMRNTLQTIGISEKEFIRCCDASFKQGSQFIGWVNGQNNDNYYHPFIAPQGFGQTNVAGYWQKNDQHTPFAHAVSFQPHLCDHGCAPKQKQTPEFAAVANYGYHLNAAKFATLLQQHCIDNLGVKHIVDHVEQVNGAIEGNIESVSTRCHSDIPADLFIDCSGSNAILLSKHYQIPFLNKKDILFNDSAIAVQVPYNTVDAPIASHTLSTAQQAGWIWDIGLPTRRGVGYTYASDYLSDEAAEQALRDYLAKELSAAKIAELTFKKIAFTPGHREKFWHKNCVAVGMAAGFLEPLEASALALVELSAKMIAKELPANHSIMAITAERFNQRFHYRWQRIIEFLKLHYVLSQRSDSKYWLDNRLAKTIPARLQQLLSLWQHQEPTYNDFTEIEEIFPAASYQYILYGMGFNTQTRATTRRYDNSQISKKNIEENQQLCRKYLAGLPSNRELIDYILQNKVQNKVNN

SEQ ID NO: 85331 - protein, 473 aa, Caulobacter vibrioides
  REGION 1..473: note = tr|A0A258D6A3|A0A258D6A3_CAUVI Tryptophan halogenase (Fragment) OS=Caulobacter vibrioides OX=155892; GN = B7Z12_10125 PE=4 SV=1
LPIAIELVESAEIGTVGVGEATVPHIRYFNARLGLDEADFMRKTQATIKLGIEFRNWGRLGEGYIHPFGAYGHAIDGLPFHQHWLAARARGEAGPIEAYSLPIIASRAGKFAPPSSDPRSLGSTFNYAYQFDASLYAQYLRAYSEARGVKRTEGKITSVQQRPQDGFVTGVTLDDGRVIEGDLFIDCSGFRGLLIEGALQAGYEDWTQWLPCDRAVAAPCEAVEPPTPYTRATADKFGWRWRIPLQHRVGNGHVYCSSYVSDDEAARALVENLDGKLQQDPRFLRFITGRRKKQWLKNVVAVGLSSGFLEPLESTSIHLIQVAVTTLIEMFPHRGFEQADQDEYNRVMDLEFERIRDFLVLHYHANQRDDSPFWIERREGPIPDSLAYKMALFRERGAVVGYKDGFFLEPSWLAVYFGQNIMPDGHDPLVAASDPARTAKIMADLAAAVTRTVEAMPTHESFLRAMAQTRSPA

SEQ ID NO: 85332 - protein, 517 aa, Pseudoxanthomonas sp.
  REGION 1..517: note = tr|A0A0Q8EXF3|A0A0Q8EXF3_9GAMM Tryptophan halogenase; OS = Pseudoxanthomonas sp. Root630 OX=1736574 GN=ASD72_03800; PE = 4 SV=1
MDSPVRHVVILGGGSAGWLTAAVLAAEHQTASETGLRITLIESPEVATVGVGEGTWPTMRDTLRRTGVSETDFIRECDAAFKQGSKFVRWREEVDGDYYHHPFVLPPGFLETHLATGWMAHRDVPFSLLTCFQAHLCEAGKSPKQMSTPEWASVANYAYHLDAAKLGVFLRKHCVEKLGVRHVADHMVEVQAHENGDIAALRTREHGAIEGDLFVDCSGMRALLIGQHYGVEIESQKDVLFNDRAIATRVPYADPHVEIACQTISTAQEAGWIWDIGLQSRRGIGHVYSSTHTSDEAAEAALRRYIVATGGREQDIDTLPKIMIRPGFRRGAWHRNCVAIGLSSGFMEPLEASSLVMVELAAGMLADQMPATRAAVDIVARRYNDTFSYRWDRIVDFLKLHYVLSKRDDSDYWRDNRRPETIPERLRDLLEFWRHQPPSRYDLNRVEEVFPSASYQFILYGMGFTPGARPATRRMDDVQCAEGYFRQSADIARKMLSALPGHREMLDHVMTRGMPRI

SEQ ID NO: 85333 - protein, 499 aa, Alishewanella agri
  REGION 1..499: note = tr|I9P1C4|I9P1C4_9ALTE Tryptophan halogenase; OS = Alishewanella agri BL06 OX=1195246 GN=AGRI_10056 PE=4; SV = 1
MKNTDLNQVRRVLIVGGGTAGWMTAAMLARILGEQIDLQLVESDTIGTVGVGEATIPAIQHFNAALGINEAEFLRETKGSIKLGIQFENWGRQGDSYMHAFGPVGRQLGMASFHHFWLAAQAKGDNSSFWDYSLNYQAAKAGKFSPQSQLPNSPLPGLQYAYHFDAGLYAAFLRRYSEQRRVKRIEGLIAKVEQKPSGDIAAVVLTDGQVLSADLFIDCSGLRALLIEQTLAAGYDNWQHWLPCDSALAVPSEARYPIVPYTRAIAHGGGWQWRIPLQHRTGNGLVYSSRFLDDEQAKQTLLSNLDAPALAEPRKISFVTGRRKQQWRRNCVAIGLSSGFLEPLESTSIHLIQSAVVRLVQCFPATQDMTALSNEFNRQSQQEFEAIRDFIILHYHLNQRTDHPLWQYCREMALPDALAQRLELFRHSAQIFRQQDELFTEVAWQQVLLGQNLLPASYHPLADSLTKAQLTGFFADLKQVISKTVAALPSLQSFLQSQS

SEQ ID NO: 85334 - protein, 499 aa, unidentified
  source 1..499: note = Thalassotalea euphylliae
  REGION 1..499: note = tr|A0A3E0U5E5|A0A3E0U5E5_9GAMM Tryptophan 7-halogenase OS=Thalassotalea euphylliae OX=1655234; GN = DXX94_15575 PE=4 SV=1
MNKPFNIVILGGGTAGWMAANLFAKRWGNKVKVTLVESPDVGIIGVGEGSTPSLKRFFEILGIEEHQWMARCQATYKLNIRFNDWSPASGITSYSHPFPAQVDTFTKRAFMVNAQTRRMGLDTHIQPEDFLLNGVLARQGKGPKVGAHFPFKMEYGYHFNSALLGEFLAEFAQGLGVDYQQAHIADITRLENGNINSLVTDQGEAISADFFVDCTGFAGLLMEKTLGVGFNSYKENLFNDAAVVLQTPYSPEQAAQIPVETESTALSAGWCWKIPLTERFGNGYVYSQDFISAEQAEQEFRQHLGVLDDNVEVRHLKMKVGQLNQHWSHNCLALGLSQGFIEPLEATALHLVQVSIELFMQKLEAGHFSAQYQAEYNELVSERFERVRDYIVAHYKLNTRNDSEYWRANRDNMKLSDSLKEILHVWYSRGDIAKEIARKNISSHFDEISWHCLLAGYGAFPLLHPNQPGKGDLYQEKDIQAFLAGCALNFDRHNTNLSM

SEQ ID NO: 85335 - protein, 409 aa, Amycolatopsis rifamycinica
  REGION 1..409: note = tr|A0A066UA86|A0A066UA86_9PSEU Tryptophan halogenase; OS = Amycolatopsis rifamycinica OX=287986 GN=DV20_06900 PE=4; SV = 1
MSATEEDYDVVVIGGGPGGAATAGLLAGMGHKVLVLEREKFPRYHIGESLITGALPTLDDLGLIKRLDAMGFTRKYGGTLLWGKNQGTWGFRFTESALYDYAYQVRRADFDALVLGRARELGAKVLEEVTVREPLFDGERMVGVSYAEKGSKETKEAHAKFVIDASGQTHMLAKHFDSVVWHDDLRNIATWTYWQGCNLYSGTKAGDIISENRPTGWFWFIPLHDGTVSVGYVTPLEEYQKSGKSLEELYFEELGKTEEVSTLVKGATRASGFRNIKDWSYTAERFHGPGWALVGDAAAFVDPLLSTGVTLALRGARALADAIDGVLHDPSVEDELLGLYEESYRTFLDSVLDFVRFFYDRTKNKEDYWNKAQEQIDPQKLRPRETDFATMLSGLTGINDIFQQRRRAA

SEQ ID NO: 85336 - protein, 516 aa, Pseudoalteromonas sp.
  REGION 1..516: note = tr|G7G5P9|G7G5P9_9GAMM Tryptophan halogenase; OS = Pseudoalteromonas sp. BSi20495 OX=386429 GN=P20495_3237; PE = 4 SV=1
MTKPITKIVVLGGGTAGWLSAGLLAAEHPHLNVTLVESANVPILGVGEGTWPSMRNTLQRIGIKESDFITQCDASFKQGSKFINWRNLSEGENYYHPFMNPQGYEHTNLHASWQRIAPNQKFADVVNMQSFVCQAALAPKQLQTPEYAAVTNYGYHLDAGKFAEFLKNHCVKNLNVTHITDDVTEVINDEHGYIASLKTNNNGDITGDLFIDCSGSCARLIGEHFNSEFIAQDHILFNNSAVAAQIPNAHIDQPIASATLSTAQSNGWIWDIALPTRRGTGYVFSSKYQSDESATNTLKSYIAKSTNEQQAEQLTYRVLKFSPGYRQKFWIKNCVAVGMSAGFLEPLEASALAMVELSISMISEQLPQNRTHMSQLASRFNSRFSTRWQRVIEFLKLHYVLSERDDTPYWQDIGNLNTAPERLQNLLKLWQFQPPSRFDFIENEEVFSSSSYQYVLYGMGFNTQTVSAQNTFNDPRTGDYYYQQNREKIAQCLNGLPSNRALLNHLLSNNGQPHND

SEQ ID NO: 85337 - protein, 506 aa, unidentified
  source 1..506: note = Lysobacter maris
  REGION 1..506: note = tr|A0A2U9TFJ3|A0A2U9TFJ3_9GAMM Uncharacterized protein OS=Lysobacter maris OX=1605891 GN=C9I47_2713 PE=4; SV = 1
MNSDNRIRNVVVVGGGSAGWMAAAALATYLGKGASIRLVESEQIGIVGVGEASVPHMKTFNSEMLGIREVDFVTRTQGTFKLGIEFRDWGRLGDSYVHGFGRIGQGLGPLPFHQFWLKLFLAGRAADIGAYSLQTAAATQGRFMVSPDNAPVGSPLSDIAYAYHFDAGLYARFLRELSERRGVKRTEGKVVDVVQRADDGFIEALVMESGERIEGELFIDCSGFRGLLIEQTLKTGYVDWSHWLPCDRAMAVPCEIVGAPTPYTRSTALKAGWQWRIPLQHRVGNGYVYSSGHLGDDEAAATLLANLDGRALADPRPLRFTTGMRRKFWNRNVVALGLASGFLEPLESTSIYLVQSGIQRLLGLFPGRDFDPLLVDRFNRESAFEYERTRDFLILHYNATERDDTPFWDYCRTMSIPDTLREAIELFRADGRYFRNGEDFFALPSWIQVMLGQRIMPRGYHPIVDEMPEDDLVEHVERVRRVIANCVGAMPRHQDFIDQYCKAPSP

SEQ ID NO: 85338 - protein, 502 aa, unidentified
  source 1..502: note = Alphaproteobacteria bacterium
  REGION 1..502: note = tr|A0A257JPD2|A0A257JPD2_9PROT Tryptophan halogenase; OS = Alphaproteobacteria bacterium PA3 OX=2015571; GN = CFE32_08420 PE=4 SV=1
MEPQAVEKIVIVGGGTAGWMTASALSKVLGPRVNIRLIESEEIGTVGVGEATIPQINIFNAILGIDENDFVAKTNGTFKLGIEFVNWHRQGERYMHAFGGIGRNLGFVPFHHYWMRQNLAGKETSLWDYSAATKAAYSNKFDRLERLGASPLPGPTWAFQFDAGLYARYLRGYSEYHGVKRTEGKVRSVELNGLSGFIQSVTLESGEIVSGDLFIDCSGFRGLLIEGALETGHEDWSNFLPCDRALAVPCESVAPLTPYTRATARHAGWQWRIPLQHRIGNGHVYCSAFTSDEEAERVLMSNLDGRPLADPRPLRFLTGRRKKLWNKNCIAVGLASGFMEPLESTSIHLIQSAVSRLITLFPTKACEAVLSDEYNQQAIEEYALIRDFLILHYHANARTDSPFWLHCQNMAIPDSLSHKIELFRKTGRIERRANDLFAEPSWLQVLLGQGIRPESYHALARDLSDDDLDGFLGNVSTIIDKAVAQMPSHEDFIARNCRAPAA

SEQ ID NO: 85339 - protein, 519 aa, unidentified
  source 1..519: note = Thalassotalea euphylliae
  REGION 1..519: note = tr|A0A3E0UGB3|A0A3E0UGB3_9GAMM Tryptophan 7-halogenase OS=Thalassotalea euphylliae OX=1655234; GN = DXX92_10165 PE=4 SV=1
MTKDVTQIVVVGGGSAGWLSAGIIAAHYQTQGDNAINVTLVESPDVATIGVGEGTWPSMRGTLKKLGISEAEFILHCDASFKQASKFNNWLYEEDNGGDSYYHPFTIPTGFFEANIAEQWLQYREQINFANATSSQSHLCEQGKAPKQIATPEYAFLQNYGYHLDAGKFSNFLTKHCTQKLAVKHIKDNVTAVNTHDDGAIASIATAQHGDVEGDLFIDCTGFTGLLVDKHYGISLKPQDHILFNDRALAAQVPYSQADAPIASHTVSSAQDNGWIWDIGLQSRRGVGHVYASNFTSDEQAEIDLRRYISRTSDIKEDDINVRKLVINPGYREKFWHKNCVAIGLSAGFIEPLEASAIALIELSANFVAEQLPANSDVMAITAARFNRKFSHRWQRIIEFLKLHYVLSERESDYWQANRRAQTIPEELQELLSLWRYQTPYQYDTHQTEELFPAASFQYILYGMGFETQLPAREKRASVAANAQQIFNENKQRTAKLMHALPSNRELINKIKQYGLSKV

SEQ ID NO: 85340 - protein, 508 aa, Brevundimonas sp.
  REGION 1..508: note = tr|A0A069IRQ2|A0A069IRQ2_9CAUL Tryptophan halogenase; OS = Brevundimonas sp. EAKA OX=1495854 GN=ER13_04550 PE=4; SV = 1
MTLLASAPLHPDAIREVLIVGGGTAGWMTAAAMTRLPAGIRVRLIESEEIGSVGVGEATIPPLVTFNAMLGIDEASFIKATQGTFKLGIEFVDWGRQGDRYMHPFGEVGMDMEGVKFHQHWLRQAQGGDPTPIEDYCLSAVAARLGRFTPASSDPRTVLASLRHAYHFDAALYAGFLRRFSEARGVERVEGKVVGVSLRDSDGFIESVRLADGRRLDADLFIDCSGFRGLLIEEALAAGYEDWSHWLPCDRALAVPSANTGPLTPFTRATADRAGWRWRIPLQQRTGNGHVYASAFTTDEDARASLLAGLEGEPLAEPRPLRFTTGRRRRQWVRNCVSLGLSSGFLEPLESTSIHLIQSGISRLMALFPTRRFDPVLIDQFNRLSQTQFEQVRDFIILHYKATQRDDTDFWRHVAAMDVPESLERRIALFRAGGRFMRDGDELFSEASWVAIFTGQHILPQDHDPLADGVPYAAMARKLAGLRGIIRKTAEAMPTHEAFIARCCQPSA

SEQ ID NO: 85341 - protein, 505 aa, unidentified
  source 1..505: note = Caulobacterales bacterium
  REGION 1..505: note = tr|A0A1F8IQI4|A0A1F8IQI4_9PROT Tryptophan halogenase; OS = Caulobacterales bacterium RIFOXYB1_FULL_67_16; OX = 1797588 GN=A2352_07450 PE=4 SV=1
MVDHSLGPVRRVAVIGGGTAGWMAAAALARRFARPGGLAVEVTLVESDAIGTVGVGEATIPPIRQFIQMLGLAEDDFIRSTAATAKLGIEFRDWMTPGAAYFHGFGDYGPVVGGQAWRHYLFRLKAAGRIESLEPWSLPAVMARAGRFAPPVDDPRSALSHYAYAFQFDAGLFARRLRSLAEDLGVARCEGRIVEVLQEGDRGHVSSVRLEDGRQIAADLFIDCSGFRGLLIEQTLKAGYEDWSRWLPCDRAVALPCASTRPPEPFTTARARAAGWQWRIPLQHRVGNGYVYSSAFIDDDAAVADLIGELESPPLAEPNRLRFVAGRRREAWKSNVVSLGLASGFLEPLESTSINLIQNGIGRLLELFPDRDFDPALAREYNRRSAGELERIRDFIVLHYHLAQRTDGELWRHCRETPPPDSLQDKIELFRARGEIALLDDESFREDSWAAVFTGLGVWPRKATPLVGLDPLDTVERQASRFADLIRQAVSSLPAHTAHFTGYAA

SEQ ID NO: 85342 - protein, 500 aa, unidentified
  source 1..500: note = Thalassotalea euphylliae
  REGION 1..500: note = tr|A0A3E0UP92|A0A3E0UP92_9GAMM Tryptophan 7-halogenase OS=Thalassotalea euphylliae OX=1655234; GN = DXX92_14905 PE=4 SV=1
MLHSQPIRKVVILGGGTAGWISAALLKKLLGEAVAIELVESETIGTVGVGEATIPPIQVLNSVLGINEAEFLRETKATIKLAIRFENWKQQGHQYYHSFGAIGKSMAFCHFHHLLKRAGGLNDESQLWQYDLNYLCAEAGKFAKIKTKDPIIDMPYAYHFDAGLYAQYLRKFSEKLGVVRTEGLVEQVVQCQQSGNIQALVLKSGQKVTGDLFIDCSGFKGLLIQDTLRTGYEDWSHWLQCDSALAVPSERHEKTAPYTRSIAHSAGWQWRIPLQHRNGNGLVYSSSHYSAQEAADVLMSNLDTKPLADPKLIRFQTGRRYQQWHKNVIAVGLASGFLEPLESTSIHLIQSAVVRLVHLFPHQGITTDIVDEYNKQSKVEFEQIRDFLILHYHVTERTDSQFWRDMRAMEIPDSLRHKIALFQENGRLFRDQNDLFLENSWLQVMVGQGIIPKDYHPTANSMSLEYIEETLKKIKAIKADPVSKLPSHDEFLAHYCQLGK

SEQ ID NO: 85343 - protein, 179 aa, unidentified
  source 1..179: note = Alphaproteobacteria bacterium
  REGION 1..179: note = tr|A0A257JAP1|A0A257JAP1_9PROT Tryptophan halogenase (Fragment) OS=Alphaproteobacteria bacterium PA3 OX=2015571; GN = CFE32_24655 PE=4 SV=1
ANTLKQDCDIKLVESELIGTVGVGEATIPPIRTFNEMLGIDEREFVAKTKGSFKLGIEFVNWGSQGNRYFHPFGPHGRAFDIVGLHHFWLKAREAGDTTSFDDFSMAWSLAQRGRFTRPSPDPRQVMSTFDYAYHFDAGLYARLLRDYAEARGVTRHEGKLVSVRQHGETGFVEGVTLE

SEQ ID NO: 85344 - protein, 506 aa, Acinetobacter junii
  REGION 1..506: note = tr|D0SKS0|D0SKS0_ACIJU Tryptophan halogenase; OS = Acinetobacter junii SH205 OX=575587 GN=HMPREF0026_01718; PE = 4 SV=1
MLLLFQIGKRRMINLRGMNRVVVVGGGTAGWFAALQLRQLFSPSVEVMVISAPEIPIVGVGEGGVLNLLSVLHDLNIDLKDFIEQTGSTLKLGFRYERWRTGKQEDYYYHLFPLPTPDFAWNEFGFNPYLSGLFNHGIDVSRYMASYEFSEERKPFQEVLQILLEGKNNFGASLHFDTFRVGQYLKKIALARGIIHVEQKIENFVFNPTTENVSAIQCVNHEISCDFVIDASGFSRLLIGKKYQSQWCSFSDTLPMNRALPFHLPHKNKIELVTRATAMSSGWVWQIPLQERIGAGYVYHDQFITDQEAQLEVENWLGHSINPVKPIAFEAGYFQQVWIKNVVGIGLASGFIEPLEATSIGQMLSQLQLLVSFIRENHGVISQQNIDFYNQQNAQYWEGIRDFIRMHYDTGRSDTPFWKYMLNVPRSESYQELKKCWVHRTPRDIDFVEHSMGGMSMFSAASWFAVGAGVGVIKPEATSAELYALSTEKKQKLAKYLQQIKQQLFL

SEQ ID NO: 85345 - protein, 494 aa, Cellvibrio sp.
  REGION 1..494: note = tr|A0A3D4Q657|A0A3D4Q657_9GAMM Tryptophan halogenase; OS = Cellvibrio sp. OX=1965322 GN=DIW64_19945 PE=4 SV=1
MKNNQTIIIVGGGSAGWMSAAALSNAFGATKKIVLIESDAIGTVGVGEATIPAVKSFNKLLGIDEAEFLKVTQGTFKLGIQFENWGAQGDAYMHPFGLVGKDSWMANFQHFWLKAKRMGLAKSYFDYSLNIRTAKSNKFFIDPNSGVDYAYHFDAGLYAAYLRKYSEARGVVRIEGMIDKVQTRSENGFIESLTLQSGEVIKGDIFVDCSGFRALLIEHTLHTGFEDWSHWLPCDRAVAVQTESVGEPIPYTRSIAHHSGWQWRIPLQHRVGNGLVYCSRYSSDEDAKKLLLENLEGTVKTEPRLIKFRTGRAIKQWNKNCIAIGLASGFLEPLESTSLHLIQTGVVRLIRMFPGDAINQSEIDEYNRQSQFEYERIRDFIILHYHVTQRTDSPFWNYCRTMSIPETLARKIQVYKNTTSVFKEQDELFHEGSWQQVMLGQGITPQDYHPVVDKLSDEELVRLMSSIESEHDQRLMQFPGHQQFINHYCKALAP

SEQ ID NO: 85346 - protein, 498 aa, Pseudoalteromonas sp.
  REGION 1..498: note = tr|G7FY55|G7FY55_9GAMM FADH2 O2-dependent halogenase I OS=Pseudoalteromonas sp. BSi20495 OX=386429 GN=prnA PE=4; SV = 1
MKSIKHVVIAGGGTAGWITAALLNKVLGKVINITLIESSSIGTVGVGEATIPPIIQLNNALGINEKEFINETNATIKLGIEFENWKKPTHSYMHAFGPIGKDFPFCDFYNFWLKGRITGCEDDLWDFSLNYQAAKQHKFAPLNTIPNTELPGLSYAYHFDATLYAEYLKKLAISRGVKHIDAKISEVTQCLATGNVETLILDDNKQINGDLFIDCTGLRALLIEKTLNTGFVDWSHYLPCDSAIAVQTKSNDELKPYTQSIAHSAGWQWQIPLQSRIGNGLVYCSRYLSDEDAKALLLNNLPADPITEPRFIKFKTGRRVKQWHKNVVAVGLSSGFLEPLESTSIHLIQSAVTRLIKLFPHHGISDALASEFNKQSVTEIERMRDFIILHYKLTERDDSAFWRQCIQMDIPDSLIHKLNLFKQTGKVIRENNELFAEIAWQQVMIGQGLIPDDYCTIANSFTDEQLSDLFISLKTLVNSTVEKLPTHKEFLASIKRAS

SEQ ID NO: 85347 - protein, 499 aa, unidentified
  source 1..499: note = Thalassotalea euphylliae
  REGION 1..499: note = tr|A0A3E0UHZ3|A0A3E0UHZ3_9GAMM Tryptophan 7-halogenase OS=Thalassotalea euphylliae OX=1655234; GN = DXX92_14900 PE=4 SV=1
MDKPFNIVILGGGTAGWMAANLFAKRWGNKVKVTLVESPDVGIIGVGEGSTPSLKRFFEILGIEEHQWMARCQATYKLNIRFNDWSPASGITSYSHPFPAQVDTFTKRAFMVNAQTRRMGLDTHIQPEDFLLNGVLARQGKGPKVGAHFPFKMEYGYHFNSALLGEFLAEYAQGLGVDYQRAHIADITRAENGNIHSLVTDQGEAISADFFVDCTGFAGLLMEKTLGVGFNSYKENLFNDAAVVLQTPYSTAQAANIPVETESTALSAGWCWKIPLTKRFGNGYVYSQDFVSSEQAEQEFRQHLGVLDDNVEVRHLTMKVGQLNQHWSHNCLALGLSQGFIEPLEATALHLVQVSIELFMQKLEAGQFSAQYQAEYNELVSERFERVRDYIVAHYKLNTRNDTEYWRANRDNMKLSDSLKEILHVWYSRGDIAKEIARQNISSHFDEISWHCLLAGYGAFPPLHPNQPGKGDLYQEKDIQAFLAGCALNFQAHAENLSA

SEQ ID NO: 85348 - protein, 498 aa, unidentified
  source 1..498: note = Thalassotalea euphylliae
  REGION 1..498: note = tr|A0A3E0TYE5|A0A3E0TYE5_9GAMM Tryptophan 7-halogenase OS=Thalassotalea euphylliae OX=1655234; GN = DXX93_10970 PE=4 SV=1
MPVNMPVKKVVIAGGGTAGWMAAAAISKLLGKAVSVTLVESDQIPTIGVGEATIPTLHILHQLLGINEAEFMVATNATFKLGISFENWKDLDQDYIHSFGYLGQDCWACGFHHFWRKGLDLGLVSEIGDYCPEHLASREGRFAVMANQDLNHAYHLDAGLYAKFLQGIAFKHGGERVEGKISQVHQDNHTGFITAVTLDNGQHVSGDLFIDCTGFRGLLIEQALHTGFDDWSHYLPCNSAIAVQTETVGAPVPYTRSIARDAGWQWRIPLQNRTGNGFVFCDKYISNEQAIDTLLSNIEGKTLNDPRVIKYTTGTRRQHWNKNCIAVGLSGGFVEPLESTGIHLFQKAIVRLLQLFPHTGIDDAIVDEFNKQTQEEMDNIRDFIVLHYYQTERNDTAFWRHCANMAIPDSLKHRMALFKESGRVFKKAEELFGEASWVQVMMGQGLLPDQYHPIVDQMSEQELANFLNRIKQNTSKKVASWPSHIDFINHYCRSKMMT

SEQ ID NO: 85349 - protein, 299 aa, unidentified
  source 1..299: note = Alphaproteobacteria bacterium
  REGION 1..299: note = tr|A0A257JF58|A0A257JF58_9PROT Tryptophan halogenase (Fragment) OS=Alphaproteobacteria bacterium PA3 OX=2015571; GN = CFE32_20180 PE=4 SV=1
MAIERIIIVGGGTAGWMAAAALSRIKAGRAVDIVLIESEAIGTVGVGEATIPPFVGFNQLLGIDEREMLAQVGGTFKLGIQFENWGKLGDSYIHPFGAYGYTMGGVSFHHVWHRMAEGGDKRPIQVFNLETMAAYFGKFARTEDYEREDLPPVNYAYHLDAGRYAAFLRRLAEGRGVVRHEGKVADVALDGETGFVTGVTLDDGRVFAGDLFIDCSGFRGLLIEQALHSGYDDWSQYLPCNRAVALPCLREDGSPPPPFTRATAHSAGWQWQVPLQHRNGNGHVYCSGFMEDQAALDIL

SEQ ID NO: 85350 - protein, 500 aa, Streptomyces afghaniensis
  REGION 1..500: note = tr|S4MVN9|S4MVN9_9ACTN Putative Tryptophan 2-halogenase OS=Streptomyces afghaniensis 772 OX=1283301; GN = STAFG_1982 PE=4 SV=1
MSSAKSTQDFDVIVVGGGPAGATVSTAVALRGHRVLLLEKETFPRYQIGESLLPSTVHGVCRILGVDDEMARAGFKPKRGGTFRWGRNRDPWQFSFALSPRLADPTSFAYQVERSRFDAILLDNARRVGVDVREGCRVTGVLAGEGAQERVRGVRWTAPGGEVREAGARYVVDASGNGSRIHPHVGGKRIHSDFFRNIAVFGYFAGGARLPAPNDGNIFCAAFDEGWLWYIPLRDDLTSVGAVVARESAEAIQRDPAAAWRRLIDACPEVRGFLDGVPQATQRPYDQVRVRKDWSYWKSQLWRPGMALVGDAACFVDPVLSSGVHLATYGGLLAARSINGCLDGNPDENRLFAEFEARYRHEYGLFHEFLVSFYDLHQDERSYFWKARKVTNVGTTELEAFVELVGGLASGDASLTGAGPAGERLTAAADDFERAVRRLPDADDLRNPLYESETFRQVFQEGTVLQERGLFGGPLEPEAPLRPGGLVASEDGLTWVEADA

SEQ ID NO: 85351 - protein, 507 aa, unidentified
  source 1..507: note = Lysobacter maris
  REGION 1..507: note = tr|A0A508B7H4|A0A508B7H4_9GAMM Tryptophan 7-halogenase OS=Lysobacter maris OX=1605891 GN=FKV24_05245; PE = 4 SV=1
MTSSDNRIRNVVVVGGGSAGWMAAAALATYLGKGASIRLVESEQIGIVGVGEASVPHMKTFNSKMLGIREVDFVTRTQGTFKLGIEFRNWGRLGDSYVHGFGRIGQGLGPLPFHQFWLKLFLAGRAADIGAYSLQTAAATQDRFMVSPDNAPAGSPLSDIAYAYHFDAGLYARFLRELSERRGVKRTEGKVVDVVQRADDGFIEALVMESGERIEGELFIDCSGFRGLLIEQTLKTGYVDWSHWLPCDRAMAVPCEIVGAPTPYTRSTALKAGWQWRIPLQHRVGNGYVYSSGHLGDDEAAATLLANLDGRALADPRPLRFTTGMRRKFWNRNVVALGLASGFLEPLESTSIYLVQSGIQRLLGLFPGRDFDPLLVDRFNRESAFEYERTRDFLILHYNATERDDTPFWNYCRTMSIPDTLREAIELFRADGRYFRNGEDFFALPSWIQVMLGQRIMPRGYHPIVDEMPEDDLVEHVERVRRVIANCVGAMPRHQDFIDQYCKAPSP

SEQ ID NO: 85352 - protein, 483 aa, unidentified
  source 1..483: note = Caulobacterales bacterium
  REGION 1..483: note = tr|A0A1F8IPK4|A0A1F8IPK4_9PROT Tryptophan halogenase; OS = Caulobacterales bacterium RIFOXYB1_FULL_67_16; OX = 1797588 GN=A2352_01220 PE=4 SV=1
MTAAALARLAAPSGVDVCLVESEAIGTVGVGESTLPHIRAFNERLGIDEATFVKATQATFKLGIRFDDWRAVGGRYIHPFGDYGAPGGEAPFHHYWLRAAKLADVGPIDDYALAVVAAREGRFAPPADDPRSMMSTYGYAYQLDATLYARFLRDYAETRGARRIEGRIVEVAQDGESGAIRSLRLETGETVEGDLFVDCSGFRALLIEGTLKAGFTDWSHWLPCDRAIAIPCQTDQPTVPYTTARALEAGWRFRIPLQHRVGNGYVYSSRFIDADTALERLTAELEGAALASPNHLKFTAGQRTRNWVGNCVSVGLSSGFIEPLESTSIYLIQIAITKLLELWPTGVVDPVSAAEFNRQMDLEYERIRDFIILHYCATERNDTPFWDYVRTMPLPQSLAEKIELFRARGVVQEYREGLFLHPSWVAVYLGQGVLPRAHHPLADAPSDDQLLASLARLRTVVQQSASRLPPQDAFIARMTAASA

SEQ ID NO: 85353 - protein, 444 aa, unidentified
  source 1..444: note = Rhodocyclaceae bacterium
  REGION 1..444: note = tr|A0A5C9BVC1|A0A5C9BVC1_9RHOO Monooxygenase FAD-binding:FAD dependent oxidoreductase:tryptophan halogenase OS=Rhodocyclaceae bacterium OX=1898103; GN = FD131_2485 PE=4SV=1
MMEQVQGVERKQCDVLVIGGGPAGCTVAPMLAEKGYKVVVLEKAHHPRFHIGESLLPANLPLFERMGIAEEVKAIGMHKPGAEFVSPNHEMSSVFVFAEAWDKSMPHAYQVKRDQFDTILIRNAAKKGVEVHEGCKAKSVDFLPDNTATVRAMHDDGRESEWQARFVVDASGRDTFLANRFQIKHRNPKHNSSAIYGHFTGCKRHEGVAEGNITIFWFEHGWFWFIPMQNDITSIGMVTWPYYMKTKGERSLEQFLRDGFAQCPKLTERLKDTKLINEIEATGNFSYVSERNHGNNYVMLGDAYAFIDPVFSSGVLLAMNSGVIAAEAIDTCLKTPAKAPAALKKFDALMKHGPKEFSWFIYRVTNPIMREFFMGPRNFFRAKEAVLSMLAGDIFGKTPIWSSIFAFKMLYYIANITQPRLAFKGWKQRRFNIRKVDDAVVYNA

SEQ ID NO: 85354 - protein, 533 aa, Myxococcus stipitatus
  REGION 1..533: note = tr|L7U9R8|L7U9R8_MYXSD Thioredoxin reductase; OS = Myxococcus stipitatus (strain DSM 14675 / JCM 12634 / Mx s8) OX=1278073 GN=MYSTI_03293 PE=4 SV=1
MDTAIREVVILGGGTAGWMTAAYLQKVFEGTVQVTLLEAATIPRIGVGEATVPNLQRVFFDRLGIPENEWMRECNAAFKTAVKFVNWRKKEPGAPDNHFYHAFGLIPNVDNIPLSHYWVLRNEGRATPDEQVDYACYREPPMMDAKLAPRFRDGRPAVNYAWHFDAQLVADYLRRLSTGWGVKHVVDELASVEKTPDGHIKALHTKGGRVLGGDLFVDCSGFRGLLINQAMEEPFLDMSDHLLCNSAVATAIEHDDAKHGIEPYTSAIASKHGWMWKIPMLGRFGTGYVYSSEFCSQDEAIREFSAKWGLDPEKTAFNRIRFRVGRNRRAWVKNCVSIGLASCFVEPLESTGIYFITASIYQLAKHFPDKGFNPVLMDRFNREVEMMFDDTRDFLQAHFLTSSRDDTPFWLANKNDLKLSDALKDKLETWKTGLTVNMPVSGEEAYYGNFETEFRNFWTNSSYYCVLSGMGWMPEQPLTTLKYRPSSVAHAEEAFQRVKLQQQALLQGLPTNHEFLQRLHRKNGMDLAATGTG

SEQ ID NO: 85355 - protein, 618 aa, unidentified
  source 1..618: note = Frankia casuarinae
  REGION 1..618: note = tr|A0A1X1PWT0|A0A1X1PWT0_FRACC Tryptophan halogenase; OS = Frankia casuarinae (strain DSM 45818 / CECT 9043 / CcI3) OX=106370 GN=UK99_11035 PE=4 SV=1
  VARIANT 84: note = Xaa can be any naturally occurring amino acid
MRDHYDVIIAGGGPAGSTLAALLARTSDLKVAIFEKDEFPREHIGESFAHPLIPVLAESGALAKVLASNCWVKKFGGIYSWARXGPSRAFFDHANWAVDGVHRWALHVNRSEFDQILLEHARDLGVDVTTGMAVTDFAAAANGCQVTLADGTAVSGAYFVDASGRQQSLVTKKPREWLSGYRNIAIWQHYLGGLPAQGLDGDWNIFREKNLSPIGCFAFPDGWCWYIPVPRIVNGERVLTHSIGIVTSPEVLKEPGKDFTDSEVFLRTVRGVPRLADLVAEVTPISDQMMTVTNYSRVNERFADLDRHWILIGDASYFVDPLFSSGVAFAANQAASAALLLRTTLRAELSPGLVRDLWQDYDHEWHGMAEVFALSIDQWYHMIGADNPGSAYWHRRNSSPHLDMPDRSFDALLNTAFTPDLLLIMTRGTGRMSDLAIDGPYQQARAHVMLTEPEPDAVLVAAPGVRMRAGVALDVPGFKAVLPPADLELDTPAAVRAAVAEYWTDPVAAEANGGLGVPSPTASPVPCHRFEFDSDALVDSGSGATGFSVRGVDSHDGAPQLWEILSRGPVVYGELGSRLAPGQRVLLQRLIKAGMVTVKTAARQTTPGTEAAEVTLAD

SEQ ID NO: 85356 - protein, 517 aa, Enhygromyxa salina
  REGION 1..517: note = tr|A0A2S9YN53|A0A2S9YN53_9DELT Flavin-dependent tryptophan halogenase PrnA OS=Enhygromyxa salina OX=215803; GN = prnA PE=4 SV=1
MTPHSITSIVIVGGGTAGWLSAAYLNRALGSSVRITVVESASVGRVGVGESTVPTMVSTLAFLGIDERAFMRRCNATFKAAIKYVNWATGGSGERVDEFYHPFFDRPELLAQPYGVMHFPFVGEGFSSADIWAAGGERREPRFDRVCSAIPAVSDALAFAPERLPGSQTLQYAYHIDASLFADMLAEVAIERGVERRIDHVLSVELDERGFVGSLVTKSGAKLTADLFIDCSGFRGLLINGALDEPFESDAKYLPCDAAVALPAASAPERDGIFPYTMATALSAGWSWRVPLFHRLGCGYVYSSDHLDASAAEQELRDLLGPAAGEDANHLRMRIGRCRRSWVNNCVAIGLSSCFLEPLESTAIFFVEYQLAQLVNMFPSRRFAPARLHRYNETINDMYDHLRDFIVMHYCTTSRGDTAFWRRIRDDMPIPDSLATTLEEYRVGVMPQDRLRFRLFRSRSYAAILSGMGVYPEYGPPILDHAPTAPGAALLADVAERTAALLQQLPTHYEYVRKLHE

SEQ ID NO: 85357 - protein, 519 aa, unidentified
  source 1..519: note = Thalassotalea euphylliae
  REGION 1..519: note = tr|A0A3E0TRB7|A0A3E0TRB7_9GAMM Tryptophan 7-halogenase OS=Thalassotalea euphylliae OX=1655234; GN = DXX93_10955 PE=4 SV=1
MTKDVTHIVVVGGGTAGWLSASIIAAHYQTQGDKAINVTLVESPDVATIGVGEGTWPSMRGTLKKLGISEAEFILHCDASFKQASKFNNWLYEEESGGDSYYHPFTIPTGFFEANIAEHWLPYREQINFANATSSQSHLCEQGKAPKQIATPEYAFLQNYGYHLDAGKFSDFLTKHCTEKLAVTHVKDNVTKVNSHDDGAIASVATAQHGEIEGDLFIDCTGFTGILIDQHYGISLKLQDHILFNDRALAAQVPYSQADASIASHTVSTAQDNGWLWDIGLQSRRGVGHVYASNFTSDEQAEIDLRRYISRTSDIQEDDINVRKLVINPGYREKFWHQNCVAIGLSAGFIEPLEASAIALIELSANFVAEQLPANSDVMAITAARFNRKFSHRWQRIIEFLKLHYVLSKRESDYWQANRRTQTIPDELRELLSLWRYQTPYQYDTHQTEELFPAASFQYILYGMGFETQLPAREKRASVAAQAQQIFNENKQRTAKLMHALPSNRELINKIKQYGLSKV

SEQ ID NO: 85358 - protein, 557 aa, unidentified
  source 1..557: note = Streptomyces kanasensis
  REGION 1..557: note = tr|A0A100Y477|A0A100Y477_9ACTN Tryptophan halogenase; OS = Streptomyces kanasensis OX=936756 GN=ATE80_18605 PE=4; SV = 1
MFDKEVFPREHIGESFAHPVVPALQESGALAKVLASPCWVKKFGGVYAWDPGKPAVALFDQAPFEKDGVRRWTMHVDRAEFDHILLDHAADVGVEVFQGVAVTAYEPDRNGGLVRLGDGGAVRAGYFVDASGRQSSVSAARNKRGWLSNFKNIAIWQHFTKGGQTQNLAEDWNIFTEDNLSPIGCFAFRDGWCWYIPVPKVIDGRRVLTHSVGIVTNPAVLKEPGRDYTDQKTFLEAVRQVPYLKDLIQEAVPVADTMLTATNYSRVSDEFADYDERHLLVGDAAFFVDPLFSSGVAVALTQAAAAALLIRKTVDGSLDETDQRHLWQDYNAKWHGTAETFALMIDQWYHAIAKNNPGSVYWNTRGTGADLGIREQTFDALLNTAFQPALLEVMTHGSRKVEDLDAAGPYLTATALAEPAELTDDALVSLAPTAGIRDSVTFVVPGFKATNPPANVQLPPAIIDGMTEYWRNPITNAGASPSPLRDTIPCRRIFSTEDPHGPTIDADPQRDGVDELWKLLGEGPVKFGELAPRLTPPQTRLVKRMCVSGFLTVQPAS

SEQ ID NO: 85359 - protein, 488 aa, unidentified
  source 1..488: note = Unknown
  REGION 1..488: note = tr|A0A0N1LMR4|A0A0N1LMR4_9PROT Tryptophan halogenase; OS = alpha proteobacterium AAP38 OX=1523418 GN=IP70_04345; PE = 4 SV=1
MAAALLSNVLPRDRLRLTLVESPDIGTVGVGEATIPPIQFFNRAVGIDEAEFMRATEGTFKLGIAFRDWVRPGHRYMHPFGQPGQAIKGVSFHAWWLRLRTAGYTVPLSDFWLAEKLADEGRFDTPSPDARSPKSTLAYAYHFDAGLYAAYLRTIAEPRGVTRVEATVADVALDPTDGTVSHVILADGRRVDGDYFIDCTGFRALVIGQALGRPYEDWSHWLPANRAVAVPSARTRDPVPFTTATARSAGWQWRINLRHRTGNGYVYVADHIDDDQAAATLLANLDGQALADPRFLRFTTGRRTQSRYKNVLAVGLSSGFLEPLESTSIHFIQHALIKFAATFPLSKDDPLSANLYNRMIGEELEQVRDFLILHYHANQRVGDPFWDRMRHMDVPDSLAEKIALFRARGCAIFPNQTLFQEPNWLAVLLGQEVEPASYDPLADAGDLSDIRQGFDATRQIIAQTARAAPRHMDYLSRLNAGSNRRGAA

SEQ ID NO: 85360 - protein, 618 aa, unidentified
  source 1..618: note = Frankia casuarinae
  REGION 1..618: note = tr|Q2J9C6|Q2J9C6_FRACC Tryptophan halogenase; OS = Frankia casuarinae (strain DSM 45818 / CECT 9043 / CcI3) OX=106370 GN=Francci3_2756 PE=4 SV=1
MRDHYDVIIAGGGPAGSTLAALLARTSDLKVAIFEKDEFPREHIGESFAHPLIPVLAESGALAKVLASNCWVKKFGGIYSWARQGPSRAFFDHANWAVDGVHRWALHVNRSEFDQILLEHARDLGVDVTTGMAVTDFAAAANGCQVTLADGTAVSGAYFVDASGRQQSLVTKKPREWLSGYRNIAIWQHYLGGLPAQGLDGDWNIFREKNLSPIGCFAFPDGWCWYIPVPRIVNGERVLTHSIGIVTSPEVLKEPGKDFTDSEVFLRTVRGVPRLADLVAEVTPISDQMMTVTNYSRVNERFADLDRHWILIGDASYFVDPLFSSGVAFAANQAASAALLLRTTLRAELSPGLVRDLWQDYDHEWHGMAEVFALSIDQWYHMIGADNPGSAYWHRRNSSPHLDMPDRSFDALLNTAFTPDLLLIMTRGTGRMSDLAIDGPYQQARAHVMLTEPEPDAVLVAAPGVRMRAGVALDVPGFKAVLPPADLELDTPAAVRAAVAEYWTDPVAAEANGGLGVPSPTASPVPCHRFEFDSDALVDSGSGATGFSVRGVDSHDGAPQLWEILSRGPVVYGELGSRLAPGQRVLLQRLIKAGMVTVKTAARQTTPGTEAAEVTLAD

SEQ ID NO: 85361 - protein, 501 aa, unidentified
  source 1..501: note = Unknown
  REGION 1..501: note = tr|A0A0N1BN20|A0A0N1BN20_9PROT Tryptophan halogenase; OS = alpha proteobacterium AAP38 OX=1523418 GN=IP70_21285; PE = 4 SV=1
MHKPIRSIVIVGGGTAGWMSAAALARVAGKTHRLHLVESEEIGTVGVGEATIPPIATFNRVLGIDEDEFLRATNGTIKLGIEFKDWYRQGHRYMHAFGALGRPLGMTHFHHVWRRAHALGLDGDWEQYVYNTVAARALRYGRPGPQRRTPLEPLTHAFHFDAGLYAAFLRRFATERGVVRTEGKIRRTILNAFNGHVEAVELEDGTKIEGDLFIDCSGFRGLLIEQALGTGFEDWSHWLPCDRAWAVPCANGGPFTPYTRSTAHSAGWQWRIPLQHRIGNGHVFASRYMGEEQARDILMANLDGTPQAEPRLLRFTAGRRKKMWNRNVVAVGLSSGFLEPLESTSIHLVQSAITRILMALPNDGIDAVEVDDFNEKARAEYERIRDFIILHYKATERDDSPFWRDCRTMDIPEELERRMRVFASHGRVSRVFDELFLDVSWIQVFLGQGVIPRSWHPLADQLSEAELKEFLGEIKAMIGHEMAALPTHADFIARHCAARPS

SEQ ID NO: 85362 - protein, 507 aa, unidentified
  source 1..507: note = Thalassotalea euphylliae
  REGION 1..507: note = tr|A0A3E0UM85|A0A3E0UM85_9GAMM Tryptophan 7-halogenase OS=Thalassotalea euphylliae OX=1655234; GN = DXX92_10180 PE=4 SV=1
MQVNMPVKKVVIAGGGTAGWMAAAAISKLLGKAVSVTLVESDQIPTIGVGEATIPTLHILHQLLGINEAEFMSATNATFKLGISFENWKDLNQDYIHSFGYLGQDCWACGFHHFWRKGLDLGLVSEIGDYCPEHLASREGRFAVMANQDLNHAYHLDAGLYAKFLQGIAFKHGCERVEGKISQVHQDNHTGFITTLTLDNGQQVSGDLFIDCTGFRGLLIEQALHTGFDDWSHYLPCNSAIAVQTETVGSPVPYTRSIARDAGWQWRIPLQNRTGNGFVFCDKYISDEQAIDTLLSNIEGKTLNDPRVIKYTTGTRRKHWNKNCIAVGLSGGFVEPLESTGIHLFQKAIVRLLQLFPHTGIDDAIVDEFNKQTQEEMDNIRDFIVLHYYQTERNDTPFWRHCANMPIPDSLKHRMALFKESGRVFKKAEELFGEASWVQVMMGQGLLPDQYHPIVDQMSEQELANFLNRIKQNTSKKVASWPSHIDFINHYCRSKVSRSKTNSAEAS

SEQ ID NO: 85363 - protein, 505 aa, unidentified
  source 1..505: note = Thalassotalea euphylliae
  REGION 1..505: note = tr|A0A3E0TM51|A0A3E0TM51_9GAMM Tryptophan 7-halogenase OS=Thalassotalea euphylliae OX=1655234; GN = DXX93_03075 PE=4 SV=1
MSHPVKNIVIVGGGTAGWLSAAVIASYHQGANDEQFRITLVESSDVPTLGVGEGTWPTMKNTLRQIGLSEREVFARCHAAFKQGGKFVNWVHGNGDFYYHPFTVPLGYGKLDLAPYVENVENFAIESNFQHHICEAGLAPRGHADLDYQGPCNYAYHLDAGELATMLKEHCTAKLGVHHLVDTLQETVIAEDGSIAAIALEKTGQLSADLFVDCTGARSLLLGKALGVGYHSLDDVLFNDSALAMQVPYDNDDSPVASHTIATAQDAGWIWDIGLTHRRGVGHVYSSRFTSDDHAEANLRKYLGKAAEGLTARKISYKPGHREKFWHKNCVAVGMAAGFVEPLEATAIMLIELSSRFIGENLPADKGLMPVVAKRFNQQMDYRWQRIADFLKLHYMLTQRPEPYWQAHCDESTFPQSLKDDLAIWQYRGPATNDFDSAIELFPAASYQYVLYGMEFKPDFTSQAYLYNQGQQAQQLIRRNQQITQQMLQNLPAHRAYIEQWLATG

SEQ ID NO: 85364 - protein, 559 aa, Plesiocystis pacifica
  REGION 1..559: note = tr|A6G2J2|A6G2J2_9DELT Tryptophan halogenase; OS = Plesiocystis pacifica SIR-1 OX=391625 GN=PPSIR1_22846; PE = 4 SV=1
MLGGGSSGYFAALAIQRRFPELEVTVIASSKVPIIGVGEATTTLMPPFLHAQLGLSMEAMCRAVEPTFKLGIRFEWGRPGAYHFNFPFGDADPLLAHHFDGDLRHQSLMSMAMDQGLAPVLRGPEGEVVSLLRQVKFAYHLDNAPFVAFLAEAARAAGIGHIDATICDASTRAGASGEPEIASLRTEDGRELAYDLYIDASGFRSVLLGGALEERFQSYASSLFCDRAVVADVAEGAGVEPYTTAETMDAGWCWRIPVRRACHRGYVYSSAFQSDDEAVAHMRAANPSMGEAKLIRFRSGRRERAWVGNVAAVGNAYGFVEPPRVHGPAHGHRRARLRARGDRGPASRGRGRGRGADLPRVRQRVPGRALGLPALVSGGALQVQPAPGQRLLAGRPGRGRRLGPRAGDRALSEPGAVAGRGRPGLRRGRSSLRLQRADDHAARPARREPGRCGAQNQAEPGPVARADRASAHRPALRRGSAHGLGLARGPPRAPARVRGAPQLVVPGRRRAGRGDRRGSAAGTAQERHARGASRLAASGWGLARGPRPDPRMGERLTRA

SEQ ID NO: 85365 - protein, 502 aa, unidentified
  source 1..502: note = Xanthomonadales bacterium
  REGION 1..502: note = tr|A0A2M7D1C8|A0A2M7D1C8_9GAMM Tryptophan halogenase; OS = Xanthomonadales bacterium CG02_land_8_20_14_3_00_62_12; OX = 1974108 GN=COS34_02560 PE=4 SV=1
MTESPIKTVVIVGGGTAGWMAAAVLAKAMGPQLAIRLIESDEIGVVGVGEATIPQIRLINQFLGLDEDEVLRQSQGTFKLGIQFNDWRRIGDSYLHAFGDIGLPLGMLAFHPYWLRARQTTATSADLWAYSLNAQTAMANRCARLGPAADSPLSGIKHAFHFDAMLYSQMLRRHCEGQSLHRSEGRIVDVRLRADDGFIESVVLASGETISGDLFIDCSGFRGLLIEGALKVGYEDWSHWLPCDRALAVPSARTAPMRPYTQASARAAGWQWRIPLQHRTGNGHVYCSRYLSDDEASAILLANLEGEALAEPRPLRFTTGRRRQFWQRNCVALGLASGFMEPLESTSIHLVQSGISRLLNLFPDRHCDAALSAEYNRQTTFEYERIRDFIILHYHASERSDTPFWRDCAAMSIPESLQRKIDLFSSSGAIVRDGEELFTEVAWLQVMLGQGICPRRYHPLADAISAAQLKEFLANIRALIDARVASLPSHADFVARNCAAAM

SEQ ID NO: 85366 - protein, 500 aa, unidentified
  source 1..500: note = Thalassotalea euphylliae
  REGION 1..500: note = tr|A0A3E0U7J7|A0A3E0U7J7_9GAMM Tryptophan 7-halogenase OS=Thalassotalea euphylliae OX=1655234; GN = DXX94_15570 PE=4 SV=1
MLHSQPIRKVVILGGGTAGWISAALLKKLLGEAVAIELVESETIGTVGVGEATIPPIQVLNSVLGINEAEFLRETKATIKLAIRFENWKQQGHQYYHSFGAIGKSMAFCHFHHLLKRAGGLDDESQLWQYDLNYLCAEAGKFAKIKSKDPIIDMPYAYHFDAGLYAQYLRKFSEKLGVVRTEGLVEQVVQCQQSGSVQALVLKSGQKVTGDLFIDCSGFKGLLIQDTLRTGYEDWSHWLQCDSALAVPTERHEKTAPYTRSIAHSAGWQWRIPLQHRNGNGLVYSSSHYSQQEAADILMSNIDTKPLADPKLIRFQTGRRYQQWHKNVIAVGLASGFLEPLESTSIHLIQSAVVRLVHLFPHQGITTDIVDEYNKQSKVEFEQIRDFLILHYHVTERTDSQFWRDMRAMEIPDSLRHKIALFQENGRLFRDQNDLFLENSWLQVMVGQGIIPKDYHPTANSMSLEYIEETLKKIKAIKADPVSKLPSHDEFLAHYCKLGK

SEQ ID NO: 85367 - protein, 529 aa, unidentified
  source 1..529: note = Dyella jiangningensis
  REGION 1..529: note = tr|A0A023NRR3|A0A023NRR3_9GAMM Tryptophan halogenase; OS = Dyella jiangningensis OX=1379159 GN=CH75_07495 PE=4 SV=1
MARLKKVLVVGGGTAGWLAACYLAKAVNAVDPGSVQVHLVESSNIGLLGVGEATFPSIRGTLSAIGLDERRFLVGATATYKQGIHYRHWVRPPGTPGNTHFFHPFSQPSQRPGGPELLPYWLLGAAPEGMPFADAVTMQSRLVERGRAPKRSTDADYQGPMNHAFHFDAACFARVLAEHGQESLGIKRHVATVERTELDETGAIARVITTELGELTADLYMDCTGLRGALIGGVMQSPFRSRRDVLFADRAVAMQVPYERPDTPIPSYTISTAQEAGWIWDIGLQKRRGVGYVYSSRHTDDARAEEVFRRYLGPAADDLKAMHIKFETGYRPEHWRKNCVAVGLAGGFVEPLESTGIALIELATYLLTHLLPGDTDDMERAARHFNEMMVARYDRIIDFIKMHYCLSQRRDSSFWIDNADPASIPQTLQDKLALWRHRPPHRLDFVSDLEMFLVSSWQYVLYGMEYKTDLEPMRSAYPRFEEARQEFAMIQQVAAHAASDLPEHRALVEQFCREFHERSGAAVASEAMA

SEQ ID NO: 85368 - protein, 206 aa, unidentified
  source 1..206: note = Alphaproteobacteria bacterium
  REGION 1..206: note = tr|A0A257JG06|A0A257JG06_9PROT Tryptophan halogenase (Fragment) OS=Alphaproteobacteria bacterium PA3 OX=2015571; GN = CFE32_19105 PE=4 SV=1
MGRRIAKVVIVGVGEATIPPIQHLNAVLGIPEGEFLRETRASIKLAIRFEGWRVPGESYFHTFGAPGRNHAFCDFQHFWRRGQQLGVAQDLGDYDLNHLCCQTGRFGRPRSQDPFLDVPYAYHFDAGLYARFLREVSEARGVQRLEGKITEVLLRPADGFIDGLRLADGRTVTGDLFIDCSGFRGLLIEEALHTGYEDWTHWLPCD

SEQ ID NO: 85369 - protein, 505 aa, Cellvibrio sp.
  REGION 1..505: note = tr|A0A3D4PXZ1|A0A3D4PXZ1_9GAMM Tryptophan halogenase; OS = Cellvibrio sp. OX=1965322 GN=DIW64_04120 PE=4 SV=1
  VARIANT 89: note = Xaa can be any naturally occurring amino acid
MNPLKKIVILGGGTSGWIAASMLAAHLKRELCEIELVESDEIGSIGVGESTIPPVVRLITSLGIDEEEFIRETQACYKLGIKFVDWRVXVKNQSYFHPYGALGKRIGSQDFYQCWLKSTMEGEHFNLQDFSPCAVMAAQERFFPPAQAMNTPIGGAGYAVHLDAKLVAAYLRRYAEARGVVRNEGNCVNVLRKDNGFIEALELSDGRKIHGDFFIDCSGFKALLIEKELGVEFEDWSNYLPCDRAIVVKTQVAGSRMPYTTATARKSGWAWRIPLRNGTGHGYVYSSKFCSDAEAKTTLLKNLDAPRINDPRLISFNTGRRKEFWSGNCLALGLSGGFIEPLESTAIHLIARGMDFFLRFFPDADCEPSLQREYNRRMGADFEEVRDFIVLHYCTTERDDSDFWRWCKTMELPESLRERIDLFKGHGILREDNDELFRSTSWQSVFEGMGIRPQKYSPRVDNLDFEQISETLKLARSAIFNMVKSLPSHDAYLQEHYGASEPPKP

SEQ ID NO: 85370 - protein, 501 aa, Streptomyces sp.
  REGION 1..501: note = tr|A0A117S0M8|A0A117S0M8_9ACTN Tryptophan halogenase; OS = Streptomyces sp. RV15 OX=909626 GN=AQJ91_20115 PE=4 SV=1
MNPNRETGETWETDEFDVIVVGGGPAGSTAATAVALRGHRVLLLEQQTFPRYQIGESLLPSTVHGVCRILGVEEEVARAGFKPKRGGTFRWGRNRDPWQFSFALSPRLADPTSFAYQVERSRFDAILLDNARRVGVDVREGCRVKGVLADEERVRGVNWTGPAGEIHEARARYVVDASGNGSRVHGEVGGRRTYSDFFRNIAVFGYFAGGARLPKPNDGNIFCAAFDEGWLWYIPLRDDLTSVGAVVGRDNAAAIQQDPVTAWRGLIDSCPEVRDLLHGVPQSTEAPYDQVRVRKDWSYWKARLWRPGMVLVGDAACFVDPVLSSGVHLATYGALLAARSINGGLAGTLGEGRLFDEFEARYRHEYGLFHEFLVSFYDMHQDERSYFWKARKVTHVDATEREAFVDLVGGLASGDTSLAGPGQAGARLTTTASELDQAVGRLPDSDGLRNPLFESASIRQVFQEGAVLQERGVFGGPLEEETPLRPGGLVASEDGLTWVAG

SEQ ID NO: 85371 - protein, 503 aa, Cellvibrio sp.
  REGION 1..503: note = tr|A0A3D4Q1Y7|A0A3D4Q1Y7_9GAMM Tryptophan halogenase; OS = Cellvibrio sp. OX=1965322 GN=DIW64_05120 PE=4 SV=1
MQNNLNSICIVGGGTAGWMAASLLSSSLQGTGIKITVIESPDIAIIGVGESTVPSILEFLRVCRINLKEFVQATSASFKLGIRFEDWLKPGEHYFHPFGRVGQDLHGFEFYQAWLKTCADGHASRWVDHSPCAIMAENHRFMLRPPQDQNWVLRNTGHALHFDAVLVARYLREFSLSRGVERIEATVDKVVVDERQFISALELNNDTTITNDFFVDCTGFKGLLIAGALNVGYEEWTHYLPCNRAIAVQTSNTGEPPPYTTATAREAGWTWKIPLQHRTGNGYVFSGDHCSDDKAIDTLLKAVDGELLIEPRVIPFTTGRRKKIWHNNCLSVGLASGFLEPLESTAIHLVYKILLRFISHFPDQDFDPQVEQAFNQKINLDYQEVRDFIILHYCTTKRDDTEFWRWCQNMPIPDSLNEKIHLFRERGELEHSYGQFFSQDSWCSILEGMNVRPKKYHPLMDGFDSQGLAKTLQENVQDIYSTVMQMPKHGDYIRQHCAAKKVL

SEQ ID NO: 85372 - protein, 503 aa, Sphingomonas sp.
  REGION 1..503: note = tr|A0A430EGB7|A0A430EGB7_9SPHN Tryptophan 7-halogenase OS=Sphingomonas sp. ABOLE OX=1985878; GN = CA234_16235 PE=4 SV=1
MATTTPYRIVIAGGGTAGWMAAAALIRFLGQGFAVTLVESDAIGTVGVGEATIPQIGMFNASLGIDEDAFVAATRASYKLAIEFVGWTRGGRYMHAFGDVGRDNGLLAFRHTWLRGMAEGVAAPLCAYALNNVAALGNRMQRGPTRTVRVLPEMPYAFHLDAGLYARFLRDYAEARGVVRHEGRIEAVTRNGADGDVAALHLDSDRRIEGDLFLDCTGFHARLIGEAMGVGYQDWSHWLPCDRALAVPSARARDFTPYTRATAHDAGWQWRIPLQHRTGNGIVYASRYLSDDEAAARLLAGLDEPALGDPRPIRFRTGRREQAWAGNVIALGLSSGFLEPLESTSIHMIQSAVERILKLLPGRRAPAPLRDSYNRQAAHESERIRDFLILHYWANDRDAPFWRERRETPVPHGLAEKIALWRETGEILREDGDLFSDVAWLQVLVGQGITARGHHPLADQPPRAQIAEYLDLLAKLNAREVAQMPPHSDFVRAHGAADAEIAA

SEQ ID NO: 85373 - protein, 493 aa, Cellvibrio sp.
  REGION 1..493: note = tr|A0A3D4Q6U6|A0A3D4Q6U6_9GAMM Tryptophan halogenase; OS = Cellvibrio sp. OX=1965322 GN=DIW64_19990 PE=4 SV=1
MPDKKMKIVIAGGGTAGWIAAAALSHQMGEILDITLIESQEIGTIGVGEATIPPMRTFHRFLGINEQEFMRATSATFKLGIQFENWKQVGEKYFHSFGVTGKQTIITDFIHFWLRGRELGIAKEFGDYCLEYKAALENRFSLNDQTSINYAFHLDAGRYASFLRARAEARGVKRVEGKIAEVIQHPESGFITSIKMDSGQDIAGDLFIDCTGMRGLLIEQCLQTGFEEWDHWLPCDSAIAVQTESHGPAVPYTKSIAHHAGWRWQIPLQHRVGNGIVFSSSHLSDDEATNMLLSSMEGKVLTEPRVIKFKTGRRKKSWNKNCIAMGLASGFLEPLESTSIHMIMTAVTRLLQLFPHGEIKQSIVDEYNTQAKSEYERIRDFIILHYKATERDDSPFWRYCKEMEIPSDLKHRIALFKDFGRSNQVEGELFRLDSWTQVMLGQGIMPSSYHPIVGLMSDRDLQNFLNSIAADVDKSIAMMSTHQDFVNKYGGVL

SEQ ID NO: 85374 - protein, 510 aa, Streptomyces sp.
  REGION 1..510: note = tr|A0A0M8RWC3|A0A0M8RWC3_9ACTN Tryptophan halogenase; OS = Streptomyces sp. NRRL F-5755 OX=1519475 GN=ADK86_04360; PE = 4 SV=1
MGERAVANSANAGNPANPETYDVVIVGGGPAGSTLGALVARQGHRVLILEKEFFPRYQIGESLLPSTVHGVCRLTGVADDLAAAGFTRKRGGTFRWGATPEPWTFSFSVSEHMAGPTSYAYQVERSKFDEILLRHAGRCGAEVREGCAAADVIADEERVRGVRYTDADGAEREAYGTFVIDASGNKSRLFQRVGGQRTYSEFFRSLALFGYFEGGKRLPEPNSGNILSVAFDSGWFWYIPLSPTLTSVGAVVRREMAEKIQGDQEEALRALIAECPLISEYLANARRVTTGQYGQLRVRKDYSYHQTTFSRPGMLLVGDAACFVDPVFSSGVHLATYSGLLAARSINSVLAGLVDEAVALREFEARYRREYSVFYEFLLSFYEMHHSEQSYFWRAKKVTHHRRSEMEAFVDLVGGVSSGEAALIDADAMAERLRADSAEFAGAVDQLAHSEDGSMLPLFKSSVVSQVTREGSQVQMRALLGADAEPETPLLPGGLVSSPDGMFWLPAGSG

SEQ ID NO: 85375 - protein, 599 aa, Microcystis sp.
  REGION 1..599: note = tr|A0A2P1UFZ1|A0A2P1UFZ1_9CHRO Tryptophan halogenase; OS = Microcystis sp. MC19 OX=1967666 GN=B5D77_11420 PE=4 SV=1
MVATNTNEYDVVIMGAGFAGVCQARHLLLNVPNIKIALIDPRPEERTDKDLKIGESMVEIATLFVCKELGLYEYMIENHPPKYALNFHWAKDADKTDTIDDYYHIWANRQFPLGTFQMNRAKFERDLLKMNKKMGASFYQGRVVDVDITPTDEMHTVKVKMIDGNYHELRAKHLVDAAGRKFIIGHKTDNVIVGADNLFGVDTGSAWVRVKNIDRTIFHDGYDPYGATCSHYYATNHWFGHGHWLWMIPTEKDSQEISIGIAQHRSVIANGQINTQEKFYAFLKANHNLLYRLVTSGENVDFHYLPRVSHTSKTMFSQDNWYVVGDAACIFDPFYSLGTSMIAFAIESITEIIRSQLAGEADTEEKRAAYNDFNLTYTRLNNHLIEHHDKQLGHASIMSWRIYAEYMWWFGIQIPLYVGKWHLDTGFISRYVPKVQADIKGYWHHLYEQFNQLVEQNKNIGFMDAHRTDQLIWGYHTLKHFDDFIENTKFEPRRCNVFAGIKATSFYTAVWYAKFLWKGFGFSAFLNPKNLSYLFGHLNGAVQSAITEMVYKYLTRKLSDNSQIEQMRQEFTHYRYRPQLNSWLKEEVKRSPEKIPIIV

SEQ ID NO: 85376 - protein, 515 aa, Catenovulum agarivorans
  REGION 1..515: note = tr|W7R035|W7R035_9ALTE Tryptophan halogenase; OS = Catenovulum agarivorans DS-2 OX=1328313 GN=DS2_05385; PE = 4 SV=1
MAIVKSITIVGGGSAGWLTAAIIAAAHKHRVETGSLKITLCESPNIPNIGVGEGTWPTMPNTLQQIGISESEFIQRCDVSFKQGSKFVGWGQDDGQGFYYNPFDLPHGFAEGLSVEYWHHNKLTDSLANVFSAQQSICELNKAPKLITHPEYAHALTYGYHLNAGAFVELLKEHSLNKLGVKHILANVEHVELATNGEISQLQLDNGATLSADLFIDCTGFKRLLIAQALQVDFSPLKSCLFADTALATQVDYASTNDPIKSYTQSTAQTAGWVWDIGLPSRRGVGHVFSSDFQTDDAAEQALVKYIQNTGGQPANCNIRKISFTAGHMKKFWHNNCVAVGLSAGFLEPLEASALVLIELSAAKIAEVLPATTEVMHIAENRFNQTFKYHWQTAVDFLKLHYLMSARTDEFWRENRNSETVSPHLQALLNLWKHSVPKMLDFPAKNELFHAASYQFVLYGHNYKSELLFELPEHEKAYVQQIIQHNKQRIAQLTSALPSNRELINNIKKYGLSRA

SEQ ID NO: 85377 - protein, 507 aa, Cellvibrio sp.
  REGION 1..507: note = tr|A0A3D4Q1B1|A0A3D4Q1B1_9GAMM Tryptophan 7-halogenase OS=Cellvibrio sp. OX=1965322 GN=DIW64_03865; PE = 4 SV=1
MKIKRVAIVGGGTAGWLAANHLGVELSRDPEIEITLIESKDIPIIGVGEGTVPQIKATLKRFGISEIDLLSSCDATFKQGIKFAHWMDAEKHGADNFYYHPFSSPYPSGFDVTNYWLNNKSAFEFSKLSEIYSVAELNRSPKQKSSPPYMGLVDYAYHFNALKFADLLAKNAREKFAVKHVFETISQVTLNADGGIKGFVYATGRAEEFDFFIDCSGFSSLLIGETLGVPFLDKSAQILTDTALAIQEPIAETDEILPYTLATAHKAGWSWDIPLTHRRGVGFVYSSRHMTESEAIGDFSTYLGRDLQNSSLRKIPMTIGYRESFWKKNCVALGLAQGFVEPLEATSILVTDFAASLLARNFPKMIDDIPVVSEYCNKAVRYTWERVIDFVQLHYLISDRRDSEFWIDNTENKVMSDVLRERLALWEIGAPKKTDFFSAFDIFGVENHLFVLYGMDYPTRPSVLGAKEAVRAKELVREVQEKSLQMANSLLSHRAWLDELKKALASR

SEQ ID NO: 85378 - protein, 501 aa, Streptomyces sp.
  REGION 1..501: note = tr|A0A0M8RDX3|A0A0M8RDX3_9ACTN Tryptophan halogenase; OS = Streptomyces sp. NRRL F-5755 OX=1519475 GN=ADK86_32515; PE = 4 SV=1
MPASSEEFDAVVVGGGPGGSTAAALIAMAGHRVLLLERERFPRYQIGESLLPSTIHGIGRLLGVEEELHEAGFMRKRGGTFRWGSAPETWTFSFADAPGLGETGGYAYQVERMRFDALLLKHAGRVGADVREECAVRAVHHHDGRVTGLTYRSPEGTEAEVRARYVIDASGNTGRLHTAAGGRRVYSPFFRNIAVFGYFEGGRRLPPPNQGNILCAAFDTGWFWYIPLTDRLTSVGAVVNREHADQVQGNPEQALAKLVDQCALVRDHLADARRVTEGTYGRVRVRKDYSYCNTRFWAPGVALVGDAACFIDPVFSSGVHLATYSAMLTARSVNSVLGAGMDEGRAFGEFEARYRREYTVFHDFLAAFYSMQAPKDTYFWQAHKVTGGQAGALASFINLVGGLASGDRALIDADQLTGRLATASRVLDETADGYQADPAGDPWDESPMLAETFAQSDALAGQGVARGDFAEKTPQFPGGLVATADGMHWAEPAGEPPGGTP

SEQ ID NO: 85379 - protein, 195 aa, unidentified
  source 1..195: note = Rhizobium fredii
  REGION 1..195: note = tr|A0A0B7MT05|A0A0B7MT05_RHIFH Partial tryptophan halogenase OS=Rhizobium fredii (strain HH103) OX=1117943; GN = SFHH103_psfHH103d_313 PE=4 SV=1
MVHGMRLDDRGHVNAFQLGGEELEVDFAVDASGFARLGLGKVFNTRWCSFANVLPTDRAIIVELEPRASSPVTRATAMKAGWMWEAPLNRSISAGYAFSSRYADAAMAIAEVENHYGFRVEAKHELSLDQGYFSTAWVNNFVALGTASGFVEPLEAALAAHTFEALRNLERILANGSGIVPARAIEGYNSANARC

SEQ ID NO: 85380 - protein, 500 aa, Cellvibrio sp.
  REGION 1..500: note = tr|A0A3D4PY96|A0A3D4PY96_9GAMM Tryptophan halogenase; OS = Cellvibrio sp. OX=1965322 GN=DIW64_04730 PE=4 SV=1
MLNATINKIVIAGGGTSGWMLAAALSKLQGKDKYDITLIESEVIGSIGVGEATIPNIQLYTGFLGIDEGDFLQKTQGTYKLGIEFIDWTRKGESYFHPFGGIGAPLNGIDFIHYWLRNREEGGSSDFGLFNAETLAARENKCSRMEGNPRPDLPSVNCAYHFDAALVAKYLRTYAETRGVTRVEGEIVAVEQNPTTGHVESLVLKSGEKIAGHLFLDCTGFSSLLIGKTLGSEFIDWSHWLPCDSAVVMPCESDVGPLKPYTCSTAKEYGWQWRIPLQNRIGNGYVYASQYISDELATQSLVTSIEGKPLGEPRIIKFKSGYRKKIWDKNVIACGLSGGFLEPLESTAIYLVQSTITKLLAHLPKNNFDPYVITTFNQKIHAEYQNIRDFLIAHYKLTERNDTEFWRHCQDMELPESLKERLGLFKASASCNVQHAELFKEHSWFAVLIGQGLMPDSYHPLADMLSKGEHKNFLSNIHSAVSERVTLLDDHRDYLNKYLG

SEQ ID NO: 85381 - protein, 504 aa, Cellvibrio sp.
  REGION 1..504: note = tr|A0A3D4Q2V4|A0A3D4Q2V4_9GAMM Tryptophan halogenase; OS = Cellvibrio sp. OX=1965322 GN=DIW64_14620 PE=4 SV=1
MPAEAIRKVVIVGGGTAGWMCAAALSRVLDLQQVAVTLVESDDIRTIGVGEATIPTLRDFNRLLGIDEADFVRKTQGTFKLGIQFDGWGQLDESYIHPFGSFGLDRPEVRFHQMWLKLRALEEGVGDISDYNLSLVAARLNRFNPPGNKGLLSTLRHAYHLDANLYGLYLREYAEARGVNRLQGTITGVTQGDDGFVNSVVLSDGRHLDGELFIDCSGFRALLIEDTLKAGYVDWSQWLPCDRAIAVPSESTGPLRPYTCAMADEAGWRWRIPLQHRMGNGYVYSSAYLDDEAAKQRLLATLEGQPLAEPRQLKFKAGHRRKLWEKNVVAIGLSGGFLEPLESTSIHLIQMGIARLLLLFPDKDFKPALREEFNRLSLLEYEQIRDFIILHYKATRRDDSAFWRYCRDMKIPDSLQQKFDLFRAGGRIIRFKDELFAENSWLAVMLGQGIIPEGYDPVADSIPVDEMRTAILTFKAAVLKTAQSLPEHAAYIASNCQGEVAKFK

SEQ ID NO: 85382 - protein, 508 aa, Pseudoalteromonas sp.
  REGION 1..508: note = tr|G7FWP8|G7FWP8_9GAMM Uncharacterized protein; OS = Pseudoalteromonas sp. BSi20495 OX=386429 GN=P20495_0048; PE = 4 SV=1
MNKTIKTIAVIGGGTAGWLSAAIIASYHQGKNGDGLKVMLVESSDIPTIGVGEGTWPTMKNTLQQIGLREVDVFKACNATFKQGGKFVNWTHGNNDFYYHPFTVPLGYGRIDLAPYLDNVEDFAQQTNFQHDICEASLAPRGIAQGEYQGNCNYAYHLDAGAFAEMLKQHCKSKLGVEHIIGTVDQVKLDDDGAINELTLKDQTRTISADLFIDCTGFSSLLLGQALNVPFKKMDHVLFNDSALAMQVPYDENDDSLASHTIATAQNAGWIWDIGLTHRRGVGHVYSSKFLSDDEAEQNLRNYLGDAANCLTARKISFESGYREKFWHKNCVAIGMSAGFVEPLEATAIMLVEISARFVAEHMPADTQVMPIVAKRFNEQMDYRWQRIIDFLKLHYMLTKRPEPYWQAHVQPDTIPQTLQEDLLLWGSRGPLIQDFHGALELFPAASYQYVLYGMGFKPDFTKQAYLYSQHVQAKQIIERNSQLTQQMLQTLPPHRAFIEQWLAANPV

SEQ ID NO: 85383 - protein, 495 aa, unidentified
  source 1..495: note = Frankia casuarinae
  REGION 1..495: note = tr|Q2JA60|Q2JA60_FRACC Tryptophan halogenase; OS = Frankia casuarinae (strain DSM 45818 / CECT 9043 / CcI3) OX=106370 GN=Francci3_2465 PE=4 SV=1
MTDSAEFDVVVVGGGPAGSTLAALVAMQGHRVLVLEKEHFPRYQIGESLLPSTIHGVCRLTGAADELAKAGFPLKRGGTFRWGATPEPWTFAFSVSSRMAGPTSFAYQVERSKFDEILLRNARRVGAEVHEGCSATDVIEDGDRVVGIRYTDDGGNRREARASFVVDATGNKSRIYHRVGGTRQYSEFFRSLALFGYFEGGRRMPEPNRNNILCVAFDSGWFWYIPLSDTLTSVGAVVRSEMAEKVQGDSEQAMKALIEECPMISDYLAPARRVTTGQYGQLRVRKDYSYHQTTFWRPGMVLVGDAACFVDPVFSSGVHLATYSALLAARSINSVLAEIVDEKTAMQEFEARYRRDYGVFYEFLVSFYEMHHSEDSYFWQAKKVTGNSQPELEAFVELIGGVSSGESALTDADALALRLQANTADFTTAVDALVANNSESMVPFMKSQVIRGVMHEGSQMQMRALLGEDAEPETPLFPGGLVSSADGMFWLPTDA

SEQ ID NO: 85384 - protein, 501 aa, Sphingomonas sp.
  REGION 1..501: note = tr|A0A430ELN2|A0A430ELN2_9SPHN Tryptophan 7-halogenase OS=Sphingomonas sp. ABOLE OX=1985878; GN = CA234_06225 PE=4 SV=1
MSAPLSHVAIIGGGTAGWMAAAALGRVLDTRAIAITLVESEAIGTVGVGEATIPPIQAFNALLGIDEGEFLRATKGTAKLGIEFVDWRAKGTRYFHPFGIHGIDFGGIPFEALWQRARLAGVAAPLEAYSICAEAARLGRFQRPATSGKNPLTHLGYAYHFDAALYAGFLREKAEQWGVRRQEGRIVTVERGEDGAIAGVVLEDGTRIAADFYIDCSGFRSLLLGEALGVAFEDWAQWLPNDRAVAVPCVLGPEGRSPFTRSTARGAGWQWRIPLQHRVGNGLVYASAHCSDAEAEAQLLGSLEGTPLAEPRLLRFQAGRRARFWEKNCVALGLASGFLEPLESTSIHLVQAGIARLLEMLPVGGGTPADIRRYNRLMATEFETIRDFLILHFHATARDDTDYWRQLRSMELPDTLAERIAIYRASGRLYREADELFSKTSWLAVLHGQGIDPSGYDPIADGMPRDEAAARLARIAEVTALAAARMPTHEAFLQESGALQR

SEQ ID NO: 85385 - protein, 509 aa, unidentified
  source 1..509: note = Caulobacterales bacterium
  REGION 1..509: note = tr|A0A1F8IIH0|A0A1F8IIH0_9PROT Tryptophan halogenase; OS = Caulobacterales bacterium RIFOXYB1_FULL_67_16; OX = 1797588 GN=A2352_06480 PE=4 SV=1
MRQLKSILIVGGGSAGWMAAALFSKLFKGLYDITLVESEAIGTVGVGEATIPAIKKFNDLIGLDENDFMRRTQASFKLGIQFVDWDRLGSSYIHGFGVIGRDLEWLRCHQYWLKMRAAGKASDFAAYSINTAAALENRFMRADPARPTSPLGHIAHAFHFDAGLYARYLRGMAEAAGVRRREGKIASVQLRPEDGFVQSVTLETGDVLSADLFVDCSGFRGLIIEQAMKTGYEDWSHWLPCDRAMAVPCARTEPFTPCTRSTARPAGWQWRIPLQHRTGNGHVYSSRYMDDDEAERILVSNLDGAQMAEPNRIRFVAGKRRQIWNRNCVAAGLASGFLEPLESTSLHLIQSVLIRLVRMMPDAGFDPATIAEFNRQTDFEYERIRDFIILHYKATERDDTPFWRYCRDMDVPATLERKIDLFRANGRIFREDDELFAEESWIQVLLGQGIIPAGYDPLVDVTPEPDVERYLADVETVIRKCVAVMPSHADYVDRVCSATRGVDAAVRAS

SEQ ID NO: 85386 - protein, 476 aa, Sphingomonas sp.
  REGION 1..476: note = tr|A0A430EFI8|A0A430EFI8_9SPHN Tryptophan 7-halogenase OS=Sphingomonas sp. ABOLE OX=1985878; GN = CA234_17260 PE=4 SV=1
MSLGQVLVVGGGLTGWSTAAALKRRVPTLSVSILPLAPPADALADRIATTLPSILGFHADLGIGLGDGVMRTGSIYRLGTLYSDWVDGLPDYVHAHGPHGEPVDGVSFHHLWARAARDDVAAPFDAFSPAAAMAREGRFVLPAEDGILGAHGFGLALDLRRYLGMLQAFARHVGVRTLDGALAGVERAADGSVAGVVLTDGIRVTADLYCDCSGPAARVHGVTGSARESWQRWLPCDRLVLEHAAPADDPAPMACVTATAQGWRWTSATQQGAVYSAAHSQRDDAAIRFEAGAALEPWRHNVVAIGDAAVTIEPLEWSNLHLAHSAIDRLITMLPAGAPHPLEAAEYNRQALAEARRVRDFVLLHYVTARRSGPFWHDVASAELPDSLAHTLRLFRERGRLPFYEEETFDRDGWLSVLFGQGVLPRRIDALADAVPHARAADAMARYRDRIAQAVRPLPTLAAFRAAQSRHLHERA

SEQ ID NO: 85387 - protein, 510 aa, Sphingomonas glacialis
  REGION 1..510: note = tr|A0A502FJ08|A0A502FJ08_9SPHN Tryptophan 7-halogenase OS=Sphingomonas glacialis OX=658225; GN = EAH76_18675 PE=4 SV=1
MSEAGSGRITKVVIVGGGTAGWMTAAALSRLVAGGVSVTLVESEEIGTVGVGEATIPSLLDFNRMLGIDEDAFVRATSATFKLGIEFRDWTRLGDAYLHPFGTHGRDVEGVSFHQLWLRQRASGAGDPGSIGDYCLSAVAARRGRFNRPSANPQSVLSTLSYAFHFDAALYAAFLRNLAEQDGVVRVEGRVVAVDKDPDAGSITAVQLADGRSIDGELFIDCSGFRSLLLGDALRVPFTSWQHWLPCDRAWAVPSARQGPLTPYTRATADTAGWRWRIPLQHRVGNGYVYSSAHIDDDAARDALLAGLEGTALGEPRQLRFVAGRRDRLWEKNCIAIGLSGGFLEPLESTSIHLIQSGITRLMTLFPDTGFSTVETAEYNRVMLREYEQVRDFIILHYHATQRSDSPFWEHCRTMALPESLQSKLELWSGKARVFREQGELFTPDSWIAVLLGQGIDPQSFDPLAAVLPAGETARFLAHVRDMIDKTAAAMPTHEQFIAQHCAAPMRQSA

SEQ ID NO: 85388 - protein, 508 aa, unidentified
  source 1..508: note = Proteobacteria bacterium
  REGION 1..508: note = tr|A0A1W9JZH5|A0A1W9JZH5_9PROT Tryptophan halogenase; OS = Proteobacteria bacterium ST_bin13 OX=1978761; GN = BVN33_03295 PE=4 SV=1
MARIERLVILGGGTAGWMTAAALAKTLGRTVQIDLLESDAIGTIGVGEATIPTIHWFNELIGLDEADFVRATKASFKLGIEFVDWARPGHRYFHPFGRYGVDLGPVPFHQCWLKAGSDGATTPLADYSLATALAGSNRFARPVDDPRSILSTLGYAYHFDASLYAAYLRKLAEAQGVTRHEGRLVSVERDPETGFVTALTSDRGDRLAGDLFVDCSGFRALLIGDELGASFEDWSHWLPCDRAIAVPCARVAETTPYTRSTLRDAGWQWRIPLQHRTGNGYVYASGFLSDDEATATLLANLDGEPLADPRLIRFTAGFRRESWTKNIVAIGLSSGFLEPLESTSIHLIQSGIAKLIALFPNRDCDPALARQFNALFGRDMDAIKDFLVLHYHATQGHQAPLWQHTRHMTLPDSLVEKEEQYRRTGRLMLTSDELFREASWLAVLNGQGIVAEDHSPIADTLDAVTNRRQLDQIAALIARAAPTLPRHDDAIATLIGQAAPRAAVAAVP

SEQ ID NO: 85389 - protein, 516 aa, Catenovulum agarivorans
  REGION 1..516: note = tr|W7QWL3|W7QWL3_9ALTE Tryptophan halogenase; OS = Catenovulum agarivorans DS-2 OX=1328313 GN=DS2_11798; PE = 4 SV=1
MNSPISSVVIVGGGNAGWLTAAILASKLKSKCAESVSITLIESPNIKTIGVGEGTWPSMRRTLKSIGISESDFIVSCNATFKQGAKFVGWVTGAKNDSYYHPLMLADNAEQTDVLHAWHQHFEHIDFSKAFCVQDYTCDNGLAPKSITSPEYAAVTNYAYHLDAGLFTNFLKKHCIEKLGVKFVADDVIDVNSSINGAIDKVLTRNCGYITGDIFIDCTGFNRLLINKHYQIPFQSCKHVLAADSAIACQVPYPSTESPITSHTISTAQTAGWIWDIGLQNRRGTGHVFASDYLSDYDAEAQLTKYIKNTGGDVEKCTFKTIRFEPGHLSKFWHKNCLAIGLSAGFIEPLEASALLLIEMSANTLAEHFPANQAAMNLVADKFNQTFLYRWQRIIDFLKLHYILNQRDGQAFWQDIKQPQSIPDSLQANLNLWQHQYPCMHDFEQAIEVFPIDSYLYVLYGMGFKTQYPFKVSQLQSDLLSRQYAEIKSNFSQLERVLEPNRHLLEKIKRYGLQKI

SEQ ID NO: 85390 - protein, 520 aa, unidentified
  source 1..520: note = Amphiplicatus metriothermophilus
  REGION 1..520: note = tr|A0A239PVE8|A0A239PVE8_9PROT Tryptophan halogenase; OS = Amphiplicatus metriothermophilus OX=1519374; GN = SAMN06297382_2182 PE=4 SV=1
MIGPAPEDRKKGRTMSPDDRLIRRIVIAGGGAAGWMTAAALANALQGSARITLVESEDIGIVGVGEATIPPIKVFNQSLKIDEADFIAATRGSFKLGIEFVNWTRLGHRYFHPFGQYGADFDVVPLHQYWLKLRAQGDETPLQEYSLAWAAAKRARFERPIPDRRRIQSTFDYAYHFDAALYARYLRGYAEARGVERLEGRIARVALRGEDGFVESLILEDGRTAEGELFIDCTGFRGLLIEDALKTGYEDWTHWLPCDRAVAVPCRHEDPDRLDPYTRATAREAGWQWRIPLQHRVGNGYVYSSAHIGDDEAAAVLSSNLEGEPLGEPRLLRFTTGRRKKFWNRNCVAIGLAAGFMEPLESTSIHLIQSGITRLLALFPDRAFHPIAAAEYDRATALEYERIRDFLILHYHATSRRDAPLWRYCASMSIPETLQYKLDHFRSYGRPVSPGFELFQNPSWLAVLIGQEATPARYDPLVDMRAKVDAAGIMAGLRRVIDEAAEAMPTHKAFIARLVPAQAQ

SEQ ID NO: 85391 - protein, 520 aa, unidentified
  source 1..520: note = Paucibacter aquatile
  REGION 1..520: note = tr|A0A2N8KXV7|A0A2N8KXV7_9BURK Tryptophan halogenase; OS = Paucibacter aquatile OX=2070761 GN=C1O66_12605 PE=4 SV=1
MSESSSLDKDGSSRSPSPTHGPIRRVVVVGGGSAGWMAAATLATYLGRQASVRLIESEEIGIVGVGEASVPHIRMFNGQMLGIDEAEFVRRTQGTVKLGIEFRDWARIGDRYTHGFGVIGRSRGPLPFHQFWLKLFLAGRAGPIGDYSLQTVMAPQGKFIPGDPSAAPDSPLADIAYAYHFDASLYARFLREISERRGVQRIEGKIVRALQRTDDGFIEAVQLESGERVEGDLFIDCSGFRGLLIEETLKTGYTDWSHWLPCDRALAVPCEGVSPITPYTRATANTAGWQWRIPLQHRIGNGYVFSSQHLSEDQAAATLMANLDGKPLVDPRLLRFTTGMRKQVWNKNVIALGLASGFLEPLESTSIYLVQSGLSRLLSLFPGREFNPQLAERFNRETAFEYERVRDFLILHYHATERDDSDFWSDCRTMSVPDSLSEAMDLFRADGRYFRHGEDFFALPSWVQVMLGQRILPRSYHPIVDDMPEDRLLAFVEGTRHILSDAVAAMPTHQQWIERYWRAA

SEQ ID NO: 85392 - protein, 517 aa, Rubrivivax sp.
  REGION 1..517: note = tr|A0A3S2TJL5|A0A3S2TJL5_9BURK Tryptophan 7-halogenase OS=Rubrivivax sp. ICH-3 OX=2499835; GN = ENE75_22475 PE=4 SV=1
MNSTVQQVVVVGGGSAGWLTACLLAAEHGHGASGRLQVTLLESPDVGPIGVGEGTWPTMRDTLRRIGVSETTLVRECDASFKQGSRFNGWVDGGPTDVYHHPFVLPQGHTEANLVAAWLERHAKVPFADLVSFQPHLCAQGKAPKQVTTPEFAAVANYGYHFDAGKFGQMLQRHGVERLGVRHVLDHVDAVLSHDNGDIAALQTRAHGAVAGDLFVDCTGMAALLLGRHFGVPLVPQHEVLFNDRALAVQVPYVRDDAPIASQTLATAQAHGWIWDIGLPTRRGVGHVYSSAHTTDDAVEQALRDYITATGGPAEIATPRKLQFQPGYRQEFWHRNCVAVGLSAGFVEPLEASALALAELSAAMISADLPATRETMAIVARRFNDSFRYRWERVIDFLKLHYALTRRRDTAYWRDHADPASMPAQLRDLLALWQHRPPSRHDFPRAEELFPSASYQYVLYGMGFRPVPGAYTQGADDGSRADGFFREAAALTRKMLPALPSNRELIAHVRQHGLSRI

SEQ ID NO: 85393 - protein, 558 aa, unidentified
  source 1..558: note = Planctomycetes bacterium
  REGION 1..558: note = tr|A0A5C6AXG7|A0A5C6AXG7_9BACT Flavin-dependent tryptophan halogenase RebH OS=Planctomycetes bacterium Pla100 OX=2528006 GN=rebH PE=4 SV=1
MFHGAFQVRFRNSFTSVFHSDAAFCYFRNMTPPIPPETHVFFDRAGDCHIGIVGGGTAGWMSAATLKRRLGCRVTVVESSQIPSIGVGEATIPAMIDWLHNMGIDEDEFMRRTGATFKLGIRFDDWVEPQHRYWHPFGNCGGTIDGLDLVHHWNHAKQAGWIAPSVAYTDFSLQTRMCEQARGPRDQTGRCVLDNYAYHLDAGRLAVFLREIALAEGVEHRVGDVVGARCDRDGNLNEVFVENQASLVADLYIDCSGFASVLIDRAMHSGWTDWSSQLLCDRAVVCRKRPDFDSTSPLRPYTISTGMNAGWSWQIPLQENTGCGYVYSSAHIGDDDARQELSRLIGVDEDDTDFRTLGMRVGMRPNGWVGNCVAIGLSSGFIEPLESTGIFLVQRALDELVECGRAELFNARMNEVYCQTRDFVLMHYVVSRRRDTAFWRDAATVELPSSLARLLEVYQREGHVLLPDHAPTFAEANHHFILTPAGITPGRRFANCDMSQPEMREVTTEILESVVQQHHQLVAKFASHRRCLELITEPPPPLPPQGLSPFLAVEILCS

SEQ ID NO: 85394 - protein, 538 aa, Burkholderia pseudomallei; identical to SEQ ID NO: 82926
  REGION 1..538: note = tr|A3P8V3|A3P8V3_BURP0 Tryptophan halogenase PrnA; OS = Burkholderia pseudomallei (strain 1106a) OX=357348; GN = BURPS1106A_A2733 PE=4 SV=1

SEQ ID NO: 85395 - protein, 536 aa, Serratia proteamaculans
  REGION 1..536: note = tr|A0A4Z0E142|A0A4Z0E142_9GAMM Tryptophan 7-halogenase OS=Serratia proteamaculans OX=28151; GN = E5C26_01570 PE=4 SV=1
MSKPIKNIVIVGGGTAGWMSASYLVRALQQQANITLIESATIPRIGVGEATIPSLQKVFFDYLGIPEQEWMPQVNGAFKAGIKFVNWRTSPDHSRNDYFYHLFGNVPSCDGVPLTHYWLRKREQGFQQSMAYACYPQPGALDGNLAPCLHDGTRQMSHAWHFDAHLVADFLKRWAVDRGVNRVVDEVVEVNLNEHGFISSLFTKEGRKLEADLFIDCSGMRGLLINQALKEPFIDMSDYLLCDSAVATAVPNDDAQAGVEPYTSSIAMNSGWTWKIPMLGRFGSGYVFSSKFTSRDQATTDFLNLWGLSDNQPLNQIKFRVGRNKRSWVNNCVSIGLASCFLEPLESTGIYFIYAALYQLVKHFPDTSFDPRLADAFNAEITYMFDDCRDFVQAHYFTSSREDTPFWLANRHDLRLSDSIKEKVERYKAGLPLTTTSFDDSTYYETFDFEFKNFWLNGNYYCIFAGLGMLPDRSLPLLQLRPESIEKAEVMFARIQREAERLRASLPTNYDYLRSLREGEAGLSRSGPTPVSPESR

SEQ ID NO: 85396 - protein, 510 aa, Sphingomonas sp.
  REGION 1..510: note = tr|A0A4R2T2F6|A0A4R2T2F6_9SPHN Tryptophan halogenase; OS = Sphingomonas sp. PP-F2F-A104-K0414 OX=2135661; GN = C8J46_107144 PE=4 SV=1
MIEGRGQHIAILGGGTAGWMTACLVAHRWSDRGVRVTLVESPEIGIVGVGEGSTPQLKHFFDTLGIAEAEWMPACDATYKLGIGFEGWSDRAGYERYFHPFPTALDGHTAPQFFYNARARRTGRDVDAHPDQFLLPARLAAVYCAPQPAENFPFEVSYGYHFDAYKVGAFLAGHATETLGVVHLQRRIASVERALTGEITALIDTDGGRIAGDVFVDASGFRNTIFSALDVPFVSYADTLFNDRAVVMPTAYTTGAPIPSQTRATALSAGWAWHIPLTSRNGNGYVYSSRHLVEAQAEAELRAHIGNQAGEARHLRMRVGRVRDSWSHNALAVGLAQGFLEPLEATALHLVIATVEAFLGAIDEGGATDAVRAAFNTRIAARYDGVRDYIVAHYRLNQRHADPTGYWAEARGVEALSDDLKMLMSTWFTGADMVAAIDRAGLGRYYSAISWHCLFAGYGTFPDAARLVPPGADIDSIDLPKIDDFLTRCASNFGSHASRLRAAADHKDHV

SEQ ID NO: 85397 - protein, 507 aa, unidentified
  source 1..507: note = Gammaproteobacteria bacterium
  REGION 1..507: note = tr|A0A1J5N217|A0A1J5N217_9GAMM Uncharacterized protein OS=Gammaproteobacteria bacterium MedPE OX=1860093; GN = BM565_07215 PE=4 SV=1
MPQKAIKTLVIVGGGSAGWMSASFLNHIFNLKEKQIDIKLIESSEVETIGVGEATIHSIRFFLSTIGISEREFMQKTQAIFKHGILFKDWSGQEKDEYYHPFEHPKVNDGIDVVRHWVNLNSNTEKSSRFDFSVSAQSLCASQNKSPKSQGNKDFEGYFPYGYHLDAAKFAHFLRDFSLTKGVKRIEGHVQEVILGTDGDIQRLILKNGLQIDGDFFIDCTGFSSVLMKAMGNKEWVDYSDSLLCDRAVTCQLEHNKENQEHRPYTIATAQKSGWIWDIDLQSRRGMGYVYSSSFCSTEQAEIDLSVYANTAREKLSFKHLQMKTGRMEKIWFKNCLAIGLSAGFIEPLESTGIYFIDMGIRFFGDYITSGNVNTLLIDKYNTVMGQLMDQSKDFISLHYTLSKRNDSQFWRAYQHDVPISETLSANLTLWKHKIPTAIDFSAQITQFTSANYTYILYGMKYFPEPAVTSNLFTSEDRSMKNIEYVKSRSNQMNNKLPTMSQFLKNI

SEQ ID NO: 85398 - protein, 524 aa, Streptomyces sp.
  REGION 1..524: note = tr|A0A2C8XJ83|A0A2C8XJ83_9ACTN Tryptophan halogenase; OS = Streptomyces sp. OK228 OX=1882786 GN=SAMN05442782_9289; PE = 4 SV=1
MANNVVIVGGGTAGWMTATYLRAAFGDDVGITLVESKNVPTIGVGEATFSTVRHFFSYLGLAEHEWMPECHASYKLAIRFENWRAEGHHFYHPFERPRNVQGFSLADWWLHTRPGEQFDRDTSLLAALCEAMSSPRHLDGAMFTSGFGAADESAKAAEDGRETQFPYAYHFDAALLARFLTRFGTERGVRHVLDDVLDVVLDDHGDISHVVTREHGSLTGDLFIDCTGFRGMLINKALGVPFESFRESLPNDSAVALRVPVNGEKAGMRPCTTATAQDAGWIWTIPLFGRIGTGYVYAGDYCTPEEAERTLREFVGPAADGLAANHIKMRIGRCAQSWVRNCVAIGLSSGFVEPLESTGIFFIHNAVEQLVKHFPGGRDDEHRRRTYNRQVAAVMDGVREFLVLHYYAAARDDNAYWRDAKKRPLPDGLAERIEAWSHRLPDAESVFPRFHGFEPYSYTAMLLGLGGLPVRPPAALSRMDDTAARREFALIRDQAQALAQRLPSQYAYLAHQQNASTGRPASAA

SEQ ID NO: 85399 - protein, 360 aa, unidentified
  source 1..360: note = Sulfopaludibacter sp.
  REGION 1..360: note = tr|A0A2U3LIR6|A0A2U3LIR6_9BACT Tryptophan halogenase; OS = Candidatus Sulfopaludibacter sp. SbA4 OX=2043165; GN = SBA4_470011 PE=4 SV=1
MRYDVAILGGGPAGAAAGLSFKRLRPALRIAIIEASRDNLWRAGETLPPGSREILQSLGCWEAFCGEGFLESFGTRAVWGGLQPYENEFLFSARGHGWRLDRRRFDAMLARCAQAAGVDLFAGTRLVASRRTDAGWHLRLDGGPGEELDTAFVVDATGRAASFAVEQGARRLAGDGLMAAWAVFPRPRTADLCTMVEARPEGWWYSSEIPGGQVVVAWMSDADLIRSHGLHRLGRWFAHLGQSSLTAARVVSADPPGTLRVCATQSQKLSQATGAGWIAAGDAASTFDPLSSQGILKALRSGKLASFAALDCLDGRTQSLDRYQRLVDGEYQSYCETKASFYRQEQRWPQSPFWRRRQEP

SEQ ID NO: 85400 - protein, 447 aa, Streptomyces subrutilus
  REGION 1..447: note = tr|A0A1E5Q285|A0A1E5Q285_9ACTN Tryptophan halogenase; OS = Streptomyces subrutilus OX=36818 GN=BGK67_24695 PE=4; SV = 1
MEKHTADVVVIGGGPAGAVSALVLAQQGHSVVLLEKDEFPRFHIGESLLPYMMGLFDQIGLRKTVEAQGYVPKFGGEFIDPTEKKFFEGVFRADFTKQGDGRHPSAFQVERAKFDKMLTEQAAEAGAQVLFGANVTELLMDGDRMTGVRYQREGRDHEVRSAYVIDASGRAGRIANRFGLRKTLEKLRMVAVFRHYEGLDESHNPGVEGDIQVGAHDDGWVWAIPLSKDAISVGTVMPRDVLRATTQEKAFEEFVARIPRITARLTGTRPTTDLKVETDYCYHSDTVTGPGWLMVGDAGCFGDPMFSGGVLVATTTAFRAAETVGAALADPTAEDHLFEKYSNFFKTGYDTYIRLIHAYYDGELVSVAADAARSTDRDTLEKYLVRLIGGDFWSEHNSVAQEMRRRQEWDTFEPFKRVFGCPVYPELDEADRKERSEARVRRATAGK

SEQ ID NO: 85401 - protein, 507 aa, unidentified
  source 1..507: note = Paucibacter aquatile
  REGION 1..507: note = tr|A0A2N8KVX8|A0A2N8KVX8_9BURK Tryptophan halogenase; OS = Paucibacter aquatile OX=2070761 GN=C1O66_08825 PE=4 SV=1
MSVQTLYSDGARPVRRVVIAGGGTAGWMVAALMGKLMGKLLDIRLVESEEIGTVGVGEATIPALHTYHELLGLNEAEFMAATQATFKLGIKFEGWKAPGEDYIHSFGLTGKDHWSAGFQHFWLKGRERGLAAPYGDYCLELRAAEEQRFAHLPNNGMNYAYHLDATRYARFLRGLAEAHGVRRIEGKIAAVLREQPGEGDLTALQMEDGSRIEGDLFVDCTGFRALLLGQTLGVGYEDWSHWLPCDRAVAVQTASVREAPPYTRSIAHPFGWQWRIPLQHRVGNGLVYSSRELSDADAPDMLRRHVEGELITEPRLLRFQPGQRHEVWHRNCVAMGLASGFIEPLESTSIHLVQRAAIRLMRLFPAGGIREVDVREFNQQTTQDLQHIRDFIILHYHVTERDDSALWRHVRTMAVPETLRHRIELFRETARVFRPLDELFAENSWIQVMMGQGISPQHHHPVADLMGDAELSQFLNNIRSQVSRQLAGLPPHQAYVERLCAPYRAAA

SEQ ID NO: 85402 - protein, 508 aa, unidentified
  source 1..508: note = Novosphingobium sediminis
  REGION 1..508: note = tr|A0A512AMT6|A0A512AMT6_9SPHN Tryptophan halogenase; OS = Novosphingobium sediminis OX=707214 GN=NSE01_28520 PE=4; SV = 1
MAENGAIRSVCIVGGGSAGWLTAGLIAARHGRDLKVTLVESVRRGTIGVGEGTWPTMRNTLRKIGLSETDFMRATHASFKQGAKFARWRTGAADDFYYHPLVLPEGFPDLDLAPYWNADPNQSFSDAVCFQEALCEASLAPKLMTSPDYVGVANYAYHLDAVRLGELLAEHCTGKLGVHHIDDDIIDVRQSETGDVSAVIGERHGAIEADLFVDCTGFASRLLGEALGVPFIDRSDVLFVDRALAVQLPVEEDSPIASHTISTAQRHGWIWDIGLPTRRGIGYVWSSRHARNERIEEELAAYVGPDFARLSPREITIRSGHRAQFWKNNVVAVGLAAGFLEPLEASALVLIELSADYIATAMPANRAAMDFVARRFNTMTRYRWDRIIEFLKLHYVLSERKDSAFWRDNRDPATIPQDLQDQLELWRDSPPGEHDFSSAHEMFPAASYQYVLYGMGFRTRARPGRLANADAAQDAFDRTAALKRKLTATMPTNRELLGRLAQYRFPPL

SEQ ID NO: 85403 - protein, 516 aa, unidentified
  source 1..516: note = Novosphingobium sediminis
  REGION 1..516: note = tr|A0A512AFA7|A0A512AFA7_9SPHN Tryptophan halogenase; OS = Novosphingobium sediminis OX=707214 GN=NSE01_02130 PE=4; SV = 1
MSSTDTSGSASATGPVRIVVAGGGTAGWMTAAAFGHFLDSGFTVTLVESEEIGTVGVGEATIPQIRMFNQALGIDEDAFIRATQATFKLAIEFVGWGAPGERYMHAFGDVGRDVGLCAFHHYWSRARRLGIAGPAGDYAINDVAAHAGRMHRGGPLTSRNIPEMPHAFHFDAGLYAAFLRQFGEARGVSRREGKIQEVRQNPLTGDITSLVLASGEEIAGDLFIDCTGFRGLLIGGTMGSGYVDWTKWLPCDRALAVPSGRVEDFTPYTRATAHDAGWQWRIPLQHRTGNGRVYCSSFISDDQAAESLLAHLDAPALADPRPIRFTTGRRAEAWRGNVIAVGLSSGFLEPLESTSIHLIQSAISRILKFLPGKDQTQAARDEYNRQFTSEMERIRDFIVLHYHVNQRPEPFWQAVRDMALPDSLSERIELFRANGHIFRHGDELFSEVGWFQVMAGQGIVPERSHALAETIDVADLKSYLETLNALYRREVERYLSHAEFIARNCAAPPLKLDAVA

SEQ ID NO: 85404 - protein, 495 aa, unidentified
  source 1..495: note = Gammaproteobacteria bacterium
  REGION 1..495: note = tr|A0A1J5MMU4|A0A1J5MMU4_9GAMM Tryptophan halogenase; OS = Gammaproteobacteria bacterium MedPE OX=1860093; GN = BM565_07105 PE=4 SV=1
MNNSKIKNITIVGGGTAGWISAALLVKVLGKTHNIKLIESQAIGTIGVGEATIPPIIHLNNALGIDEKTFLSATKGTMKLGIEFENWSSENSKYMHAFGGIGKNLPFCDFHHAFLRAKEQGSEYEFGDFSLNYQAAKQHKFDKLPHITGTNLPGIVYAYHFDASLYAKLLSEYSQARGVERIEGKVVDVIQNQQSGNIEQLVLEDGQHIDGDLFIDCSGLRGLLIEQTLNTGYEDWRHWLPCDSAVALPCESPSPIAPYTRSVAKEAGWCWHIPLQHRMGNGMVYSSKFMTDEQALKTLSDSLPGKPLTEPNFIKFRTGRRLKQWNKNVVAIGLSSGFLEPLESTSIHLIQMGIIRLLKCFPHHGIKACEVDEYNRQSTVEIENIRDFIILHYKATKRQDSAFWQQCQRMDIPETLARKIALFKESGKVFREQDDVFTEVAWQQVLLGQEVLPQDTHPMASTLTDEQLTDLMDNLNTLIQRSVESMPQHEAFLNN

SEQ ID NO: 85405 - protein, 502 aa, Sphingomonas sp.
  REGION 1..502: note = tr|A0A4R2TT79|A0A4R2TT79_9SPHN Tryptophan halogenase; OS = Sphingomonas sp. PP-F2F-A104-K0414 OX=2135661; GN = C8J46_105468 PE=4 SV=1
MKRVQRLVILGGGTAGWMTAAALSATFGDLVTISILESDAIGTVGVGEATIPTIHWFNQLIGLDEAAFVAATKASFKLGIEFVDWARPGARYFHPFGRYGVDLGPVPFHQHWLRAKGDGLDRPLSTYSLAAQLAAAGRFAKPVDDPRSILSTLGYAYHFDASLYARHLRQLAEKRGVVRHEGLLRDIERDPDTGFVTALTSDRGERLKGDLFIDCSGFRALLIGETMGVQFEDWSHWLPCDRAVAVPCARIAATTPFTRSTLLPAGWQWRIPLQHRTGNGYVYASSFVSDDEAVATLLSNLDGEPLADPRMLRFTAGFRREAWRGNVVAIGLASGFLEPLESTSIHLIQSGIAKLITLFPDADCDPALARQFNTLFARDMDGIRDFLILHYHATQGHDAPLWQHTRHMTPPPTLVDKMAQYTRAGRLMLSPDELFREASWLAVLEGQGVGALSHAPLADTLDAGINRRQLDQIETVIARAAPTLPLHDAAIAALVSPRVAAR

SEQ ID NO: 85406 - protein, 505 aa, Xanthomonas sp.
  REGION 1..505: note = tr|A0A0Q5J582|A0A0Q5J582_9XANT Tryptophan halogenase; OS = Xanthomonas sp. Leaf148 OX=1736275 GN=ASF90_10050 PE=4; SV = 1
MNQARIRKVVIAGGGTAGWIAACALSHQFRDLLDITLVESDQIATVGVGESTVPPIRTFHRFLQIDEQEFLRAVAGTFKLSISFEHWRRQGERYIHPFGITGQSTLVCAFHHLWLESQRRGMPGAFGDYCLETVASRVDRFALPREPAVNYAYHLDAALYARFLRTRSEAHGVTRVEGKIQQVTLQPDSGDVAALVLEDGQVIEGDLFIDCTGFRGLLIEQTLHTGYEDWSHWLPCDRAVAVQTEAVGPPVPYTRAIAHEAGWRWHIPLQHRVGNGLVFSSQHMSDDEAHAKLLRDTAATPVKEPWLVPFRTGRRLKAWNKNVVSLGLASGFIEPLESTSIHLTIAAVVRLITLFPADGIAPSQVDVFNDISRTEMEHVRDFVTLHYHATQRDEPLWQQCRDMELPDSLRLRLRAWRERAHAWQGTDELFRVDSWTHVLLGQGVVPQQHHPLAAALSDTDLRRLLDGIAQPIQRVVEQMPSQQDFISAYCKADEQLWGGRRRVAM

SEQ ID NO: 85407 - protein, 517 aa, Altererythrobacter sp.
  REGION 1..517: note = tr|A0A0T2QD80|A0A0T2QD80_9SPHN Tryptophan halogenase; OS = Altererythrobacter sp. Root672 OX=1736584; GN = ASD76_00980 PE=4 SV=1
MSGSMAERSILIVGGGTAGWLTAAYLARFFDVARNPRIRITVLESPEIGIIGVGEGTFPTIRNTLRYIGIDESRFVRATSATFKQGIRFDNWVQTPAEGREEHFLHPFEAPFHAEGYSLVSYWLLQDERTRPPFAEAMSIQNRVAEAGRAPKRADEGDFAGPLNYAYHFDAARVAEVLSDHARALGVHHLQGLMTGVELDPVTGAIDHVVTREHGDLKADLYVDCSGFRAELIDGALGVPFKEVGDVLFTDRALACKLPYDEEGSPLRSYTVASAHQAGWIWDIGLSGAHGVGCVYSSAHMSDDEAAQALERYTGGRSLDVTPRKIPFRAGYRTRPWEKNCVAVGLAGGFLEPLESTGVVMIEAAAAMIAELFPHYGPADGPARRFNELMTARYESIIKFLKLHYCLSRRVEPFWRDNAAASSIPDQLQDLLEQWSYRPPSRFDFVLDHESFAFFNYQYILYGMGFRTDLSPVRDEFPHTDEAQKIFERIRHFGDQAARDLPAHRALIERMAAAEGS

SEQ ID NO: 85408 - protein, 518 aa, unidentified
  source 1..518: note = Burkholderiales bacterium
  REGION 1..518: note = tr|A0A257CVW5|A0A257CVW5_9BURK Tryptophan halogenase; OS = Burkholderiales bacterium PBB3 OX=2015565; GN = CFE43_05095 PE=4 SV=1
MTSKRRILIVGGGTAGWLTAAHLAKFLGLSERSHLEVTVLESPDIGVIGVGEGTFPTIRSTLQFLGIDEKRFIRETSATFKQGIRFVDWASTPVGDQHHQYVHPFEAPFYTEGTSLVPYWLLQDPAKRPPFAQAVTIQDRVVEGRRAPKRSSDAAYTAPLNYAYHFDAIKFAKLLAERARELGVQHVEATLSSVSLDATGAIDHIDTLQHGSFSADLYIDCTGFRAELIGQAMGTAFKSVRDQLFTDRALTCKLPLDHARDQPGAYEAHMESCTISTAHEAGWTWDIGLNGARGIGCVYSSSHISDDRATEILRAYIGPGHEDVVPRRIAFAAGYREQQWVKNCVAVGLSAGFLEPLESTGLVLIEAAAGMIAEMLPHSGPMQAPARRFNQLMTARFENIVNFLKLHYCLSQRQEPFWRDNVHPASIPGPLAEYLEQWKLRPPGRFDFELDTETFAFFNYQYILYGMGFKTDLSAGRDDFPQVDEANKLFAKIQRFGDRALGDLPSHRALIQQINAQA

SEQ ID NO: 85409 - protein, 496 aa, Sphingomonas sp.
  REGION 1..496: note = tr|A0A3M0FY60|A0A3M0FY60_9SPHN Tryptophan halogenase; OS = Sphingomonas sp. PP-CE-3A-406 OX=2135659 GN=C8J44_1418; PE = 4 SV=1
MTSPTAPVPLKTIVIVGGGTAGWIAAAMLARFVPRTTKISLVESDAIGTVGVGEATIPQIRLLTAALGIDENAMLAATHGTFKLGIEFVDWTGRGSRYMHAFGAVGRGLGVVPFHHHWLRAQASGTAAPLGDYIASARAAADARFDRHPDLAYAYHFDATLLARWLRGLAEASGVDRIEGRIVTAQRDGETGDLTGVTLDDGRAVEGDFFLDCSGFRSLLLGEALGVAFEDWSHWLPCDRAMAVACEVTTPLLPYTRATARPVGWQWRIPLQHRTGNGLVYAAAHLSDDEAAARLLANLDGPAIGDPRPLRFATGKRATFWERNVVALGLASGFMEPLESTSIHMVQSAVARLLSLFPSAGDNAAARAAYNRQTHIEYDTVRDFLILHYHANRRPEPFWQRCRDMALPDRLAEKIAQFRAAAILTPDVADLFTEPAWLQVMIGQGINPVTWSPLAEALSPDQLAGFLADIRDRHAATARALPAHADTVARHCMAKR

SEQ ID NO: 85410 - protein, 504 aa, unidentified
  source 1..504: note = Niveispirillum cyanobacteriorum
  REGION 1..504: note = tr|A0A2K9NL75|A0A2K9NL75_9PROT Tryptophan halogenase; OS = Niveispirillum cyanobacteriorum OX=1612173; GN = C0V82_25825 PE=4 SV=1
MTRSPDPIRQIVIVGGGTAGWMAAAALSRLSANGATRITLVESDEIGTVGVGEATIPPIRQFNALLGLDENEFVSQTQGSMKLGIAFEGWTTARPRYLHPFGSFGFDMEAVKFHQFWLKLHAQGLASGIDDYNLCATMANREKFARPVADPSSVLSQITYAYHFDAGLYAAYLRRYAEARGVKRVEGKVASVPLRATDGFIEAVVLADGRRLEGDLFIDCSGFRGLLIEGALNSGYEDWTHWLPCDRALAVPSATIGPPKPYTRAIARDGGWQWRIPLQHRTGNGYVYCSQFVTDEQAADTLLSNLEGPALADPRPLRFTTGRRRKMWNRNCVALGLASGFLEPLESTSIHLIQAGISKLLALFPDRSFNPANEDAYNRLSAMQFEQVRDFIILHYVANDRPEPFWQRAAAMDIPDSLRQKIDLFRACGRLFRFEDELFSDNSWVAVLLGQGVIPERWDPLVDTIDPGLVRHNLDRLRAVFARAADAMPGHGDFLARMIKGHGT

SEQ ID NO: 85411 - protein, 97 aa, unidentified
  source 1..97: note = Alphaproteobacteria bacterium
  REGION 1..97: note = tr|A0A4Q3XNY0|A0A4Q3XNY0_9PROT Tryptophan halogenase (Fragment) OS=Alphaproteobacteria bacterium OX=1913988; GN = EON59_15915 PE=4 SV=1
MPSEGDQNQPVRIVILGGGTAGWMCAAALVRHLDSRDYTVTLIESDEIGTVGVGEATLPHIKIFNDTLGIDEARFMAETKATFKLGIEFVGWDQPGD

SEQ ID NO: 85412 - protein, 499 aa, unidentified
  source 1..499: note = Alphaproteobacteria bacterium
  REGION 1..499: note = tr|A0A3M1Q1Z6|A0A3M1Q1Z6_9PROT Tryptophan 7-halogenase OS=Alphaproteobacteria bacterium OX=1913988; GN = D6740_02840 PE=4 SV=1
MRVLVLGGGTAGWMAAAVLARGLGPLVHVSLLESPAIGTVGVGEATIPQIRHLNRFLGITDAELLAASEGTIKLGIRFIGWGRPGESYIHAFSDIGVALGQVGFHHYWLRARAAAPDRAGSFWDYSPNALAAAAGRFLPQEEPLAPGLTGLRWAYHFDAGLYAGLLRRKAEEAGVRHLTGLMQAAERDPHDGRVVALRLDDGRRLEAEFFIDCSGFRSLLLGQALAVPFVDWSQWLACDTALAVGSRRRGPPAAHTEAHAHAAGWRWRIPLRHRIGNGYVYCSSEMDEEAARRALLAALDGEPLGEPRLIRFKAGRRQRVWEANVVALGLAAGFLEPLESTSIHLVQSGLQRLLEMWPRGKDEAALRAEYNRRTAEEWEAIRDFLILHYHRNDRSEPFWRQLAGMTLPEGLAERIALFAQSARIYPDPLELFTEIAWLQVLLGQGVQPRGWHPAADLVPMERLLGYLGQLRERLRRAVRRMPDHEQALARIMDAHAAAD

SEQ ID NO: 85413 - protein, 521 aa, unidentified
  source 1..521: note = Alphaproteobacteria bacterium
  REGION 1..521: note = tr|A0A3M1GH68|A0A3M1GH68_9PROT Tryptophan 7-halogenase OS=Alphaproteobacteria bacterium OX=1913988; GN = D6782_00105 PE=4 SV=1
MFSMSKAVRSVVIVGGGSAGWITAAVIAAHHRAHLPGALHVTLIESPNVPTVGVGEGTWPTMRSTLIKLGISETEFFRQCDASFKQGAKFARWVDGGDDDYYYHPLMLPQGFPKIDLAPYWHRFTEGEKKPPSFSQAVCFQEAVCERGLAPKMITTAEFGHVANYAYHLDTGKFAPFLQRHATEKLGVRHILDDVVEVVAAENGDIACLKTKNSGDLAGDLFVDCTGFASLLLGKHYGVPFIDCSDVLFIDTALAVHVPYAREDDPVIPYTVSTGQSAGWIWDIGLPTRRGVGYVYSSRYSSEDEAVRALRAYIGPRAEKLSIRKIPIRSGHRQIFWKQNCVAVGLSAGFLEPLEASALVLIELSADMLAKQLPACREVMDIAAKRFNSVFNYRWDRIIDFLKLHYMLSRREDSRFWIDNRDPASIPESLREQLELWRYQSPGDHDFTSNNEVFPAASYQYVLYGMGFRTDFRYRRDMLADEAKAKQQFAQNAQMKRKAVESLPTNRALIDKIHRHGLQPI

SEQ ID NO: 85414 - protein, 528 aa, Sphingobium sp.
  REGION 1..528: note = tr|A0A2M8QL67|A0A2M8QL67_9SPHN Tryptophan halogenase; OS = Sphingobium sp. LB126 OX=1983755 GN=CAF53_19120 PE=4; SV = 1
MSVDIPSLFMGSFFMVHPVRNIVIVGGGTAGWLTAGVIAARHGSRLGNDFTVTLVESPNTPIIGVGEGTWPTLRTTLSRMGISETDLFRECDAAFKQGARFARWTTGERDDGYYHPLMLPQNFGQVNLAPHWLAGAGDESFCDSVCSQGRICDDGLAPKTIATAEYDALANYAYHLDAGKFAPFLQRHCCEKLGVRHVLADVEQVLMKEDGDIRAIRTTQAGEIEGDLFVDCTGFKALLIEGAMKVPFKDCNDILFCDTALAMQVPYERPNSPMASHTISTAQSAGWIWDIGLPTRRGIGHVYSSNHISDEEAERELRAYIGPLAEGLSARKIAIRSGHRETFWKGNCVAVGLAAGFLEPLEASAIVLIELSAKIIAEQMPACREVMDIIASRFNATTHYRWGRIIDFLKLHYALTKRTDSDFWRDNVRDETMPDRLKELMLLWRYQSPWFLDEFDRVEEVFPAASYQYVLYGMGFRTEVDRAALARDTHLADRARRENRNMTAKLRAGLPRHRDLIDKIVTHGLQPV

SEQ ID NO: 85415 - protein, 142 aa, unidentified
  source 1..142: note = Alphaproteobacteria bacterium
  REGION 1..142: note = tr|A0A4Q3XT95|A0A4Q3XT95_9PROT Tryptophan halogenase (Fragment) OS=Alphaproteobacteria bacterium OX=1913988; GN = EON59_13680 PE=4 SV=1
LFNRNYIDPNLVDAFNREMEGEYVNIKDFLIAHYKVTEREDTPFWAYCKHMDIPESLKTRLEVFKARGESMVRQYELFKETSWFAVLAGQGMMPDAYHPVADVISDEELRQRLSRIRTAIQDRVNGMPSQERYLKDRGLTAA

SEQ ID NO: 85416 - protein, 491 aa, Amycolatopsis orientalis
  REGION 1..491: note = tr|A0A193C664|A0A193C664_AMYOR Tryptophan halogenase; OS = Amycolatopsis orientalis OX=31958 GN=SD37_33695 PE=4; SV = 1
MSVEDFDVVVAGGGPGGSTVATLVAMQGHRVLLLEKEVFPRYQIGESLLPATVHGVCRMLGVADELAGAGFPIKRGGTFRWGARPEPWTFHFGISAKMAGSTSHAYQVERARFDEILLNNAKRKGVVVREGCSVHDVVEDGERVTGAKYTDPDGNEREVSARFVIDASGNKSRLYSKVGGSRNYSEFFRSLALFGYFEGGKRLPEPVSGNILSVAFDNGWFWYIPLSDTLTSVGAVVRREDADKIQGDREKALNALIAECPLISEYLSNATRVTTGKYGELRVRKDYSYQQETYWRPGMVLVGDAACFVDPVFSSGVHLATYSALLAARSINSVLAGDLDEKTALNEFEARYRREYGVFYEFLVSFYQMNVNEESYFWQAKKVTQNQSTDIESFVELIGGVSSGETALTAADRIAARSAEFAAAVDEMAGGDGDNMVPMFKSTVVKQAMQEAGQVQMKALLGEDAEPELPLFPGGLVTSPDGMKWLPHHPA

SEQ ID NO: 85417 - protein, 528 aa, Sphingobium japonicum
  REGION 1..528: note = tr|D4Z7X2|D4Z7X2_SPHJU Putative tryptophan halogenase OS=Sphingobium japonicum (strain DSM 16413 / CCM 7287 / MTCC 6362 / UT26 / NBRC 101211 / UT26S); OX = 452662 GN=SJ A_C2-02280 PE=4 SV=1
MSVDIPSLFMGNFDMIHPVRNIVIVGGGTAGWLTAGVIAARHRSRIGNGFTVTLVESPNTPIIGVGEGTWPTLRTTLSRMGISETDLFRECDAAFKQGARFARWTTGTPDDGYYHPLMLPQNFGQVNLAPHWLAGEGDESFCDSVCSQGRICDDGLAPKTIATAEYDALANYAYHLDAGKFAPFLQRHCTEKLGVRHVLADVEQVLMKEDGDIRAIRTTQAGEIEGDLFVDCTGFKALLIEGAMKVPFRDCNDVLFCDTALAMQVPYDRPDSPMASHTISTAQSAGWIWDIGLPTRRGIGHVYSSNHISDEEAERELRAYIGPPAEGLSARKIAIRSGHRETFWKGNCVAVGLAAGFLEPLEASAIVLIELSAKIIAEQMPACREVMDIVASRFNATTHYRWGRIIDFLKLHYVLTKRTDSDFWRDNVREETIPDRLQELMLLWRYQSPWFLDEFDRVEEVFPAASYQYVLYGMGFRTEVDRPALARDAHLADRARRENAAMTAKLRAGLPRHRDLIDKIVTHGLQPV

SEQ ID NO: 85418 - protein, 376 aa, unidentified
  source 1..376: note = Alphaproteobacteria bacterium
  REGION 1..376: note = tr|A0A4Q3XPA5|A0A4Q3XPA5_9PROT Tryptophan 7-halogenase (Fragment) OS=Alphaproteobacteria bacterium; OX = 1913988 GN=EON59_16785 PE=4 SV=1
MTVPATHPQRIRKVVIVGGGTAGWMTAAALSKVLGPDYCDIDLIESEEIGTVGVGEATIPQIRLFNDLLGLDENDFIRATQGTFKLGIEFVDWGQIGDRYIHPFGKYGIDMEGVSFHAFFLKGRAQGASHDLSDFSLEASAAREGRFMRSIKAGNSPLSNVRYAFHFDASLYAAYLRKFAEARGVVRREGKVVDVALRPQNGFVDSVRLDNGEVVEADLFIDCSGFRGLLIEQALKTGYEDWSHWLPCDRALAVPCARVTSPTPFTRSTARSAGWQWRIPLQHRTGNGYVYSSAHLSEEEATRTLMSNLDGDALADPRALRFVTGRRKRFWNRNVVALGLASGFMEPLESTSIHLVQSGIAKLLSMFPDRSFAPVE

SEQ ID NO: 85419 - protein, 511 aa, Altererythrobacter sp.
  REGION 1..511: note = tr|A0A0T2Q8P2|A0A0T2Q8P2_9SPHN Tryptophan halogenase; OS = Altererythrobacter sp. Root672 OX=1736584; GN = ASD76_15670 PE=4 SV=1
MNADRIRKVVIVGGGTAGWMAAAAISKIMGNLPDFSIDLVESEAIGTVGVGEATIPQICLFNAMLGLDEMEFMRETHATYKLGIEFVDWTRIGHKYIHPFGFYGLDMMGVEFHHHWLKGRLAGDTSELDEYSIAAMAALSNKYLPPAPDQPKSPLSKLGYAFQFDAGRYARYLRGRSERQGVNRIEGRIIEVEQDPESGFVTALKLESGARVEGELFLDCSGFRSLLLGQTLGVPFVDWSKWLPNDRAVAIPCTLGPNRKPITRATARSCGWQWNIPLQHRVGNGHVYSSAHISEDEATAVLLANLEGEPLAAPNPLRFLAGHRARVWEKNVIALGLAGGFLEPLESTSIHLVQSGIARLMTLFPTREFKPREIERYNQMTQQEYVDIRDFLVLHYSATERDDSEYWNYCRNIEPPEGLAEKLAMFRSSGRVFREHNELFTETSWEAVLVGQGIVADGYHPAADLLSDEETLKRLASIRGTVARTVEQMPTQEEFLAANGGAIDPALRLTA

SEQ ID NO: 85420 - protein, 526 aa, unidentified
  source 1..526: note = Rhodobacteraceae bacterium
  REGION 1..526: note = tr|A0A257EWB8|A0A257EWB8_9RHOB Uncharacterized protein OS=Rhodobacteraceae bacterium PARR1 OX=2015578; GN = CFE34_14165 PE=4 SV=1
MTFWPRMATGCRNGRACHSARQAKTMWPRRICVVGGGTAGWLAAMMLGDSARRGGHPCEVTVIESSKIGTIGVGEGTTAVFRQMLQHFGLDEMEFLAETGATIKFGIRHRDWRRLGHSYDGPIDDPHRVTGFEVNALDLYQVSRGESVGQVHLFQHLLSRNKSPFAVVDGRHIAVGPFHHAYHFDQALAGKWLRSKAKAIATIDDQVLRVERLAESGDITALHLEGGARVEADLFVDCTGFRRALIGPMGGTWVSYRDMLPVNRAIPFWLDIPKGEEIDPCTLAWAQGSGWMWKIPTQSRYGCGYVFSDAHITPDQAKDEIERVLGRPIHVRNDIRIDAGRLDRQWIGNCVALGLSSSFLEPLEATSIHGTVVQLMLLASVLPNPDDRARLAFNAASARQVDDFRDFIRLHYVSERRDTPFWRDVAGNLPPHLADRLAAWGGRVPGAADFAPFPMGLPHTDHHLHVPVLDGLGLLDPAKAKDWLAAHPKLRAQARAEAAKLTGEYKRAAGRAMGHRAFLDGLGVTA

SEQ ID NO: 85421 - protein, 501 aa, unidentified
  source 1..501: note = Niveispirillum cyanobacteriorum
  REGION 1..501: note = tr|A0A2K9NL78|A0A2K9NL78_9PROT Tryptophan halogenase; OS = Niveispirillum cyanobacteriorum OX=1612173; GN = C0V82_25830 PE=4 SV=1
MSSDRRIRRITIVGGGTAGWMSAATFARILGPDYAEITLVESDEIGIVGVGEATIPQMATFNRMLGIDEDEFLRATKGSFKLGIQFVDWGRKGHTYFHPFGHIGLHMEGVSFHAYWLRLKQAGLVDRIEDWSLQAVASARGKFMRAINAGRSPLSEIAYAFHFDAGLYARYLRGFAEARGVVRREGKIVRVHQHPETGFVQSVELADGTKVEGDLFIDCSGFRGLLIEGTLKAGYADWSHHLPCNRAVAVPCEGTEAMTPYTRSTARAAGWQWRIPLQHRIGNGHVFCSEYMSDDEAVSVLLSNLDGKPLADPRFVPFQTGHRRKMWDKNVVAIGLSSGFLEPLESTSIWLIQSGLSRLMAMFPDLDFDPVTRDRYNRILTTEYAEIRDFLILHYKATERDDSPFWNYCRTMPVPERLQEKMDVFLAHGRTFRENEELFNDTSWFAVMLGQLMVPRGYDPVANILSLEETKARLAHIKDAISNSADYMPTHREFIRQHCGA

SEQ ID NO: 85422 - protein, 505 aa, unidentified
  source 1..505: note = Xanthomonadaceae bacterium
  REGION 1..505: note = tr|A0A1E4L1C8|A0A1E4L1C8_9GAMM Tryptophan halogenase; OS = Xanthomonadaceae bacterium SCN 69-123 OX=1660170; GN = ABS96_00590 PE=4 SV=1
MQDQRIREVVIVGGGTAGWMAAAALAKVLGRSYSLRLVESDDIGTVGVGEATIPMIKLFNAALELDEADFIRRTQGSFKLGIEFVNWGQVGDSYIHGFGKIGQDLGIVPFYHYWLKLHQQGRAGHLDDYSINTAAARANKFIPARTDRPNSPLADIAYAYHFDAGLYARYLREYAEARGVRRTEGKVASVQQHPESGFIESITMESGERIPGQLFVDCSGFRGILIQQALKTGYIDWSHWLPCNRAVAVPCETRQAITPYTRSTARTAGWQWRIPLQHRVGNGHVFSSDFISEDEATSMLMANLEGKPLAEPRVLKFVTGKRRKFWNKNVVAVGLASGFMEPLESTSIHLIQSAIARLTAFFPHAGFDQTDIDEFNAHSHWEFDKIRDFLILHYHATERSDTPFWNYVRTMDIPAELRAKMELFRSNGRVFRDGHELFAEPSWVQVMHGQRMQPRGYHALVDAQDDEAVQKHVETVRDVIAACVQAMPTHEQFIDRHCAARPKAA

SEQ ID NO: 85423 - protein, 516 aa, unidentified
  source 1..516: note = Alphaproteobacteria bacterium
  REGION 1..516: note = tr|A0A3M1GJE0|A0A3M1GJE0_9PROT Tryptophan 7-halogenase OS=Alphaproteobacteria bacterium OX=1913988; GN = D6782_01235 PE=4 SV=1
MATPLRSVVIVGGGTAGWMVACRLAAKHRGKGENGLQVVLIESPNIATVGVGEGTWPTMRASLRKIGLSETVFLRECDAAFKQGGKFARWTTGADDDFYYHPFGPPVGHGKITLAPYWAKMLAPRGIRFAEAVDMQHHICEKGLAPKTMASAEYEHVANYAYHLDAGKFASLLQRHAVEALGVRHIRDDVTAVRLGDDGAVAALETAASGVLAGDLYVDCSGFSALVLGKTLGVPFIDRNDVLFADRAMVAQMPHATPDAPLACQTNATAHQAGWTWDIALPTRRGIGHVYSSAHMTDEEAERGLRAYLGPEGKDLPLRTIAFRSGHRQRFWEKNCVAVGLSAGFLEPLEASALLLVEMSADMIADQLPACLEVMPAIAAQFNRLFAYRWDRIIDFLKLHYMLSKREDHDFWIDNRRPESIPDGLAERLSVWRYHPPSDYDFTGNNEVFSWASYHYVMYGMDFPIDYRMIDRSLHEGKLAQRFFAANARATRQALADLPMHRDLLCRLERHAFQPI

SEQ ID NO: 85424 - protein, 533 aa, Xanthomonas phaseoli
  REGION 1..533: note = tr|A0A1V9GS87|A0A1V9GS87_9XANT Tryptophan halogenase; OS = Xanthomonas phaseoli pv. syngonii LMG 9055 OX=1437878; GN = IA54_013350 PE=4 SV=1
MGMWPVERGQLAPFAYSSAVLAQECIGMIPAPLRNIVIVGGGTAGWMAAAAFARVLGPTFKVQLIESEQLGTVGVGEATVPHIKAFNNLLGINEAEFVRQTQGSFKLGIEFVDWQRPGSTYMHGFGSQIGHPLGLLPFHQYWIKQHARGKAQPLGAYTLNTVAAARGKFMTSVGDVPANSPLANIAYAYHFDATQYAHFLRRYSQQRGVTRIEGLVEQVQLHPESGHVQSLQLASGQTVHGDLFIDCSGFGGLLIEQALHTGYHDFTHWLPCDRALAVPCEKVGPPTPYTRSTARAAGWQWRIPLQHRTGNGYVYCSAHISDDEAAATLLANLDGKPLADPRPLRFTTGRRKQCWNRNVVALGLASGFLEPLESTSIHLIQSGISKLLELFPREGISPVLVQRYNDRLAFEFDRIRDFLLLHYHATERDDSAFWRHCRQMPITPELQATLDLFRDSGRFYRNAEEMFAEISWVQVLVGQGVLPQGYHPLVDQVPDRDAEGFLTSVAQTISHCVDVMPSHQQFIDRYCKAAALP

SEQ ID NO: 85425 - protein, 516 aa, Streptomyces sp.
  REGION 1..516: note = tr|A0A2Z4IY92|A0A2Z4IY92_9ACTN Tryptophan 7-halogenase OS=Streptomyces sp. ZFG47 OX=2184053; GN = DN051_13765 PE=4 SV=1
MVDKIVIVGGGTSGWMSASYLKAAFGERISVTVVESDRVPTIGVGEATFSTVRHFFEYLGLKETDWMPACNATYKLGIRFQNWSGVGEHFYHPFERLRVVDGFPLTDWWLKQRPSERFDADNFVMAALGDNLRSPRFLDGTLFERGNSDLGPGGAAFRSTLTEQDTQFPYAYHFDAALLAKYLTEYGVSRGVRHVVDDVVDVKLDDRGWISAVATAEHGDLEGDLFVDCTGFKGLLLNKALEEPFVSYQDTLPNNRAVALRVPVDTAERGIPPYTRATAMEAGWIWTIPLFDRIGTGYVYADEYCSPEEAERTLREFVGPGAEGLEANHIRMRIGRSRNSWTKNCVAVGLSSGFVEPLESTGIFFIQHGIEQLVKHFPQQDWSQRLRDSYNRAVNNCMDGVREFLVLHYRGAARNDNQYWQDAKTRKVPDALQGRLEQWQNKLPDAENIFPHYHGFEAYSYVAMLMGLKGIPLRAAGALDLMDGTAAAEEFERVRATAKDLLRTLPSQHEYLAQLH

SEQ ID NO: 85426 - protein, 551 aa, Streptomyces sp.
  REGION 1..551: note = tr|A0A3N6HDP4|A0A3N6HDP4_9ACTN Tryptophan halogenase; OS = Streptomyces sp. ADI97-07 OX=1522762 GN=EES45_03535; PE = 4 SV=1
MKNTMGRKEKYDVAILGSGMAGGMLGAVLARNGVKVLLLDAGTHPRFAVGESTIPYTSGMTRLVADRYQVPELRALSSFKGIRDKVSRNCGQKQNFGFVYHREGRSQNAQEINQLVVPSVLRTETHLFRQDIDAYLFHVAVKYGAHPRLNTRIVDIETDPDTGAVLRTDGGEEFRASYVVDGSGFRSPLAEKFSLRETPTRARTHSRCLFTHMTGVEAFDKSPAARAHDQPNPWHHGTLHHVFDGGWLWVIPFDNHADSLNPLCSVGLTLDPRVFPKGDQTPQQEFDDFLQRFPEIAHQFRGARSVRPWVSTGRLQYSAKQVVGERFCLTSHAAGFIDALYSRGLTNTLELVNSLGWRIIQASKDGDWSMERFGYLEELQQGLFDFHDDIVYSSFVGFGDYELWNAVNRTWMLGTMLGNVMLEDAYYRFERTGDDAVFRELETHGHPGSPLPVSSGFNEMGRITRELCREVEAGTERPGDAAQKILTYIRDADFIAPSFKFGERDTRCFAMSPAKMAMNARWCRNDAPPEIGKRMINASKGLVRMRLRAGR

SEQ ID NO: 85427 - protein, 521 aa, Xanthomonas phaseoli
  REGION 1..521: note = tr|A0A1V9GRT5|A0A1V9GRT5_9XANT Tryptophan halogenase; OS = Xanthomonas phaseoli pv. syngonii LMG 9055 OX=1437878; GN = IA54_013960 PE=4 SV=1
MPDTTPSDPQQRPVRRVVIAGGGTAGWMAAAALSKLLGRHLQITLVESDEIGTVGVGEATIPSLVTFHRLLEIDEAVFMAATQATIKLGIAFEHWRDVDQHYIHSFGHAGTDHWSAGFQHFWLKGRQRGVARDFGDYCLELRAAQEGRFAHLPNGGMNYAYHLDAGLYARFLRRFSEGFGVQRIEGRIGQVETDPESGFLTALTLHNGARVEGDLFIDCTGFAGLLIGKTLGVGSDDWSRWLFADSALAVQTESVGPPVTYTRSRADQAGWMWRIPLQHRVGNGIVYSSRYMDQDGARAVLERNLTGRALTEPRPLRFTPNQRHRVWEKNCVALGLASGFLEPLESTNIHLIQRGIIRLLQTFPQVINAVDIAEYNRQAAQEITHIRDFVILHYHATDRRDTPFWRDCAAMDIPDSLRHRVELFRQSGRVFHQANELFAENSWVQVMLGQGIVPQQHHPVADLMGDAELGRFLETIRTRVEAALVRLPAHADFLQRYCPAPPLPEPAARVPAPQVMATPAG

SEQ ID NO: 85428 - protein, 485 aa, Sphingopyxis terrae
  REGION 1..485: note = tr|A0A142VVK5|A0A142VVK5_9SPHN Tryptophan halogenase; OS = Sphingopyxis terrae subsp. terrae NBRC 15098 OX=1219058; GN = AOA14_04315 PE=4 SV=1
MAAACLRRFLPAGWSVSLVESDAIGAVGVGEATIPQIRLFNDALGIDEDEFLAATQGTIKLGIEFNGWTRPGHRYMHAFGAVGRGLGLLEFHHYWLRARAAGVAETLDHYSLNERAAYARRMQRGAPRTSPHLLEMPYAFHFDAALYAAFLRRRAEVSGVERIEGKVVDVRLNGETGDVTGVACDDGRSVEGDFFIDCSGFRGLLIEDALETGYEDWSHWLLNNRAVAVPCAHGATPQLPWTGATTRDAGWQWRIPLQHRIGNGYVYSSDHVTDDEAVATLLANLDGPAQAEPNRLRFVSGKRRRMWNRNVVALGLASGFMEPLESTSIHLVQAGISRLLKMLPSGAADPAVAAEFNRQSDFEWERIRDFIILHFKATERRDTAYWRDRAEMPVPDTLAAKIELFRAQGLIFREHEELFTESGWLQVLVGQGIAPRAWHPLADGIGADDLARYMAGVAAMVEAEVAQMASYDDFLAATSRAAVAA

SEQ ID NO: 85429 - protein, 516 aa, unidentified
  source 1..516: note = Niveispirillum cyanobacteriorum
  REGION 1..516: note = tr|A0A2K9NFL5|A0A2K9NFL5_9PROT Tryptophan halogenase; OS = Niveispirillum cyanobacteriorum OX=1612173; GN = C0V82_15915 PE=4 SV=1
MRVQAAKRLRVVIVGGGTAGWMMASGLAKLLPADAYDLTLIESDEIGTVGVGEATLPHIKLFNDRLGIDEAEFMRATGATIKLGIEFVGWNQPTDRYIHPFGVFGEPWAGVDFQHHWARARLSGIDAGSLQDYSFAVALCRAGLFDHPVVDTQSIRSSFSYAYHFDAGLYAEFLRTWSNARGVTRVEGRILDVARDGESGHVTRLTLASGDGIEGDFFVDCSGFRSLLVGGAMQVPWCDWSHWLPCDRALAVPSGSVTPLTPYTRATARKAGWTWRIPLQHRIGNGYVFSSRWCGEEEARETLLSALDGPGLAEPRLLRFAAGRRARAWEGNCVAAGLSSGFLEPLESTSIFLIQAAMFDLVGLMPRPGGGIDPRLSTEFNRLFEIHYDRVRDFLILHYMANSRHGEPLWDHVRSMEMPDSLMHKLDLFRESAAAPDYKLGLFSRDSWLSVFEGQGVMPGAYARLADHLPLPELERRLSDLRGRIRDGLSGMPTHADFIAGHCAAPDRAGSQGNAA

SEQ ID NO: 85430 - protein, 441 aa, Amycolatopsis orientalis
  REGION 1..441: note = tr|A0A193BV42|A0A193BV42_AMYOR Tryptophan halogenase; OS = Amycolatopsis orientalis OX=31958 GN=SD37_10910 PE=4; SV = 1
MADKAFDVIVIGGGPAGSVCAAALADHGHSVAVLERQEFPRFHIGESMLPYMIGLLERLDLLDAVGKQGYVVKRGGEFIDPTGTKFITPGVYRADFSKQGEGRHSETFQVERAHFDQVLLEKARANGAEVITGASVRELVMTGDRITGVRYRHGGGEHEISASFVVDASGRAGTIANRFGLRKTTDGLRMVAIFRHYEGLDERYNPGHEGDIQIGSHADGWVWAIPLSGDKVSVGTVMPRAVFREGAKEDVFAEHVARVPRIVERLTGTRPSTELRVETDYSYHTDEVAGPGWLMAGDAGCFGDPMFSGGTLVAMVTAARAADTITRVLADPRAERALTDDYANFFKTGYDTYVRLIFAFYQSELISAVAEASTVAEREKLEMYMVRLLGGDFWSEHNPIAQALRANPAWRTFAPFQPVFGCPVYPELDAADRAEVAAARA

SEQ ID NO: 85431 - protein, 500 aa, Amycolatopsis orientalis
  REGION 1..500: note = tr|A0A193BY62|A0A193BY62_AMYOR Tryptophan halogenase; OS = Amycolatopsis orientalis OX=31958 GN=SD37_16625 PE=4; SV = 1
MSTARNEEFDVAVVGGGPAGSTLASLVAMRGHRVLLLEKETFPRYQIGESLLPSTIHGVCHLLGVDDEIAEAGFLRKRGGTFRWGANPTPWNFAFSVSPKVAGPTSFAYQVERSKFDKILLDNSARKGVDVRQNRTVTDVLESEDGRVRGLRYTDPDGTEHEVSARYVVDASGNTSRIHKRVGGSRKYSDFFRSLALFGYFENGKRLPAPNSGNILCVAFSHGWFWYIPLSDKLTSVGAVVRREDAAKIQGDPEAAMRNLIGECPLIGEYLDGATRVTTGQYGQLRVRKDYSYHQTNFWRPGMVLVGDAACFVDPVFSSGVHLATYSALLAARSINSVLDGSVGEQRAFDEFEGRYRREYGVFYEFLTSFYDMHIDENSYFWSAKKVTKSSNTELESFVELVAGMSSAEFDLTDTESGVLRLKQRSAEFADAVDTLVEAREENMAPLFRSSVVRQAMQEGSQVQTRAQLGDEAGEITPVFDGGLVATPDGMSWCEPDPGR

SEQ ID NO: 85432 - protein, 565 aa, unidentified
  source 1..565: note = Niveispirillum cyanobacteriorum
  REGION 1..565: note = tr|A0A2K9NLB4|A0A2K9NLB4_9PROT Tryptophan halogenase; OS = Niveispirillum cyanobacteriorum OX=1612173; GN = C0V82_26005 PE=4 SV=1
MESTRQAYPFALNLDSWPSLGTSCKSSIRDPFGPLKDPVARLLKCIREDVLDKPVKTVVIAGGGSAGWITAGRIAARNAQGPDAVRVILIESSAIGTIGVGEGTWPTMRNTLRKIGIKETDFIRHCDAAFKQGAKFVRWTDGTDADGYYHPLNPPQAATQINLSGHWQRLAGKGGPDFATAVDFQASLCEAGLAPKSITSPEYAGIANYAYHLDAGKFADLLRDHAVSRLGVIHMVDDITQVHQDEEGDITGLSLRSAGLVQGDFFIDCTGFASLLLGRTYGVGFKDCTDVLFCDRALALQVPYERDDAPVATHTISTAQDAGWIWDIGLPTRRGVGHVYSSRHTTDEQAEAALRRYAGPMANGLTARMIKIRAGHRETFWTHNCVAVGLSAGFLEPLEASALMLIETAVDFIADRLPARRSVMDVLSRQFNRAFLHHWDRIIEFLKLHYILTKRTDTAFWRDNCDPASIPDGLLERLELWRHHPPGPGDFPHQPEVFSWPSYQYILHGMGFETAYDGLPPLAGEAAGAQRAFAMAERAREQALRDLPRHRQLLNAIREHGLQAV

SEQ ID NO: 85433 - protein, 454 aa, Amycolatopsis orientalis
  REGION 1..454: note = tr|A0A193C1M5|A0A193C1M5_AMYOR Tryptophan halogenase; OS = Amycolatopsis orientalis OX=31958 GN=SD37_23460 PE=4; SV = 1
MDDYDVIVVGGGPGGSTVAGLTAAEGHRVLLLDKERFPRYQIGESLLPATIHGICAMLGVREEIERAGFVRKRGGTFKWGTGAEPWTFSFAASERMAGPTSYAYQVERTRFDTLLLDAARRLGAEVRQGHRALGTFRAGGRIGGVRYTDDTGHERRATARFVVDASGHGSRLHHDVGGTREYSPHFRNLALFGYFEGGRRMPEPGSGNILCVSFPDGWFWYIPLSDTLTSVGAVVKHESADKVQGDPDAAYTALIGACPLIGEFLRDARRATEPPYDRLRVRKDYSYDRTVLWCPGMVLVGDAACFIDPVFSSGVHLATYSALLAARSINSALSGLLAENRCFAEFEARYRREFGLFRDFLITFYELDADEGDYFRHARRLTSHHGAADEAFADLVGGVSSKDFSRKMFGEVLAEGVQLQLRGLLGDAAGDEPPMFPGGLVPTADGRRWRVPDA

SEQ ID NO: 85434 - protein, 505 aa, Xanthomonas phaseoli
  REGION 1..505: note = tr|A0A1V9HJM4|A0A1V9HJM4_9XANT Tryptophan halogenase; OS = Xanthomonas phaseoli pv. syngonii LMG 9055 OX=1437878; GN = IA54_019865 PE=4 SV=1
MTQAQIRKVVIAGGGTAGWIAACALSHQFRNLLDITLVESEQIGTVGVGESTVPPIRTFHRFLQIDEQEFLRAVAGTFKLSISFEHWRRQGERYIHPFGITGQSPLVCAFHHLWLESQRRGMPGSFGDYCLETVASRVDRFALHGEPAVNYAYHLDAALYVKFLRARSEACGVTRIEGRIQQVTVQPHSGDVASLVLEDGQVIEGDLFIDCSGFRGLLIEQTLHTGYEDWSHWLPCDRAVAVQTQALGPPVPYTRAIAHEAGWRWHIPLQHRVGNGLVFSSMHLSDDEAHAKLLRDVAAPAVKDPWMVPFRTGRRLKAWNKNVVSLGLASGFIEPLESTSIHLTISAVVRLLALFPAEGIAPSQVQLFNDVSRAEMEHVRDFVTLHYHATQRDEPLWQQCRQMELPESLALRLRAWRERAHAWQGPDELFRIDSWTHVLMGQGIAPEQHHPLTRAFSDYDLRRLLDGIAQPIQHAVRQMPSQQDFIERYCKAGEQVWGMRSPVPA

SEQ ID NO: 85435 - protein, 507 aa, Sphingomonas sp.
  REGION 1..507: note = tr|A0A3M0GC36|A0A3M0GC36_9SPHN Tryptophan halogenase; OS = Sphingomonas sp. PP-CE-3A-406 OX=2135659 GN=C8J44_0063; PE = 4 SV=1
MTGTPAARITKVVIVGGGTAGWMTAAALSRLVATGVAVTLVESEDIGTVGVGEATIPSLRDYNRMLGIDEDALVRATGATFKLGIEFRDWRRLGDSYLHPFGTHGRDIEGVSFHQLWLRQANLGGDPGPIGDYCLSAVAARKGRFTRPASNPQSVLSTLSYAFHFDAALYAKFLRAMAEEAGVVSVEGRVAAVDRDAETGFITGLRLDGDRRIDGELFIDCSGFRSLLLGDALGVPFTSWQHWLPCDRAWAVASERQGTLTPYTRATAETAGWRWRIPLQHRVGNGHVYASDHVDDDAAMHALLAGLDGKPLAEPRQLRFVAGRRERLWEKNCVAIGLSGGFLEPLESTSIHLIQSGITRLMALFPDRGFGGIEIAEYNRVMLREYAQIRDFIILHYHATERSDSTFWNHCRTMTIPDTLQAKLDLWSGKARTFREQGELFTPDGWIAVLLGQGVRPVSTDPLVAALPPEESTRFMDHVRDMIGKTADAMPTHEQFIAQHCAATIAP

SEQ ID NO: 85436 - protein, 504 aa, unidentified
  source 1..504: note = Niveispirillum cyanobacteriorum
  REGION 1..504: note = tr|A0A2K9NHF9|A0A2K9NHF9_9PROT Tryptophan halogenase; OS = Niveispirillum cyanobacteriorum OX=1612173; GN = C0V82_19485 PE=4 SV=1
MKPLNRIVIAGGGTAGWITAAMLSFMTKGTGTAVELVESDEIGTIGVGESTIPPFVVLLRSLGIDEQDFIKSTNASFKLAIRFEDWFKRNQHYYHPFGTLGGLIDNHEFYQCWLRAKAAGHPSELQDFAAATVMADQMKFLLPFKAPRTMIASASYALHVDAKRVAQYLRRYAEERGVTRTEGRINRVRTHPDGSIAGLDLANGKVVDGDFFIDCTGFRALLIGQTLGVGYVSWAEELLCDRAVAVQTENTEDDADVHPYTLSQAQDCGWRWRIPLQHRAGNGYVYSSRFLSDDEAVATLMRQVKGRPLIEPNIIPFKTGMRAKMWEKNCVALGLAAGFIEPLESTAIHLVYRAVDYLFRFFPDADVDPSLQAEFNRRVAAEYEEVRDFIVLHYCTTQRDDTPFWRAAQRTPIPASLRARMDLFKATGILRQGLEELFGAASWQSVYEGMGVRPARYQPFVDKLPMSVITETLDRSAPLLKAQVAGLPHHAQFLRDHCRAERDF

SEQ ID NO: 85437 - protein, 499 aa, unidentified
  source 1..499: note = Niveispirillum cyanobacteriorum
  REGION 1..499: note = tr|A0A2K9NA56|A0A2K9NA56_9PROT Tryptophan halogenase; OS = Niveispirillum cyanobacteriorum OX=1612173; GN = C0V82_07105 PE=4 SV=1
MAGNLPGSILIVGGGTAGWMAAAALARAVGRHTRIQLVESSAIGTVGVGEATIPAIRGFNHMLGLDEADFLRHTQGTYKLGIEFRDWTRLNHSYFHPFGVHGASLDANYTHQYWLRLNAMGEGGRLEDYSLCTIMAEQGRYMAPVTDPRNIMSVVGSAYHFDASLYADYLRRYAERLGVIRLDRKVVDVALRGEDGFVEAVICDGGERLAADFFIDCTGFTGLLIEKALKAGYEDWTHWLPCDRAWAVPSSGDGRITPFTRSTAREAGWQWRIPLRHRVGNGHVFSSAHVSEEQAREVLLANIDGQALAEPKLLRFVTGRRKQAWVKNCLSLGLASGFLEPLESTSIHLIQTGITKLLDFFPGRQIDGAEVREYNALAQGEFEAVRDFLILHYHVTERSDSSFWNHCRTMDIPDSLKSRIELFRRRGRVSTRARALFTDTSWIAVMIGQGIMPETYDPLVDLHPLPAVRERMATMRARIRQAADSMPTHEAFLGKQAAA

SEQ ID NO: 85438 - protein, 533 aa, Streptomyces sp.
  REGION 1..533: note = tr|A0A0M8U7M6|A0A0M8U7M6_9ACTN Tryptophan halogenase; OS = Streptomyces sp. H021 OX=1519486 GN=ADK97_22410 PE=4; SV = 1
MTSTDTRLQKVVILGGGTAGWMTAAYLGKALQGTVDITVLEAPTIPRIGVGEATVPNLQRSFFDYLGIAEDEWMRECNASFKMAVRFVNWRTDGQGESTARELPGGGPDHFYHPFGLLPDYDQTPLSHYWFKRKYEGRTTEPFDYACFREPPVMDAMKAPRWLDGRPATRYAWHFDAQLVADFLRRFATEKQGVNHVQDEMVRVEQDSRGHVTTLHTKGGLALDADLFVDCSGFRGLLINQAMQEPFIDMSDHLLCDSAVATAVPHDDEANGVEPYTSAIAMSSGWAWKIPMLGRFGTGYVYSSKFTDQDTATREFADMWGLDVEETKFNHIRFRVGRNRRAWVKNVVSIGLSSCFLEPLESTGIYFITAAIYQLAKHFPDKTFNEGLIDSFNHEIEVMFDDTRDFIQAHFFYAPRNDTPFWQANKKLVLPDNIKQKISAYKAGLPINSPITDESTYYGNFEAEFRNFWTNGSYYCIFAGLGLEPDAPLPTLAHRPESVAGAEPLFDTVKRQQQNLLETLPSAYDYLRQLHGA

SEQ ID NO: 85439 - protein, 442 aa, unidentified
  source 1..442: note = Caballeronia temeraria
  REGION 1..442: note = tr|A0A158DEF6|A0A158DEF6_9BURK Tryptophan halogenase; OS = Caballeronia temeraria OX=1777137 GN=AWB76_06833 PE=4; SV = 1
MSETTQTWDVVVIGGGPAGSTAATLLADRGYRVRVLEKARHPRFHIGESLLPANLRLFEKLGIADEVRAIGMVKLAAEFVSPQHGNRMQRFLFADAWDKSMPSAYQVRRSELDDILLRNAAKHGALLSEGCRARDVVFAPDGSSATINAEHDDGRIEEVRARFVVDASGRDTLLANHFKTKRRNERHNSSALYGHFSNARRNEGENEGNITVFWFEHGWFWFIPLADGATSVGAVVWPAYLKQRPKGTPVDTFFRDTIAMCAPLAARLKDAELISEVHATGNYSYTGDMTHGRNFLLLGDAFAFIDPVFSSGVMLAMQSAFAGADAIDAALTNPANAQAALAKFDRDVRHGPREFSWFIYRMTSPTMRNLFMGPRNPLRMKEALLSLLAGDIFGATPIWRSLRAFKGIYYISAALDWRNSLRAYRQRRRNLREAQRAEPSVN

SEQ ID NO: 85440 - protein, 488 aa, unidentified
  source 1..488: note = Niveispirillum cyanobacteriorum
  REGION 1..488: note = tr|A0A2K9NFR1|A0A2K9NFR1_9PROT Tryptophan halogenase; OS = Niveispirillum cyanobacteriorum OX=1612173; GN = C0V82_15910 PE=4 SV=1
MNQPINHLVIAGRDAPLWLTAATLVRALSPSGLRITIVELPAKAGPGDLHASLPALEALHQQLRLDEKGLLALVGGAYTLGWNFADALGSVPPFLHPFGALGSPIGGQDFFAYWLRARRHGLSVPLEDFSLTAAAARQGRLFIPDAESEEYGRSDYGYHLPALPYAAVLKELALRAGVTVVPARSLSVLREGGVITGLMLENGRRIEGDFYLDVTGSDAQLIAGPENGLEPWDFPADRVLTARGPRMKALPPYAEVRGFNQGWIALRPAQSGTYLTAVWRSGPGEADVLRRLPPLCGFAPEDAVGRGSAPGLRTKAWAGNCVALGQAAVRLDPLHDLDLLALQQGLVHLLAHFPRHGGFRAAQAEYNRLTRAHFTHLRDFQAMHYHLARHVGPFWDIARDLPLSADLFHRLSLFRARGELAPWDEDDLAPDSWRAFLAGHGLVPDTYPPALELIPAEQLKARLRAMLVFVKAQVLRQPTHDAYLHHGQ

SEQ ID NO: 85441 - protein, 521 aa, Xanthomonas hortorum
  REGION 1..521: note = tr|A0A2S7DUP4|A0A2S7DUP4_9XANT Tryptophan halogenase; OS = Xanthomonas hortorum pv. hederae OX=453603; GN = XhhCFBP4925_18870 PE=4 SV=1
MPDTTPSDPQQRPVRRVVIAGGGTAGWMAAAALSKVLGRQLQITVVESDEIGTVGVGEATIPSLVTFHRLLEIDEAAFMAATQATIKLGIGFEHWRDVDRHYIHSFGHTGTDHWSAGFQHFWLKGRQRGVARDFGDYCLELRAAQEGRFAHLPNGGMNYAYHLDAGLYARFLRRFSEGFGVQRIEGRIGNVETDVHSGYLTALTLENGTRVEGDLFLDCTGFAGLLIGKTLGVGADDWSHWLFADSALAVQTESVGAPVPYTRSRADQAGWMWRIPLQHRVGNGIVYSSRYMDQDNAAQVLQRNLTGRALTQPRALRFTPNQRHRVWEKNCVALGLASGFLEPLESTNIHLIQRGIIRLMQTFPQVINDSDIAEYNRQAAEEITHIRDFVILHYHVTERRDTPFWRDCAAMEIPDTLRHRVELFRQSGRVFHQANELFAENSWVQMMLGQGITPKQHHPVADLMGDAELNHFLENIRTRVDAALVRLPAHADFLRRYCPAPPLPEPATRLPATPVLATPAA

SEQ ID NO: 85442 - protein, 521 aa, Sphingomonas sp.
  REGION 1..521: note = tr|A0A0Q6KJM9|A0A0Q6KJM9_9SPHN Tryptophan halogenase; OS = Sphingomonas sp. Leaf339 OX=1736343 GN=ASG67_06665 PE=4; SV = 1
MDTPVAHIVIVGGGTAGWLAACLIAARADPAATAPLSVTLVESPDVPTIGVGEGTWPTMRRTLARIGIDEAEFLTACDASFKQGSRFDGWVTGAAGDSYLHPFVAPVEADPAAAVAAWREHGTGADFATMVGVQPHVCSRDLAPRQRGMPGYTGALNYAYHLDAAKFAALLTRHATERFGVRHVRDHVVGVDKAAGGDIAAVRTRASGAIGGDLFLDCTGHAALLIGGEYGVGVIDRSGELFNDRALAVQVPVAPGSPIASQTNATAHGAGWIWDIGLPTRRGVGCVYSSAHMDGDAAAATLAAYLDRTAPGVEMDALSVRRLTFRSQHRERFWVRNCLAVGLSAGFLEPLEASAIVLIELSLDALLDNFPATRGVMDIHAARFDVLFRYRWDRIVEFLKLHYVLSRRDEPYWRDHREAATIPPRLAELLQVWCHQPPSRTDFGMIDEVFPAASYQYVLYGMGFPPPGPAIVRGNARVNLGQLFQGVEQRARMLVASLPTNRAYLDALRDVRAAPAMEHSA

SEQ ID NO: 85443 - protein, 508 aa, unidentified
  source 1..508: note = Niveispirillum cyanobacteriorum
  REGION 1..508: note = tr|A0A2K9NH86|A0A2K9NH86_9PROT Tryptophan halogenase; OS = Niveispirillum cyanobacteriorum OX=1612173; GN = C0V82_18910 PE=4 SV=1
MIVAAPIRHIVIVGGGTAGWMAAALLSNVLPPDRLRLTLVESPDIGTVGVGEATIPPIQFFNRAVGIDEAEFMRATEGTFKLGIAFQDWVRPGHRYMHPFGQPGQAIKGVSFHAWWLRLRAAGYTVPLSDFWLAEKLADEGRFDTPSSDARSPKSTLAYAYHFDAGLYAAYLRTIAEPRGVMRVEATVAEVVLDPNDGTVSHLILTDGRRIDGDYFIDCTGFRALLIGQALGRPYEDWSHWLPANRAVAVPSARTRDPVPFTTATARSAGWQWRINLRHRTGNGYVYVADHIDDDQAAATLLANLDGQALSDPRFLRFTTGRRTQSRYKNVLAVGLSSGFLEPLESTSIHFIQHALIKFAATFPLSKDDPLSANLYNRMIGEELEQVRDFLILHYHANQRVGDPFWDRMRHMDVPDSLAEKMALFRARGCAIFPSQTLFQEPNWLAVLLGQEVEPDSYDPLADAGDLSDIRQGFDATRQIIAQTARAAPLHMDYLSRLIAPGNRRGAA

SEQ ID NO: 85444 - protein, 506 aa, Novosphingobium sp.
  REGION 1..506: note = tr|A0A257G4J9|A0A257G4J9_9SPHN Tryptophan halogenase; OS = Novosphingobium sp. PASSN1 OX=2015561 GN=CFE35_20895; PE = 4 SV=1
MTPSSDRRIRSIVIVGGGSAGWMTAAALANTLKQDCEIKLVESELIGTVGVGEATIPPIRTFNEMLGIDEREFVAKTKGSFKLGIEFVNWGRQGNRYFHPFGPHGRAFDIVGLHHFWLKAREAGDTTSFDDFSMAWSLAQRGRFTRPSPDPRQVMSTFDYAYHFDAGLYARLLRDYAEARGVKRHEGKVVSVRQHGETGFVEGVTLESGLELTGDLFIDCSGFRGLLIGEALKVGYQDWTHWLPCDRAVAMPCAKVGDMLPYTRSTACEAGWQWRIPLQHRTGNGYVYCSKFISDEDAEASLRANLDGEALAGPNKLRFTTGRRDKFWDKNVVAIGLSSGFLEPLESTSIHLIQAGISKLLALFPQRDFDPLIVDEYNHIASTEFERIRDFLVLHYKLTTRDDSPLWRYCASMDIPDTLKLKIDHFRRYGRHIARDMDLFGQPSWLAVHIGQGNIPQDVDPVFDFRGIDGRDYLGKLKAAMVASAEQVSSHQAFVNTHCAAEGAIA

SEQ ID NO: 85445 - protein, 522 aa, Sphingomonas sp.
  REGION 1..522: note = tr|A0A0Q6L8A8|A0A0Q6L8A8_9SPHN Tryptophan halogenase; OS = Sphingomonas sp. Leaf339 OX=1736343 GN=ASG67_00075 PE=4; SV = 1
MFPGEEAVDGLVQHVVVVGGGSAGWIAACRLAAQAKRSGSGVRVTLVESTNVPSVGVGEGTWPTMRNTLAKIGITETDFIRSCDAAFKQGARFVGWTDGTPADAYYHPLNPPAGATEIDLAPHWLHRPATEATDFASWVDFQATLCDAGLAPKTILMPEYAGHANYAYHLDAGKFATLLRDHAVGNLGVEHVLGDVVRPHMADNGDITDIELADGRRLAGDLFVDCTGFAALLIGGVYGVPFRRCSDVLFADRAMAMQVPYGGEDDDITCHTVSTAQDAGWIWDIGLWTRRGVGHVYSSAHTSDDAAEAALRRYTGPRAEGLSVRRINIDAGHRERFWQNNCVAVGLSAGFIEPLEASALMLIETSMDAIADRLPRTRSAMDVMAHQFNDTFRHHWQRIIEFLKLHYVLTKRTDTAFWRDNTVASSIPDGLRERLDLWRHHSPAPQDFDHAREVFSWPSYQYVLHGMQFASDYPRVDAASPDAAMASRFVTRNDRARADLLHRAPRHRDLLRAVRDHGLQLV

SEQ ID NO: 85446 - protein, 508 aa, Pseudomonas sp.
  REGION 1..508: note = tr|A0A1B8TJV3|A0A1B8TJV3_9PSED Uncharacterized protein OS=Pseudomonas sp. AU12215 OX=1860123; GN = A9513_025385 PE=4 SV=1
MLNLSNYRRVAVVGGGSAGWFAALELRKLFLDQVEVVLVESETLGIIGAGEGSLPNFNRALDRYEIDRAEFMRETRSTYKLGLTLEGWRTGKKDDIFFHPFSFHSDGVDLNAWIEPNGSYPLASILLNQDLQLHHFPDAWRLYREGASQQQAEAYLQEQLKLYAVPPMAFHFDARKLAEYLREVALKRGVKRVNARVESVRLNERRHVTHLILENGELEVDFVIDASGLHRLIIDKALHSPWESYSDHLLLNQALPFFIPAQGAHPSLVTRAIAMKNGWMWCIPTQDRLGVGYVYSNQHTDKEGALREAQAYWGTEIEPVNHFAFSAGHFKEVWIGNVMAVGLSSGFVEPLEATSIGQTLVQLARFNQVVSACDGLIPQQLIDQFNRDITRHWDGIRDFLFLHYDTPRQDTEFWKAASSATPPSTYAELKRTFALRPPRDVDLEPYRGGTFSLFGPTSWMSVAAPLGVLTRKATAADLVPLSKEQRWNIGEFLAKVEPRMTAEAAMSI

SEQ ID NO: 85447 - protein, 499 aa, Sphingopyxis sp.
  REGION 1..499: note = tr|A0A1P8X1F3|A0A1P8X1F3_9SPHN Tryptophan halogenase; OS = Sphingopyxis sp. QXT-31 OX=1357916 GN=BWQ93_17865 PE=4; SV = 1
MTPMRLIIIGGGTAGWMAAACLRRFLPQGWSVTLVESEAIGTVGVGEATIPQIRLFNEALGIDEDAFLRATQGTIKQGIEFDGWTRPGHRYMHAFGAIGRGLGLLPFHQYWLRGRSLGIADSLDAYSLNEQAAHAGRFRRGAGGSAHAPAMPYAFHFDAGLYAAFLRKRAEGWGVTRVEGKVVSAERADNGDVAAVLLEGERRVAGELFVDCSGFRGLLIEGALATGYEDWSHWLPNDRAVAVPCGHGDTPQQPYTRAVAREAGWQWRIPLQHRIGNGYVYCSRFLDDDAAEAALLASLDGPAQAPPNRLRFTSGKRRKMWNRNVVALGLAAGFMEPLESTSIHLVQSGISRLLNLLPAGAPDPAIVAEFNQQSDFEWERIRDFIVLHYKATERADTPYWRERAAMDIPDTLAAKLDQFRAQGLIVREHEELFTEPGWLQVLVGQGVMPTAWHPLADTLSEADLKTFLDTNRLVIEREVAAMQPYDAFLNSMSPTGVAA

SEQ ID NO: 85448 - protein, 500 aa, unidentified
  source 1..500: note = Idiomarinaceae bacterium
  REGION 1..500: note = tr|A0A2D6I9Y9|A0A2D6I9Y9_9GAMM Tryptophan halogenase; OS = Idiomarinaceae bacterium OX=1898113 GN=CMF17_10340 PE=4; SV = 1
MVKPLQRILILGGGSAGWMAAAALGKVLDTGNIEVTLVESEDIGTVGVGEATIPQLMLYNDLIGLDEDEFVRETGGTFKLGIQFTDWDKIGSQYFHAFGELGKNMEGVHFYQYWLRMQQQGLAGELDDYSLASQACLQKKFMRPIEAGNSPLSSIAYAFHFDAGLYARYLRKLAEGWGVTRIEGKVDTVQQHESGDIAGVTLENGDVLEADFFIDCSGFRALLIEQTLNAGFEDWQHWLPCDRAVTVGTKRNGDPWPFTRAAAQKAGWQWRIPLQHRTGNGHVYSSKFMSDDEALAILKGNLDGEMLGEPRLITFKTGMRRKSWSRNCLAVGLSSGFMEPLESTSLHLIQVAISKFFSFFPHQGYAQHDVDEFNQQMRFEYEAIRDFLILHYHATTRTDTPFWRYCKTMDIPPALQQKMDLFEENGRIFRYNNELFNDISWFEVMYGQGLQPKGYHALANRYTDEQLAHRMEEIRGVIRRSADYMPPHDEFIREHCLMRS

SEQ ID NO: 85449 - protein, 418 aa, Burkholderia plantarii
  REGION 1..418: note = tr|A0A0B6RXR2|A0A0B6RXR2_9BURK Tryptophan halogenase; OS = Burkholderia plantarii OX=41899 GN=BGL_1c13030 PE=4 SV=1
MSQTISTQDTVDVAIIGAGPAGAVAAALLRKAGRSVLVLERQQFPRFSIGESLLPQSMAYLEEAGMLQAVVEAGFQFKNGAYFVHRDRVSSFDFRDKLTPGWGTTYQVERAVFDDLLIRCAAAQGAEVRFSHTVRAFTPGVRPRLDVLDEAGRDYVVEAGFVLDASGFGRVLPRLLDLEAPTGMPTRAAIFTHVEDRLPGGSTDRNKICVAVHPERRDVWYWMIPLANGRSSVGCVAESAFLDVPEAQREATLRELLRTEPTLARLVGDKPFLMPVRHIDGYSANVAQLHGAGYALLGNAGEFLDPVFSSGVTIALRSAHLAVKTLERQWHGEAVDWARDYGAALRKGVDTFRAFVERWYSGELQDVVFYEDKSPELKRMICSVLAGYAWDETNPFVREPGRRLDVLAELCRLHAVDA

SEQ ID NO: 85450 - protein, 515 aa, unidentified
  source 1..515: note = Burkholderiales bacterium
  REGION 1..515: note = tr|A0A257FLC4|A0A257FLC4_9BURK Tryptophan halogenase; OS = Burkholderiales bacterium PBB2 OX=2015564; GN = CFE41_14175 PE=4 SV=1
MTSAPTASPHFIIVGGGTAGWMSACLLARQLGPACRYTLVESSDIGIIGVGEGSTPYLRDFFRQLGLEERDWMPACHATYKAGIRFPGWSTVPGYESYVHPFFNEADRPLGQAFIQQANQRRRGEDVDANPADFFLAAELARQRRAPHYIHPAQHPATDYAYHFDSGLLGSFLKRHAQEQLGLQHCVDTVAAVERHAESGDITALRLQSSGQRLEGDFFIDCSGFRGLLINEALGEPFIPWVDRLFNDRAIAIPTALEPDQDIASETTSTALGHGWAWQIPLTHRYGNGYVYSSQFISDDTAEAALRAHLGPAAEGASARRLEMRVGRVARHWRHNCVAIGLSQGFIEPLEATALMLIQFSVQHLIEALQTGGDDPATLRERYNAEINRMFDGVCDYVQTHYLLNTREDTEYWRANRAKKPGSDRLAELLASWDAGTDFDAALGRHEAALMYQRPSWYCLLAGMGRFPSNAPGHKAAPSQAMALSGLQARASLVDQARKHFLPHREALRRLVTSA

SEQ ID NO: 85451 - protein, 533 aa, Sagittula stellata
  REGION 1..533: note = tr|A3K571|A3K571_9RHOB Tryptophan halogenase, putative OS=Sagittula stellata E-37 OX=388399; GN = SSE37_13838 PE=4 SV=1
MHSMAEPVTSITVVGGGTAGWLAATYLRSKCAPKIAITLIESPNVPTVGVGEATVPHMPVTLREMGIDDKEFFRRCNTSFKMGVMFRGWNVDHKGRPFDYMNPFAPPPKIDGVEAGHYFQAFGAGRRDYIQSFSPLMDLLDAGKCPLSFNAKNDPMPRAGYAYHLDAGAFAKMLAEVGVARGVEHVLDDVDGVELDDTGHVAALNLRALGRRPVQLVIDCTGFKGLVIREALGEPFENYSDYLANDRAMALPIPHADPEVLPAATSSTALGAGWSWSVPLYHRIGTGYVYSSAHRTDDAARDDFMAHLGDRAPKGAEPRVIPMRIGRMRRAWVKNCVALGLSGGFIEPLESTAIHMIDMGIRWLLQYFPSRDYEESTRAAYNRCADEMYNEVRDFICLHYRLGNRTDTDYWCDARGLKITDRLEGWLDLWQRQLPVEMDIGRANLFDHNTFQAVLLGKRVYENGWGAARLNRSFALSEKRWKAFLRDSAARNMAVVKAKADHRRALRVLRGEATDGAVTRQSLGAVADEAVLF

SEQ ID NO: 85452 - protein, 495 aa, unidentified
  source 1..495: note = Sphingomonas taxi
  REGION 1..495: note = tr|A0A097EJ96|A0A097EJ96_9SPHN Tryptophan halogenase; OS = Sphingomonas taxi OX=1549858 GN=MC45_16045 PE=4 SV=1
MKARRIVIAGGGTAGWMAAAAIARVMGRAAEVTLVESDTIGTVGVGESTIPPLITFNRLLGINEAEFMRATQATFKLGIAFDGWKQAGDSYFHSFGLTGTDHWAAGFQHYWLDGQTRGHGQPYDDYCLELIAAREGKFAHLPDDRMNYAYQLDSALYGRFLRRMAEADGAHRIEGKIAQVELDGASGDIAALRLESGTRIEGDLFLDCTGFRALLIEQALHTGFDDWTHYLPCDAAIAVQTESVAPAVPFTRAMAHDAGWQWRIPLQHRVGNGIVYCSRYLDHDAALDRLLGNVEGRVLTQPNRIRFVTGARRKQWHRNCIALGLSGGFMEPLESTSIHLIQRAILRLIRMMPAGDVSPRDVAEFNDQQHTDMLQIRDFLILHYKVTERRDSPFWRQCATMEIPDSLAQKIELFRETGRVFRKNEELFAENSWVQVMLGQGIVPRSHHPIAAKLGDDDMARLLSTLRRNVATTVRGLPPHAAYVAQYCGVAPDAA

SEQ ID NO: 85453 - protein, 502 aa, Sphingopyxis sp.
  REGION 1..502: note = tr|A0A1P8WWS0|A0A1P8WWS0_9SPHN Tryptophan halogenase; OS = Sphingopyxis sp. QXT-31 OX=1357916 GN=BWQ93_08370 PE=4; SV = 1
MDEGPFNLIIVGGGTAGWMCAAACAAKLDPALYRVRLVESEEIGTVGVGEATLPQMKDFNDFLGLDEVEFMQATQASFKLGIEFVNWGRQGDRYVHPFGTFGRPIGEADFFSYWVRAHNAGQAAPLFDYCFPIVAALQNRFMLPNGDANDVRNAFAYAYHLDAFLYARYLRRWAEARGIERVEGRIVDVERDGQTGNIAAVTLASGTKVAGDMFVDCSGFRSLLMGQTLGVALEDWSRWLPCDSAQAVPSVRSPDFTPYTRSTRRPAGWQWRIPLQHRTGNGYVYSSADISDDEAAATLLANLDGEALAEPRVLRFKAGKREKAWAHNVVGMGLAGGFLEPLESTSIYLVQMAIMHMLTLLPPGPAIDPALPAEFNRVMDVEYDRIRDFLILHYIANDADAPLWERVTTMDVPDSLAGKIDRFRHRAHVQAYRDGLFGPPSWQAVFVGQGVVPEAADRLADMLPDDQLAERLAGLHATIARGAASAPLHADFVAHYCPAPAP

SEQ ID NO: 85454 - protein, 500 aa, Novosphingobium sp.
  REGION 1..500: note = tr|A0A257GBI1|A0A257GBI1_9SPHN Tryptophan halogenase; OS = Novosphingobium sp. PASSN1 OX=2015561 GN=CFE35_10410; PE = 4 SV=1
MTQASTKRRIIVAGGGTAGWMAAAALARTMGDAIELTLVESDAIGTIGVGESTIPPLVAYNRLLGIAEADFMRATQATFKLGINFENWRVEGENYFHSFGTTGRDHWSAGFQHFWMHGLTKGHKESYDDYCIELQAAMKSKFAHLPDNRINYAYQLDSSLYAVFLRKLAEADGCRRVEGKIAEVELNPETGDIAALRLDSGQRLEGDLFLDCTGFRALLMEGALHVGYDDWSHWLPCDSAIAVQTASVRAPIPYTRAIAHDAGWQWRIPLQHRQGNGIVYCSRYLSQEAAQERLFATVEGERLTKPNVIRFTTGARRKQWHRNCVAIGLSGGFMEPLESTSIHLIQRAILRVIRMLPAGEISARDVAEFNEQQMTDMEQIRDFLILHYKATDRRDSPFWRQCAAMDIPDSLTHKIELFRETGRVFRKNEELFVENSWVQVMMGQGIMPKSYHPVATKLSDAELAHLLKGLRESVAKTVAGLPDHHAYVAQYCGAQEARAA

SEQ ID NO: 85455 - protein, 515 aa, Novosphingobium sp.
  REGION 1..515: note = tr|A0A257GBM0|A0A257GBM0_9SPHN Tryptophan halogenase; OS = Novosphingobium sp. PASSN1 OX=2015561 GN=CFE35_10655; PE = 4 SV=1
MTAPDPLRSILIVGGGTAGWSAAALLSAVLAPAGTAITLIETSDVPTVGVGEATIPPVFAFLANCGIDEIDFIRHCQATFKLAIRFDDWLEQGHSYWHPFGNIGVTINQRPFHHYWWKNKAAGHGESMGDLCPAIALAQDGKFAFPPPDGSFPGGALNYALHFDAGLVAQYLRRHAEARGVQHIDARIAGTVLAEDGAIAAVMLADGRQIAADFFIDCSGFRGLLIEEALHAGYEDWTKWLPCDRAVAMPTATVGAPAPYTVSAAHEAGWRWRIPLQSRVGNGYVYSSRHVSDEAAAETLRGSVTGEALAEPRFLRFNAGHRKAMWVKNCLAVGLSSGFLEPLESTSIHLIHTALNRLLDYFPDRRCDPVLAAAYNREAADEYAHIRDFLLLHYVPNRRFGEPFWDEIRATPLPDSLAAKLELFQRTGRVVSRRRELFADVSWFFVAAGMGIEPQALDPLADAAPFDEVRGVIGQIAEVMGRYRSAAPTHQDMLARLLDPALKGRPNFAQVWGGA

SEQ ID NO: 85456 - protein, 513 aa, unidentified
  source 1..513: note = Sphingomonas taxi
  REGION 1..513: note = tr|A0A2W4Z7P3|A0A2W4Z7P3_9SPHN Tryptophan halogenase; OS = Sphingomonas taxi OX=1549858 GN=DI640_03480 PE=4 SV=1
MHEIQNIVIVGGGTAGWLTAGVIAAKHQARRQHGFTVTLVESPNVPTIGVGEGTWPTLRSTLKKMGVSETELFRQCDASFKQGARFNRWTTGAPDDGYYHPLMLPQHFGQVNLAPHWLADEGGTTFCDTVTPQGRICDEGLGPKTIATPEYDGHANYAYHLDAGKFSHFLQRHCCDTLGVRHVKADVTEVRLDESGDIASLDTEQGISIAGDLFVDCTGFAARLIGGPMKVPFRSCTDVLFCDTALAMQVPYDLPDDPIASHTISTAQSAGWIWDIGLPTRRGVGHVFSSSHISVDAAEQELRDYIGPAARDLTARRLAIRAGHREQFWARNCVAVGLAAGFLEPLEASAIVLIELSAKMIAEQMPACREVMDVVARRFNDTTSYRWGRIIDFLKLHYALTKRTDTAFWRDNVRPETIPDRLMGLMELWRFQSPWVHDEFDRAEEVFPSASYQYVLYGMGARTAVMPGTIDDDLALARRARHDNQMQTQRLVSSLPGHRDLIDKIKRHGLQSI

SEQ ID NO: 85457 - protein, 500 aa, unidentified
  source 1..500: note = Sphingomonas taxi
  REGION 1..500: note = tr|A0A097EJX4|A0A097EJX4_9SPHN Tryptophan halogenase; OS = Sphingomonas taxi OX=1549858 GN=MC45_17590 PE=4 SV=1
MESRRIRRVVILGGGTAGWMTAGALSHSFGAAVTVTLLESEEIGTVGVGEATIPTIHWFNSLVGLDEADFLRATKATFKLGIAFVDWRAPGHRYFHPFGHYGAALPGVAFHHRWLKAATNGLALPLGALSLAERLADENRFARPSGDARSILSSLGYAYHFDAGLYAAYLRRVSETRGVTRVEGRLNTVERHPDTGFVSALTTSRGERLEGDLFIDCSGFRALLIDDVVGEPFEDWSHWLPCDRAVAVPCARVAPTTPYTRSTARAAGWQWRIPLQHRIGNGYVYASDQCSDDAAIATLLANLDGEPLAEPRLLRFKAGMRRRPWRDNVVAIGLSSGFLEPLESTSIHLIQSGIAKLLTLFPDRDCDPALASRFNTTFARDMDGIKDFLILHYHATGREEPLWRHCRAMSLPDGLRERIAQYRRSGRLILDPDELFREASWLAVLDGQGIKAQGYNPLADAIDPAANRAQVQQIADVIARAVPTLPMHDAVLAQMIGTPS

SEQ ID NO: 85458 - protein, 499 aa, unidentified
  source 1..499: note = Sphingomonas taxi
  REGION 1..499: note = tr|A0A2W5PC34|A0A2W5PC34_9SPHN Tryptophan halogenase; OS = Sphingomonas taxi OX=1549858 GN=DI544_01580 PE=4 SV=1
MPAAIERVVIVGGGTAGWMTAALLARVLGGQVAITLVESDEIGIIGVGEATIPPIQNVNAVLGIDEAEFLRETKATIKLAIRFEDWGAIGDSYYHTFGAAGRNLPFCSFHHFWTRARRAGMDVDYWDFDLNQLCAREGKFAKIQSGGDPTWNLPYAYHFDSSLYGRYLRGYSERRDVRRVEGLVQHVRRDAQSGAVAALALRDGTEIAGDLFIDCSGTRGLLIQQQLNVGYEDWGHWLPCDRAMAVPSERFAHTAPYTRAIARRCGWQWRIPLQHRNGNGLVYSSRHCSDEQAAEILLNNLDGPALAEPRIIPFRTGRARRQWDRNVVAVGLSSGFLEPLESTSIYLIQAAIVRLLHLFPRDGIDERVVREYNRQSQIEYETIRDFIILHYHATRRDDSAFWRDVRAMPVPERLAAKIALFRASGVLTQDPLDIFMEPSWVQVLLGQGVLPADHHPLADGPSDAELAEQLRQVAAQKREPLPNMPLHDDFLRAFGGSAG

SEQ ID NO: 85459 - protein, 497 aa, unidentified
  source 1..497: note = Idiomarinaceae bacterium
  REGION 1..497: note = tr|A0A2D7YRV7|A0A2D7YRV7_9GAMM Tryptophan halogenase; OS = Idiomarinaceae bacterium OX=1898113 GN=CMF19_08910 PE=4; SV = 1
MSEIKQVVILGGGTAGWMSAALIGKMLGKQLNITLVESADIGTVGVGEATIPPIVGFNRALGIDEKTLLQRTGATIKLGIQFEHWGQVGDSYMHAFGDIGKAFPFCDFHHIFHRAQSAGLADSLWDYSLNYQSAKAGRFAPLQNLPNTQLKGTEHAYHFDASKYAQLLRESAEQFGVTRKEGKVEEVVQTDAGDIEALILQSGERIAGDLFIDCSGQRALLIEKTLGVGFEDWSHWLPCDRAIAVQSSHDEGHEPVPYTRSIAHEWGWQWQIPLQHRMGNGLVYCSRYVDDASAKERLLSKLPGEALTEPRVIPFRTGMRRQQWHKNVVAIGLSSGFLEPLESTSIHLIQTAVTRLLKHFPHQQIMPASVTAFNRQFRTEMTQVRDFIIAHYALTQRQDSGFWRHCGMMDIPESLAARIDQFRQSGNVQRYQDELFAEVAWQQVLLGQNCRPQQHHPLAQQFTETQLRELLESLRALIAHGVSMMPSHNQFIQRSLT

SEQ ID NO: 85460 - protein, 514 aa, unidentified
  source 1..514: note = Hephaestia caeni
  REGION 1..514: note = tr|A0A397NIU5|A0A397NIU5_9SPHN Tryptophan halogenase; OS = Hephaestia caeni OX=645617 GN=DFR49_3337 PE=4 SV=1
MTHPVKKIVIVGGGTAGWLTAGVIAAKHRSRMPGGFSITLVESPNIPTAGVGEGTWPTLRATLARMGVSETELFRTADAAFKQGAQFARWTTGADDDAYYHPLMLPQSFSQLNLVPHWLTSGEGESFCDAVCPQGRLCEDGLAPKTIATPEYEALANYAYHLDAGKFAPFLQRHCCDVLGVRHVLADVRRVAMAENGDIRAIVTEQAGEIEGDLFVDCTGFRSILLGEALGVAFKDCNDVLFCDRALAVQIPYASEISPIASHTISTAQSCGWIWDIGLPERRGTGHAYSSSHISDDAAEAELRAYIGPAADGLTVRRIKFRSGHRETFWKRNCVAVGLAAGFLEPLESSAIVLTELSAKMIAEQLPVCREVMDVIAARFNATTHYRWGRIIDFLKLHYVLTRREDTAFWRDNVRPETIPDRLKELLLLWRYQSPWFHDEFDRVEEVFPAASYQYVLYGMGYGTEVEPDAVAGDARMAERAMRENMRQTERLRAGLPRHRDLIRKIHEHGLQPV

SEQ ID NO: 85461 - protein, 524 aa, Duganella sp.
  REGION 1..524: note = tr|A0A4Y9SBP7|A0A4Y9SBP7_9BURK Tryptophan 7-halogenase OS=Duganella sp. DN04 OX=2561932; GN = E4L98_21810 PE=4 SV=1
MKTLPKQGVRNVLIVGGGTAGWLTAAFLARQLGTGADENAVRITLVESKEIGIIGVGEGTFPSIRGTLATIGIDEARFIRECDATFKQGIHFQHWVREPGMPGADHYFHPFSLPSQRPGGPELLPYWLQGGAPAGVGFAAAATMQKRVADAAHAPKRPSDADFMGPLNYAYHFDAGKFATLLATHAKSLGVQHVLATVERVELDDRGAIGAVHTREAGALTAELYIDCTGFRAALIGEALGTSFRNINDVLFVDRALAMQVPYERPDAPIPSYTISTAHEAGWTWDIGLHQRRGIGYVYSSRHTDDARAEQVLRNYIGPASKDLHPRQLKLNVGYRDVHWVKNCVAVGLSGGFLEPLESSGIGLIETAAYLISYLFPHDGDMEPVARTYNEMMKARYERIVDFVKLHYCLTQRKDSRFWTDNTDPASIPQTLQDKLAMWRHRAPHRMDFVVDYEMYPPSSWQYVLYGMEYPTDLYANARTLPRMEEARKEFAMIAQMSQRALADLPPHRAMVEHLAQRGQRKSA

SEQ ID NO: 85462 - protein, 525 aa, unidentified; identical to SEQ ID NO: 83663
  source 1..525: note = Pelagibacter sp.
  REGION 1..525: note = tr|A0A1Z9LTE2|A0A1Z9LTE2_9PROT Uncharacterized protein OS=Candidatus Pelagibacter sp. TMED197 OX=1986808; GN = CBD57_02650 PE=4 SV=1

SEQ ID NO: 85463 - protein, 484 aa, unidentified
  source 1..484: note = Sphingomonas naasensis
  REGION 1..484: note = tr|A0A4S1WHB3|A0A4S1WHB3_9SPHN Tryptophan 7-halogenase OS=Sphingomonas naasensis OX=1344951; GN = E5A74_12195 PE=4 SV=1
MTAAALVRFLGPGFAVTLVESAEIGTVGVGEATIPQIRLFNAGLGIDENQFIAVTQATFKLAIEFVGWTRGGRYMHAFGEVGRDNGGVAFQHSWLRGLAEGVAQPLAAYALNNAAALANRMQRGPARTAQILPEMPYAFHFDAGLYARFLRDYAEARGVTRHEGKIVEVRRDAETGDVSALHLDGERAIPGDLFIDCTGFRGLLIAEALGAGFEDWSHWLPCDRAMAVPSERAADFTPYTRATAHPAGWQWRIPLQHRTGNGIVYASDALSDDEAAAQLLANLDGAPLGDPRPLRFTAGKRSAFWQANVIAIGLSSGFLEPLESTSIHLIQSAIERVLKLLPGRRISAAQRAEYNRQTNLEVDRIRDFLILHYWANDRDEPFWRARREMPLPDGLAHKIELWRASGQIVREEADLFSEVAWLQVLAGQGIAAESHHPLADQPPAAQIAEYLDLLAKLTAREVAQMPDHAAFIRQHCAAREEIAA

SEQ ID NO: 85464 - protein, 490 aa, unidentified
  source 1..490: note = Sphingomonas taxi
  REGION 1..490: note = tr|A0A097EKP8|A0A097EKP8_9SPHN Tryptophan halogenase; OS = Sphingomonas taxi OX=1549858 GN=MC45_09825 PE=4 SV=1
MSGTPIGRVVIAGGGTAGWMAAAAASRFLNDGQRTITLVESDAIGTVGVGEATIPPIRGFNARLGIEEADFLRATGGTPKLGIEFVDWGARGERYMHPFGTPGRDIEGLNFHQLWLKLRERPGIGDFEGYAMAAVAARAGRFAPPSPDPRSPLSGVDYAYHFDAGLYAAFLRRRAEEQGTVRVEGRITGVEQDERGHVTAVRLEGDRRIAGDLFLDCSGFRSLLLGEAMGVGFEDWSHWLPCDRAIAVPTERTQPLLPYTRATAHDAGWQWRIPLQHRTGNGHVYASAFTDDDTAERILMANLDAAPTATPRRLSFTAGRRRQSWAGNVVALGLAGGFLEPLESTSIHLIQEGIAKLFALFPDDRFSPVVRDEYNRLMADHYTAIRDFIILHYAATRRRDTPFWRHVGSMALPETLARKLALFAEKGRIFRYDDELFTVPSWVAVLLGQGIVPTGYDPIVDALDADRVAEALRHMRRQNATLAQQLPPAG

SEQ ID NO: 85465 - protein, 543 aa, Idiomarina insulisalsae
  REGION 1..543: note = tr|A0A432YEQ1|A0A432YEQ1_9GAMM Tryptophan 7-halogenase OS=Idiomarina insulisalsae OX=575789; GN = CWI71_08265 PE=4 SV=1
MTKRKILIVGGGSAGWMTAAYLNGALNRRGEDHRVDIELLESPDTPRISVGEATIPSMRHLLAVVGVNELDFMRATEATFKQSIKYVNWVHNDNSFYHHPFSSLRAQPIDYAGSDWLRSDRSVPFMETCSIQPLVCEWGRAPQMFGEWRMGARLNYAYQMNAQKFADYLRDFSNARGVRHIMANMQQVEKHANGDIRAVITDQGETLGADLFIDCTGFRSLLLEQEMGVGFEDFGKYLLCDRAVTMHVPYETHYPGMVRPYTTATALSNGWIWDIPMQSRRSIGYVHSSAFIDKEAAEKEMRAYQGNNTENLPCRFIPFKAGRRHQQWQGNCVAIGLSGGFIEPLESTGLYLSDLGAVLLAEHFPWHQDDMKPLANRYNRLMTNRYYEILDFINMHYCMTKRTDTEFWRTVQQREHITDRLLAKLDFWRSKPPSMHDFQDQFFPGMPTAAAAGVDSGDTRPPIDTGGLWNHESYECILYGMEFLQQECDKWFGTGRPPTRVNPAILQRLQMARQMLPPHELWLQRVLGMAEYRPAGTPAGWVV

SEQ ID NO: 85466 - protein, 517 aa, Shewanella sp.
  REGION 1..517: note = tr|A0A516G1D6|A0A516G1D6_9GAMM Tryptophan 7-halogenase OS=Shewanella sp. YLB-06 OX=2593655; GN = FM037_21320 PE=4 SV=1
MPEKNKITKVLIVGGGTAGWLAANHLGKRFSDLDGPNIEVTLIESPNIPNIGVGEGTVPMMRETLRYLGIDEGYFVQSCDATFKQSIKFVDWLYNPKEKSHSYHHLFDYPVSHDSAFYWHKTSASSRDSFANSVSVQGVLADAGFGPRLVTQPQFQGVTSYAYHLDARKFSAVLRLNALSKFGVSHILDDVLEVTLSDNGDISTVSTSQNGELEADLFIDCTGFSARLIEKACKVPFVDKGDVLFVDSALAVQVPYEKTDDAIPCFTLSTAKEAGWIWDIGLTERRGVGYVYSSRHSSRQDAEKVLSEYLGGKVSEAEFRHIPMRIGYREKAWHRNCVAIGLSGGFVEPLEATGLLVFDVTSRMLAECIPNKLSSMPLVAERFNKRTAETWNKVIDFIKLHYVVSKRNDTEFWSDNRKEASIPDSLKQKLALWSSELPNRYDFTSTLEIFNLENYQYVLYGMDFDTDLGCSEVSKDGLDKFLSEQNKIAEFIHQAKTQLEPHRELIDKIHKFGIQKV

SEQ ID NO: 85467 - protein, 504 aa, unidentified
  source 1..504: note = Sphingomonas taxi
  REGION 1..504: note = tr|A0A2W5ANU3|A0A2W5ANU3_9SPHN Tryptophan halogenase; OS = Sphingomonas taxi OX=1549858 GN=DI640_13265 PE=4 SV=1
MANHPLRIVIAGGGTAGWMAAATFARFLETGYEIDLIESDEIGTVGVGEATIPQIHLFNDALGLDEDAFLRATGGTFKLGIEFVDWFKPGHRYMHAFGDVGRDVGLLPFHQYWLRARSLGLAGDLGAYSLNTHAALAERMQRGPARTARTLPSMPYAYHFDAGLYARYLRRYSETRGVNRIEGKIVRVTRDGESGDVAGLVLENGTTVAADLYIDCTGFRGLLIEEALGTGYEDWTHWLPCDRAIAVPSARSEKFTPYTRSTAHAAGWQWRIPLQHRTGNGVVFSSAHISEDEATATLLSGLDTPAMADPRTITFRTGRRKQIWNRNVVALGLAAGFMEPLESTSIHLIQSAISRLLKLLPGRVIADADRAEFNRQSDFEYERIRDFIILHYKATARDDTPFWRQCRDMAVPDTLAAKIELWRGNGHIVREHEELFTEVGWLQVLAGQGIIPAGHHPLADAISTNDLGEFMDTIDKLNAREVAQMQDHAAFVAQHCAASAGLGA

SEQ ID NO: 85468 - protein, 508 aa, unidentified
  source 1..508: note = Sphingomonas taxi
  REGION 1..508: note = tr|A0A097EF52|A0A097EF52_9SPHN Tryptophan halogenase; OS = Sphingomonas taxi OX=1549858 GN=MC45_07120 PE=4 SV=1
MRDDAIRRVVIVGGGTAGWMAAAAMSRVLGEMPGLTIELIESDEIGTVGVGEATIPQIVLFNKMLGLDEAQFMRETRATYKLGIEFVDWVRPGHRYVHPFGSYGLDMKGIEFHHFWLKGQALGDTTPLDAYSLAIVAGLQGRFGHPRPDQPGSPLSKLSYAFQFDAGLYAQLLRRLAEANGVRRIEGRIVAAERDGETGHVSAVALAAGTRVAGDLFIDCSGFRGLLIEGEMQAGFEDWSAWLPCDRAVAVPCAHGGDRQPLTRSTARAAGWQWRIPLQHRIGNGYVYASDYLSDDEAAATLLANLDGAPLADPRFLRFTAGHRRRAWVGNVVALGLAGGFLEPLESTSIHLVQSAIARLLTYWPTRRFDRVEIDKFNAAHVADYLDIRDFLVLHYKATQRRDTAFWDYCRMLAPPPGLAEKLAVFAANGRVFREHDELFTETSWLSVMVGQGVAAGGYHPAADLLSDAETLSRLNHIRRVVEETAHLLPRQDELLAHYGCAMTGVAA

SEQ ID NO: 85469 - protein, 514 aa, Sphingomonas sp.
  REGION 1..514: note = tr|A0A3R9Y493|A0A3R9Y493_9SPHN Tryptophan 7-halogenase OS=Sphingomonas sp. HMF7854 OX=2315330; GN = HMF7854_02690 PE=4 SV=1
MQPVRTVTIVGGGTAGWMTAAALSQWLTKVEIRLIESEEIGTIGVGEATIPHIRNFLPLAGIDPLAMIARTKASFKLGIQFVGWGAEGESYVHGFGKIGRDMLWLHTHQLWLAARERGLPLRSFDHYALNCAAALRNRFCFPDARNPQSPLADLDYAYHFDASLFARFLRKESEQRGVRRIEGRIVAVDVNGEWGEVERVRLADGRELDGDLWVDCSGMRALLIGEALGVGYEDWSHWLPCDRAQAVPCESVSPLTPYTRATARAAGWQWRIPLQHRIGNGIVYSSALMSDEQAAETLLGSLDGAPLGDPRPVRFAPGRRLEAWRRNVVAIGLSSGFLEPLESTSIHLIQTGIQRLLAMFPANGMAEPDIAEFNRQARFEMEDVRDFIIAHYAVTRRTGEPFWDHVRTMAVPDSLAERLALFASSGRFFKHGAAELFAEESWVQVLLGQGFAARADPVTRFVDDRALGGFLGEVEEVIADVAGRMPDHGAFVAGLPERSPRSSAPAVSFGPVVR

SEQ ID NO: 85470 - protein, 488 aa, unidentified
  source 1..488: note = Sphingomonas taxi
  REGION 1..488: note = tr|A0A2W5PFU5|A0A2W5PFU5_9SPHN Tryptophan halogenase; OS = Sphingomonas taxi OX=1549858 GN=DI544_01810 PE=4 SV=1
MKKRVVIAGGGTAGWLAAAALAVHLGPLIQVTLVESDEIGTVGVGESTIPTTRSFHQLLGIDEAAFVRATGATFKLGISFENWDRIGDRYFHPFGAIGRSVMMADFQHFWLEARARGLSGGFTDHSFEAAAAAAGAFAIGGEAPLSYAYHLDATAYGQFLRALAEARGAVRREGRIAQVARDERGDIAAILLADGTRVEGELFLDCTGFRALLSEGALATGFEDWSHWLGTDSAFAVQSEATAPPAPYTRAIAHDAGWRWRIPLQHRVGNGIVFSSAHLSDEAARDALLRSLDGAPLFEPRLLRFRTGRRRLAWHRNCIALGLAAGFVEPLESTSIHLVMIAVTRLIQSFPFGADSTALAQRFNDQSRAEWEHVRDFIILHYKLTHRDDSPFWRRCRDMAVPESLAARIALFRESAMAHQGQDELFRVDSWAAVMLGQGVMPAAHHGLPGVMATADLHRALADVRAKIAHDVARLPTHGDFVQRFASA

SEQ ID NO: 85471 - protein, 515 aa, unidentified
  source 1..515: note = Sphingomonas naasensis
  REGION 1..515: note = tr|A0A4S1WJB3|A0A4S1WJB3_9SPHN Tryptophan 7-halogenase OS=Sphingomonas naasensis OX=1344951; GN = E5A74_08930 PE=4 SV=1
MRAPNALRKVCIVGGGTAGWIAAAVMAHHFKGKLFEIELVESDDIGTIGVGESTIPPFMELIARLDINEQDFVRATQASFKLGIEFEDWHRKGESYFHPFGAIGQQVELSDFYQCWLKAKHAGQPFELMDFAPAAAMARDGRFMLPFKAHKTPIGGAAYALHVDAKRVAQFLRAHAEERGVKRTEGIVSDVRLDDRGFVDTLTLNDGREVSADFFIDCSGFRALLIGKALGVGYEDWSEWLFCDRAIAAQTQNVGAPRPYTLAQAQDYGWRWRIPLQHRTGNGHVFCSEFLSDDEATRILLDQVEGEVVAGPMVVPFKTGVRDKIWHKNVLSLGLASGFIEPLESTAIHLVYRGMDFFFRYLPDRNCDPRLAAEYNRRMTADYVEIRDFIVLHYCATQRDDTPFWRKCRDMTLPDSLRERIELFRTSGVLREGLDELFRAVSWQSVLEGMGIHPASYHPLVDRIDEAWLFDAMDKVRSQLGQVVATLPTHQEFIDAHCRADAVDLGQPARPAAAR

SEQ ID NO: 85472 - protein, 513 aa, unidentified
  source 1..513: note = Sphingomonas naasensis
  REGION 1..513: note = tr|A0A4S1WUM5|A0A4S1WUM5_9SPHN Tryptophan 7-halogenase OS=Sphingomonas naasensis OX=1344951; GN = E5A74_02475 PE=4 SV=1
MTGTVPRAPLARIVIVGGGSAGWMTAAALARLVAAGTTITLVESDEIGTVGVGEATVPPLLDFNAALGIDENAFVAATQGTFKLGIAFEDWGHVGNRYVHPFGKYGQLTFGIPFHQIWLRQRLLGVAAADPGPFDHYAISIAAAARGRFSKPIANPEAVLSGLAYAYHFDAGLYARFLRDRAEAQGVARVEGKIAHVEKSPDNGHLSGVLLADGRRIEGDFFVDCSGFRALLIGEALGVPYRSWQHWLPCDSAVAVPSATVGPPAPYTRSIAEKAGWRWRIPLQHRTGNGHVYSSAHIDDDAAARALTEGLDGAPLADPRVLRFTAGRREKLWEKNCVAIGLSAGFIEPLESTSIHLIQSGIFRLMALFPDRSFAPVEIDAYNRWLIDEYENVRDFIVLHYHASTRSDSDFWNYCRTMDIPDSLAARLELWRGKGRVFRGSNSLFTEESWTAVLFGQGIIPHDADPLTAMLPVDETTRFLTHMRTIIAQAAEAMPRHEDYIARHCAAAQRSAA

SEQ ID NO: 85473 - protein, 503 aa, Streptomyces sp.
  REGION 1..503: note = tr|A0A2A2YPW7|A0A2A2YPW7_9ACTN Tryptophan halogenase; OS = Streptomyces sp. SA15 OX=934019 GN=CLM62_39605 PE=4 SV=1
MEEYDVIVVGGGPAGATVSAAVALKGHRVLLVERHTFPRYQIGESLLPSTVHGVCRILGVEDEVAAAGFKPKRGGTFRWGRGRDPWQFSFALSPRLADPTSFAYQVERSRFDTILLDNARRVGVDVREGCRVTGVLADEERVRGVRWTGPDGEPREAGARYVVDASGNGSRIHARVGGKRTYSDFFRNMAVFGYFAGGERLPAPNDGNIFCAAFDEGWIWYIPLRDDLTSVGAVVSQENAAAIQRDPAAAWRRLIDACPEVRDLLDGVPRATEAPYDEVRVRRDWSYWKSRLWRPGMVLVGDAACFVDPVLSSGVHLATYGALLAARSINSGLAGVLDEGRLFDEFEARYRHEYGLFYEFLVSFYDMHQDERSYFWKARKLTNVGATELEAFVELVGGLASGDASLTGPGAAGARLTAASSDFDRAVGRLPGSDGLRNPLLESATVRQVFQEGAILQERGVFGGPLEEETPVRAGGLVASEDGLAWVNPAPDKRVGGGQSISG

SEQ ID NO: 85474 - protein, 502 aa, Sphingomonas sp.
  REGION 1..502: note = tr|A0A429VBL6|A0A429VBL6_9SPHN Tryptophan 7-halogenase OS=Sphingomonas sp. HMF7854 OX=2315330; GN = HMF7854_11425 PE=4 SV=1
MSDADPARIASVLIVGGGTAGWMAAAALAKHFHGSGLVITLVESDEIGTIGVGEATIPTIRRFIARLGLSDETVMRATGATAKLGILFEDWHRKGEGFIHPFGLYGEDYGELGFHHLWLQRRRGGDERPINDYSFGAQLAERGRMAIPPRDTPRTPFAVFDWALHLDAAAFARLLRDYAVNSGVKRVEGRIISVEADAGMVRSVTLADGNTLAADLFIDCSGFRGLMIEKALGVGFEDWSEWLPCDAAVAVQSEWKAGDPPPFTRAKACDYGWQWRIPLRHRAGNGYVYSTRHLSADEATAALLADLPGKPLRDPLSIPFRSGRRTRAWQGNTVALGLASGFLEPLESTSIALIETGIERLKELFPTRDLDPALADEFNDATAREMERVRDFIILHYKLTRRDDTPFWVHCRDMAVPPTLERKLALWDARGEFVRYRWEMFHPASWLAMYAGFQRIPRSLHPALATVPAGLTGEGLDRIRAVIDRQVAASPSHQAFLDKVHG

SEQ ID NO: 85475 - protein, 467 aa, unidentified
  source 1..467: note = Sphingomonas naasensis
  REGION 1..467: note = tr|A0A4S1WCA0|A0A4S1WCA0_9SPHN Tryptophan 7-halogenase OS=Sphingomonas naasensis OX=1344951; GN = E5A74_13715 PE=4 SV=1
MSDRAIRSLAILGGGIVGLSAAAAFARALPQLAVSVIETAPDPAALADRLPGSTSTIHRFHARIGLDEATLLRAGAAVPRLGLRFENWPAGAARWFHVHGEHGAPAGNVAFHQLWARARREGRAEAWHRHAVAGVLAEAGKFVHPRPGTPFAAFDYALRLVSERYCAALAALAASLRVTGLAGAFGGIERRADGGVAALLLAGGRRIEADLYIDASGPAAPLAAALAPGFEDWSATLPFDRLDLGAAPASAADPADTIIGGQAGWQFAAPLPGKTILGRVHGDRGEGQSIAIRPGRRSTPWTHNVVALGDAAVALDPLHWPNLHLAQSGIMRAIELLPGRDCHPVEIAEYNRRANAEAERMRDFQALHYLRLGLPIAVPNSLARILALFERRGQFVHEDEDSLLEEIWISALLGLGVLPQAIDPSAAGVPAEVAAAGMAEMRAGLAALPARVPAYAEYLARCEIPAV

SEQ ID NO: 85476 - protein, 519 aa, unidentified
  source 1..519: note = Sphingomonas naasensis
  REGION 1..519: note = tr|A0A4S1WWU2|A0A4S1WWU2_9SPHN Tryptophan 7-halogenase OS=Sphingomonas naasensis OX=1344951; GN = E5A74_02470 PE=4 SV=1
MTNSVRNVVIVGGGTAGWLTAGYLAKLLAADRPGGAAITLVESSDIGILGVGEGTFPTIRKTLARIGVREADLVRRCGASFKQGASFINWRRAPGTPGRDDFLHAFQEADRDGPELLPYWLLGVAGDRPWDAASTPQRRAADACRAPKLPGHPDYVGPLNYAFHFDAGAFAELLREQGIANGVTHLVDTVDAVQLGEDGGIAGLSLRAHGQLTADLYIDCSGFRAELIGKALGQPWKSCRDTLFCDSAVALQLPDQAPDEPIASSTLATGQTSGWIWDIGLAARRGIGHVYSSAHCDADAAERALRAYVGQAGARLETRSFRFDAGYREISWYKNCVAVGLSGCFFEPLEATGIVFSEVAAALIANLFPWAGDFETAARQFNANMRRRYARTLDFLKLHYCLSERRDSDFWNDNVDPRSVPDSLHELLDRWRHRPPNELDIDTNVDIFPEASWQYVLYGMGWKTDLSAKAGVYRFADEARAAFAEVRRHGEFAVQQLPSNRALIRFAQGAAFGAGAHAA

SEQ ID NO: 85477 - protein, 520 aa, unidentified
  source 1..520: note = Novosphingobium barchaimii
  REGION 1..520: note = tr|A0A0J7XXQ8|A0A0J7XXQ8_9SPHN Tryptophan halogenase; OS = Novosphingobium barchaimii LL02 OX=1114963; GN = V474_16230 PE=4 SV=1
MTIDNPSSCRVVILGGGTAGWLAAAYLSRTLKMTGITLVESSEIGIIGVGEGTFPTIRSTLAGLGISEAEFLVRADATFKQGVLFEGWATGKDTYFHPFNIPIGGEDEALLPHWLADTSPQRPSWADAVTVQEQVIRAGRAPKRPEDPDFSGPMNYAYHFDAARFADYLREISIAAGVERIDGKVAAVQRKADGDIAALELANGRIVPGDFFLDCSGFRALLIGQTLGADFTSCAGSLFNDRALAMQVPYAQPGAPVRPYTLATAHEAGWTWDIGLTERRGVGYVYSSRHCSDDEAEATLRRYVGPQGDVLSPRQLRFETGYRQRQWIGNCVAVGLSAGFFEPLESTGIMLIEAALRMVGEFLVPNVLAGAARDARDAAARSFNRLMSARFERIVHFLKLHYCITRRSDTAYWRDNADPATIPEPLRDMLAQWRHRPPSRFDFVVDLETFLPPSYHYILYGMGFETSLGNARYSGAAQAREVFARVRSAHAGARGGLPDHRALLNHYHARTGIQSSKVSR

SEQ ID NO: 85478 - protein, 516 aa, unidentified
  source 1..516: note = Sphingomonas taxi
  REGION 1..516: note = tr|A0A2W5B879|A0A2W5B879_9SPHN Tryptophan halogenase; OS = Sphingomonas taxi OX=1549858 GN=DI640_00770 PE=4 SV=1
MTKRILIVGGGTAGWLTAGYLAKRLGADLPGGVAITLVESRDIGILGVGEGTFPTIRRTLATIGIDEADLIRRCGATFKQGAKFVHWRHAPGQGATDHYSHPFQVADASDGLDLLPYWLLGHGGTENWDEVSNPQKKAADRHRAPKLPTNPDYVGPLNYAFHFDAVALAALLREQGVKNGVRHLTDTVSEVLLDADGAIGGVRTERNGMLDADLYIDCTGFRAELIGKAMKIPFRSCRDVLFCNRAIAAQMPYTRPDEPIASYTISTAQGAGWIWDIGLDRRRGIGHVYSSDHSDDEAAERILRGYLGAAGEKADVRHFKFEAGYREVNWYKNCVAVGLSSGFFEPLEATGIAFAEVSAGMIANLFPWGGDYETSARQFNANMLRRYERALDFIKLHYCISERRDTAFWRDNVADASVPDRLLEMLDRWRFRPPNELDIDGQVDIFTEASWQYVLYGMGWKTDLSAKAGALRYADDARRAFAEVQRQATYAIANLPSNRDLVNYAQSHSFGARAAA

SEQ ID NO: 85479 - protein, 506 aa, Sphingomonas sp.
  REGION 1..506: note = tr|A0A429VBW6|A0A429VBW6_9SPHN Tryptophan 7-halogenase OS=Sphingomonas sp. HMF7854 OX=2315330; GN = HMF7854_11430 PE=4 SV=1
MNEESGRPIRNLCIVGGGTAGWIAAALLGHYAGHLFRIRLVESEEIGTIGVGESTIPPFLQLIARLGISESEFIRETQASFKLGIRFDDWLDRGSSYFHPFGAIGAPNPPVDPYQLWLRARTADPSLELQSLAPASVMADAGRFMLPFKAATTPVGGAAYALHVDAKRVAAFLRRFAEGKGVVRTEGLVDRVEAEGDQVAAIVLRSGERIAADLFVDCTGFRSLLLGQALEVPLDDWSDLLLCDRAVVVQTENIGPPPPFTLAEAQDAGWRWRIPLQHRTGNGHVFSSRHMGADEARSILLAKVEGRPVTEPMLLSFTTGARREMWRGNVVAAGLSAGFIEPLESTAIHLVYRAIDFLLRYLPGTSRAPELAAEFNRRMTGDYVEIRDFIIAHYSLTRRRDAPFWRDVASIELPAGLRHRVAMFADAGMLPEVLDGLFSAVSWQSVLDGMGVLPRRPHPSVANAEPAALARDLRGLEQAIGRTVQQLPTHQAFLDQHCRAEKPLAA

SEQ ID NO: 85480 - protein, 516 aa, Sphingomonas sp.
  REGION 1..516: note = tr|A0A3R9WMX1|A0A3R9WMX1_9SPHN Tryptophan 7-halogenase OS=Sphingomonas sp. HMF7854 OX=2315330; GN = HMF7854_04690 PE=4 SV=1
MTDHRIKNVVIVGGGTAGWMAAAALSRFLNNGYTKVTLIESEEIGTIGVGEATIPPLISFNAMLGINENEFVAETQATFKLGIEFVDWGRLGDRYFHPFGSYGQDLQGIHFHQLYLREKMAGPVPDIGDWAISAVAAQRGRFARPGRAAQAPLASLRYAFHFDAALYAAFLRRYAERHGVRRTEGRIEHVALRPADGFVESVRLADGRSIDGDLFIDCSGFRGLLIEEALNTGYEDWSRWLPCDRAIAMPCALAGAEPEAFTRATARRSGWQWRIPLQHRVGNGHVYSSGFCSDDEAERTLRDHLEGEPGGDPRLLRFTTGRRSLAWNRNVVALGLAGGFVEPLESTSIHLVQSGIARLIALFPDKRFLAVERDEYNRQMQSLAERVRDFVLLHYKATERSDSDFWRQCAATAIPDSLAERIELFRAKGRIFAEGAELFSTSSWVAVMLGQHIVPDEYEPVVDALDENLVANAMEQMRRAIDQTVERLPSHGEFIAQCRSTLQAPSQPSALPEFAF

SEQ ID NO: 85481 - protein, 496 aa, unidentified
  source 1..496: note = Gammaproteobacteria bacterium
  REGION 1..496: note = tr|A0A2N1YA32|A0A2N1YA32_9GAMM Tryptophan halogenase; OS = Gammaproteobacteria bacterium HGW-Gammaproteobacteria-15 OX=2013797 GN=CVV11_18390 PE=4; SV = 1
MQSQAIKRVVIAGGGTAGWMAAAAIAKLMGKHLQICLIESDDIATVGVGEATIPPLLTLHKLLGINEAEFMAATQATFKLGIQFENWRDQGHDYIHSFGTTGQDCWAAGFQHFWLKGQQLGLASDYGDYCPELLATKAGKFAHLPNRPLNYAFHFDAGLYAKFLRSMAEQHGATRTEGKIASVETCEQSGNISALRMASGERIVGDLFIDCTGFRALLIEQTLHTGFDDWSHWLPCDSAVAVQTRATREPVPYTRSIAHGAGWQWQIPLQHRVGNGLVYCSKYYSDEQAKALLLANVSGELLTEPRLIKFRTGMRRKHWNKNCIALGLASGFIEPLESTSIHLIQRSIVRLLQMFPLNGISQADIDEFNQQTEHEVLNIRDFIILHYHVTARRDTAFWRYCQNMPIPESLAHRIRLFKETGRVFKVPNELFGENSWTQVMLGQGIMPEQHHPIVELMSEQELNHFLSQIKQQNQRLVAQLPTHQTFLQSYCPAVSK

SEQ ID NO: 85482 - protein, 526 aa, unidentified
  source 1..526: note = Sphingomonas taxi
  REGION 1..526: note = tr|A0A2W4YVC5|A0A2W4YVC5_9SPHN Tryptophan halogenase; OS = Sphingomonas taxi OX=1549858 GN=DI640_13335 PE=4 SV=1
MATNTGPEATSDHPITNIVVVGGGTAGWLAACLIAARADRGAQRPLSVILVESPDVATIGVGEGTWPTMRRTLERIGIAETDFLLACDASFKQGSRFDGWRTGAADDSYLHPFTAPVDGDPRDIVAAWAQNGGKFADIVGAQGEICHRDLAPRQRAMPDYAGTLNYAYHLDAGKLAALLMRHATERLGVRHVRDHVVGIDSTGDGDIAAVQTRASGAITGDLFLDCTGHAALLIEGHYGVASIDRGGELFNDRALAVQVPVAGGSAIASQTNATAHAAGWIWDIGLPTRRGIGCVYSSAHLGDDAAAQTLERYIRATAPDAPLPVFRQLKFQSRHRARFWERNCIAVGLSAGFLEPLEASAIVLIELSLDALLDNFPSTRGAMDIHATRFNALFRYRWDRIVEFLKLHYVLSERDEPYWRDHRDAASIPPRLAELLTLWRHQPPSRADFPMIDEVFPAASYHYVLYGMGFPPPTRGPIATTDRARTETLLAQVDQRRRMLAAGLPTNRAYLDALRHATAQVMELSA

SEQ ID NO: 85483 - protein, 500 aa, Sphingopyxis sp.
  REGION 1..500: note = tr|A0A1P8WXW1|A0A1P8WXW1_9SPHN Tryptophan halogenase; OS = Sphingopyxis sp. QXT-31 OX=1357916 GN=BWQ93_10655 PE=4; SV = 1
METNRIQSIVIVGGGTAGWMTAAALARILGPDYARITLVESDEIGTVGVGEATIPQINIFNRMLGIDEDDFVRRTKGSFKLGIEFVDWGGIGQRYFHPFGNIGVDMGGVSFHAFWQRLRGEPEFADVEDYSVMAKAARHGKFMRPTTAPGSLLSSIAYAFHFDAGLYALYLRELAEANGVRRVEGKITDVARNGETGHIEHVTMADGRVVGGQLFIDCSGFGGLLIGRALGVPYVDWSSFLPCNRAVAVPCEHGGEFTPYTRSTARSAGWQWRIPLQHRIGNGHVYCSDYISDDEAAAVLLANLDGKPLADPRFLKFTTGHRARFWEKNCVSIGLSAGFMEPLESTSIWMIQTGIARLLSNFPDRGFEPASIERYNRLMVEESELVRDFLVLHYHVTTRDDSDFWNYCRTMPIPDRLAEKIRVFQSSGRAFREHEELFNDTSWFAVMEGQRLGARGFDPVAELMPIEQTRDRLRQIKAAVTASVDHMPLHRDYIREHCAA

SEQ ID NO: 85484 - protein, 500 aa, unidentified
  source 1..500: note = Pelagibacter sp.
  REGION 1..500: note = tr|A0A1Z9LSY7|A0A1Z9LSY7_9PROT Uncharacterized protein OS=Candidatus Pelagibacter sp. TMED197 OX=1986808; GN = CBD57_02645 PE=4 SV=1
MSVNKITVLGGGTAGLVSALVLKARFEKLNIEVVKSDNIGIIGVGEGSTEHWKDFMEFIGVPLKELLLETDATFKYGIMFEDWTKEPYFHNITNELHKVALGQYYAGYAYATINKLKPDEYTSGHCFNNEVLPNYIPSQFHFNTHKLNTFLLKKCKDFGIEVHTDDITDVETDNHGIKRIRGDKGWYESDFYIDCTGFKKYLISKLGAKWVSYKDYLPMNEAIAFPTPDTDEYTPYTLAKAMSSGWMWRIPTYGRWGNGYVFDNRYINAEQAQKECEDYLGFKVNVAKNIKFDAGALDRPWIGNCVAMGLCASFIEPLEASSIGTSIQQSFLLMHTLINYKQTDIDQYNTKVGHIVENIRDFVLLHYIVKRNDSKFWKELKVNLPDSLKHNLDKWSDRMPIKEDFKTDYVLFNAQNFAVLLKELELANIDSLKREYDMLVEHNKNVVKKEVDHHIKTFKTDPMNKQCPIMGHKQYLMKLRSGKETLNQQIDYLQNENSNT

SEQ ID NO: 85485 - protein, 510 aa, unidentified
  source 1..510: note = Sphingomonas naasensis
  REGION 1..510: note = tr|A0A4V3QWN7|A0A4V3QWN7_9SPHN Tryptophan 7-halogenase OS=Sphingomonas naasensis OX=1344951; GN = E5A74_09005 PE=4 SV=1
MTDTTRDNVPLETITIVGGGTAGWMTAALLSHVFRGYRIRLVESDEIGIIGVGEATIPAIRDYMAMAGIDQVEMIRASQATFKLGIDFVNWRDGNDRYFHGFGRIGQDFMWLHPHQLWLRLKRLGVPIRHLDDYALNCRAGMANKFCFPDPRNPGSPISGIDYAYHFDASLLARYLRVRAEAKGVERIEGRIVDTKLDGESGHVAHVVLADGRTVDGDLFVDCSGMRGLLIGQALGVGYEDWNQWLLNDRALAVPCESVSPLTPYTRVTARDHGWQWRIPLQHRIGNGHVFASAQISDDAAAATLLANLDGKPLADPRAVAFRPGKRHKAWEKNVVAIGLSSGFLEPLESTSIHLIQTGITKLIGLFPHRGFAAPDIAEYNRQHDFEFTDVRDFIVAHYKVTEREDTEYWRYLKHMPIPDSLAERLDLFASSGRFFRRAAAELFREESWVQVLMGQGLPVAYDPMVEMIPDETVAAFLHDTEEVIADVARAMPDHADFIARYCKAPLSPN

SEQ ID NO: 85486 - protein, 471 aa, Sphingomonas sp.
  REGION 1..471: note = tr|A0A3R9YLG0|A0A3R9YLG0_9SPHN Tryptophan 7-halogenase OS=Sphingomonas sp. HMF7854 OX=2315330; GN = HMF7854_04695 PE=4 SV=1
MIDRDIRRILVVGDGIVAWCAAAAIRRHLPVIAVDVLAQPVAPDALADRVAATLPSLVGFHEDLRLSERDTLGAAGSSRRAGNLMTDWSGIGERFVHAYGPVGEPVDGSNFHQQWLRSADAAPAAFDSFSENGGAALAGRIPEDSEHGLTLTPGRYRAMIRAFALHLGARERSGAAAATETDAEGRLEAVRTTTGDRLEADLFIDAAGPAGLPGTASAADWEDWSAWLPCDRVAIASAPASDPLPLDRVEGLPWGWGWSSRSPFEQSRGVAWSSRHASDREALAWLGAPDAAVVPLRQGRRRSPWTGNLLAIGDAAVAVEPLEWTNLHLALSLIDRLITMLPGSACAPVEVAEFNRQSAMEAARVRDFLGLHYAVSRRPEPFWRETRERPLPASLQHSLDQFRSRGRLPFYEEETFARDSWLAILIGCGERPRRIDPLATAVPRERALAALRRQHQARLARLPLSAMSPAQ

SEQ ID NO: 85487 - protein, 495 aa, unidentified
  source 1..495: note = Gammaproteobacteria bacterium
  REGION 1..495: note = tr|A0A2N1YB10|A0A2N1YB10_9GAMM Tryptophan halogenase; OS = Gammaproteobacteria bacterium HGW-Gammaproteobacteria-15 OX=2013797 GN=CVV11_13820 PE=4; SV = 1
MQHHTVKKVVIAGGGTAGWVAAAALSKRLKGLIDVVLIESEEIGTVGVGESTVPPVQLFHNLLGINEQEFMQATDATFKLAISFENWGQQGDHYFHPFGVTGKGSFLSDFQHYYLHGLNQGIAAPFGDYCYELQAAKQHKFAKTEQSTINYAYHLDAGRYARFLRRFSEELGAVRIEGKIAQVQQHVNGDIRSVVLESGQEITGDLFIDCTGFRALLIEQTLKTGYERWDHWLPCNKAVVVQTEPGPTVPPYTRAIAHDSGWQWKIPLQHRVGNGLVYASDYLSDDKARQRLLNGLEAPAIMEPRVLSYQTGRRKKFWHKNCVAIGLSSGFIEPLESTSIFLFMSGIIRLLRLFPFNGVTPALTDEYNQQSITEVEKIRDFIILHYHQTERNDSPFWDYCRTMTIPDSLAHRIELFRESAHAFQTGDEMFRLESWSHVMLGQRLQPQSYHQLVAGLNNGELSRHLQQIRDTINSAVHRLPSHRDFLRQYCPSNLT

SEQ ID NO: 85488 - protein, 491 aa, unidentified
  source 1..491: note = Sphingomonas taxi
  REGION 1..491: note = tr|A0A2W5ANW2|A0A2W5ANW2_9SPHN Tryptophan halogenase; OS = Sphingomonas taxi OX=1549858 GN=DI640_13280 PE=4 SV=1
MTACLVAHRWRDRGVRVTLVESPEIGIVGVGEGSTPQLKHFFDTLGIAEADWMPACDATYKLGIGFEGWSDRAGYERYFHPFPTALDGHTAPQFFYNARARRTGRDVEAHPDQFLLPARLAAAHCAPQSAANFPFEVSYGYHFDAYKVGAFLASHATEALSVVHLQRRIASVERAPNGNIAALVDTDGELIAGDLFVDASGFRSTIFSALDIPFASYADALFNDRAVVMPTAHAPGAPIPSQTRATAQSAGWAWHIPLTSRNGNGYVYSSRHLTEAQAEAELRAHIGVETGEARHLKMRVGRVRDSWSHNALAVGLAQGFLEPLEATALHLVIATVEAFLDMVDHGGATDAVRTAFNTRIAARYDGVRDYIVAHYRLNQRHDDPTGYWAEARGVEALSDDLKMLMSTWFTGADMLAAIDRAGLGRYYSAISWHCLFAGYGTFPDAARLIPPGADIDPIDLPKIDDFLTRCASNFGSHASRLRDLADHKDTV

SEQ ID NO: 85489 - protein, 496 aa, unidentified
  source 1..496: note = Sphingomonas taxi
  REGION 1..496: note = tr|A0A097EJ72|A0A097EJ72_9SPHN Tryptophan halogenase; OS = Sphingomonas taxi OX=1549858 GN=MC45_16000 PE=4 SV=1
MNGPATPRRIVIAGGGTAGWLAAAILTRQLGPFADVTLVESDEIGTVGVGESTIPTVRAFHALIGVDEREFMQATGASFKLGISFENWAREGDRYIHSFGDVGQSTWMSDFHHFWLEAQARGVAEPFGSYCYEHEAAAADRFAIGGTPALNYAYHFDAGRYARFLRGKAEANGLRRLEGKIDRVVRDTESGDITTLILDDGTAVAGDLFFDCTGFRALLIGEALGVGFEDWGDWLPTNRALAMQTEATGPARPYTRAIAHDAGWRWKIPLHHRVGNGLVYCADYLSDDAAHARLLATVEGAALIEPRLIRFRTGRRKAAWQHNCVALSLASGFVEPLESTSIHLIMIALTRFLQLLPSERPSAAAIARFNVQAAQEIEGVRDFIILHYHLTGRDEPFWRDRRAMTIPDSLSDRIALFRDSANAYQADHDLFRVASWLQVMLGQRLAAASHHPLVRLMPSDQLRSALRDMRTTIARSVDGLPSHQVFLDGYVRTAAN

SEQ ID NO: 85490 - protein, 510 aa, unidentified
  source 1..510: note = Nitrospirillum amazonense
  REGION 1..510: note = tr|A0A560IEP4|A0A560IEP4_9PROT Tryptophan halogenase; OS = Nitrospirillum amazonense OX=28077 GN=FBZ92_111105 PE=4; SV = 1
MTFAPLRDIVIVGGGTAGWMAAALFSHILGPGGHRIHLVESEEIGTVGVGEATIPPIAIFNRALGLDENDFLRQTQGTIKLAIEFVDWLRPGHRYLHSFGAFSRSLGLGHFQDFWLRAHRLGMTDDWEPYILNSVAARRGRFIQPDPRRQSPLEPLAHAFHIDAGLYARYLRRFAEQRGVRRTEGKIVRTVLRAHDGFVDAVEMADGTRVAGDLFIDCSGFRGLLIEQALNTGFEDWTHWLPCDRAWAVPSAHDGSAAALTPYTRSTARPAGWQWRIPLQHRTGNGYVYSSRHASDDEAAATLMANLDGEALAEPRQLRFTAGRRRRFWNRNIVAVGLAGGFMEPLESTSIHLVQSAISRLITLLPNHGFDPAVADEFNRASAVEYERIRDFIILHYTATERADSPFWRECRGRPVPEELARRMRVFRALGRVARDHDELFSEVSWLHVFLGQGVWPRDHHPLADQLSEEDLRRFLDDIKAAVAREVDAMPTHADFIARHCKADSLTRTA

SEQ ID NO: 85491 - protein, 493 aa, Sphingopyxis sp.
  REGION 1..493: note = tr|A0A1P8X397|A0A1P8X397_9SPHN Tryptophan halogenase; OS = Sphingopyxis sp. QXT-31 OX=1357916 GN=BWQ93_10725 PE=4; SV = 1
MLGGGTAGWMTAAALAKLLPGQADIHLVESEEIGIVGVGEATLPHLREFIRRLGLDEMDFMRKTRATFKLGIDFVDFGAIGEGYIHPFGAYGTDIAGVGFHHYWLRMKAAGRVPPICDFSLPIVASRARRFAPIPAGGDFLDSSYSYAYQFDATRMAPMLRAFAEAHGVRRSEGKVVGVERDAASGDIAALRTDRGDVIAGDLFVDCSGFRALLIGETLGSPWEDWSQWLPCDRAAALPCTAPDGPIEPYTRATAMPAGWRWRIPLQHRVGNGYVYSSAHLSDDEACGAILGAIEGEPLADPRVLRFRAGRRTKSWDRNVVAIGLASGFLEPLESTSIHLVQQAVTRLVELFPQRRIDTSDRDTFNALVDREYDRIRDFLILHYHATRRDDSDFWNHVRTMAVPETLQRKMDLWRTSGRVELYTQGLFLEASWVAVYLGQGVVPLSYDQRADTPAPDRLARSLTELDQAIRQRVAAWPDHGDYLRQSGAWEAA

SEQ ID NO: 85492 - protein, 511 aa, unidentified
  source 1..511: note = Nitrospirillum amazonense
  REGION 1..511: note = tr|A0A560JLK4|A0A560JLK4_9PROT Tryptophan halogenase; OS = Nitrospirillum amazonense OX=28077 GN=FBZ87_106120 PE=4; SV = 1
MDRPIQHIVIVGGGTAGWLTAGVIAARHKARMASGFKVTLVESPNVAIIGVGEGTWPTMRTTLEKMGVSETEFFRHCDTAFKQGGKFVGWTTGAPDDAYYHPLMLPHGWSQVNLVPHWLQDGRGRTFSAAVCPQEAICEEGLAPKTIATPEYRGLANYAYHLDAGKFASFMQKHCTEKLGVHHVLADVTEVKQDESGDITGLVTEQAGEITGDMFVDCTGFRALLIEKTLGVGFKDCRDVLFCDTALAIQVPHESDDAPMASQTIATAQSSGWIWDIALPTRRGLGYVYSSDHIDEEAARAELARYAGTQAEARKIPIRSGHREMFWKNNCVAVGLAAGFLEPLEASAIMLIELSAKIIADQLPARRSVMDVVARRFNEVTHYRWGRIIDFLKLHYVLTQRTDTAFWRDNVDPASTPERLQDLLRLWKYRAPWFLDEFDRLEEVFPAASYQYVLYGMGFRTEVDPVENSADALLASRIMEENAAMAQKMRANLPKNRDLVRKIRDHGMQSI

SEQ ID NO: 85493 - protein, 511 aa, unidentified
  source 1..511: note = Nitrospirillum amazonense
  REGION 1..511: note = tr|A0A560G773|A0A560G773_9PROT Tryptophan halogenase; OS = Nitrospirillum amazonense OX=28077 GN=FBZ88_103168 PE=4; SV = 1
MDRPIQHIVVVGGGTAGWLTAGVIAARHKARMASGFKVTLVESPNVAIIGVGEGTWPTMRTTLEKMGVSETEFFRHCDTAFKQGGKFVGWTTGAPDDAYYHPLMLPHGWSQVNLVPHWLQDGRGRTFSAAVCPQEAICEEGLAPKTIATPEYRGLANYAYHLDAGKFASFMQKHCTEKLGVHHVLADVTQVKQDESGDITSLVTEQAGEITGDMFVDCTGFRALLIEKTLGVGFKDCRDVLFCDTALAVQVPHESDDAPLASQTIATAQSSGWIWDIALPTRRGLGYVYSSNHIDEEAARAELARYAGTQAEARKIPIRSGHREMFWKNNCVAVGLAAGFLEPLEASAIMLIELSAKIIADQLPARRSVMDVVARRFNEVTHYRWGRIIDFLKLHYVLTQRTDTAFWRDNIDPASTPARLQDLLRLWKYRAPWFLDEFDRLEEVFPAASYQYVLYGMGFRTEVDPVENSADALLASRIMEENAAMAQKMRANLPKNRDLVRKIRDHGMQSI

SEQ ID NO: 85494 - protein, 504 aa, unidentified
  source 1..504: note = Idiomarinaceae bacterium
  REGION 1..504: note = tr|A0A2E4ZAG6|A0A2E4ZAG6_9GAMM Tryptophan halogenase; OS = Idiomarinaceae bacterium OX=1898113 GN=CMF22_03345 PE=4; SV = 1
MSMSQPYHIVILGGGSAGWMTAAALSKVLDRQHYKITLIESAAIGTVSVGEATIPGIREFNQLLQIDENEFIRETHGSFKLGIAFENWQNIGDEYMHPFGTYGVTLNGVPFHHYYLRHEREQGSGNAIPLPELNLEWSAALAHKFTRPIADKRSPLGHIKYAYHFDAAAYARYLKNYATQRGVVALEDRMLEAKRHANGYVASLLLEKQGEVRGDFFIDCSGFKALLIGETLGVSYHDWRKWMPCDSAVALPGQHDADNILPYTRSIAHHEGWRWKIPLQHRTGEGWVYSSRFTDSDKAEREFRETIGNFDSKANHLRWINGRRDEAWKHNVCSIGLSAGFIEPLESTGLQLTQSGIMRLISLLPGKGDMTERAKAFNRYTAEEITNIRDFVMCHYKLTNRDDSEFWRYCRDMEIPDSLQERLDLYRENASIFRNSNNELFNEISWFSMFHGQGLTPEQVHPIAQQMPAATMQQHLTTIQRVFKQSVAQLPSHADFIRKHCQAS

SEQ ID NO: 85495 - protein, 531 aa, Luteibacter sp.
  REGION 1..531: note = tr|A0A1K1MPD9|A0A1K1MPD9_9GAMM Tryptophan halogenase; OS = Luteibacter sp. UNCMF366Tsu5.1 OX=1502758; GN = SAMN02800691_0531 PE=4 SV=1
MARLKNVLIVGGGTAGWLTACYLAKAVNALDPRSVQVHLVESPDIGLLGVGEATFPSIRGTLAAIGLDERRFLVGATATYKQGIHYRHWVRPPGTPGADHFFHPFNAPSQRPGGPDLLPYWLLGAAPEGMPFADAVSMQSTLVDHSRAPKRARDSDYQGPMNHAFHFDAACFARVLAEHGQQSLGVVRHVATVERTELDETGAIARVVTKEEGDLTADLYVDCTGLRGMLIGNVMQSPFRSRADVLFANRAVAMQVPYDTPDTPIPSYTISTAQEAGWTWDIGLQKRRGVGYVYSSRHTSDDRAEDVFRRYLGQAAENLKAMHIRFETGYRPEHWRKNCVAVGLAGGFVEPLESTGIALIELATYLLSHLLPSDTDGMESAARHFNDMMVARYDRIIDFIKMHYCLSQRRDSAFWIDNADPATIPTTLQEKLARWKHRPPHRLDFVTDLEMFMPCSWQYILYGMEFKTDLEPMRSAYPHVAAARHEFAMIQQAAIRALDDLPDHRALVEQMCGEHVRRGQSQEPGVVHATA

SEQ ID NO: 85496 - protein, 528 aa, unidentified
  source 1..528: note = Xanthomonadaceae bacterium
  REGION 1..528: note = tr|A0A411HH37|A0A411HH37_9GAMM Tryptophan 7-halogenase OS=Xanthomonadaceae bacterium AQ6-296; OX = 2511995 GN=ELE36_04695 PE=4 SV=1
MAALRKILIVGGGTAGWLTANYLARTLNIAAQQSAQNIQMESIQIELVESADIGIIGVGEGTFPSIRGTLAAIGLDEARFLRGANATFKQGIKFANWARTPTASATSHYFHPFSLPSQRGDSPELLPYWLLGAAAPGAAFADAATMQKHVADASRAPKRRTDSEYQGRLNYAYHFDAGRFASLLAEHGRSLGVQHKIAHVEKVELDEQGAIARVITREAGALTADLYIDCTGMRGGLIGDALGSPFRSTRDTLFVDRAVAIQVPYPRADTPIPSYTISTAHEAGWTWDIGLQARRGIGYVYSSRHTDDSRAEQVLRQYIGPAAENLNARLLKFETGFRPEQWRKNCVAVGLSAGFLEPLESTGIGLIEIAAYLIAHLLPNDGDMARVAKLFNAQMTTRYERIIDFIKMHYCISQRRDSSFWIDNADAASTPESLQDKLAMWRCRPPHRLDFVTDLEMFMPASWQFVLYGMEFKTDLSGMRHAYPRVDAAQREFEMIRAVAPHAIADLPDHRALIEEICAHGFASKPAA

SEQ ID NO: 85497 - protein, 515 aa, unidentified
  source 1..515: note = Nitrospirillum amazonense
  REGION 1..515: note = tr|A0A560FXS8|A0A560FXS8_9PROT Tryptophan halogenase; OS = Nitrospirillum amazonense OX=28077 GN=FBZ88_108211 PE=4; SV = 1
MTFAPLRDIVIVGGGTAGWMTAALFSHILGPGDHRIHLVESEEIGTVGVGEATIPPIAIFNRALGLDENDFLRQTQGTVKLAIEFVDWLRPGHRYLHSFGAFSRSLGLGHFQDFWLRAHRLGLTDDWEPYILNSVAARRGRFIRPDPRRQSPLEPLAHAFHIDAGLYARYLRRFAEQRGVRRTEGKIVRTVLRAHDGFVDAVEMADGTRVAGDLFIDCSGFRGLLIEQALNTGFEDWTHWLPCDRAWAVPSAHDRSAAALTPYTRSTARPAGWQWRIPLQHRTGNGYVYSSRHVSDDEAAATLMANLDGEALAEPRQLRFTAGRRRRFWNRNVVAVGLAGGFMEPLESTSIHLVQSAISRLITLLPNHSLANGGFDPAVADEFNRASAIEYERIRDFIILHYAATERADSPFWRECRDRPVPEELARRMRVFRALGRVARDHDELFSEVSWLHVFLGQGVWPRDYHPLADQLSEEDLRRFLDDIKAAVAREVDAMPTHADFIARHCKADSPTRTA

SEQ ID NO: 85498 - protein, 507 aa, unidentified
  source 1..507: note = Pseudoalteromonas amylolytica
  REGION 1..507: note = tr|A0A1S1MRD4|A0A1S1MRD4_9GAMM Tryptophan halogenase; OS = Pseudoalteromonas amylolytica OX=1859457 GN=BET10_18910; PE = 4 SV=1
MKIKRIAILGGGTAGWLCANHIGHALSHHGDIQITVIESATIDSIGVGEGTVPYIQNSLKRFGISEAEFLVKCDATFKQGIKFVDWLNPDVHGANYYYHPFDEPFAQGYDITNYLLSKQIKFENVGIQARICELGLAPKRKSDTEYQGSLAYAYHFDAAKFAALLACNAKEKFSVKHQFATIVDATCDEHGNIVSLIDEQGEQLEFDFYLDCSGFRALLTDKALKIPFVDKSDELLVDTALVKQIPLEKDEQLPPYTTATAHKAGWIWDIPLTTRRGTGFVYASKYMSEDEAKASYADYLNIPVAELSVRKLDMKVGFREQCWHKNCVSFGLAQGFVEPLEATSILLTDFCGELLAKNFPKTIEESNAMSTYFNDVMRYVWERTTDFIKLHYCISDRIDSDFWQENRDMLASSAELKQRLDKFKFRVPTQSDFFSRFDLFDHKNFLYVLYGMEFKTELKELSDTEKQMSEQLLAQNTQMINSAKMQLLNHRQWLESLKTAYQKIHGE

SEQ ID NO: 85499 - protein, 504 aa, unidentified
  source 1..504: note = Niveispirillum cyanobacteriorum
  REGION 1..504: note = tr|A0A2K9NH69|A0A2K9NH69_9PROT Tryptophan halogenase; OS = Niveispirillum cyanobacteriorum OX=1612173; GN = C0V82_18905 PE=4 SV=1
MTNLRRILIVGGGTAGWMAACAMNQAVKRLGTVVELVESEEIGTIGVGEATVPTIRDFNRSIGLDEVAFMKATQGSFKLGIAFQDWRAKGTSFFHGFGDYIVNAGPYSTLNHWLVARHLAGQDAVGPFDDYHMAAVMAAAGRFAAPESDPRSPYAYFSYAFHFDASLYARMLRAKAEAEGVVRHEGRITQVDRHADTGFITQVHLADDRILAADLFIDCSGFVSLLSDKTLAEPWVDYSHWLPVDRAWAVPCAGTGTPAPFTRATALEAGWQWRIPLQHRTGNGYVFSSAHVTEDAARERLLAGLDGRVLAEPRLLRFRTGRRQRFWIGNCIAIGLSSGFVEPLESTSISLIQGGITRLVNLLPDMDFNPGLAAEYNRIQALEFDRIRDFIILHYALNGREDSEFWRERRRIPLPDTLAEKIETFRATGQVVLLNEETFVTPSWQALFIGLGLIPQRLDPLMAAQDRGEVLETLRLRQQSLAQAAARLPSHGDFINRFCKADPA

SEQ ID NO: 85500 - protein, 501 aa, unidentified
  source 1..501: note = Niveispirillum cyanobacteriorum
  REGION 1..501: note = tr|A0A2K9NKN0|A0A2K9NKN0_9PROT Tryptophan halogenase; OS = Niveispirillum cyanobacteriorum OX=1612173; GN = C0V82_21735 PE=4 SV=1
MHKPIRSIVIVGGGTAGWMSAAALARVAGKTHKLHLVESEEIGTVGVGEATIPPIATFNRVLGIDEDEFLRATNGTIKLGIEFKDWYRQGHRYMHAFGALGRPLGMTHFHHVWRRANALGLDGDWEQYVYNTVAARALRYARPGPQRRTPLEPLTHAFHFDAGLYAAFLRRFATERGVVRTEGKIRRTILNAFNGHVEAVEMEDGTKIEGDLFIDCSGFRGLLIEQALGTGFEDWSHWLPCDRAWAVPCANGGEFTPYTRSTAHPAGWQWRIPLQHRIGNGHVFASRYMGEEQARDILMANLDGTPQAEPRLLRFTAGRRKKMWNRNVVAVGLSSGFLEPLESTSIHLVQSAITRILMALPNDGIDAVEVDDFNAKAQAEYERIRDFIILHYKATERDDSPFWRDCRAMEIPEELERRMRVFASHGRVSRVFDELFLDVSWIQVFLGQGVIPRSWHPLADQLSETELKEFLAEIKAMIAHEMAALPTHADFIARQCAARPS

SEQ ID NO: 85501 - protein, 515 aa, unidentified
  source 1..515: note = Proteobacteria bacterium
  REGION 1..515: note = tr|A0A1W9K8A8|A0A1W9K8A8_9PROT Tryptophan halogenase; OS = Proteobacteria bacterium ST_bin14 OX=1978762; GN = BVN32_00435 PE=4 SV=1
METLVRTVVIVGGGSAGWIAAARIAARNGTGPDAVRVVLVESAAIGTIGVGEGTWPTMRNTLRKVGISETRFIRKCDAAFKQGAKFVRWTDGTDADGYYHPLNPPQGATQINLSGHWQQRQHDTPMAFADSVDFQPALCEAGLAPKAITTPEYGAVANYAYHLDAGKFATMMRDHAVGTLGVEHFVDDVIGVRMAENGDIAGLDLEQHGALDGDLFVDCTGFAALLIGGVYDSKFRDCSDVLFADHALAMQVPYPEEDSPIACHTISTAQSAGWIWDIGLWTRRGIGHVYSSSHISHDQAEAELRAYIGPQSEALTARRIAIRAGHRETFWSHNCVAVGLSAGFLEPLEASALMLVETAVDCIADRLPRTRPVMETMARQFNAAFTHHWERIIEFLKLHYLLTKRTDTSFWRDIVAPESVPDGLRDKLEMWRYHPPTAQDFPHQPEVFSWPSYQYVLHGMDFANHYARLADLDAETGAARRWFANNERVRGQAMSQLPKHRELLGKIRTHGLQTV

SEQ ID NO: 85502 - protein, 505 aa, unidentified
  source 1..505: note = Niveispirillum cyanobacteriorum
  REGION 1..505: note = tr|A0A2K9NJV2|A0A2K9NJV2_9PROT Tryptophan halogenase; OS = Niveispirillum cyanobacteriorum OX=1612173; GN = C0V82_23630 PE=4 SV=1
MMQTKPLDITIVGGGTAGWMTAALLAKATKGRLGRITLIESAEIGTVGVGEATIPPIQFFNQLLGIDERDFVARTQASFKLGIEFRNWTRTGHSYIHPFGSYGANIDAVSFHHYWLRARALGDTTDIGDYCPAIVAARQGRFAPEIPQGPASAPLLSYAYHFDAALYAAYLRDFATRLGVTRIEGRITGIRQRAEDGYISNLDLADGGSVGGDLFIDCSGFRSLLLGQTLGVGFKDWSRWLPCDRALAVPCEGGREITPYTRSTAHTAGWQWRIPLQHRIGNGHVYSSAFMADEEAEALLLGHLDGRPLADARPLRFTAGRRDKAWVRNVLGVGLAGGFLEPLESTSIHLIQTALFRLLALMPTDVRDQATRDEFNRLSEIEYEQIRDFLILHYNATERDDSDFWNYCRTMPIPDSLRHKIDLFRARGRVARFDGQLFAEASWLAVFLGQGVDPVGYDPMADIMPAAELQQRLFRHRDYVQRAVATMPAHRDFIDRHCKAPATAA

SEQ ID NO: 85503 - protein, 529 aa, Sphingomonas sp.
  REGION 1..529: note = tr|A0A4R2SFB2|A0A4R2SFB2_9SPHN Tryptophan halogenase; OS = Sphingomonas sp. PP-CE-1A-559 OX=2135657 GN=C8J42_11522; PE = 4 SV=1
MATNTGPGITSDHPITHIVIVGGGTAGWLTACLIGARADRDTARPLSVTLVESPDVATIGVGEGTWPTMRRTLERIGITETDFLLACDAAFKQGSRFDGWRTGAADDSYLHPFTAPVDGDPRDLVSAWSEHGGRFADMVGAQGAICHHDLAPRQRAMPDYAGTLNYAYHLDAGKLAALLTRHATERLGVRHVRDHVVGIDGTEHGDIVAVRTRASGAIAGDLFVDCTGHAALLIGDHYGVATIDRDRELFNDRALAVQMPVAAGSPIASQTNATAHAAGWIWDIGLPTRRGIGCVYSSGHLSDDAAADTLTRHIRATAPDAPDAPLPTFRQLKFQSRHRAKFWERNCLAVGLSAGFLEPLEASAIVLIELSLDALLDNFPSHRGAMDIQATRFNTLFRYRWDRIVEFLKLHYVLSERDEPYWRDHRDAASIPPRLVELLALWRHQPPSRADFPMIDEIFPAASYQYVLYGMGFPPPTRGPIATADRARTETLLAQIDQRRRMLAAGLPSNRAYLDALRHTTAPAMELSA

SEQ ID NO: 85504 - protein, 490 aa, Streptomyces sp.
  REGION 1..490: note = tr|A0A429BY05|A0A429BY05_9ACTN Tryptophan halogenase; OS = Streptomyces sp. WAC 01325 OX=2203202 GN=DMH25_04385; PE = 4 SV=1
MTSDYDLIVVGGGPAGSTAATAVALRGHRVLLLERETFPRYQIGESLLPATVHGLCRILGVADEVARAGFTLKRGGTLRWGRTPDPWQFSFAMTPRLPEPTATAFQVERSRFDEILLRNAERVGVEVREGSPVRRVLTEGERVHGVEYTDRDGTTRTAHARYVIDGSGNTSRLHGKVGGARVYSDFFRNLAVFGYYAGGRRLPEPDSGNIFCAAFDAGWLWYIPLRDDLTSVGAVISPEHYPAVQQDPRAAWQDMIKACPEVARLLTDVPVATEQPYDQVRVRKDYSYWKSSLWIPGMALVGDAACFVDPVLSSGVHLATYGALLAARAVNSALDGSVPEDRGFAEFEARYRREYGVFYDFLIAFYDMERNEDSYFWAAKKVTEVDIDEVAAFAELAGGVASGDEAVGATGRLGTYWSAAAAELDAAVDHLTAPEEPRTNPLLTTEVVTNTFRTGNALQEQALYGGPLDAPTAPTPDALTVTEDGLSWVV

SEQ ID NO: 85505 - protein, 503 aa, unidentified
  source 1..503: note = Niveispirillum cyanobacteriorum
  REGION 1..503: note = tr|A0A2K9NHI0|A0A2K9NHI0_9PROT Tryptophan halogenase; OS = Niveispirillum cyanobacteriorum OX=1612173; GN = C0V82_19490 PE=4 SV=1
MPTDNRIRDLVIVGGGTAGWMTAASLANHFQGSGLKITLIESSAIGTIGVGEATIPTIRRFYQSLGLRDLDVLKATHGTVKLGIRFDGWLNKDSSFIHPFGVYGQDLRDIPFHQYWLRLRAAGEKVDLGDYSLAVALARGGRFTTPSPNPPSTLSVFDWALHFDAGLFAQLMRQTAEKLGVQRIDAKIEKVELNPENGHIAGLLLDSGATVTGDLFVDCSGFRGLLIEGAMSAGYEDWGQWLLCDRALAAQGYAITPPPPFTRVTAHNAGWRWTIPLQHRTGHGYVYSSRHISDSDAEAELLSAVGGDLKMAPRRITFTPGRRRQAWKGNCVAIGLSSGFLEPLESTSIALIETGIDKLKQLFPQRDIDPLLVDEYNDWSRREMERVRDFIILHYWLNRREDTAFWRDCRAIDLPDTLTRKVQMWKRRGHMVRYRWEMFQPASWLAIYAGFDFLPDGYDPALDGFDVPSLSRGLAGMRKAIADTVADCPTHQEFIDRYAKVVV

SEQ ID NO: 85506 - protein, 534 aa, Amycolatopsis orientalis
  REGION 1..534: note = tr|A0A193BSD0|A0A193BSD0_AMYOR Uncharacterized protein OS=Amycolatopsis orientalis OX=31958 GN=SD37_05170; PE = 4 SV=1
MGVSGPQRSTSVARPIEKIVIVGGGTAGWLSAAYLNRAFGGKIDITLVESPRIPRIGVGEATVPTLRTTFSFLGMKEEDWMPKTNAVFKSAVRFNDWRKPHEGRDGHTYYHPFFTVPEPAVPNYEKPFHKRFGRGVSLAHFWLKQRLAGDTRVRETFGDAGMALQRLCELNKAPKPLPGTDAPDPGYRYAYHFDAALIAKYLRELATGRGVKHVSADVKSVTVDPRGTIEKIVTDTAGEIEADLFLDCTGFRGLLINETLKEPFVSANDVLLCDSAVALPAAHLDGGLRPYTSATAKPDGWIWEIPLADRDGTGFVYSSAFTTPEKAEEQLRQHLGGRDHDVPGNHIKMRVGHNRRSWVNNCVAVGLSSCFVEPLESTTIALIEYQLALLVLHFPDVEFDERRKARYNELMVGAFEDMRDFIVMHYTLTDRDDTEFWRAVREAPIPASLEEKLTEYADSVIIPDGSQLRLFETRSLWAILSGMDFDFRKAPPSVELMNDAAAWEMFEQIDKEREIYSASLPDHREYIEALHRGL

SEQ ID NO: 85507 - protein, 508 aa, unidentified
  source 1..508: note = Streptomyces bingchenggensis
  REGION 1..508: note = tr|D7C2E3|D7C2E3_STRBB Tryptophan halogenase; OS = Streptomyces bingchenggensis (strain BCW-1) OX=749414; GN = SBI_00676 PE=4 SV=1
MDHVDNADNMDNADNFEEFDVVVVGGGPAGSTMAALVAKKGHSVLVLEKESFPRYQIGESLLPSTIHGICRLTGAADELAKAGFPLKRGGTFRWGANPEPWTFSFSVSPKMAGPTSTAYQVERSKFDEILLNNARRVGAQVREECDVIDVVEDGDRVTGVRYTDSQGVERHAAAKFVVDASGNKSRLYKRAGGKREYSEFFRSLALFGYFEGGKRLPEPTRYNILCVAFESGWFWYIPLSDTLTSVGAVVRREMAEKIQGDPEKALQALIDECPKISDFLSPAKRVTEGQYGQIRVRKDYSYHNTTFWRPGMMLVGDAACFVDPVFSSGVHLATYSSMLAARSINSVLDGVVEENAAMQEFEARYRREYSVFYEFLVSFYEMHRDENSYFWQAKKVTKASRPELESFVDLVGGVSSGEAALTSADALAERMQSHSKEFSDAVDQMGGTTGGGWGNLVNSSVVREAMVEGSKVQMQALLGEDAEDETPLFEGGLIPSPDGLSWVHAPTE

SEQ ID NO: 85508 - protein, 503 aa, unidentified
  source 1..503: note = Hephaestia caeni
  REGION 1..503: note = tr|A0A397ND54|A0A397ND54_9SPHN Tryptophan halogenase; OS = Hephaestia caeni OX=645617 GN=DFR49_4169 PE=4 SV=1
MDMTSPDRIRSLVIVGGGTAGWMAAAALAKHFQRSDLAITLVESSAIGTIGVGEATIPTIRRFYARLGMSDMEVMRATHATAKLGISFEGWDHPGSRCLHPFGLFGQDYGGIGFHHLWLDARARGDETPLTAYSLGAGLADHGRMALPQPNPPTPLATYDWALHLDASLFAQHLRGFAERAGVTRIDARVEDVELAEDGRIAAIRLDEGRRIAGDFFIDCTGFRSLLLGETLGVDYVDWGQWLPCDTAIATQTENDAATPLPPHTRVIARDAGWQWRIPLQHRAGNGIVYSSAHASDDEALAALTADLPGTPVTEPRRIPFRPGRRRLSWAKNCVALGLAAGFVEPLESTSIAVIETGIERLKQLFPDTRLDPALASEFNDATGRELDRLRDFLVLHYKLARRGDTSFWRACAAIDVPETLRHKLAVWDAGGEFVRYRWEMFHPSSWLAIYSGFGRLPQRLSPALDGIDRAGLDAAMAKMRTSVAETVARAPSHAQFLSAIPQ

SEQ ID NO: 85509 - protein, 488 aa, Streptomyces sp.
  REGION 1..488: note = tr|A0A429BFQ7|A0A429BFQ7_9ACTN Tryptophan halogenase; OS = Streptomyces sp. WAC 01325 OX=2203202 GN=DMH25_11800; PE = 4 SV=1
MAVVGGGPAGSTLAALVAKQGHRVVVLEKENFPRYQIGESLLPSTIHGVCRLSGAADDLAKAGFPLKRGGTFRWGARPEPWTFAFSVSPRMAGPTSVAYQVERSKFDDILLKNARKQGADVREGCSVRGVIEEGERVRGLTYADADGNEREVRARYVVDASGNKSRLYNKVGGTREYSDFFRGLALFGYFENGKRMPEPNRFNILCVAFESGWFWYIPLSDTLTSVGAVVRREMAEKIQGDPEKALRALIDECPMIADHLSGATRVTEGQYGEIRVRKDYSYHHTTFTRPGMMLVGDAACFVDPVFSSGVHLATYSSLLAARSLNSALEGKVDEDAAMKEFEARYRREYGVFYEFLVSFYEMHRDENSYFWQAKKVTANSEPELQSFVELIGGVSSGEQGLMNTEALSERLADNSEEFATAVEKFAANEDGSSVPLFSSSVVRNAMQEAGQVQMRALLGEDAEPETPMFPGGLVSSPDGLYWLPATTA

SEQ ID NO: 85510 - protein, 510 aa, unidentified
  source 1..510: note = Niveispirillum cyanobacteriorum
  REGION 1..510: note = tr|A0A2K9NMJ6|A0A2K9NMJ6_9PROT Tryptophan halogenase; OS = Niveispirillum cyanobacteriorum OX=1612173; GN = C0V82_25815 PE=4 SV=1
MKLYNTNTQSPVSVLIVGGGTAGWMTAAALSAKLAGTGVSIRLVESAEIGTVGVGEATVPHIRHFNASLGFDEADFMSRTEATFKLGIEFRDWGRKGDAYIHPFAAFGRDIGGVPFHHHWTRARRAGRVPAGGLDAVSLPIQAARLGRFGHPSPDPNSFFSTFSYAYQFDAGLYAAYLRSYAEARGVVRTEGKVRDVSVSADGHVQAVTMENGERIEADLFIDCSGFRGLIIEGALKTGYEDWTHFLPCDRAVAVPCANDAPPAPYTRATARDAGWMWRIPLQHRAGNGHVYCSGFITDDAAEQALLAQLDHPPQATPRRLRFTTGKRKRQWVGNVVAIGLSAGFLEPLESTSIHLIQLGIGRLLDLFPTSRDMDPLDAVEFNRLMDLEYERVRDFIILHYVATQRDDTPFWNHCRTMAIPDSLATKMDLFKERGIVTLYRDGMFLEPSWIAVYLGQNILPDQVDPRAALVPDAEIDRLIAMEAENCRRAASSMPAHGEILSRYKAQVPA

SEQ ID NO: 85511 - protein, 414 aa, unidentified
  source 1..414: note = Rhodopirellula maiorica
  REGION 1..414: note = tr|M5RT10|M5RT10_9PLAN Tryptophan halogenase; OS = Rhodopirellula maiorica SM1 OX=1265738 GN=RMSM_00652; PE = 4 SV=1
MMKSSYDCVVIGGGPGGCTAAAIVAQSGLSTLLIEREAFPRFHVGESLMPESYWPLERLGLLERMKEAQFQVKKSVQFVSHHGNESAPFFFRQHDMRDCSDTWQVERSEFDKMLFDRAEELGADCYDQTRLIDVRFDESQKIVGVRVRDRDGNERDIDCPVVIDGTGQQSFIANKLKLKVVNPDLRKVAFWSYYRDAVRDEGDNGGATIILNTESKESWFWFIPLSRGITSIGCVGDTDYMIKGRGKPEEVYFEELERCPGLKPRLENATRLGDIRAAKEFSYMTKQHAGDGWVLVGDALGFIDPVYSSGVYFALEMGVRAGDAVVEGFKKNDLSAAQLGGWTESFLEGVHWLRKLVAAFYTKEFSIGRFMKEYPEHRGRVTDLLIGRIFEESAEQLFKDMDTSIEKAKMEAAM

SEQ ID NO: 85512 - protein, 444 aa, Halothiobacillus neapolitanus
  REGION 1..444: note = tr|D0KWT2|D0KWT2_HALNC Tryptophan halogenase; OS = Halothiobacillus neapolitanus (strain ATCC 23641 / c2); OX = 555778 GN=Hneap_2237 PE=4 SV=1
MPRVETSEPVHHCDVLVIGGGPAGSTVAPLLVERGYRVVVLEKAHHPRFHIGESLLPANMPLFDRLGVGEEIRAVGMEKWGAEFVSPHHDHKQVFEFAEAWDKSMPMAYQVPRAQFDEILIRNARQKGAEVIEGCRAKNVEFLPDDHPSGPGARVTAVMDDGTQTEWKTKFVVDASGRDTFLANKMQSKQRNPKHNSSAVYGHMRGALRNEGKAEGNITIFWFDHGWFWFIPLMDGITSIGMVTWPYHMKSRGDRSLEQFLRDNIESCAPLAEQLRGAEFVNNVEATGNYSYLSDRTHGNNYVLLGDAFAFIDPVFSSGVLLAMQSAVLATDAIDTALQHPAKAAAALKKFDKQIRMGPREFSWFIYRVTNPAMRDLFMGPRNIFRVKEALLSLLAGDIYGKTPIWTSLRMMKVIYTVALLRNPLRAYRAWQARRFNIRPELDA

SEQ ID NO: 85513 - protein, 503 aa, Sphingomonas sp.
  REGION 1..503: note = tr|A0A4R2SEF1|A0A4R2SEF1_9SPHN Tryptophan halogenase; OS = Sphingomonas sp. PP-CE-1A-559 OX=2135657 GN=C8J42_11519; PE = 4 SV=1
MTEHPIRRVVIAGGGTAGWMAAAAIARTMGSTIELTLVESDAIGTVGVGESTIPPMITFNRLLGINEAEFMRETQATFKLGILFDDWKDRGERYFHSFGITGKDHWSAGFQHFWLHGLTKGHAQPYDDYCLELRAALQGKFAHLPDDRMNYAYQLDSTRYAKFLRKMAEADGTRRLEGRIAQVELNGESGDIAALVLESGARIEGDLFLDCTGFRALLIEGALHAGFDDWTHYLPCDSAIAIQTESVRPALPYTRAMAHDAGWQWRIPLQHRTGNGIVYCSRYLDRDAALDRLLANIEGKTLTEPNVIRFVTGARRQQWHRNCIAIGLSGGFMEPLESTSIHLIQRAVLRLLRLFPSSPVSPRDVAEFNDQQHTDMLQIRDFLILHYKATNRRDSAFWRQCAAMPIPASLEHKIELFRETGRVFRKNEELFAENSWVQVMLGQGIVPRSYHPIATKLRDDELARLLGGLRDGTNATVAGLPEHAEYVARYCGAAPAPSPVLAA

SEQ ID NO: 85514 - protein, 506 aa, Xanthomonas hortorum
  REGION 1..506: note = tr|A0A2S7DZA6|A0A2S7DZA6_9XANT Tryptophan halogenase; OS = Xanthomonas hortorum pv. hederae OX=453603; GN = XhhCFBP4925_16455 PE=4 SV=1
MIPAPLRNIVIVGGGTAGWMAAAAFARVLGPGFNVQLIESEQLGTVGVGEATVPHIKAFNNLLGIDEAEFVRQTQGSFKLGIEFVDWQRPGTSYIHSFGTQIGHPLGLLPFHQYWIKQHLRGKAQPLGAYTLNTVAAVRGKFMTSAGDVPANSPLANIAYAYHFDATQYARFLRGYAEQRGVTRIEGLVEQVQLHADTGHVQSLQLASGQVVSGDLFIDCSGFRGLLIEEALHTGYHDFTHWLPCDRALAVPSENVGPPTPYTRSTARAAGWQWRIPLQHRTGNGYVYSSAHISDDEAAATLLANLDGKPLADPRPLRFTTGRRKQFWNRNVVALGLASGFLEPLESTSIHLIQAGISRLLELFPREGISPVLVQRYNDRLAFEFDRIRDFLVLHYHATERDDSAFWRHCRTMPITPELQFTLDLFRDSGRFYRNAEEMFAEISWVQVMVGQGVLPQGYHPLVDQVPDHDAERFLASIAETIGHCVDAMPTHQQFIDRYCKAAAPR

SEQ ID NO: 85515 - protein, 511 aa, unidentified
  source 1..511: note = Hephaestia caeni
  REGION 1..511: note = tr|A0A397P2A6|A0A397P2A6_9SPHN Tryptophan halogenase; OS = Hephaestia caeni OX=645617 GN=DFR49_1934 PE=4 SV=1
MIDDPIRRIVIVGGGTAGWMAAAATARILGAMPGLSITLIESEQIGTVGVGEATIPQIVLFNALLGIDEPDFVRATNATYKLGIEFIDWVRPGHRYTHPFGFYGLDMMGIEFHHHWLKGRTLGDRHSLDDYAISIVAARAEKFLRPRPDQPKSPLSKLAYAFQFDASAYARMLRGLAEAGGVTRVEGRIVDATQAGERGLIEHVTLADGRTIAGDLFIDCSGFRGLLIEQVMKAGFEDWSKWLPCDRALAVASERTADWQPLTRSTAKPAGWQWRIPLQHRTGNGYVYSSAHVSDDEAAATLLAGLDGAALGDPRPLRFTAGHRKAAWVGNVVALGLASGFLEPLESTSIHLVQTGIARLMTLFPTRAFDPRAIARYNAMTLREYVDIRDFLVLHYNATERDDTPFWDYCRNLPPPEGLKAKLEMFRASGRIFREHDELFTETSWLSVMAGQGIEAAGYHPAADLLADDETLTRLRHLREVVAHTAAAMPTQQEFLRQERSLAEQPLARAS

SEQ ID NO: 85516 - protein, 504 aa, Sphingomonas sp.
  REGION 1..504: note = tr|A0A0Q6KRX0|A0A0Q6KRX0_9SPHN Tryptophan halogenase; OS = Sphingomonas sp. Leaf339 OX=1736343 GN=ASG67_10195 PE=4; SV = 1
MNQQPDRAIRSIVIVGGGTAGWMSAAYLARMLAHLPIAITVIDSAAIGTVGVGEATVPAIRDFLAAVELGEPEVLRETSGTIKYGIRFDGWVAPDKAFFHPFGLYGVPARGVAFHQYWLKLKAAGDDLPIGDYCLATQLAEQGLFLPPPDRPANDLGVFNFAVHFDASKFAAMLRRLSIANRVTHIDGRIDRVERDGEDGRVTAVHLEGDRRVEGDLWIDCSGFRSLLLGEALGVPYIDWRHWLPCDRAIALPCRAAAAPRPFTTATARPAGWQWHIPLQQRVGNGHIYSSDHMSDDEAEHILRANLEGEALAEPNRLRFTAGHRDRFWDRNVVGIGLSSGFLEPLESTSITLIQSGLERLVALFPDRDVDPRLAATYNRQSTLEFERVRDFLFLHYQANGRTGERFWDERRSVALPETLQRKLDAWRSGGEFVRYEWESFQDASWLSMYAGFGDLPPRHSPLADRFDTGALRGTFARMREAIAGTLAHAEPHAAFLARHAADT

SEQ ID NO: 85517 - protein, 505 aa, Sphingomonas sp.
  REGION 1..505: note = tr|A0A0Q6K838|A0A0Q6K838_9SPHN Tryptophan halogenase; OS = Sphingomonas sp. Leaf339 OX=1736343 GN=ASG67_10755 PE=4; SV = 1
MTGADDRRIRRILIVGGGTAGWMTAAALAHALPRGCRIELVESEDIGTVGVGEATIPPIRLFNETLGINEAEFLRATKGSFKLGIEFVDWAKQEHRYFHPFGTFGKPFDMLAVHQHWLRARAAGSMVPLDDLSMAWGAASRNRFAPPMVDPRSVGSTFDYAYHFDAGLYAAFLRHYAEARGVVRVEGKVGDVALEGESGHVASVTLTDGRVLAAELFVDCSGFRGLLIEGALQTGYESWTHWLPCDRAVAVPCAHAPGGVLTPYTRSTARAAGWQWRIPLQHRVGNGYVYCSDHLSDDKAATTLLAGLDGEALGDPRFLQFQTGRRRQFWNRNVVAIGLASGFMEPLESTSIHLIQAGIAKLLAFFPTRDFEPLGIEEYNRVAITECERIRDFLILHYKLTQRDDAPLWRQCAAMAIPDTLAMKIEHFRRHGRLIARDMDLFGAASWLAVHVGQLNLPEGGDPLIDYAADPAASRRFVEQLAGAIGRAAETMPTHADYIARHCAA

SEQ ID NO: 85518 - protein, 500 aa, Sphingomonas sp.
  REGION 1..500: note = tr|A0A4R2SXG6|A0A4R2SXG6_9SPHN Tryptophan halogenase; OS = Sphingomonas sp. PP-CE-1A-559 OX=2135657; GN = C8J42_101532 PE=4 SV=1
MSARIQVVIIGGGTAGWMTAATLAMSFAGRLADVTLVESEDIGTVGVGEATVPHIRFFNQKLGIDEADFIRRTNATFKLGIEFRDWGRIGDSYIHPFGDFGHDIDGLPFHQYWAHATRGGADGLPKLEDCSLPIVAARDNRFTPPLEDPRSIGSTYSYAYQFDATLYAAYLRDYSEARGVVRIEGRVDAVEQSAGGIDAVRLADGRRIAGDLFIDCSGFRALLIDGALKVGHEDWSHWLPCNAAWAVPTANAGALTPYTRATAREAGWQWRIPLQHRTGNGHVFSTRFTDPETARAVLMDNLEGEALAEPRMLRFRTGRRDRQWVGNCVAIGLSAGFLEPLESTSIHLIQLAIGKLIELFPSGGVFDPADAAEFNRAMALEYDRVRDFLVLHYCATERDDTPFWRYMRTMTLPSSLTEKIAEFRERGIVASYREGMFLPASWLAVYYGQRIMPDRVNPLIADITMATSRAHVTRVAAACASAAKAMPLHEDYIGRIKAAA

SEQ ID NO: 85519 - protein, 532 aa, Sphingomonas sp.
  REGION 1..532: note = tr|A0A4R2SS82|A0A4R2SS82_9SPHN Tryptophan halogenase; OS = Sphingomonas sp. PP-CE-1A-559 OX=2135657; GN = C8J42_102968 PE=4 SV=1
MSMAGRLTPPRICPAVAAPDGFEAGTRTMANHPLRIVIAGGGTAGWMAAATFARFLETGYEIDLIESDAIGTVGVGEATIPQIHLFNDALGLDEDAFLRATGGTFKLGIEFVDWFKPGHRYMHAFGDVGRDVGLLPFHQYWLRARSLGLAGDLGAYSLNTHAALAERMQRGPARTARTLPSMPYAYHFDAGLYARYLRRYSETRGVNRIEGKIVRVTRDGESGDVSGLVLENGTSVAADLYIDCTGFRGLLIEEALGTGYEDWTHWLPCDRAIAVPSARSEKFTPFTRSAAHAAGWQWRIPLQHRTGNGVVFSSAHMSEDEATTTLLAGLDTPAMADPRTIAFRTGRRKRMWNRNVVALGLAAGFMEPLESTSIHLIQSAISRLLKLLPGRVIAEADRTEFNRQSDFEYERIRDFIVLHYKTTARDDTPFWRQCRDMAIPDTLAAKIDLWRGNGHIVREHEELFTEVGWLQVLAGQGITPAGHHPLADAISTSDLGEFMDTIDKLNAREAGQMQDHAAFVAQHCAASVSLGA

SEQ ID NO: 85520 - protein, 480 aa, Sphingomonas sp.
  REGION 1..480: note = tr|A0A0Q6KJB9|A0A0Q6KJB9_9SPHN Tryptophan halogenase; OS = Sphingomonas sp. Leaf339 OX=1736343 GN=ASG67_07455 PE=4; SV = 1
MTAAALRGVACAACDVHLVESAEVGIVGVGEATLPHLRAFIERLGIDEAAFMAATSATFKLGIEFCDFGAIGDRYIHPFGTYGRDLAGVGFHHYWLRRASANAAAAPISDYSAAVVAAEARRFARPTGIDDPAASFGYAYQFDATRFAPFLREWSEARGAVRTEGRIVSVDRDAATGDVRAIVLANGSRIEGDLFVDCSGFRSLLLGEAMGEGWEDWSHWLPCDRAVAAPCASPPGPIEPFTRAVAMSAGWRWRIPLQHRVGNGYVYSSAHISDDDARTALLDALESEPLAEPRFLRFRAGRRQRSWVGNVVAIGLASGFLEPLESTSIYLSQMAITQLIEHFPERMVEDVDRDGFNASVDAEYDRIRDFLILHYHATTRTDSPFWDHVRTMAIPDTLASKMALWRETAQVSKYAHGLFLEPSWVAVYLGQGIVPTGWDQRADLPEPAALDRALATLASTIADRVAAMPDHATYLARGSA

SEQ ID NO: 85521 - protein, 501 aa, Sphingomonas sp.
  REGION 1..501: note = tr|A0A0Q6KIV1|A0A0Q6KIV1_9SPHN Tryptophan halogenase; OS = Sphingomonas sp. Leaf339 OX=1736343 GN=ASG67_06680 PE=4; SV = 1
MSVGSVQGGSMRRVVIAGGGTAGWMAAAAIARTMGRTVELTLVESDAIGTVGVGESTIPPLVTYNRLLGINEADFMRATQATFKLGILFDDWKERGHRYFHSFGLTGKDHWSAGFQHFWLYGQEKGHLQSYDEYCLELVAAMQGKFAHLPDDRVNYAYQLDSTLYAKFLRGMAETDGTTRVEGRIAQVELDGERGDIAALVLESGARIEGDLFIDCTGFRALLIEQALHAGFDDWTHYLPCDAAIAVQTESVRPAVPYTRAMAHDAGWQWRIPLQHRTGNGIVYCSRYLDHDAALDRLLGNIEGRTLTEPNRLRFVTGARRRQWHRNCIAIGLSGGFMEPLESTSIHLIQRAVLRLLRLFPTGAISERDVAEFNDQQHTDMLQIRDFLILHYKATERRDSAFWRQCGAMVIPESLDQKIELFRETGRVFRKNDELFAENSWVQVMMGQGIIPRAFHPIVGKLRDEELARLLTTLRDEVGRTVAGLPDHAAYVARYCGAMAA

SEQ ID NO: 85522 - protein, 497 aa, unidentified
  source 1..497: note = Pseudoalteromonas amylolytica
  REGION 1..497: note = tr|A0A1S1MS80|A0A1S1MS80_9GAMM Tryptophan halogenase; OS = Pseudoalteromonas amylolytica OX=1859457 GN=BET10_19100; PE = 4 SV=1
MSAQQIKNVVIVGGGTAGWLSASFLAKVMGKLINITVLESADISTVGVGEATIPPLQPFNSAMGIDEQAFIRATKATIKLGIQFEGWGTETSSYMHAFGAIGKDFPFCEFHNHWLYAQQQGIGDDFWDYSLNYQAAKHHKFSKLNAIPGTKLPGISYAYHFDAGLYAKFLAAHAKQLGACHIQGTVERVIKDESSGNIRALELKDGQQVTGDLFIDCTGMHALLIDKALNSGFEDWSHWLPCDSALAVPCEHASTHIAPYTRSIAHEAGWQWQIPLQHRVGNGLVYASKHMSDEQAKDKLLSNLPGKALAEPKLIRFRTGRRLTPWHKNVVAIGLSSGFLEPLESTSIHLIQTAIVRLVKLFPHNGIEQSQVALYNQQSKTEFERIRDFIILHYKLNERRDSDFWRQCESMNIPESLLQKITLFKETGKLLREDDELFAEVAWQQVFIGQGLKPKQLHPLLHALSDQQRMELFSSLKTLIEQTVTAMPTHTQFLTDL

SEQ ID NO: 85523 - protein, 496 aa, unidentified
  source 1..496: note = Rheinheimera tuosuensis
  REGION 1..496: note = tr|A0A285INE8|A0A285INE8_9GAMM Tryptophan halogenase; OS = Rheinheimera tuosuensis OX=1323745 GN=SAMN06297280_1426; PE = 4 SV=1
MNNAVKKIVVLGGGTAGWMAAALLKKVLAGAIDIELVESEDIGTVGVGEATIPPIRLFNNVMGINEAEFLRETKATIKLAIKFDNWRVPGEGYFHTFGAPGKSLAFCHFHHLWLRARQQGNKTDLWQYDLNYLCAMAGKFAPINAKDNILELPYAYHFDAGLYARYLRKLSEQMGVVRHEGKVQQVFQHPNGDIKCLVLDDGRELSGDLFIDCSGFRGLLIQDKLNAGYDDWSHFLPCDRAVAVPSERFEKTLPYTRSIAHSAGWQWRIPLQHRNGNGLVYSSAHYTDEQASDLIMANLERKALAEPKFLRFKTGRRRQQWQRNVVAVGLASGFLEPLESTSIHLIQSAVVRLIQLFPHNGICQSAVNEYNRQSELEYTQIRDFLILHYHVNERSDSQFWRDMQQLAIPDSLRQKMAIFADNGQLFRDQNDLFLESSWLQVMLGQGIEPKDYHPIANNFSPEKLRDMLANIQAIKQEPLSKLPDHDTYIQTMINRS

SEQ ID NO: 85524 - protein, 506 aa, Sphingomonas adhaesiva
  REGION 1..506: note = tr|A0A2A4IC56|A0A2A4IC56_9SPHN Tryptophan 7-halogenase OS=Sphingomonas adhaesiva OX=28212; GN = COA07_03760 PE=4 SV=1
MTGEAAMNGPVRSIVIVGGGTAGWMAATYLARRLGHLRPDITVIESAAIGTVGVGEATVPAIRDFLAAIELGEPEVLRETGGTIKYGIRFDGWKQDGHRFFHPFGLYGVAARGVAFHHYWLKMRAAGDATPLSDYCLATQLAERGLFLPPSDRPANDLGVFNFAVHFDASKFAALLRRLAVANNVRHIDARIEAVERDGADGRVAAVTLDDGRRVAGDLWIDCSGFRSLLLGDALGVPYVDWRHWLPCDRAIAIPCAAADGPTTPFTVATARKGGWQWRIPLRHRVGNGYVYCSDHVGDDEAERDLLASLEGEPLAAPNRLRFTTGHRARFWDRNVVALGLASGFLEPLESTSISLIQSGLERFVALFPDKDFDPRLAATYNRQSVLEFERLRDFLLLHYWSNRRIGEPFWDRMRALEPTEGLQIKLDAWRAGGEFVRNEWDTFQDPSWLSMYAGFDDLPARYSPLADQVSERDLADSLSRMRAAIAGTLAHAEPHDAFLARTVGA

SEQ ID NO: 85525 - protein, 516 aa, unidentified
  source 1..516: note = Nitrospirillum amazonense
  REGION 1..516: note = tr|A0A560G771|A0A560G771_9PROT Tryptophan halogenase; OS = Nitrospirillum amazonense OX=28077 GN=FBZ88_103165 PE=4; SV = 1
MAAPHTSHQPSDDTATNAPLRRIVIVGGGTAGWMAAASLARFLRNLKCDIQLVESEQIGTVGVGEATIPPIMNFIRVLGIDEDDLIRQTNATFKLGIRFQDWTRLGHSYFHPFGHTGFEMEGIGFPAYWMRQRLAGAAAPLEEYSLQAQAAAHNRFMRPVKAPGSPLEGITYALHFDAALFARYLRTYSEARGVTRVEGKVVKVDLRPEDGFIDALRLEDGRRVEGDFFIDCSGFRGLLIEEALQAGYENWQSYLPCDSAVAVPSERAGAPPSYTLATAREAGWQWRIPLQHREGNGVVYARDFLDDEAARETLLANLVGKPLADPRILRFVTGRRRETWKRNCLSLGLASGFLEPLESTSIHMVHRGLALFIQMLPDRRCEPADIARYNRMVAFEYERIRDFLVLHYATNERRDTDFWRHCAGIEWPDSLKSKIELFQSHGRIQREDTELFPEQSWLYVFTGQGLVPRRYDPLTDLLDPEKMRGALANIHDVIGRVVQTMPHHQAFIDRYCAAQS

SEQ ID NO: 85526 - protein, 516 aa, unidentified
  source 1..516: note = Nitrospirillum amazonense
  REGION 1..516: note = tr|A0A560JMS9|A0A560JMS9_9PROT Tryptophan halogenase; OS = Nitrospirillum amazonense OX=28077 GN=FBZ87_106123 PE=4; SV = 1
MAAPHTSPQPSDDTATNAPLRRIVIVGGGTAGWMAAASLAKFLRNLKCDIQLVESEQIGTVGVGEATIPPIMNFIRVLGIDEDDLIRQTNATFKLGIRFQDWTRLGHSYFHPFGHTGFEMEGIGFPAYWMRQRLAGAAAPLEEYSLQAQAAAHNRFMRPVKAPGSPLEGITYALHFDAALFARYLRTYSEARGVTRVEGKVVKIDLRPEDGFIAALRLEDGRRVEGDFFIDCSGFRGLLIEEALQAGYENWQSYLPCDSAVAVPSERAGAPPSYTLATARDAGWQWRIPLQHREGNGVVYARDFLDDEAARETLLANLAGKPLADPRILRFVTGRRRETWKRNCLSLGLASGFLEPLESTSIHMVHRGLALFIQMLPDRRCEPADVARYNRMVAFEYERIRDFLVLHYATNERRDTEFWRHCAGIDWPDSLRAKIELFQSHGRIQREDTELFPEQSWLYVFTGQGLIPRRYDPLTDLLDPEKMRGALANIHDVIGRVVQTMPHHQAFIDRHCSAGR

SEQ ID NO: 85527 - protein, 551 aa, unidentified
  source 1..551: note = Nitrospirillum amazonense
  REGION 1..551: note = tr|A0A560GCX4|A0A560GCX4_9PROT Tryptophan halogenase; OS = Nitrospirillum amazonense OX=28077 GN=FBZ88_101136 PE=4; SV = 1
MADTNAPDGARAKGAPVRNVLIVGGGTAGWLAAAYLARTLSIGQPGGARITLVESADIGILGVGEGTFPNIQRTLRRIGIDESVFMRESEATFKQGIRFDHWQHAPGSGERDHYFHPFQSAISRQDLDLVPYWLLGAAGDGVPLDTALTMQKRVADAALAPKRSGDADYAAPLNYAYHFDAVKFARLLRVVATDLGVRHVVDTVDAVPLDETGAVAGVVTRESGTLTADLYIDCTGFRAQLIGQALKSPYQSCRKWLFCDRAVALQVPYDQPDAPIPSYTVSTAHEAGWTWDIGLETRRGIGHVYSSDHTDDARAEQVLRDYIGPAAGDKTARTFRFEAGYRPEPWVRNCVAIGLSSGFFEPLESTGIVLIEVASVLLTSLFPWAGDMATAARQFNRIMRQRYERALDFLKLHYCLTRRTDTAFWRDNADAATVPDTLHDLLDRWRHRPPEGLDFDLNLDTFSEASWQFVLYGMGYNTDLSAQAGAFRHMDEARQQFAAIRASTEQALAALPRHRDLITQIYRHGLRPRTPLGGAPSGRASLSSGMAGLAR

SEQ ID NO: 85528 - protein, 550 aa, unidentified
  source 1..550: note = Nitrospirillum amazonense
  REGION 1..550: note = tr|A0A560G1W5|A0A560G1W5_9PROT Tryptophan halogenase; OS = Nitrospirillum amazonense OX=28077 GN=FBZ88_106304 PE=4; SV = 1
MTAAEGARRRILIVGGGTAGWLTAAYLAKTLGANLSGGTEITLIESSDIGIIGVGEGTFPTIRSTLAAIGIDEARFLRESTATFKQGVHFVDWAETPAPDASPTQALGTVAGHSHYFHPFNFPHQGNGPELLPYWLLGGAGDAPFAEAVTLQKAVADASRGPKRAIDPPYAAPLNYAYHFDANRLAVLLRTVAIELGVRHRVGTVTDVVLDGSGAVARVDTREHGSLSADLYIDCSGFRAEIIGRALKVPFKSYQDVLFNDRAVALQVPYDRPDAPIPSYTVATAHEAGWTWDIGLNDRRGTGYVYSSRHTDDARAEQVLRRYLGPAAEGRDVRLLKFDSGCRTAQWVGNCVAVGLSGGFFEPLESTGIMLIEVAAHMIAQYFPWGETGLDSAQTAASMAATARTYNALMGKRYERIVDFLKLHYCITRRTDSAYWRDNADPATIPESLRDRLAVWAHRPPGRFDFVADHETFLPASYQYVLYGMGFKTDLEPARALHRRMDEARHEFRGLRTVAPQAVSSLPTHRELVEEVYRNGFRPPQAAQAVGGRR

SEQ ID NO: 85529 - protein, 487 aa, Porphyrobacter neustonensis
  REGION 1..487: note = tr|A0A192D7F5|A0A192D7F5_9SPHN Tryptophan halogenase; OS = Porphyrobacter neustonensis OX=1112 GN=A9D12_00165 PE=4; SV = 1
MAAAALGRLRNGRPVEITLIESESIGTVGVGEATIPPFVGFNQLLGINEAEMLSEVGGTFKLGIQFENWGKLGDSYIHPFGAYGYNMGGISFHHVWHRLAVAGDKRPIQVFNLETMAAYFGKFARTEDFKGADAPPVNYAYHLDAGRYAAFLRKLAESRGVVRQEGKVVDVALDGESGFVTAVTLDGGKQIAGDLFIDCSGFRGLLIEQALQTGYDDWSNYLPCNRAVALPCQREDGSPPPPFTRATAHGAGWQWQVPLQHRNGNGHVYCSAYMEDQEALDILLGNIAGKPQAEPNWLRFVTGRRKKFWNKNVVALGLAAGFMEPLESTSIHLINTGIDKLISLLSLDGITKVQEDTFNRLTGREYARIRDFLILHYNATSRTDTEFWNHVRTMPVPDTLTEKVELFRANGQIFREEDELFTETSWAAVMMGQGIRMGSHNAMADALDPATTAREINDMEQSIRYLVQRMPGHGDYLARYCPAPMAA

SEQ ID NO: 85530 - protein, 508 aa, unidentified
  source 1..508: note = Nitrospirillum amazonense
  REGION 1..508: note = tr|A0A560HHS8|A0A560HHS8_9PROT Tryptophan halogenase; OS = Nitrospirillum amazonense OX=28077 GN=FBZ90_101330 PE=4; SV = 1
MTVPSQGPLRRILIVGGGTAGWMAACALNQAVRAGGTRVELVESDAIGTVGVGEATVPPIRQFNQDIGLDEATFIKATQGTFKLGIEFQDWRATGTRFFHGFGDYIVNAGPFSTLNHWLVARDLVGEAAGDFDAYHMAAVMARAGRFAAPDNDPRSPYYYFNYAFHFDAGLYARLLRTKAEAEGVTRHEGRIVATDLHPETGHIRSVRLDDGRDLSADLFIDCSGFIALLADKALGERFIDYGHWLPVDRAWAVPCASVGPPSPYTRATALEAGWQWRIPLQHRTGNGYVFSTAHVTEDAARARLLANLDGQALDEPRLLRFRTGRRERFWARNCVAIGLSSGFVEPLESTSISLIQGGITRLISLLPDLSFNPGLAAEYNRVQALEFDRIRDFIILHYALTQRDDTAFWRERRGMALPDTLAYRIETFRETGHVVLLNEETFVAPSWQALFIGLGLIPKRRDPLMAAQRREEIIETLRLRRTSLASAAQRLPTHAAFLARLGMTESP

SEQ ID NO: 85531 - protein, 530 aa, Rhodanobacter sp.
  REGION 1..530: note = tr|A0A1V3PVY8|A0A1V3PVY8_9GAMM Tryptophan halogenase; OS = Rhodanobacter sp. B05 OX=1945859 GN=B0E47_11040 PE=4; SV = 1
MPRLQKILVVGGGTAGWLTACYLAKTLNAGDARSVQVELVESPSIGALGVGEGTFPSIRGTLAAIGLDERRFFVGASATFKQGVHFVDWVRPPGEAGHHHYFHPFNHPSQRAGSPELLPYWLLGAAPAGMPFAEAVTMQQRIVDAGRAPKRMTDGNYLGPMNYAYHFDAARFASVLAEHGQGLGIKRLLATVEHTELDERGAIARVVTRELGALSADLYIDCTGLRGALIGGAMQSPLRSLRDVLFCDRAVAVQVPDEKPDAPIRPYTMSTAQEAGWIWDIGLQRRRGTGYVYSSQHTDSARAEEVIRGYLGPAAETLEARHIKFDPGYRPEPWRHNCVAVGLSGGVVEPLESTGIALVELGAYLISHLLPGDSSDMARTAKLYNGMMSARYERILDFIKMHYCLTRRRDSKFWIDNVDPASIPDTLRDRLALWRHRPPHRLDFVTDLEMFMPASWQYVLYGMEFETDLEPMRSAHPQMEAARREFATIQQVAGHALHDLPDHRALVEQLCREQVQRDPGEATEPARMSV

SEQ ID NO: 85532 - protein, 488 aa, Sphingomonas sp.
  REGION 1..488: note = tr|A0A0Q4JE96|A0A0Q4JE96_9SPHN Tryptophan halogenase; OS = Sphingomonas sp. Leaf28 OX=1735695 GN=ASE79_16615 PE=4; SV = 1
MAAAALSRLVAGGVSVTLVESEEIGTVGVGEATIPSLLDYNRMLGIDEDAFVRATGATFKLGIEFRDWRRLGEAYLHPFGTHGRDIDGVSFHQLWLRQAASGTPDPGPIGDYCLSSVAARRGRFTRPSANPQSVLSTLSYAFHFDAALYARFLRDMAEQDGVVRVEGRVVAVDRDAETGFIEAVRLEGDRRIEGELFVDCSGFRSLLLGETLDVPFTSWKQWLPCDRAWAVPSARQGPLTPYTRATADTAGWRWRIPLQHRVGNGYVYSSAHIDDDDAKQALLAGLDGAAQGEPRQLRFEAGRRERLWDRNCVAIGLAGGFLEPLESTSIHLIQSGITRLMSLFPDRGLGSAERDEYNRVMLREYEQVRDFIILHYHATERSDSPFWDHCRTMTVPESLLAKLGLWSGRARVFRDQGELFTPDSWIAVLLGQGVCPDSFDPLTAGLPPSETARFMAHIRDMIDKTAAAMPMHEDFIAQHCAASSRRSA

SEQ ID NO: 85533 - protein, 510 aa, Alteromonas sp.
  REGION 1..510: note = tr|A0A2K8XVK0|A0A2K8XVK0_9ALTE Tryptophan halogenase; OS = Alteromonas sp. MB-3u-76 OX=2058133 GN=CW735_01235 PE=4; SV = 1
MNNSTNTSSKQRIVIVGGGTAGWLTAAIVAAKHKIAKGQCGLDITLVESSDIPTVGVGEGTWPTMRNTLKDIGLSEKEVFRKCSAAFKQGGKFVNWVNGDGDFYYHPFTVPLGYGRVEMAPYIDNISEFANSTNFQQHVCEQNMAPRTLNEEEYSSAQSNYAYHLDAGAFADMLKTFCKEELGVTHKVATVEQVETSSKQCIESITLNDNSILEADLFVDCSGFRSMLLGEALSEPVVSANDTLFNNSALALHVPYNGDFEIKPYTQATAQEAGWIWDIGLSSRRGVGHVYSTDFTTDERAEELLRRYVGDDKGELTPRVIRFDSGYKKQIWKGNCIGVGLSAGFVEPLEATALMLIEISARYIAEQMPTPASAMPIISQRFNKQMQYRWQRIIDFLKLHYIFNQRSEPYWVANRDAASIPDSLKEDLEIWKYRGPQIADFSAAIELFPAASYQYVLYGMGFSPDFSLQSHFYTQRDLANKVIQQNQLITQQKLSSLPNHRNYIEQWLAS

SEQ ID NO: 85534 - protein, 491 aa, Cellvibrio sp.
  REGION 1..491: note = tr|I3IDK4|I3IDK4_9GAMM Tryptophan halogenase; OS = Cellvibrio sp. BR OX=1134474 GN=O59_000160 PE=4 SV=1
MTAIKNLVIVGGGTAGWMAAAAITKLYGKIVNVTLVESEEIGTIGVGEATIPTMVFFHQLLGINEAEFLSATQGTFKLGIRFENWRAQGKHYLHAFGVTGNDCWAAGFQHFWRRGLELGIAGEFGDYCFERQAAEQLRFAHMPNNGLNYAFHLDASRYAKFLRQFSEAQGATRIEGTIKQVTTEPQTGFIQSVTLNSGKIIEGDFFFDCSGMRGLLIEQALHTGYEDWSHWLPCDRAIAVQTESVREPVPYTRSIAHSAGWQWQIPLRQRVGNGLVYCSKYLADEDAKKLLLENVEGKLLTEPRLIQFRTGRRLQQWSKNCLAVGLSGGFLEPLESTSIHLIQQNIVRFMRMFPAQGIVQSDIDEFNKQAKFDLEHIRDFIILHYCVTERTDSPFWNHCRTMSLPDSLAHRIKLFKETGRMFREGNELFDDSWLQVMIGQGLMPSSHNPLVDTMTRDELTVFLLKIKDTISKKLNGLPLHAEYLKKYPLPD

SEQ ID NO: 85535 - protein, 506 aa, Porphyrobacter neustonensis
  REGION 1..506: note = tr|A0A192D1J5|A0A192D1J5_9SPHN Tryptophan halogenase; OS = Porphyrobacter neustonensis OX=1112 GN=A9D12_01475 PE=4; SV = 1
MTAAPAPLKSIVIVGGGSAGWMTAAALAKAVGETCAITLIESEAIGTVGVGEATIPPIRNFNQRLGIDEATFVRETQGSFKLGIEFVDWGRLGHSYFHPFGQYGAEFDSVPFYHHWMRAHLAGEMHGPIDDFSMCWAMAKAGKFAHPSPDRRLIQSTFDYAYHFDAGLYAAFLRRYAEQRGVRRVEGKVVDVSLRGEDGFIEAVTLDDGARIAGEFFIDCSGFRGLLIEEALHAGYDNWQHWLPCDRAVAVPSERGAFTPFTRSTARVAGWQWRIPLQHRTGNGYVHCSQFVSEDEATETLLANLEGKPLADPRTLRFVTGKRRAFWQKNCVAIGLSAGFMEPLESTSLHLIQYGILRLLALLPDTAMSPLLAREYNAQTAREYELIRDFLILHYKASERDDSQLWRYCAAMPIPDSLQYKIDHFRAHGTLVAEPQELFANPSWIAVYLGQGIVPARAPALAQMRGSVPVAERLGQIRKAMDDAVAVMPSHGDFIARHCAAPPLSA

SEQ ID NO: 85536 - protein, 521 aa, unidentified
  source 1..521: note = Nitrospirillum amazonense
  REGION 1..521: note = tr|A0A560FMV6|A0A560FMV6_9PROT Glycine/D-amino acid oxidase-like deaminating enzyme OS=Nitrospirillum amazonense OX=28077 GN=FBZ88_11546 PE=4 SV=1
MTVERTILIVGGGTAGWLAAAYLAKYLGVREGGPIGITLLEAPDIGIVGVGEGTFPTIRGTLRFLGLNEAQFMRDTSATFKQGIRFARWVDGGEDDSFFHPFEAPFPTDGAGLVPYWLLQDGDRRPPFAQAMTFQQQVTDARRAPKRGPEGDFEAPLNYAYHFDAAKAAQALAARARELGVRHLRGTVTDVALAADGAIAHLVTREYGAIAADFYVDCSGLRAELIGRALGVPQKSVKSILFTDRALSCKVPYEAADTPLESCTVATAHAAGWTWEIGLEGARGVGCVYSSDHMSDDEAEEVLRAYVAPHLGSGVELAPRKTAFDAGYRETPWVRNCVAIGLAGGFLEPLESTSVVLIEVAVGMLAELFPHDGRWDAPAARFNELMTRRFENIVNFLKLHYCLSKREEPFWRDNRDPASIPPALRDLLAQWRTRPPSRFDFALDLEAFAFFNYQYILYGMGFETDLSAARAAFPQAEAAQKTFARIRAYGDHATKDLPAHRALIRRMNQISAPDGRVASRR

SEQ ID NO: 85537 - protein, 510 aa, Sphingomonas adhaesiva
  REGION 1..510: note = tr|A0A2A4IAD7|A0A2A4IAD7_9SPHN Tryptophan 7-halogenase OS=Sphingomonas adhaesiva OX=28212; GN = COA07_00750 PE=4 SV=1
MNDGLARAVRKVTIVGGGTAGWMAAALLSRLFAGGGFDIRLIESDEIGTIGVGEATIPAIRTFLELAGLDQVEMIRATQATFKLGIEFVDWRAKGTSYIHGFGTIGQDLLWLHTHQFWLKYAARGQAKPFDFYALNCLAARRNRFCMPDARNPGSPLAGLDYAYHFDASLFARHLRAQSEARGVTRIEGRIVDIVCRGEDGHVDHVVLADGRTVDGDLFIDCSGMRSLLLGQALGVGYEDWRHWLPCDRALAVPCASVAPLTPYTRSTARDAGWQWRIPLQHRIGNGHVYASDHISDDDAAATLLAHLDAAPLADPRPVRFAPGRRLRAWEKNVVAIGLSSGFLEPLESTSIHLIQTALLRIVALFPGEGVKPADVAEYNRQTAFEMADIRDFIIAHYKVTEREDTPFWAYVKHMAIPDSLAERLELFRTSARFFLHSRAELFREESWVQVLIGQGLAMRHDPMVDLIPDADALAYLRDIEAVIDDVAARMPDHAAFVARNCSAAATPAR

SEQ ID NO: 85538 - protein, 508 aa, unidentified
  source 1..508: note = Nitrospirillum amazonense
  REGION 1..508: note = tr|A0A560K2A2|A0A560K2A2_9PROT Tryptophan halogenase; OS = Nitrospirillum amazonense OX=28077 GN=FBZ87_103295 PE=4; SV = 1
MAEAMRSGRKIVIVGGGTAGWMAAAVLARVLKGKYGAIELVESAEIGTVGVGEATIPPIQFLNHLLGIDEVDFVRKTQATFKLGIEFVDWTRLNHRYFHPFGPHGHTIDAVSFHHYWLRQQSQGDTSDIGDYSPSTVAARMGKFQPPAPDARPGGPVIAYAYHFDAGLYAQYLRGIAERNGVKRTEGKIVQVTQREPDGFIDSLVLDNGTRVEGDLFVDCSGFRGLLIGETLRAPYEDWSHWLPCDRAVAVPCEGVAAITPYTRSTARAAGWQWRIPLQHRIGNGHVYSSRFISDDEATATLLANLDGKPLADPRLLRFTTGRRKNSWTKNCISLGLASGFMEPLESTSIHLVQSGLFRMVSLLPRDGFEQATVDEYNRLTNIEYEQIRDFLILHYHAVERDDSPLWNYCRTMEIPDSLRHKIDLFRARGRIARFDEQLFAEPSWVAVFLGQGIQPHSYDPVADVMPEAEVTARLARIREAIRRMADALPTHAEFINRHCRADRPVAA

SEQ ID NO: 85539 - protein, 515 aa, unidentified
  source 1..515: note = Nitrospirillum amazonense
  REGION 1..515: note = tr|A0A560JDG6|A0A560JDG6_9PROT Tryptophan halogenase; OS = Nitrospirillum amazonense OX=28077 GN=FBZ87_10983 PE=4; SV = 1
MTFAPLRDIVIVGGGTAGWMTAALFSHILGPGGHRIHLVESEEIGTVGVGEATIPPIAIFNRALGLDENDFLRQTQGTIKLAIEFVDWLRPGHRYLHSFGAFSRSLGLGHFQDFWLRAHRLGLTDDWEPYILNSVAARRGRFIRPDPRRQSPLEPLAHAFHIDAGLYARYLRRFAEQRGVRRTEGKIVRTVLRAHDGFVDAVEMADGTRVAGDLFIDCSGFRGLLIEQALNTGFEDWTHWLPCDRAWAVPSAHDGSAAALTPYTRSTARPAGWQWRIPLQHRTGNGYVYSSRHVSDDEAAATLMANLDGEALAEPRPLRFTAGRRRRFWNRNVVAVGLAGGFMEPLESTSIHLVQSAISRLITLLPNHSSPDGGFDPAVADEFNRASAIEYERIRDFIILHYAATERDGSPFWRECRDRPVPEELARRMRVFRAMGRVARDHDELFSEVSWLHVFLGQGVWPRDYHPLADQLSEEDLRCFLDDIKAAVAREVDAMPSHADFIARHCKADSLTRTA

SEQ ID NO: 85540 - protein, 492 aa, Sphingomonas adhaesiva
  REGION 1..492: note = tr|A0A2A4I9U8|A0A2A4I9U8_9SPHN Tryptophan 7-halogenase OS=Sphingomonas adhaesiva OX=28212; GN = COA07_04980 PE=4 SV=1
MRVVIVGGGTAGWMTAAALARLVPAAQAEIVLIESEEIGIVGVGEATLPHIRAFNTRIGIDEADFMRATGATFKLGIEFRDWARIGDSYIHPFGVFGRDTDGVGFHHYLARAGQIGRLQDFSLPVVAARAARFAPPADDPESLLSTYGYAYQFDATRYAPYLRARAEADGAQRIEGRVVAVEHDAGDGRVTAVRLADGRAVAGDLFVDCSGFRALLIGDTLGEPFEDWSRWLPCDRAVAVPCASEGPLLPYTSAVAMPAGWRWRIPLQHRVGNGYVYSSAHLDDDAARDALLAAIEGPALAEPRILRFRAGRRPRGWVDNVVAIGLAGGFLEPLESTSIYLIQIAITALVELFPDGTIDPADRDEFNRVLAIEYDRIRDFLILHYHATERDDSTFWTQMRTMAVPDTLARKMALFRARGRVETYREGVFLEPSWIAVYLGQRVVPTGYDQRADAPDETQLARAIERLHAATAAAARAMPDHRDYIASIGAAA

SEQ ID NO: 85541 - protein, 525 aa, Mitsuaria sp.
  REGION 1..525: note = tr|A0A1A9HKY5|A0A1A9HKY5_9BURK Tryptophan halogenase; OS = Mitsuaria sp. 7 OX=1658665 GN=ABE85_11130 PE=4 SV=1
MGDGAGGASRAGAEEIPGIEEIVIVGGGTAGWMTAAALSKVLRGRKRIVLVESEEIGTVGVGEATIPMIQRFNQVLEIDEDEFLRETQATFKLGIEFVGWGAPGERYIHGFGRIGQDLLTAPFDQYWQRLHAIGQAADLGEYSIARVAALRNKFMRPRTDMPQSPLSEIAYAFHFDASLYARYLRRYAEARGVVRLEGKVAEVRQHEGGGARDGHVRSLVLSDGRRVDGELFIDCSGFRGLLIEQTLKVGYEDWTHWLPCDRAVAVPSAATTPRTPYTRATARRAGWQWRIPLQHRTGNGHVFCSRHISEDEATAELMANLDGEALAEPRALRFTTGMRQRAWDRNVVAIGLSSGFLEPLESTSIHMIQSGISRLLSFFPDRGFAQVDIDEFNRQGRFEYERVRDFIVLHYHLNRREEPLWRACREMDVPATLKAKMALYRSRGRIVRENNELFAEVAWLQVMHGQGLRADGHHPLVDLLGEHEVKDYLDSVRAVIAQCVDVMPTHDEFLARCASGNLPRSGDRT

SEQ ID NO: 85542 - protein, 518 aa, unidentified
  source 1..518: note = Nitrospirillum amazonense
  REGION 1..518: note = tr|A0A560FFC1|A0A560FFC1_9PROT Tryptophan halogenase; OS = Nitrospirillum amazonense OX=28077 GN=FBZ89_10716 PE=4; SV = 1
MAAPHASSQTSNDTATNAPLRRIVIVGGGTAGWMAAASLAKFLRNLKCDIQLVESEQIGTVGVGEATIPPIMNFIRVLGIDEDDLIRQTNATFKLGIRFQDWTRLGHSYFHPFGHTGFEMEGIGFPAYWMRQRLAGAAAPLEEYSLQAQAAAHNRFMRPVKAPGSPLEGITYALHFDAALFARYLRSYSEARGVTRVEGKVVKVDLRPEDGFIDALRLEDGRRVEGDFFIDCSGFRGLLIEEALQAGYENWQSYLPCDSAVAVPSERTGAPPSYTLATARDAGWQWRIPLQHREGNGVVYARDFLDDDAARETLLANLVGKPLADPRILRFVTGRRRETWKRNCLSLGLASGFLEPLESTSIHMVHRGLALFIQMLPDRRCEPADIARYNKMVAFEYERIRDFLVLHYATNERRDTDFWRHCAAIDWPDSLKAKIELFQSHGRIQREDTELFPEQSWLYVFTGQGLRPRRYDPLTDLLDPEKMRGALANIHDVIGRVVQTMPYHQAFIDRHCAAHPSR

SEQ ID NO: 85543 - protein, 408 aa, unidentified
  source 1..408: note = Methylovulum psychrotolerans
  REGION 1..408: note = tr|A0A2S5CH03|A0A2S5CH03_9GAMM Tryptophan halogenase; OS = Methylovulum psychrotolerans OX=1704499; GN = AADEFJLK_04171 PE=4 SV=1
MDQKKVIIIGAGPSGSIAAALLQKKGHQAIILEREVFPRFSIGESLLPQCMAFIEEAGMLQAVIEAGFQLKTGADFLCGDKRSEFYFADKFSPGFETTFQVQRDRFDALLATEAQAQGTVIQWQHQVLGADFSGAKPVLTVCDEQKATYQTEADFVLDASGFGRVLPRLLNLESPTNFPVRQALFTHIEDRISGADYDRKQISIVIHPKMADVWYWLIPFSNGRCSLGIVGEPRLFDGFADNQQAFHALVAEEPNLSALLANAVYDTPINGIKGYSANVSALHGKGYALLGNAGEFLDPVFSSGVTIAMKSASLAADVLDRQFNGQAIDWQRDYAQPLQKGVDTFRTFVTSWYEGGLQDVIFYNQQQPNIKAMICSILAGYAWDERNPYVKNSQNRLNTLVELCRITA

SEQ ID NO: 85544 - protein, 514 aa, unidentified
  source 1..514: note = Nitrospirillum amazonense
  REGION 1..514: note = tr|A0A560GPT3|A0A560GPT3_9PROT Tryptophan halogenase; OS = Nitrospirillum amazonense OX=28077 GN=FBZ90_11936 PE=4; SV = 1
MTFAPLRDIVIVGGGTAGWMAAALFSHILGPGGRSGGHRVHLVESQEIGTVGVGEATIPPIGVFNRALGLDENDFLRQTQGTIKLGIEFVDWLRPGHRYLHSFGAFGHALGLGHFQDFWLRAHRLGMTDDWEPYILNSVAARRGRFTPPDPRRQSPLEPLAYAFHIDAGLYAQYLRRFAEQRGVRRTEGRIVRTILRAHDGFVDAVEMADGTRVKGDLFIDCSGFRGLLIEQALNTGFEDWSHWLPCDRAWAVPSAHDGTASALTPYTRSTARVAGWQWRIPLQHRTGNGYVYSSRHVSDDEAAATLLANLEGEALADPRPLRFTAGRRRRFWNRNVVAVGLAAGFMEPLESTSIHLVQSALSRLITLLPNHTLDPAVVEEFNRASAIEYERIRDFIILHYAATDRGESPFWRECRDRPVPEELARRMRVFRALGRVARDHDELFSEVSWLHVFLGQGVWPRDHHPLADQLSEEDLRRFLDDIKAAVAREVDAMPTHADFIARHCQPDSLTRTA

SEQ ID NO: 85545 - protein, 509 aa, unidentified
  source 1..509: note = Nitrospirillum amazonense
  REGION 1..509: note = tr|A0A560GR65|A0A560GR65_9PROT Tryptophan halogenase; OS = Nitrospirillum amazonense OX=28077 GN=FBZ90_11773 PE=4; SV = 1
MSQNGPLGHIAIIGGGTAGWMAAAALARVLGRHGPAITLVESEEIGTVGVGEATIPPIQAFNAMLGINEDDFLRATQGTFKLGIEFIDWLRPGHLYFHPFGDHGVDFGPVPFDGLWHKLRSRGLAGPLEAYSICAAAAAAGRFARPTQGDNTPLSRISYAFHFDAALYAQLLRTHAEAAGVTRREGRVTAVDLRPDGFIEAVTLSCGSRVTADFFIDCSGFRGLLIADALGAGFQDWGHWLPNDRAVAVPCAPGGSFTPYTRSTARAAGWQWRIPLRNRIGNGYVYASAHLSDEGAMATLMANLDGAALAEPRLLRFRTGRRDAFWVKNCVALGLAAGFLEPLESTSIHLIQAGIARLLEMFPTRAFEPADIRRYNRLMAAEFDSVRDFVILHFHATERADTPYWAHVRTMEVPETLAERLRIYRATGRVFREADDLFTKTSWLAVMQGQGLTAEGYDPLADGMPETEAQARLERIAAVTAASVQRLPSHGEFIRTRVDAGFQPWGESL

SEQ ID NO: 85546 - protein, 501 aa, unidentified
  source 1..501: note = Nitrospirillum amazonense
  REGION 1..501: note = tr|A0A560F1F1|A0A560F1F1_9PROT Tryptophan halogenase; OS = Nitrospirillum amazonense OX=28077 GN=FBZ89_11410 PE=4; SV = 1
MSDRRIRKVVILGGGTAGWMTAAALAKVNTPPQFEVTLIESDEIGIIGVGEATIPTIHWFNRLIDLDEAQFLRETKATFKLGIEFVGWNGGDSRYFHPFGRYGGPADAQMFFHRWIRANLGGFPHGHQDYSLATLAARANRFGPPAPDPNSLFSTLGYAYHFDAGLYAAHLRRLSEARGVKRIEGKVERIEQDPETGFVTRLTTHRGEVVEGDLFIDCSGLRALLIEGVMNSGFEDWSHWLPCDRALAIPCERVADPTPYTRATAHAFGWQWRIPLQHRTGNGIVYSSRFVGDDEAAATLMANLDGKALADPRLIRFQTGRRRRSWVKNVVAIGLSSGFLEPLESTSIHLIQSGIAKLLSLFPTRDCPEETAGQFNQVYGADVESVRDFLVLHYSRTQGRDEPLWRHCQAMAVPEGLSLKERHFTRTGRIVLSTDELFREASWFAVLMGQGLRATDYNPLLDTMPANENLAYLLRLRDQMAKAAATLPSHEEYLRRVMGPA

SEQ ID NO: 85547 - protein, 506 aa, Luteibacter sp.
  REGION 1..506: note = tr|A0A1K1RA67|A0A1K1RA67_9GAMM Tryptophan halogenase; OS = Luteibacter sp. UNCMF366Tsu5.1 OX=1502758; GN = SAMN02800691_2953 PE=4 SV=1
MSYGITPIVIVGGGTAGWMAAAALARVLGKRATVRLVESEDIGTVGVGEATVPHIKAFNNLLGINEADFVMRTQGTFKLGIQFNDWTRPGDSYVHGFGTMGHDLGLTPFHQFWIKGRLAGLAADLHDYSVNTVAATRGKFLPAPTDVPASNPLSGMAYAYHFDASLYARYLREYSEARGVQRTEGKVRNVELHPESGHVAAIVMEDGERIEGALFVDCSGFRGLLIEGALQSGYEDWSQWLPCDRALAVPCAKVAEPTPYTRSTARPAGWQWRIPLQHRTGNGYVYCSRYISDDEAAATLLANLDGPALGDPRPLRFVTGMRKKAWNKNVVALGLASGFMEPLESTSIHMIQAGISKLLQLFPADGVMDPLLIDRYNAQTRFESERIRDFLVLHYHATERADSPFWDYCRTMAIPASLQENIDLFRQSGRFFRNGDEMFGVVSWVQVMIGQGILPAGYDPLADQLPDEELPKFLASIRDVVSRNVDLLPTHQQFIDRECRAPTVAV

SEQ ID NO: 85548 - protein, 557 aa, unidentified
  source 1..557: note = Nitrospirillum amazonense
  REGION 1..557: note = tr|A0A560IKU0|A0A560IKU0_9PROT Tryptophan halogenase; OS = Nitrospirillum amazonense OX=28077 GN=FBZ92_10785 PE=4; SV = 1
MADIEAPTDGARAKGAPVKNVLIVGGGTAGWLAAAYLARTLSIGQPGGARITLVESADIGILGVGEGTFPNIQRTLRRIGIDESVFMRESEATFKQGIRFDHWQHAPGPSATGAGQRDHYFHPFQSAIGPQDLDLIPYWLLGAAGDGVPLDTALTMQKRVADAALAPKRSGDADYAAPLNYAYHFDAVKFARLLRVVATDLGVRHVIDTVDAVPLDETGAVAGVVTRENGTLTADLYIDCTGFRAQLIGQALKSPYQSCRKWLFCDRAVALQVPYDQPDAPIPSYTISTAHEAGWTWDIGLETRRGIGHVYSSDHTDDARAEQVLRDYIGPAAADKTARTFRFEAGYRPEPWVRNCVAIGLSSGFFEPLESTGIVLIEVASVLLTSLFPWAGDMATAARQFNRIMRQRYERALDFLKLHYCLTRRTDTAFWRDNADAATVPDTLHDLLDRWRHRPPEGLDFDLNLDTFSEASWQFVLYGMGYRTDLSAQAGAFRHMDEARQQFAAIRAGTEQALAALPRHRDLITQIYRHGLRPRTPLAGAPSGRATLSSGMAGLSR

SEQ ID NO: 85549 - protein, 552 aa, unidentified
  source 1..552: note = Nitrospirillum amazonense
  REGION 1..552: note = tr|A0A560FBT9|A0A560FBT9_9PROT Tryptophan halogenase; OS = Nitrospirillum amazonense OX=28077 GN=FBZ89_108140 PE=4; SV = 1
MTAAEGARRRILIVGGGTAGWLTAAYLAKTLGANLSGGTEITLIESSDIGIIGVGEGTFPTIRSTLAAIGIDEARFLRESTATFKQGVHFVDWAETPAPGASPTQALGAVAGHTHYFHPFNFPHIGNGPGGNGPELLPYWLLGGAGDLPFAEAVTLQKAVADASRGPKRPVDPPYAAPLNYAYHFDANRLAVLLRTVATELGVRHRVGTVTDVALDGSGAVARVETREHGSLSADLYIDCSGFRAEIIGRALKVPFKSYQDVLFNDRAVALQVPYDRPDAPIPSYTVATAHEAGWTWDIGLNDRRGTGYVYSSRHTDDTRAEQVLRRYLGPAAEGRDVRLLKFDSGCRTAQWVGNCVAVGLSGGFFEPLESTGIMLIEVAAHMIAQYFPWGETGLDSAGTAASMAATARTYNALMGKRYERIVDFLKLHYCITRRTDSAYWRDNADPATIPESLRDRLAVWAHRPPGRFDFVADHETFLPASYQYVLYGMGFKTDLEPARALHRRMDEARHEFRGLRTVAPQAVSSLPTHRELVEEVYSTGFRPPQAAPGRR

SEQ ID NO: 85550 - protein, 505 aa, unidentified
  source 1..505: note = Nitrospirillum amazonense
  REGION 1..505: note = tr|A0A560IKL6|A0A560IKL6_9PROT Tryptophan halogenase; OS = Nitrospirillum amazonense OX=28077 GN=FBZ92_108133 PE=4; SV = 1
MSDRRIRKVVILGGGTAGWMTAAALAKVNTPPQFEVTLIESDEIGIIGVGEATIPTIHWFNRLVDLDEAQFLRETRATFKLGIEFVGWNGARNGEVSRYFHPFGRYGGPADTQMFFHRWIRATLGGFPHGHQDYSLATLAAMANKFGPPAPDPNSLFSTLGYAYHFDAGLYAAHLRRRSEARGVKRIEGKVERIEQDPETGFVTRLTTHRGQVVEGDLFIDCSGLRALLIEGVMNSGFEDWSHWLPCDRALAVPCERVADPVPYTRATAHAFGWQWRIPLQHRTGNGIVYSSRFASDDEAASTLMTNLDGKALADPRLIRFQTGRRRQPWVKNVVAIGLSSGFLEPLESTSIHLIQSGIAKLLSLFPTRDCPEETAGQFNQVYGADVESVRDFLVLHYSRTQGRNEPLWRHCQAMAVPEGLSLKERHFTRTGRIVLSTDELFREASWFAVLMGQGLWATDYNPLLDTMPADENLAYLLRLREQMAKAAATLPSHEEYLRRVMGPA

SEQ ID NO: 85551 - protein, 516 aa, unidentified
  source 1..516: note = Streptomyces gilvosporeus
  REGION 1..516: note = tr|A0A1V0TMW0|A0A1V0TMW0_9ACTN Tryptophan halogenase; OS = Streptomyces gilvosporeus OX=553510 GN=B1H19_08825 PE=4; SV = 1
MIKSVVIVGGGTAGWMSAAYLKAAFGDRIDVTLVESDRVSTIGVGEATFSTVRHFFDYLGLDEREWLPECAGSYKLGIRFENWRKPGHHFYHPFERLRTAEGFTLADWWLLEGDRSEPFDRSCFITPALCEAQRSPRMLDGSLFAGDLDGSLGRSTLEDQRDQFPYAYHFDASLLAKFLTKYGTDRGVRHVVDDVVDVARDQRGWIGHVTTREHGEISGDLFIDCTGFRGLLINQTLEEPFESFQDVLPNNRAVALRVPQPDQATKGMRPYTTATAMDAGWIWTIPLFGRNGNGYVYSDEFCTPEEAERTLREFAAPGQDDLEANHIRMRIGRNRRSWVNNCVAIGLSSAFVEPLESTGIFFIQHGIEQLVKNFPDQHWDPQLMKDYNDRVANVLDGVKEFLVLHYRAAQRDDTAYWKEAKVRPIPDALAARLETASSHLLDEHTIYPAYHGFEQYSWITMLLGLGHEPTRPRPTLAHLDPAAARAELAALKADTEHLVNSLPSCYEYLASINKAG

SEQ ID NO: 85552 - protein, 550 aa, unidentified
  source 1..550: note = Nitrospirillum amazonense
  REGION 1..550: note = tr|A0A560HEQ0|A0A560HEQ0_9PROT Tryptophan halogenase; OS = Nitrospirillum amazonense OX=28077 GN=FBZ90_104248 PE=4; SV = 1
MTTQSMGSKDAGSPPVRDVLIVGGGTAGWLAAAYLARTLAISQPGGARISLVESPDIGILGVGEGTFPSIQRTLRRIGIDESVFMRESEATFKQGIRFDHWVRPPDTPGRSHYFHPFESAITPEGMDLLPYWLLGCADDGIGIDTAVTVQKGVADASLAPKRPGEADYAGALNYAYHFDAVKFARLLRTVAIDLGVRHVVDTVDAVPLAEDGTIAGVLTHRNGRLTADLYIDCTGFSAQLIGQALKSPYQSCRQWLFCDRAVALQVPYDRPDAPIPSYTISTAQEAGWTWDIGLESRRGTGHVYSSDHTDDTRAEQVLRDYIGPAAADKAARTFRFEAGFRPQPWVGNCVAIGLSGGFFEPLESTGIVMIEVAAVLLSSLFPWAGDMVTAARQFNRIMRQRYERAADFLKLHYCLTRRTDTAFWRDNADAATTPDTLRDLLDRWRHRPPEGLDFDLNLDTFSEASWRFVLYGMEYGTDLAAQAGAFRHKDEARRHFAAIRAGTAQALAALPRHRDLIQQIYRHGLRPRPSFGTAQAGQSALSAGMAGLSR

SEQ ID NO: 85553 - protein, 516 aa, unidentified
  source 1..516: note = Nitrospirillum amazonense
  REGION 1..516: note = tr|A0A560IY87|A0A560IY87_9PROT Tryptophan halogenase; OS = Nitrospirillum amazonense OX=28077 GN=FBZ92_102156 PE=4; SV = 1
MAAPHTSPQTSDDNATNAPLRRIVIVGGGTAGWMAAASLAKFLRNLKCDIVLVESEQIGTVGVGEATIPPIMNFIRVLGIDEDDLIRQTNATFKLGIRFQDWTRLGHSYFHPFGHTGFEMEGIGFPAYWMRQRLAGAAAPLEEYSLQAQAAAHNRFMRPVKAPGSPLEGITYALHFDAALFARYLRTYSEARGVTRVEGKVVKVDLRPEDGFIDALRLEDGRRVEGDFFIDCSGFRGLLIEEALQAGYENWQSYLPCDSAVAVPSERAGAPPSYTLATARDAGWQWRIPLQHREGNGVVYARDFLGDDAARETLLANLAGKPLADPRILRFVTGRRRETWKRNCLSLGLASGFLEPLESTSIHMVHRGLALFIQMLPDRRCEPADIARYNRMVAFEYERIRDFLVLHYATNERRDTDFWRHCAGIDWPDSLKAKIELFQSHGRIQREDTELFPEQSWLYVFTGQGLTPRRYDPLTDLLDPEKMRGALANIHDVIGRVVQTMPHHQAFIDRYCAAQS

SEQ ID NO: 85554 - protein, 495 aa, unidentified
  source 1..495: note = Alteromonadaceae bacterium
  REGION 1..495: note = tr|A0A3R7VN10|A0A3R7VN10_9ALTE Tryptophan 7-halogenase OS=Alteromonadaceae bacterium TMED101; OX = 1986649 GN=CBC61_007590 PE=4 SV=1
  VARIANT 452: note = Xaa can be any naturally occurring amino acid
MDQNVNKVVIAGGGTAGWMAAAALSKLVARPLEIILVESESIGTIGVGEATIPSILSINRMLQIPEPDFIKLTSGTFKLGIQFENWRTVGDSYIHSFGDTGQGSWAAGFHHFWLKGRSLGIEYDYGDYCAELLAAQQERFAITSKNRLNYAYHLDAAKYAAYLRNLAETAGVIRVEGRITRIDKTSDGFISSLQINDGEQAVEGDLFIDCSGFQAILADNALGVDYDDWSSWLPANRAWAVQSEITEHPKPYTRAIAHEAGWRWKIPLQHRTGNGLVYSSEFMDDQAAHNLLIQSVAGTLTTEPRQIKFTTGQRKRYWEKNCVTLGLSSGFIEPLESTSIHMIQNGIMWLLLLFPDPLIEKTAVTQYNKQVRSEAEYIRDFIVLHYTANERYGEPFWDHCRNMELPETLSHRIEMFRSTGRVFQAQDDIFTENSWVQVLLGQGIVPRTYHNXVETMDPSELASFLTSIREQAAGTVQGLPMHGEYIKRLISHASA

SEQ ID NO: 85555 - protein, 506 aa, unidentified
  source 1..506: note = Roseimaritima ulvae
  REGION 1..506: note = tr|A0A5B9QUW6|A0A5B9QUW6_9PLAN Tryptophan halogenase; OS = Roseimaritima ulvae OX=980254 GN=UC8_31640 PE=4 SV=1
MREHHAVDVAVVGAGCGGSLIALLLNRIGLSVVLLDRGSHPRFAIGESSTPTADLVLRDLAQRYELPALLPLSQYGTWKANYPQLTCGLKRGFSYFHQCPGQPFRPLSDHSNELLVAASSDDRHADTHWLRSDVDAFLVRQVQAAGIPYIDQTEFIAEQCQPTWKLSGSRENIPLSITAKFLIDATGEAAFLPHILGLTNKTSRMRTNSRALFAHFEGVTPWQEMLVAQNADLDAYPFRSDIAAVHHLLQEGWMWQLRFDNGVTSVGFALEGGCQAGPAKLSPTAEWNALLERYPTLADQFADARVVAPERGLTRTGRLQRRWEPSAGENWALLPHTAGFVDPLYSPGLAQTMCGVERLVGLLEQHWGRESLPERLAGYQRTVAAELDLIDRLVHGSYRCRHHFDLFVPYSMLYFAAATTYEQRRLEHGFDPGKAAPAFLCADEADFQAIVGELQQRLEHALASPDRRPASDRFFAEVAEAIAPYNHVGLCDRTVHNMYHHTAVNP

SEQ ID NO: 85556 - protein, 501 aa, unidentified
  source 1..501: note = Nitrospirillum amazonense
  REGION 1..501: note = tr|A0A560FH62|A0A560FH62_9PROT Tryptophan halogenase; OS = Nitrospirillum amazonense OX=28077 GN=FBZ88_12038 PE=4; SV = 1
MSDRRIRKVVILGGGTAGWMTAAALAKVNTPPQFEVTLIESDEIGIIGVGEATIPTIHWFNRLVELDEAQFLRETKATFKLGIEFAGWNGGNSRYFHPFGRYGGPADAQMFFHRWIRATLGGFPHGHQDYSLATLAAMANKFGPPAPDPNSLFSTLGYAYHFDAGLYAAHLRRRSEVLGVKRIEGKVERIEQDPETGFVTRLTTHRGEVVEGDLFIDCSGLRALLIEGVMNSGFEDWSHWLPCDRALAVPCERVPDPVPYTRATAHAFGWQWRIPLQHRTGNGIVYSSRFAGDDEAASTLMANLDGKALADPRLIRFQTGRRRRSWVKNVVAIGLSSGFLEPLESTSIHLIQSGIAKLLSLFPTRDCPEETAGQFNQVYGADVESVRDFLVLHYSRTQGRDEPLWRHCQAMAVPEGLSLKERHFTRTGRIVLSTDELFREASWFAVMMGQGLRATDYNPLLDTMPADENLAYLLRLREQMAKAAATLPSHEEYLRRVMGPA

SEQ ID NO: 85557 - protein, 518 aa, Cellvibrio sp.
  REGION 1..518: note = tr|I3IDD0|I3IDD0_9GAMM Putative tryptophan halogenase OS=Cellvibrio sp. BR OX=1134474 GN=O59_000086; PE = 4 SV=1
MNNKIASVVIVGGGTAGWLTAGRIAAQHRTQTGSTISVTLVESPTIPIIGVGEGTWPTMRSTLMKLGISETDFIRECDASFKQGAKFARWVTGTPDDFYYHPLMLPQGFGKTNMAAHWQALRNEQQLQESFSAATCFQEAICELGLAPKMITTPEFNSVANYAYHLNAGKFSTFLQKHCTEKLGVLHVLADVVSINSADNGDIRSVTTAQAGEISGDLFVDCTGFQSLLLGQHLQVPFVDCSDVLFIDNALAVQIPYDSDDAPIASHTISTAQDAGWIWDIGLIHRRGVGHVYSSRHTSEDQATAQLAAYIGPAFNNSSLRKIPLPCGHRDIFWKNNCVAVGLSAGFLEPLEASALVLVELSASMIAEQLPACRAVMDITAKRFNETFRYRWDRIIDFLKLHYILSKRTDNTFWIDNRDPATIPASLQELMQLWRYQPPGDHDFTSNNEVFPAASYQYVLYGMGFETCYDYSEHLLRDNQFAQEQFMKNKKTIAQVTRSLPSNRELLQKIHLHGLQTL

SEQ ID NO: 85558 - protein, 506 aa, unidentified
  source 1..506: note = Duganella sacchari
  REGION 1..506: note = tr|A0A1M7R5S2|A0A1M7R5S2_9BURK Tryptophan halogenase; OS = Duganella sacchari OX=551987 GN=SAMN05192549_11170 PE=4; SV = 1
MNTLNRINHITVVGGGSAGWMAATALATYLGKGATIRLIESEEIGIVGVGEASVPHIKLFNGQWLGIDEAEFVKRTQGTVKLGIQFNDWGRIGDSYIHGFGAIGRSMGPLPFHQFWLKQFLAGRAPDIGHYTPQTVMAPQGRFAPGDRNAPPHSPLADIAYAYHFDATLYARYLRELAEQRGVQRIEGKIVSVQQRADDGHIESVTLESGQVVEGELFIDCSGFRGLLIEQTLKTGYVDWTHWLPCDRAMAVPSASVEPITPYTRATARAAGWQWRIPLQHRIGNGYVYSSRHISDDEAAATLLANLDGEALAEPRPLRFTTGMRKKFWNKNVVALGLASGFLEPLESTSIYLAQSGITRLLSLFPKRDFNPLLAARYNRESAFEYERVRDFLILHYNATERNDTPFWDDCRTMSIPDSLREAVELFRADGRYFRNGEDFFALPSWVQVMLGQRIMPQSYHPIVDEMPEDKLIEQVDGMRAMLAHAVASMPTHQEWINRYWKASAP

SEQ ID NO: 85559 - protein, 363 aa, unidentified
  source 1..363: note = Methylovulum psychrotolerans
  REGION 1..363: note = tr|A0A1Z4C435|A0A1Z4C435_9GAMM Tryptophan halogenase; OS = Methylovulum psychrotolerans OX=1704499 GN=CEK71_20635; PE = 4 SV=1
MTQPTPFDVFIVGAGPAGCAVALSLAQTVPGLRVAIADPGRSTPFRIGESVPPLIKPFLDQLGVGAAFLQDNHCPSFRTVSAWGSPELVSNEFFLNVHNTGWRLDRARFDQTLLNAACQQGAQRLPAQLRTLSHHAPYWHIGCGDAGDYRATYLIDASGRTALPSRLAGLKPINHDRLVASAVFFGQTDPNLPNADAVLTEACPDGWWYTAALPEGRRVVALMTDADLARRLNAKQLAAWQQQLAQTRHVLPLIGNARPLAPPQLWPANSRYLHGPTRPNLLAVGDALSCFDPLSSQGIIKALRSGLFAAYALTDHIRRQDSSGFSRYQALMQREFAAYQTTLSDYHRQEQRWPDAPFWQRRL

SEQ ID NO: 85560 - protein, 505 aa, Erythrobacter sp.
  REGION 1..505: note = tr|A5PB21|A5PB21_9SPHN Tryptophan halogenase, putative OS=Erythrobacter sp. SD-21 OX=161528; GN = ED21_23601 PE=4 SV=1
MRMAIEHIVIVGGGTAGWMAAAALSRIRDGRDLKITLVESEQIGTVGVGEATIPPFVEFQNALDIDEREMMAAVQGTFKLGIQFANWGQVGESYIHPFGDYGYELGGVHFHQVWHAMRERGDKRPLQVFNLETMAAHFGKFMRSQDYGRDDLPPMNYAYHIDATAYARFLRAYAEKRGVVRREGLVKNVALHPETGFVTGITLDDGEEIEGDFFVDCSGFRGLLIEQALETGYEEWTRFLPCDRAVALPCNRDDGSPPPPFTKATAHKAGWQWQVPLQTRNGNGHVYCSEFMEADEAHDILVQNLAGKPTADPNHLRFVTGRRKKFWNKNVVALGLASGFMEPLESTSIHLINTGVNKLIATLSLDGVTEAQASTYNRLTDKEYERIRDFLVLHYKVTRRDDSEFWNYVRTMDVPDTLSEKIEIFKANGQVFREEDELFTTTSWAAVMLGQGITMDGTSPMAAGVIDGVAKEVDEMERSIKWLVQQMPGHDQYLQRYCPTGVKAA

SEQ ID NO: 85561 - protein, 550 aa, unidentified
  source 1..550: note = Nitrospirillum amazonense
  REGION 1..550: note = tr|A0A560KHJ5|A0A560KHJ5_9PROT Tryptophan halogenase; OS = Nitrospirillum amazonense OX=28077 GN=FBZ87_101451 PE=4; SV = 1
MTAADGARRRILIVGGGTAGWLTAAYLAKTLGANLSGGTEITLIESSDIGIIGVGEGTFPTIRSTLAAIGIDEARFLRESSATFKQGVHFVDWAETPAPDASPTQALGAVPGHTHYFHPFNFPHQGNGPELLPYWLLGEAGDLPFAEAVTLQKAVADAARGPKRPIDPPYAAPLNYAYHFDANRLAVLLRTVAIELGVRHRVGTVTDVVLDGSGAVARVDTREHGSLSADLYIDCSGFRAEIIGRALKVPFKSYQDVLFNDRAVALQVPYDRPDAPIPSYTVATAHEAGWTWDIGLNDRRGTGYVYSSRHTDDTRAEEVLRRYLGLVAEGRDVRLLKFDSGCRAAQWVGNCVAVGLSGGFFEPLESTGIMLIEVAAHMIAQYFPWGETGLDSAQTAASMAATARTYNALMGKRYERIVDFLKLHYCITRRTDSAYWRDNADPATIPESLRDRLAAWAHRPPGRFDFVADHETFLPASYQYVLYGMGFKTDLEPAHALHRRMDEARHEFRGLRTVTPQAVSSLPTHRDLVEEVYRNGFRPPQAAPAVGGRR

SEQ ID NO: 85562 - protein, 505 aa, Cellvibrio sp.
  REGION 1..505: note = tr|I3I4A2|I3I4A2_9GAMM Tryptophan halogenase, putative OS=Cellvibrio sp. BR OX=1134474 GN=O59_001168; PE = 4 SV=1
MDKLLRIVILGGGTAGWMAANLFAKRWPREQVQITLMESPEIPIIGVGEGSTPSLKRFFKQLDLPEQEWMPACHATYKTNIRFVGWSPASGMQEYSHPFYSQPDVFNERAFFTNCRTRRLGLDVVTDPEKFFINGELARQGKVPTASANFPFQMEYGYHFDSQLLGRYLAGVATARGVIHHQAKLAEVLRNDRGEITALQTDGGDLLAGDFFIDCTGFASLLMQKALAVPFHSYQQQLFNDSAVVMPTPAFENPPVETRSTALSAGWCWQIPLTHRTGNGYVYSSQFISRDQAEAEFRAHIGMSESAQECRHLTMRVGQLAQHWSHNCVGLGLSQGFIEPLEATALHLVQLTIEALMDALDENNFTSNGRDNFNRTVANHFDGVRDYIIAHYKLNTRGVNNSLGSDYWRANRDNKQLPESLLQILDVWYRCGDLAAELAQRKIKPAFNTASWHCLLAGYGAFPPLAANQPGQGKGDLYRECEVKKFVEGCALNFPLQTDMIKMAR

SEQ ID NO: 85563 - protein, 521 aa, Xanthomonas cynarae; identical to SEQ ID NO: 84798
  REGION 1..521: note = tr|A0A2S7BC78|A0A2S7BC78_9XANT Tryptophan 7-halogenase OS=Xanthomonas cynarae OX=109214; GN = XcyCFBP4188_13555 PE=4 SV=1

SEQ ID NO: 85564 - protein, 485 aa, Cellvibrio sp.
  REGION 1..485: note = tr|I3IAI0|I3IAI0_9GAMM Tryptophan halogenase; OS = Cellvibrio sp. BR OX=1134474 GN=O59_001739 PE=4 SV=1
MNDGIKKIVIVGRDLDAWITAFFLKSVLDKSRDSYEVTLVELGTLLTEHDIFAVLPSYKMLHKTLGANEDKLRQTAKARPFFGQRFTGWNPELPEFFHAYDRLGINFNGVDFFQYWMKAVSNGLKLPLEDFSLGVAAAKHGRFVASTGQADFSHLAYGYHLSAIEYVNAIARAAMEVGVKRENGNIITINRNNDVIHSLSLDDGMVLKADFFIDASGADALLINSLTDNNFESWEHWFLCDRIITASSAPLSPAPAFSQVTAFSSGWCGLYPLNNRTAIQTLYSSRHTDFSGVVAEMKMRVGVDISQGVERPIKCGMLSRPWIGNCLAVGTAAASMEPLDALQEHSLVISMVMLKQLFPNSNEYQNERDVYNKKMHSFIENLRDFQIVHYALNSRDELFWTACKNLKLPHILKEKIDIFKCCGYASVREDETFQEENWISVFNGHGLAPEFYSPLVDNMSDDEMIQNFQKILRMIKERINSSPLV

SEQ ID NO: 85565 - protein, 504 aa, Cellvibrio sp.
  REGION 1..504: note = tr|I3I4A1|I3I4A1_9GAMM Putative tryptophan halogenase OS=Cellvibrio sp. BR OX=1134474 GN=O59_001167; PE = 4 SV=1
MNNIIKKIVIAGGGTAGWMTAALLKKVLQQRVEIQLVESEEIGIIGVGEATIPPIQTFNSVLGLHEPEFLRETKATIKMAIRFDNWKQQGDSYYHTFGAPGTTIGFSAFQHYWLRAQKQGWNTPIWDYDLNYLCCEAGVFGKFDGKDPLYQVPYAYHFDSALYGRYLRKISEQAGVVRTEGKIREVRLNADSGFVEALLMENGSEIQGDLFIDCSGMRGLLTQGALQTGYEDWSHWLPCDHALAVPSERFEKTLPYTRSIAHKAGWQWRIPLTHRNGNGLVYSSHHLSDDEATTILLSNLDSTALAEPKPIKFKTGRTLQQWNKNVIAVGLSSGFLEPLESTSIHLIQSAIVRLLKHFPNAGISQTQVDEYNRDSKHEYETVRDFIILHYHLNERDDSEFWRYLRNMPIPERLAHKIALFQETGAIMNDPGDIFLDSSWLQVMMGQGIMPRDYHPTADIPGAEQLQSMLARIASAKRQPLTQLPSHDEFLHQYAGVTRAGINRG

SEQ ID NO: 85566 - protein, 524 aa, unidentified
  source 1..524: note = Erythrobacter zhengii
  REGION 1..524: note = tr|A0A418NT99|A0A418NT99_9SPHN Tryptophan 7-halogenase OS=Erythrobacter zhengii OX=2307003; GN = D2V07_08490 PE=4 SV=1
MSQSNGIVTPGRIADVVIVGGGTAGWMAAAALSRFFDDGKRTITLVESDQIGTVGVGEATIPPIRNFNAMLDISENEFLRETRGTFKLGIEFVDWGRIGDRYFHPFGDYGHDFHGIQFHQLFLRQLALGSADIGDIADYSMSSVAAALGRFGRPSAQAKTPISEISYAFHFDAGLYAAFLRKLAERQGTVRKEGQIVRAHRNGESGDVSAIELADGTCIEGDLFIDCSGFRGLLIEEELETGYDDWSHWLPVDRAIAVPTSNIASPDPFTRSTARPAGWQWRIPLQHRVGNGHVFCSQYMDEDEARDILLANLEGQPLAEPRTIRFKTGMRRKAWSHNVVSLGLSSGFIEPLESTSIHMIQNGIARLFALFPDKPISSLERDEYNRGMRDVYEDVRDFIILHYKATQRGDTDFWRYVRDMAVPDSLTRKMELWRLHGRVFRENAELFAQPSWIAVMLGQNIAPESHDPIADTLDERKVAEAMKQMRETYRSTAQQLPSQEDFLRRAGAWHLEQPAAQFAFGGQS

SEQ ID NO: 85567 - protein, 485 aa, unidentified
  source 1..485: note = Pseudoalteromonas amylolytica
  REGION 1..485: note = tr|A0A1S1MXM0|A0A1S1MXM0_9GAMM Tryptophan halogenase; OS = Pseudoalteromonas amylolytica OX=1859457 GN=BET10_09555; PE = 4 SV=1
MAAASLSRFAKGKDLSVTLIESPDINTVGVGEATIPNFVDFNRNLGIADADLIKATQATFKLGIEFEDWYKKGSRFFHPFAAYGAPLENIEFHQYINKLKAQGVAPEIEDYCFACLLAKKGAFAQPNGQSNNSATHYSYAYHMDAVLYAQFLTQFCKEKGVKHILATVSKVTLNVESGMIESLKLSDGQTINGDLFIDCSGFKGILIEGAMGIGLEADDHWLPCDSAVAVQTELQGQPTPYTRAIAKEAGWQWCIPLQHRMGNGYIYSSKFMSDAQAEESLLNSVKGRTITQVKHFKFPKGRRKVIWHKNCFALGLAAGFLEPLESLGISLIQTALAKLLTFFPDKSFNQADIDEVNRLHNSELDRIIDFLLVHYKLTQRDDTAFWRYCQQMPIPESLAHKLAVYKSQGHVVQYADESFQQASWLAMFFGFNLQPERFDARIKSLDNRLIEKNLAQLNDQLQSAVSQCLSHQAFIDKHCKAVSDV

SEQ ID NO: 85568 - protein, 510 aa, unidentified
  source 1..510: note = Burkholderiales bacterium
  REGION 1..510: note = tr|A0A257FL90|A0A257FL90_9BURK Tryptophan halogenase; OS = Burkholderiales bacterium PBB2 OX=2015564; GN = CFE41_15950 PE=4 SV=1
MRVKKIAIIGGGTAGWLAANHLAVELRAEQDISITVIESAEIGIIGVGEGTVPHIRKSLLKFGISEAELLAECDATFKVGIKFSDWLAPGQNQAANSYYHPFSSPYPGGLDVTTMYLQNAADMEFSSLTEVAALADAMKAPKKVSSAPFEAPINYAYHFNALKFGQLLARNATERLGVHRKQATVVDAVLNSSGDVDYLLTKEGEQLQFDVYVDCTGFNSLLLGGLYKIPFVDKSSQILTDTALTVQVPTEPQCEIPPYTLAKAHKAGWLWDIPLTNRRGVGFVYASSLMPEAQALEGLAAHLGQSPDQMSPRKIGMRIGYREKFWHQNVVALGLAQGFVEPLEATSIFVTDLAAELFARNFSPEKGAMSAAAAYCNQVVSYTWERVMDFVQLHYCISDRRDSEFWRLNTEAAQLSEVLAQRLAMWRVNPPKKSDFFSRFDLFDVENFLFVLYGMKYPTKARAMTANEVQAYVRELNQVKGLEKALSGELIGHREWLTGFLAAYREMQRK

SEQ ID NO: 85569 - protein, 513 aa, unidentified
  source 1..513: note = Burkholderiales bacterium
  REGION 1..513: note = tr|A0A257FKU5|A0A257FKU5_9BURK Tryptophan halogenase; OS = Burkholderiales bacterium PBB2 OX=2015564; GN = CFE41_17010 PE=4 SV=1
MSLPPVTSLPLLRRIVIAGGGTAGWMSAAALSTLLPPGYEIHLVESEEIGTIGVGEATIPNIKNFNAALGLDEDDFIRATQGSFKMGIEFVNWGRLGERYIHGFGSFGQDFGSVGFHHQWLRLRREGLASALDDYSINTSAPRQAKFMRARPEMAGSPLADIAYAYQFDAGLYAAYLRRHAEQRGARRSEGRIVEVLRAAEDGRIRALRLDSGEQIEGDFFLDCTGMRALLMGQALGVGFEDWSHWLPCDRAWAVPCESAGPLLPMTRATAHSAGWQWRIPLQHRTGNGHVFASRFMDEGEARDLLMRHLDGKPLAEARSIRFQPGRRHQAWHQNCLAVGLSGGFLEPLESTSIHLIQTALARLMSFFPHGGLDAADIAEYNRQTQFEYERIRDFIILHYKATARDDSPFWNHCRQMAVPETLQRKIDLFCSNGRIVREADELFAELSWLQVMNGQGLQPRGYHPLAEQTPQAEAVELLDHIRQVIARCVQVMPTQAAYIAEHCQAVRPGSGT

SEQ ID NO: 85570 - protein, 505 aa, Sphingomonas sp.
  REGION 1..505: note = tr|A0A4V2T1K7|A0A4V2T1K7_9SPHN Tryptophan halogenase; OS = Sphingomonas sp. PP-CE-1A-559 OX=2135657; GN = C8J42_101530 PE=4 SV=1
MTLGSPVRRIVIVGGGTAGWMAAAALARLIPTGASVTLIESDTIGTVGVGEATIPPIRAFNAMLGIDEAAFLAATAGSFKLGIEFVDWGAIGERYLHPFGGFGFDIEGVRFHQHWRRRRAAGVVENIDAYSLCAVAARAGRFAPPSPDPASILSQMAHAYHFDAGLYARFLRGRAERDGVTRIEGEIGDVALDGHTGHVRHVTLAGDRRIEGDLFLDCSGFRGLLIEQALGAGYEDWTRWLPCDRAVAMPTANTGTAITPYTRSTAREAGWQWRIPLQHRTGNGYVYSSAHCSDDEAATTLLDGVDGPPLADPRILRFTAGRRRKQWIGNVVALGLASGFTEPLESTSIHMVQTGISKLLALFPDQGFSPVEIDTYNRLAETQFDQVRDFLALHYHATRRTDSPFWREAGARAIPDSLAEKIALWRRRGRLFRWEDDLFAEASWVAVLLGQGIVPEGWDRLADTVDARDVDPRFDRLRAMFADAAARMPRHEDYLARTSPTRVRA

SEQ ID NO: 85571 - protein, 519 aa, unidentified
  source 1..519: note = Burkholderiales bacterium
  REGION 1..519: note = tr|A0A257FSH7|A0A257FSH7_9BURK Tryptophan halogenase; OS = Burkholderiales bacterium PBB2 OX=2015564; GN = CFE41_03590 PE=4 SV=1
MSESSSLDHNSSSLRSQPHGPIRRVVVVGGGSAGWMAAATLATYLGRQASVRLIESEDIGIVGVGEASVPHIRMFNGQMLGIDEAEFVRRTQGTVKLGIEFRDWARMGDRYTHGFGVIGRSRGPLPFHQFWLKLFLAGRAGPIGDYSLQTVMAPQGKFIPGDPSAAPDSPLADIAYAYHFDASLYARFLREISERRGVQRIEGKIVRALQRPDDGFIEAVQLESGERVEGDLFIDCSGFRGLLIEETLKTGYTDWSHWLPCDRALAVPCEGVSPITPYTRATAHAAGWQWRIPLQHRIGNGYVFSSQHLSEDQAAATLMANLDGKPLADPRLLRFTTGMRKQVWNKNVIALGLASGFLEPLESTSIYLVQSGLSRLLSLFPGREFNPQLAERFNRETAFEYERVRDFLILHYHATERDDTDFWNDCRTMSVPDSLREAMDLFRADGRYFRHGEDFFALPSWVQVMLGQRILPRRYHPIVDDMPEDRLHAFVEGTRHILSDAVAAMPTHQQWIERYWRAA

SEQ ID NO: 85572 - protein, 511 aa, unidentified
  source 1..511: note = Pseudoalteromonas amylolytica
  REGION 1..511: note = tr|A0A1S1MWX6|A0A1S1MWX6_9GAMM Uncharacterized protein OS=Pseudoalteromonas amylolytica OX=1859457; GN = BET10_11995 PE=4 SV=1
MSHNNKQTKRILIVGGGSAGWLTAGLLASQCRGWQVTLVESKNIATIGVGEGTWPTMRTTLQKIGIDEDVFMHQCEASFKQGSEFINWTRSEGHSYYHPFSLPVGYSEQIDIVTPWLGIKDRVDFAHATSAQSYWCDRALAPKTASDPQYQGRANYGYHLNADKFAQLLKQHCTTKLGVTLILDDVTKVNGEVDAHINSVSTQEHGELLADLFIDCTGSRALLLGEHYKVQWQSKKHILKNDRAVALQVSHNTPSCDVASCTKSTAQSYGWIWDIALQSRRGIGYTFASEYCDFVQASTQLRDYIRSQGLSVAQDAQVKEIKFNPGHREKFWHKNCVAIGMSAGFIEPLEASALVMIELSAQYLCDNFPQSEHMMDVVATRFNAKFNYHWSRIIDFLKLHYVLSERDDTAYWQSMKRDDIPESLESLLTLWRYRPPKHGDLDHIDEVFSPASYQYVLYGMGFTTQADSFGISEQINSLFKHVTQIAQQGIDTQPSNRILLDNIAKYGIAKI

SEQ ID NO: 85573 - protein, 507 aa, unidentified
  source 1..507: note = Burkholderiales bacterium
  REGION 1..507: note = tr|A0A257FMA4|A0A257FMA4_9BURK Tryptophan halogenase; OS = Burkholderiales bacterium PBB2 OX=2015564; GN = CFE41_11880 PE=4 SV=1
MSVQTLYSDGARPVRRVVIAGGGTAGWMVAALMGKLMGKLLDIRLVESEEIGTVGVGEATIPALHTYHELLGLNEAEFMAATQATFKLGIKFEGWKAPGEDYIHSFGLTGKDHWSAGFQHFWLKGRERGLAAPYGDYCLELRAAEEQRFAHLPNNGMNYAYHLDATRYARFLRGLAEAHGVRRIEGKIAAVLREQPGAGDLTALQMEDGSRIEGDLFVDCTGFRALLLGQTLGVGYEDWSHWLPCDRAVAVQTASVREAPPYTRSIAHPFGWQWRIPLQHRVGNGLVYSSRELSDADAPEMLRRHVEGELITEPRLLRFEPGQRHEVWHRNCVAMGLASGFIEPLESTSIHLVQRAAIRLMRLFPAGGIREVDVREFNQQTTQDLQHIRDFIILHYHVTERDDSALWRHVRTMAVPETLRHRIELFRETARVFRPLDELFAENSWIQVMMGQGISPQHHHPVADLMGDAELSHFLNNIRSQVSRQLAGLPPHQAYVERLCAPYRAAA

SEQ ID NO: 85574 - protein, 498 aa, Sphingomonas sp.
  REGION 1..498: note = tr|A0A0Q6L184|A0A0Q6L184_9SPHN Tryptophan halogenase; OS = Sphingomonas sp. Leaf339 OX=1736343 GN=ASG67_16450 PE=4; SV = 1
MAAAINKVVIVGGGTAGWMAAALIARVIGEQVSVELVESDDIGIIGVGEATIPPIQHVNAVLGIDEAEFLRETKATIKLAIRFDNWGAIGESYYHTFGSAGRNLAFCSFHHFWTRARRAGMAVDYWDFDLNYLCAREGKFAKMQGDDPTWSLPYAYHFDSLLYGKYLRRYSERLGVVRTEGLIEHADRDPETGDVTSLTLRDGRQVAGDLFIDCSGSRGLLIQRHLNVGYEDWGHWLPCDRAMAVPSARFAQTAPYTRSIAHEAGWQWRIPLQHRNGNGLVYSSRHCSDDRAASILLGNLDGEALDELRIIPFRTGRARRQWDHNVVAVGLASGFLEPLESTSIYLIQSAIVRLLHLFPRDGIDDRVVAEYNRQSQIEYETVRDFIILHYHATRRDDSAFWRDLRAMPVPDRLAAKIDLFRRSGILTQDPLDIFMEPSWVQVLMGQGIVPADHHPLADGPDNDELAAQLRQLAAMKREPVPTMPLHDTFLKAFGGQAG

SEQ ID NO: 85575 - protein, 499 aa, Sphingomonas sp.
  REGION 1..499: note = tr|A0A4R2SE09|A0A4R2SE09_9SPHN Tryptophan halogenase; OS = Sphingomonas sp. PP-CE-1A-559 OX=2135657 GN=C8J42_11417; PE = 4 SV=1
MSEFSEAQRTRVVVAGGGTAGWIAAAAIVRQLGPLVDVTLIESDEIGTVGVGESTIPTARSFHAFLGIDEAAFMRATQATFKLGIAFENWRQVGDRYFHPFGSVGRSVAIADFQHFWLEARARGFGGAYGDYSLEQQAAGAGLFGHDEQHSLAYAYHLDATAYARFLRTLAEPWGVRRVEGRIERVERDGKGGDIAALVLASGERIAGDLFIDCTGFRALLTEGALGTGFEDWSEWLSTDRALAVQTETVAPPVPYTRAIAHDAGWRWQIPLQKRTGNGLVYSSAHMSDDEAHATLIGALDGRPLFEPRPLRFRSGMRRQAWNRNCIALGLAAGFIEPLESTSIHLIMNAVIRLIQLFPFRGDDHVALAARFNAQSRHEWEHVRDFIILHYHVTQRDDSPFWRDCAHMTIPDSLAGRIALFTKTAGAWQGQDDLFRIDSWVSVMLGQGVEPRAHHRIARIIKEQELQTSFADLSRGITSTMRALPRHCDFLAQYCLADG

SEQ ID NO: 85576 - protein, 531 aa, unidentified
  source 1..531: note = Hephaestia caeni
  REGION 1..531: note = tr|A0A397NPM7|A0A397NPM7_9SPHN Tryptophan halogenase; OS = Hephaestia caeni OX=645617 GN=DFR49_4000 PE=4 SV=1
MSGRAIRNIVIVGGGTAGWMAAATIGRALADQDVSVTVIESAAIGTVGVGEATIPPLLHLNQLLGIDENDFIRRTSATFKLGLDFVGWGKAGDRYFHPFGRYGADIGALPFHQYWLRARAADPAAAGALTDYSLPSKAALAGKFCRPSPDPKNTLSNIAYAYQFDAARYAVMLREIAEAAGTVRHEGRIVEVLMRENGFVRGVRLERGEVIEADFFIDCSGFRGLLIEGALETGYESWTHWLPCDRAIALPCEAAGDPTPYTRCSAHRAGWQWRIPLQHRIGNGHVYASAHMGDDEAEAILRANLDGAPLGEANRLRFTTGRRRLFWNRNVLALGLASGFIEPLESTSIHLVQSGLAKLLTLFPDRDFHQPDIDFYNRQTTVEHERLRDFIIMHYHANQRVGEPFWDACRAMPIPDTLAEKLAMWRRHGRVFRVDDELFGEPSWVAVLEGQGFPPERYDPLADALPPEKLARLPAIRAAIARGVAAMPEHGAYLAGAGTIGTAPPRAVPPDTLAGLVTTHTGSIGPAVVRR

SEQ ID NO: 85577 - protein, 510 aa, Sphingomonas sp.
  REGION 1..510: note = tr|A0A4R2SUQ9|A0A4R2SUQ9_9SPHN Tryptophan halogenase; OS = Sphingomonas sp. PP-CE-1A-559 OX=2135657 GN=C8J42_1028; PE = 4 SV=1
MTSDGAARVTKVVIVGGGTAGWMTAAALSRLVPSGVSVTLVESEEIGTVGVGEATIPPLLDFNRMLGIDEDAFVRATGATFKLGIEFRDWARLGDAYLHPFGTHGRDIGGVQFHQLWLRQAALGNPDPGPIGDYCLSAVAARRGRFTRPSANPESVLSTLFYAFHFDAALYGKFLRDMAEQDGVVRVEGRVVAVERDAGTGFIEAVRLEGDRRIDGELFIDCSGFRSLLLGGALDVPFTSWKHWLPCDRAWAVPSQRQGGLTPYTRATADTAGWRWRIPLQHRVGNGYVYSSAHIDDDDARRALLAGLEGEALGEPRQLRFEAGRRDRLWERNCVAIGLSGGFLEPLESTSIHLIQSGITRLMSLFPDLGFGVTEIDEYNRVMLREYEQVRDFIILHYHATERSDSPFWDQCRTMAIPASLSAKLALWSGKARVFREQGELFTPDGWIAVLLGQGIRPASFDPLASALPADESARFLAHVRDVIDKTAAAMPTHEAFIAQNCAARTHQAA

SEQ ID NO: 85578 - protein, 502 aa, unidentified
  source 1..502: note = Burkholderiales bacterium
  REGION 1..502: note = tr|A0A257FG66|A0A257FG66_9BURK Tryptophan halogenase (Fragment) OS=Burkholderiales bacterium PBB2 OX=2015564; GN = CFE41_23260 PE=4 SV=1
MITPAAPAPTSSTSVTSAAPYQSQPVRRVVIAGGGTAGWMVAAGLSKSLGSLYDIRLIESEEIGTIGVGEATIPTLHFFHEILGIDEQEFMAATNATFKLGISFENWRNVNEDYFHSFGTTGKPHWTAGFQHFWLEGRKRGLASDYGDYCLELRAAMDNRFAKLPNWGLNYAYHLDATAYAGYLRRYSEALGVVRIEGKIVKVHTDASSGPSQGGITGITLNDGSLIEGDLFIDCTGMRSLLLGETLGVAYEDWSQWLPCDSAVAAQTASVGEAVPYTRSIAHPFGWQWRIPLQHRVGNGLIYSSKYLSDDEAKATLLANVQGAVLRPPRVIKFTPGQRKQVWKNNCVAIGLSSGFLEPLESTSIHLIQRGLTRLIQMFPADGVRQSDIDEYNQQTDSAIQTIRDFIILHYHVTNRGDSQFWRDCRDMAVPALLAHRIQLFKDTARVCLDSDELFKDNSWIQVMMGQGITPAAHHPVTRQMDNRDLSEFLGEIRKDAARTFI

SEQ ID NO: 85579 - protein, 495 aa, Sphingomonas sp.
  REGION 1..495: note = tr|A0A4R2TH39|A0A4R2TH39_9SPHN Tryptophan halogenase; OS = Sphingomonas sp. PP-CE-1A-559 OX=2135657; GN = C8J42_101529 PE=4 SV=1
MTDALRSVTIVGGGTAGWMAAVAFGRLLGPAGTRVTLIESDDIPTVGVGEATIPPIRTFHAMLGIDEDAFLRATGGSYKLGIRFEGWTRPGESYVHPFGQIGTDIAGVSFAAQWLRARHAGLAAPLGAYSLEARAAETGRFSRPIANGDSPLSRIGYAYHFDAGRYAAFLRTQAEAYGVVRHEGLVERVERGPAGIAAVHLADGSRIAGDMFLDCSGFRALLIEGGMEAGWTDWAEWLPCDRAVAVPSVADAAPLPLTRAIAERAGWRWRIPLQHRTGNGHVFSSRHISEDEATATLLAGVEGETLADPRVIRFATGHRNYFWSGNCIALGLAAGFMEPLESTSIHLVQSGLQHLLRMLPTGARPAPAVVERYNRIMTAEFSRIRDFLVAHYHLNARAEPFWRDRAAAAIPEGLAEKLALFCAGGRIFREADELFNETSWLAVLTGQNAPVSGYDPICDGIPIETAANRLAQIERVVATSLTHMPSHAHALARLA

SEQ ID NO: 85580 - protein, 494 aa, Sphingomonas sp.
  REGION 1..494: note = tr|A0A429VDP7|A0A429VDP7_9SPHN Tryptophan 7-halogenase OS=Sphingomonas sp. HMF7854 OX=2315330; GN = HMF7854_04700 PE=4 SV=1
MVGGGTAGWMTAAALSRLLPHQCEITLVESEAIGIVGVGEATLPHIRGFNERLGIPEAEFMAATRATIKLGIEFNDWGRIGDSYVHPFGTFGNARGAVDFHHYWTRLRQAGLPVDDLQEYSLGVRLARANRFDFPSQDGESLRSTYGYAYQFDAMQFAPYLRGIAERAGVKRIEGRIVAVERSPESGDVTAVQLDNGRNVGGELFVDCSGFGSLLLGRTLSESFEDWSQWLPCDSAVAVPCRTETALSPFTSATAMGAGWRWRIPLQHRTGNGYVYSSAHLDDDSARAALLAVVEGEPMAEPRVLRFRAGRRARSWSHNVVGVGLASGFLEPLESTSIYLIQQAITFLVELFPAGAASPSDRDEFNRLIDLEYDRIRDFLILHYHATTRSDSSFWDYVRTMAIPDSLAEKIELFRRRGRVVKYREGVFLDASWVAVYLGQGIMPEGHDRRADLPDEAALVAAMTALRQQIAAEVAATTEHRRFLDHYCPMRRAA

SEQ ID NO: 85581 - protein, 510 aa, unidentified
  source 1..510: note = Sphingomonas naasensis
  REGION 1..510: note = tr|A0A4S1WSF5|A0A4S1WSF5_9SPHN Tryptophan 7-halogenase OS=Sphingomonas naasensis OX=1344951; GN = E5A74_04130 PE=4 SV=1
MPEKRGILVVGGGTAGWLTAAYLARFFEGRIAITLLESPEIGIIGVGEGAFPTIRSTLKFLGIDESHFIRAASATFKQGIRFNDWLHAPGPGGRRHHYLHPFEAPFYTEGASLVPYWLLQDPATRPPFAEAVTIQNRVAEAQRAPKRPGEGDYAGPLNYAYHFDARRLAELLEARAVDLGVRHLRGLLTDVELDADGSIAAIRTAGHGRLEADLYIDCSGFRAELIGKALGARFQSVRHQLFTDRALACKIPYDRPDAPIESFTVATAHAAGWTWDIGLEGARGIGCVYSSAHMADDEAAAVLRDYVGHDRYSARIIPFEPGYRAAQWVGNCVSVGLSGGFLEPLESTGVVLIEAAVGMIAELFPHNGPAEAPAARFNALMAARYANIINFLKLHYCLSRRPEPFWRDNADPASIPAALQELLAQWRWRPPSRFDFTLDLESFAFFNYQYILYGMEFGTDLAPGRGDFPNVAAAEKLFARIRGFSERATEDLPAHRALIREINAGRSLGA

SEQ ID NO: 85582 - protein, 499 aa, Duganella sp.
  REGION 1..499: note = tr|A0A4Y9SQL2|A0A4Y9SQL2_9BURK Tryptophan 7-halogenase OS=Duganella sp. DN04 OX=2561932; GN = E4L98_05090 PE=4 SV=1
MENIKQVVIVGGGTAGWMTASALARVLEGKIQITLIESDDIGSVGVGESTIPMIKLFNAVLGIDEDEFMRATHATFKLGIEFRDWGRVGDNYMHGFGIFGQDLATLPFYQYWLRLHLAGKAPDLENYSINRMAAKAGKFMRADRSHGNSPLGDIVHAFHLDAGLYARYLRQYAEARGVSRIEGKVVDALTRASDGHVDAVRMENGDLVSGDLFIDCSGFRALLIEQALHTGFEDWSHWLPCDRAWAVPCELSGELQPYTRATARPAGWQWRIGLQHRTGNGHVYAARFMSDDEAAAILMANLDGRPLAEPRLLRFTAGKRKQVWNKNVVAVGLSSGFLEPLESTSIHLIQSTIARLITFFPDRGFSEADIAEFNRQCDFEVERIRDFLILHYHATERDDTPFWNHVRTMDIPDTLRAKMDLWRSRGRIVRNDNELFAEVGWLQVLHGQRVPAAGHHPLADLMEEREVADYLGDIASVINACVEQMPTHAAYIEARCASR

SEQ ID NO: 85583 - protein, 509 aa, unidentified
  source 1..509: note = Hephaestia caeni
  REGION 1..509: note = tr|A0A397NIQ8|A0A397NIQ8_9SPHN Tryptophan halogenase; OS = Hephaestia caeni OX=645617 GN=DFR49_4170 PE=4 SV=1
MSGDAAKDGAPGPIRRICIVGGGTAGWIAAAVLAHQYQGMIEVDLVESDDIGTVGVGESTIPPFLQLLAGLGVSESEFVMATQASFKLGIGFEDWGGPGHRYFHPFGTIGQMANARDFYQIWLRAAAGGEAPPLLAFAPAHAMAEAGKFMLPFKAPDTPIAGASYALHVDAKRVARFLRGFAEERGVTRHEGIVTEVATRPDGFVDRVILNDGRSIAVDFFIDCSGFRALLIGKTLGVGYTDWSHWLLCDRAVAVQTENVGPPPPYTLAVAQPAGWRWRIPLQHRTGNGHVYSSAHMSEDEATALLLDQVVGETVTNPLPLRFTSGVRERGWDKNVLSLGLASGFIEPLESTAIHLVYRGMEYFLRFLPGTDCAPELADEYNRRVTADYEEIRDFVILHYCLTGRRDTAFWRACVDMELPPSLAQRIALFRINGTIPEHVDPLFRSVSWQALMDGLGVRPRAYHPAIDRVAAGEVNRELGAMADALAGFVATLPAHEAFLARHCPAPAP

SEQ ID NO: 85584 - protein, 466 aa, Sphingomonas sp.
  REGION 1..466: note = tr|A0A4R2SZW9|A0A4R2SZW9_9SPHN Tryptophan halogenase; OS = Sphingomonas sp. PP-CE-1A-559 OX=2135657; GN = C8J42_101531 PE=4 SV=1
MSQTVAILGANLCGWMTAAALARRLPRDAYHVVVIDDGTTGDGLGDFAPVIAVPPALGGFHADLGIEPTALVRATGGGHALGVAFGGWRKDGTAAFLSYGETGMPLQGIAFHQLAGRLRKDGAHVRLADYALSAVAAQAGRFALEAPIAHALHLPVERYTAVLRAAAMNFGASCANAPLADPRIDANGIVEMLKLADGTDIAPLLVLDCSGSSARIASRTAPAFDDWSAWLPCDRTHTQTLSAAGAPPPYTQIDVQGSGWTATWPLGGADVRLTCTAGGEGTPFRAGRRVEAWHGNCIALGAAAGLIEPLHPTALTVLLRSLAQLIQLWPAECRAPVEATAFNRFTANAMTGARNFVIAQKAAARGSNAIGDERSEPVLPDAVEAKRTLFAARGRLPMFDDEPFEEEDWAAMFDAMGLVPRRYDARADALPLATIQQHFADHRARIIAQVRALPPYAHAMAELAAA

SEQ ID NO: 85585 - protein, 518 aa, Photorhabdus temperata
  REGION 1..518: note = tr|A0A4R7P280|A0A4R7P280_PHOTE Tryptophan halogenase; OS = Photorhabdus temperata OX=574560 GN=EDD23_4825 PE=4 SV=1
MIKSVLIVGGGTAGWMTAAYLSKAFVQNVDITVLESKKVKKIGVGEATFSTVRHYFDYLGLDESEWLAKCAGSYKLGIRFENWDGQDNHFYHPFERWETVKGFPISEWWLRKSTTNQGFDYATFLTPHLCEAKRSPRRLDGSLFAQSSDKSLGQSTLAEQRAQFPYAYHFDADEVANFLKRYAMNRGVSHIEDDVTHVEIDESGNIGYLETKIRGKLKADLYIDCTGFKGLLINQALNEPFISFSDVLKNNRAVALRVPREDTRDIEPYTTARTMSNGWRWTIPLYKRNGYGYVYCDEYQSPEEAEAELRRSIPYENADCAANHIRMRIGRSNRSWVKNCVAIGLSSAFVEPLESTGIFFIQHGIEQLVRFFPRSGSNEPLIEEYNTRVNRVVDGVKEFLLLHFSLAQRNDTLYWKEWKNIELPKELLKKIMLAKDHLLDKDTIYPFYHGFEEYSWNTMILGLGSGPLTSKPALSLMIPDKADEILLQHYVKARKIISGLPTCYEYLQYLHSSEGKNG

SEQ ID NO: 85586 - protein, 505 aa, Xanthomonas hortorum
  REGION 1..505: note = tr|A0A2S7E3W0|A0A2S7E3W0_9XANT Tryptophan halogenase; OS = Xanthomonas hortorum pv. hederae OX=453603; GN = XhhCFBP4925_07615 PE=4 SV=1
MTQAPIRKVVIVGGGTAGWIAACALSHQFRELLEITLVESEQIGTVGVGESTVPPIRTFHRFLQIDEQEFLRAVAGTFKLSISFEHWRRQGERYIHPFGITGQSTLVCAFHHLWLESQRRGMPGTFGDYCLETVASRVDRFALLREPAVNYAYHLDAALYANFLRARSEAFGVKRIEGKVQQVTLQPDSGDVATLVLEDGQVLDGDLFIDCSGFRGLLIEQALHTGYEDWSHWLPCDRAVAVQTEAAGPPVPYTRAIAHQAGWRWHIPLQHRVGNGLVFSSRHLSDDEAHAKLLRDAAAPALKDPWLVPFRTGRRRKAWNKNVVSLGLASGFIEPLESTSIHLTIAAVVRLISLFPADGIAPSQVQLFNDISRAEMEHVRDFIILHYHATQRDEPLWRQCREMELPESLALRLRAWRERAHAWQGADELFRVDSWTHVLMGQGIIPAQHHPLARAVSDRDLHRLLDGIAQPIQRAVEQMPSQQAFIDAYCKAGASAWGLRSPLVA

SEQ ID NO: 85587 - protein, 506 aa, Novosphingobium sp.
  REGION 1..506: note = tr|A0A257GBR6|A0A257GBR6_9SPHN Tryptophan halogenase; OS = Novosphingobium sp. PASSN1 OX=2015561 GN=CFE35_10395; PE = 4 SV=1
MSNPVQHIVIVGGGTAGWLSACLLAARLPGKRITLVEAPDIPTIGVGEGTWPTMRETLAAIGIPEAEFLAECDAAFKQGSRFDGWRDGSAEDSYLHPFTAPPPAEMQALAAAWQENGSQGPFAAAITAQHGVCAANLAPRQRTMPGYAGALNYGYHLDAGKFAALLMRHATTRLGVTHIAARVTGIEAAANGDIAALMLEGRDPLSGDLFLDCSGQAALLIKGHCGAGWVDRSDISFNDRALAVQVPVRPGSPIAAQTIGTAHEAGWLWDIGLPTRRGIGCVYASRFLSDERAEEILRGYIAAKVPGADVASLTPRKLAFATGHRDRFWIGNCLAVGLSAGFIEPLEASAIVLIELSLKALADNFPQSRASMAIHAARFNELFRYRWDRIVEFLKLHYVPSQRTEPYWLAQRAPETIPPRLAECLALWREQAPSAWDFPRVDEMFPAASQQYVLHGMGVPVPTGSSAPAPHARLAEVTAKARALTAALPTARDYLDRLSAPTRIPA

SEQ ID NO: 85588 - protein, 513 aa, Massilia sp.
  REGION 1..513: note = tr|A0A0Q7F9W1|A0A0Q7F9W1_9BURK Tryptophan halogenase; OS = Massilia sp. Root418 OX=1736532 GN=ASC94_13695 PE=4 SV=1
MSMDQQGNLAIRKIVIVGGGTAGWMTAAPLALRLGKACEIVLVESPEIGTVGVGEATLPTIAYYNRALGLDPADFARKTKATFKLGIEFKDWGHLGNRFFHGFGDFGPAIENRSPYIYWLRLAREFKDMPSYENWSVATAMARANRFMEPYGDQPAVTNAFSYAYHFDAGLYAAYLRDYAVQRGVTRIEGMITAVEQHPETGFITGVRLRDGSLVEGDLFIDCSGFRGLLIEGVYQAGYDDWSAMLPCNSAQAVPCERVEPLTPYTRSTAQSAGWTWRIPLQHRTGNGHVYCNGFTSDEEASRVLLAGLDGRALDTPRQLRFTTGRRRKSWIKNCVAIGLSSGFLEPLESTSINIIENSVGWLLQHFPDRSFQPALADEFNRLVSRRYEFVRDFIVMHYKITRRDDSEFWRYCAAMPVPDTLQHQIELFRETGRVAIYDPEGFLVSSHISIMAGLGITPKAYDPLIGLMDLQALRTHFDRVRDTIARAVQAMPEHGAYVRQLSGVPAAPPLAA

SEQ ID NO: 85589 - protein, 500 aa, Xanthomonas hortorum
  REGION 1..500: note = tr|A0A248Y7S1|A0A248Y7S1_9XANT Tryptophan halogenase; OS = Xanthomonas hortorum OX=56454 GN=XJ27_05710 PE=4 SV=1
MTQAPIRKVVIAGGGTAGWIAACALSHQFRELLEITLVESEQIGTVGVGESTVPPIRTFHRFLQIDEQEFLRAVAGTFKLSISFEHWRRQGERYIHPFGITGQSTLVCAFHHLWLESQRRGMPGTFGDYCLETVASRVDRFALLREPAVNYAYHLDAALYAKFLRARSEAFGVKRIEGKIQQVTLQPDSGDVATLVLEDGQVLDGDLFIDCSGFRGLLIEQALHTGYEDWSHWLPCDRAVAVQTEAVGPPVPYTRAIAHEAGWRWHIPLQHRVGNGLVFSSRHLSDDEAHAKLLRDAAAPALKDPWLVPFRTGRRRKAWNKNVVSLGLASGFIEPLESTSIHLTIAAVVRLITLFPADGIAPSQVQLFNDISRAEMEHVRDFIILHYHATQRDEPLWRQCREMELPESLALRLRAWRERAHAWQGADELFRVDSWTHVLMGQGLIPAQHHSLARAVSDRDLHRLLDGIAQPIQRAVEQMPSQQAFIDAYCKAGASAWGAA

SEQ ID NO: 85590 - protein, 516 aa, Sphingomonas sp.
  REGION 1..516: note = tr|A0A0Q4J8P0|A0A0Q4J8P0_9SPHN Tryptophan halogenase; OS = Sphingomonas sp. Leaf28 OX=1735695 GN=ASE79_16610 PE=4; SV = 1
MTKRILIVGGGTAGWLTAGYLAKRLGADLPAGVAITLVESRDIGILGVGEGTFPTIRRTLATIGIDEADLIRRCGATFKQGAKFVHWRHAPGQGPTDHYSHPFQVADSSDGLDLLPYWLLGHGGTENWDEVSNPQKKAADRHRAPKLASNPDYVGPLNYAFHFDAVALAGLLREQAVKNGVRHLTDTVNEVLLDADGAIGGVRTERNGMLDADLYIDCTGFRAELIGKAMRIPFRSCRDVLFCNRAIAAQLPYARPDEPIASYTISTAQEAGWIWDIGLDRRRGIGHVYSSDHSDDEAAERVLRGYLGAAGEKADVRHFKFEAGYREVNWYKNCVAVGLSSGFFEPLEATGIAFAEVSAGMIANLFPWGGDYETSARQFNANMLRRYERALDFIKLHYCISERRDTAFWRDNVADASVPNSLLEMLDRWRFRPPNELDIDGQIDIFTEASWQYVLYGMGWKTDLSAKAGVLRYGDDARRAFAEVQRQARYAIANLPSNRDLVAYAQSHSFGGRAAA

SEQ ID NO: 85591 - protein, 521 aa, Xanthomonas hortorum
  REGION 1..521: note = tr|A0A248YBW8|A0A248YBW8_9XANT Tryptophan halogenase; OS = Xanthomonas hortorum OX=56454 GN=XJ27_14105 PE=4 SV=1
MSDTHASDPRQRPVRRVVIAGGGTAGWMAAAALSKVLGKQLQITVVESDEIGTVGVGEATIPSLVTFHRLLEIDEAAFMAATQATIKLGIGFEHWRDVDRHYIHSFGHTGTDHWSAGFQHFWLKGRQRGVARDFGDYCLELRAAQEGRFAHLPNGGMNYAYHLDAGLYARFLRRFSEGFGVQRIEGRIGHVETDAHSGYLTALTLENGTRVEGDLFLDCTGFAGLLIGKTLGVGADDWSHWLFADSALAVQTESVGAPVPYTRSRADQAGWMWRIPLQHRVGNGIVYSSRYMDQDSAAQVLQRNLIGRALTEPRALRFTPNQRHRVWEKNCVALGLASGFLEPLESTNIHLIQRGIIRLMQTFPQVINDSDIAEYNRQAAEEITHIRDFVILHYHVTDRRDTPFWRDCAAMEIPDTLRHRVELFRQSGRVFHQANELFAENSWVQVMLGQGITPKQHHPVADLMGDAELNHFLENIHTRVDAALVRLPAHADFLRRYCPAPPLPEPATRLPATPVLATPAA

SEQ ID NO: 85592 - protein, 501 aa, Pseudoxanthomonas sp.
  REGION 1..501: note = tr|A0A2S6B1I8|A0A2S6B1I8_9GAMM Tryptophan 7-halogenase OS=Pseudoxanthomonas sp. KAs_5_3 OX=2067658; GN = C0063_16010 PE=4 SV=1
MHNQDPIATPRTIKRVVIAGGGTAGWMAAAALSKTLGKTLDITLVESEEIGTVGVGEATIPTLVVFHRLLDIKEQDFMAAVQGTVKLGISFEHWKELGHRYIHSFGISGKDHWSAGFQHFWLRGHAEGIASDYSDYCIELQAALQDRFSHLPRYHVNYAYHMDAALYARFLRGFSERHGCKRIEGKIVDVATDADGCISSIKLERGDVIEGDLFIDCTGFRALLIGKALGVGYTDWSQWLFNDSALATQTTAVRDAVPYTRAIAGTAGWQWRIPLQHRVGNGIVYSSRHISDDEAREQFLSSVEGEVIKQPWPIRFKPGQRQQCWAKNCVALGLAGSFIEPLESTTIHLIQRGIVRLLQTFPQAITQPAIDEYNARLDEELQHVRDFVVMHYHVSDRRDTPYWREIAEMEIPATLRHRIELFRETGTVFHVPGELFGENSWIQVMMGQGIVPKRYHPTADVMSPPDLQRFLDDIRRNVLDTARQMPAHMDYLRSYCPAPKP

SEQ ID NO: 85593 - protein, 538 aa, Pseudomonas sp.
  REGION 1..538: note = tr|A0A554PBY6|A0A554PBY6_9PSED Tryptophan 7-halogenase OS=Pseudomonas sp. ATCC 13985 OX=2578105; GN = FCE86_028835 PE=4 SV=1
MNKPIKNIVIVGGGTAGWMAASYLIRALQQQANITLIESAAIPRIGVGEATIPSLQKVFFDFLGIPEREWMPQVNGAFKAAIKFVNWRKSPDHSRDDHFYHLFGNVPNCDGVPLTHYWLRKREQGFRQPMEYACYPQPGALDGKLAPCLADGTRQMSHAWHFDAHLVADFLKRWAVERGVNRVVDEVVEVRLNDRGYISTLLTKEGRTLEGDLFIDCSGMRGLLINQALKEPFIDMSDYLLCDSAVASAVPNDDAREGVEPYTSAIAMNSGWTWKIPMLGRFGSGYVFSSKFTSRDQATADFLNLWGLSDNQPLNQIKFRVGRNKRAWVNNCVSIGLSSCFLEPLESTGIYFIYAALYQLVKHFPDTSFDPRLSDAFNAEIVHMFDDCRDFVQAHYFTASREDTPFWLANRHELRLSDAIKEKVQRYKAGLPLTTTSFDDSTYYETFDYEFKNFWLNGNYYCIFAGLGMLPDRSLPLLQHRPESIEKAEAMFASIQREAERLRTSLPTNYDYLRSLRDGDAGLSRSQPGPTLAAREIL

SEQ ID NO: 85594 - protein, 522 aa, Alteromonas sp.
  REGION 1..522: note = tr|A0A495UQI4|A0A495UQI4_9ALTE Tryptophan halogenase; OS = Alteromonas sp. TK-46(2) OX=1276890 GN=CLW98_2815 PE=4; SV = 1
MATATPITHIVVVGGGSAGWLTAGRIAAQHQCATRKDIKVTLVESPNVPIIGVGEGTWPTMRSTLIALGISETTFIKECDATFKQGAKFAKWTTGEEHDFYYHPLMLPQGFSQTNLGPYWQMVAPELNESFSHAACVQEAICEAGCAPKSIRHAEFAGTANYAYHLDAGKFTAFLTKHCTEKLGVHHVLADVNRVESNDNGDIKALHTEQGVTVEGDLFVDCTGFKSMLLGEHYKVPFIPCDDVLFIDRALAVHVPYDTPQSPIASHTISTAQDAGWIWDIGLQSRRGVGHVYSSRHQSKDEAYARLDAYVRQTSSLNGIEGINVKDITIQSGHRQRFWQNNCVAVGLAAGFLEPLEASALVLVELSASMIAEQLPANRAVMDIMAKRFNDTFSYRWQRIIDFLKLHYMLSKREDSAFWRDNRDSHTIPDSLKELLALWQYHPPSDKDFTSNNEVFPAASYQYVLYGMGFTSDLATHQQWVNADFAKQQLQQNRKARTMAVEKLPKHRELINKIHQFGLQAV

SEQ ID NO: 85595 - protein, 506 aa, Limnohabitans sp.
  REGION 1..506: note = tr|A0A315APR2|A0A315APR2_9BURK Tryptophan halogenase; OS = Limnohabitans sp. WS1 OX=1100726 GN=B9Z48_17705 PE=4; SV = 1
MQQANLIRSIVIVGGGTAGWMTAAALATILKGRYPIQLIESDEIGIVGVGEATIPMIQRFNKVLGIDEAEFMRETMGSFKLGIEFVNWGRQGERYMHGFGKIGQDLWTTRFDQYWRKMRQLGKAAPLENYSITRMAALANKFMPTPDGVQNSPFNDIAYAYHFDASLYAKYLRKLAEQRGVVRTEGKINQVSQRPIDEHVDAVVLENGKRIEGDLFIDCSGFRGLLIEQTLHTGFEDWTHWLPCDRALAVPCASAFTFTPYTRSTAHQAGWQWRIPLQHRTGNGHVYCSQYISDDEAASVLLAHLDGKALADPRPIRFTTGMRQKAWNKNVVAIGLSSGFLEPLESTSIHLIQNTISQLVEFFPNQSFNPTQIAEFNRQNRFQMERLRDFIILHYHVNQRDDSAFWQACAHMAIPDTLQHKIDLYKTTGRVLRVDNELFAEDGWLQVMEGQNLPTESYHPLVDLQSENSIHEYLESVREVIAKCVSVMPDHADFIAQHCAAPKMNM

SEQ ID NO: 85596 - protein, 517 aa, Cellvibrio sp.
  REGION 1..517: note = tr|I3I6N4|I3I6N4_9GAMM Tryptophan halogenase; OS = Cellvibrio sp. BR OX=1134474 GN=O59_003599 PE=4 SV=1
MSKSVLIVGGGTAGWICAAYMARMLAADTPGGVTITLVESDEIGILGVGEGTFPIIRKTMSRIGLDESTLIREADATFKQGIRFNNWKKNPADDPHDTYFHPFQVASQHTDMDLLPYWLLGVAGDVPWAEACTVQERVVDAKLAPKLITHPNYNAPLNYAYHFDAGKLAQVVCRQAMAMGVKRLIDTIDDVKVDENGIASVQGRVHGELKADLYIDCTGFRARLIGEALGSEFTSYKDQLFCNRAVAMQVPYDRPDAPIPSCTYTSAQDAGWIWDIGLHNRRGVGYVYASDYCSDDEALATLKRYIGPAANNLQHRKLAFEAGFRKTQWHKNCIGVGLSVGFIEPLEATGISFAEVAALMLCNLFPWSGDYERSAQQFNQAMTKRFEHVIDFIKLHYYLSERTDTAFWRDNRAPASASDYLKGKLEQWRHRPPSFLDIDASHDIFDENSWQYILYGMGFKTDISARAGALRFYDDAKREFESIRQQSNKAMTAVPSHRDLINEVVARGFRNASGGQR

SEQ ID NO: 85597 - protein, 500 aa, Pseudoalteromonas luteoviolacea
  REGION 1..500: note = tr|A0A167N8F9|A0A167N8F9_9GAMM Tryptophan halogenase; OS = Pseudoalteromonas luteoviolacea S4060-1 OX=1365257; GN = N478_02640 PE=4 SV=1
MSSRKIVILGGGTAGWMAANLIAKSWCDKDIHVGVVESPDIGIIGVGEGSTPQFKAFMDFIEVPESQWMPKCNATYKNGIRFVNWSTRPGFEQYFHPFPAQPDDYSAPAFFHNSFVRRKGIDLEGHPDPFFLSTYLAEHAKAPIAAESFPFEINYGYHFDSGKLGQLLAEKASEFGVEHIQARVTDVRKNTDGTIAALVSEEGQEFCGDIFIDCSGFSGLLMQQHMQVGFESFENNLFNDSAVVLATEQGNVIASETTSVARKFGWSWHIPLTNRIGNGYVYSSKYCDKDQAETELRAALGMLDSEIEARHLSMKVGQVKEHWHKNCVAIGLSQGFIEPLEATALHIVQETVQSFIECYQDGEFTCKEQGKHNQMMAQRYQAIRDYIVAHYRVNSRTDTNYWRDNANNNQISKSLFDVLNAWVQGKNLSDELDRQNIDKYYPSVSWHCLLAGYGIYPEQHQLVAGNQNANVHDVSKIREYIRRCGLNFSDHKAQLARFSS

SEQ ID NO: 85598 - protein, 495 aa, Rubritalea squalenifaciens
  REGION 1..495: note = tr|A0A1M6AX62|A0A1M6AX62_9BACT Tryptophan halogenase; OS = Rubritalea squalenifaciens DSM 18772 OX=1123071; GN = SAMN02745181_0062 PE=4 SV=1
MLKKVIVLGAGSAGLLAALTLKRRLKHLQVTVVYSEKIGIIGVGEGTTPYVPLHIHGYLGMDREEFQREVKPVWKLGIEFEWGKRGVFHYSFSNQQTDFQWQGLKKPNGYYAFDRFDGADLPGALMKRRIATPMGDDGKPDIPPPGVGIAWHLENHRFVQWLHKACMREGVKFIEGKVEDVELQENGEVKRLLLDGGRRVAGEMFIDASGFRAELMNKLGAHFDSFTDALFCDKAVVGGWEREDETILPCTRSEQMPHGWSWRIDHPDRINRGYVYSSSFVSDHDAEQAFREANPKIKDTRLVHFRSGRYRDSWIKNVVGIGNASGFVEPLEASAIMVICIQSRALTDCLYDCDGMTNDSLRKSYNKLIGGAWDDIRDFLALHYKYNTALDTPFWQECREKVNLGKGQDVADFYQQNGPSLIAKEVLMNAGDPYGMEGYLTLLVGMQVPHKNTYTPTAEEWKLWENYRNHFSNLAENGVGMKGLLEYMKKPGWAG

SEQ ID NO: 85599 - protein, 516 aa, Streptomyces sp.
  REGION 1..516: note = tr|A0A553ZQF8|A0A553ZQF8_9ACTN Tryptophan 7-halogenase OS=Streptomyces sp. MZ03-48 OX=2593677; GN = FNZ23_03200 PE=4 SV=1
MINSVVIVGGGTAGWMSASYLKAAFGDRINVTLVESDRVSSIGVGEATFSTVRHFFDYLGLDEREWMPECAGSYKLGIRFENWRKSGQHFYHPFERLGASDGFSLADWWLLKGDRSQPFDRSCFITPALCEAQRSPRMLDGSLFASGLDGSLGRSTLEEQRAQFPYAYHFDAGLLAQYLTKYGTDRGVRHIVDDVVDVGRDERGWLSHVTTREHGELAGDLFIDCTGFRGLLINQTMEEPFESFQDVLPNNRAVALRVPQPDQATTGMRPYTTATAMEAGWIWTIPLFGRNGNGYVYSDEFCTPEEAERTLREFAAPGQDGLEANHIRMRIGRNRRSWVKNCVAIGLSSAFVEPLESTGIFFIQHGIEQLVKHFPDERWDQTLAKSYNDRVAHVLDGVKEFLVLHYRAAQRDDTPYWKEAKVRPIPDALAARLEIGASHLLDEETIYPYYHGFEQYSWITMMLGLGHEPTRPRPTLAHIDPAGARAEWAKLRADAERQVATLPSCYEYLASINSAR

SEQ ID NO: 85600 - protein, 497 aa, unidentified
  source 1..497: note = Wenxinia saemankumensis
  REGION 1..497: note = tr|A0A1M6FGC3|A0A1M6FGC3_9RHOB Tryptophan halogenase; OS = Wenxinia saemankumensis OX=1447782 GN=SAMN05444417_2304; PE = 4 SV=1
MRLVIVGGGTAGWLAALLLKEGRDVTVIESSRLGTIGVGEGTTALFRQTLKHLGLDERDFLRQTGATIKYGIRHQDWRRVGHSYDGPIDDPRAVTDPALDHYAVAAGKPVAEAHLFSHLMSKGRAPVARAGGREVPAGPFHHAYHFDQAKAGAWLRRQAAGVCVVDDIVCGLDRDGETGDIRAVLLEGGDRVEGDVFLDCTGFRRALIGPLGARWIDYAASLPANRAMPFWLDLKEGEEIAPLTLARALGAGWMWRIPTQDRYGCGYVYSDAHTGPDAAKAEVEAALGHAIEPRNDIRIDAGRLDTPWRHNCIAIGLSSSFLEPLEATSIHGTLVQLLWLRDWLGAANVDPAARDRYNSAAARQVDEYRDFIRLHYVTERRDTPFWRDVAASHPAAVTDRLAAWGGRLPEARDFTPLPLGLPHVEEVLHRPVLDGLGLLSRDVAKRQMATDPARRARLRQSHDRITREYRRAAAECLPHRAWLASLTPTPAQRETTT

SEQ ID NO: 85601 - protein, 505 aa, Pseudoalteromonas luteoviolacea
  REGION 1..505: note = tr|A0A167JPM5|A0A167JPM5_9GAMM Uncharacterized protein OS=Pseudoalteromonas luteoviolacea S4060-1; OX = 1365257 GN=N478_05170 PE=4 SV=1
MSEQSIKSITIVGGGSSGWMTAAYLNELYNSKSHKIDITLIESKDIGILGVGEATVHSIRYFFAAMGINEQELMRETQATYKSGIMFRNWMKPTESGDTHEYFHPFEQQQLGSNIDIATAWLLSDRNKQERYDEGVCLSSHTIKHALSPKLPNSTGYKAPTPYGYHLDATQMARFLKTKCTAAGVKHVEATVTDISVVNGNIDTVHTEKGDFSADVFIDCTGFKGLLINKVSSNNWESFEEALPCNKAVAIQRKLPANKTPNPYTVATALSNGWVWQIDLANRQGTGYVYDGNRLTKKEAEEELKSFLGDESEFIKTTHIDMQIGRRKEFWVGNCICVGLSGGFIEPLESTGLHLINLGARLLSTHLTGTQVPLSVKDSYNRLMRHAYDDLKQFIVLHYCLTDRDDSEFWVQARKSVEHCPELIEKLALWRNKPCEFADIGSAGTSCFTDENYRYILYGMGHAPKLNIEYDYSEHEAVFDELQNRIKRLIGSVMTHEDALKRINS

SEQ ID NO: 85602 - protein, 505 aa, Rubritalea squalenifaciens
  REGION 1..505: note = tr|A0A1M6B4L0|A0A1M6B4L0_9BACT Tryptophan halogenase; OS = Rubritalea squalenifaciens DSM 18772 OX=1123071; GN = SAMN02745181_0117 PE=4 SV=1
MKRVKKVLVLGGGSAGLLAALAIRKRCPSVQVRVVASSKKGVIGVGEGTVPYVVDFVHRYLGMDEAEVYRALDPVYKLGVRFDWGKRECYDYPFTESLHVQAIPGLKKVSGYYIGERCEGFDLPSALMDKGNALPTRGHKKADVPPPGNSVAWHLENHRFVAWLETACKQQGIDMVDDEVEEVVFEDSGDVKGLKISNGAVLKADLFIDSSGFAGEIIGKAMEVPFKSYADALFCDRALVGGWDREEGEKILPYTVSQTMDSGWCWRIDHPERINRGYVFSSDHISLEDAEKEMLEKNPKIKQVREVKFSSGRREKVWVNNVIAIGNAAGFVEPLEATAIMCACLQARWLADGLMDSMSEPTPTMRDLYNERVASVWDEIRDFLAMHYRFNDKLETPFWKRCQEEISLGPIEKLVAFFQENGPSSLGRALVPEQSPFGVQGYYAHLVGMRVPHARPYKAGKAEQDVWSAYLSQVDQVASKGMSMEEVREQLMDAGYWKQLRSLSR

SEQ ID NO: 85603 - protein, 503 aa, unidentified
  source 1..503: note = Alphaproteobacteria bacterium
  REGION 1..503: note = tr|A0A257JQK1|A0A257JQK1_9PROT Tryptophan halogenase; OS = Alphaproteobacteria bacterium PA3 OX=2015571; GN = CFE32_06200 PE=4 SV=1
METNGLLPKSIVIVGGGTAGWMTAAALARFVGHKVKITLIESSDIGTVGVGEATIPPIRNFNAILGLDEAEFVRETKGTYKLGIEFCDWVKPGHSYFHPFGVYGPSLHQPNFFHQWLRARAGGKVPELSDFSLCSLAARAGRFAPQGRDPASIQATLTSAFHFDAGLYAAYLRKFAEARNVRRIDQKVQSVRQSGETGNIEAVVLESGEAVHGDFFVDCTGFRGLLIEQTLKTGYEDWSAFLPADRALAVPTAKAGPAVPFTRSTARLGGWQWRIPLQHRTGNGYVYSSQLLSDEAAHETLMANLDAPALADPKPLRFVTGRRTKLWNKNVIAIGLASGFLEPLESTSIHLIQTGITKLLDFFPSQNNHAADAATYNRLGQEEYESIRDFLILHYAANQRVGEPLWDYCRNMALPDSLKERMALFQHGGRVPPRAFDLFTETSWVAVFMGQGIEPEGYNPLVEVHDEAAGRQFLADTHRALGDVASQLPAHESFLRQAGMMPS

SEQ ID NO: 85604 - protein, 505 aa, Aquimonas voraii
  REGION 1..505: note = tr|A0A1G6RPU4|A0A1G6RPU4_9GAMM Tryptophan halogenase; OS = Aquimonas voraii OX=265719 GN=SAMN04488509_10134 PE=4; SV = 1
MQDQRIREVVIVGGGTAGWMAAAALAKVLGPRYSLRLVESDDIGTVGVGEATIPMIKLFNAALDLDEADFIRRTQGSFKLGIEFVNWGQLGDSYIHGFGKIGQDLGIVPFYHYWLKLHQQGRAGHLDDYSINTAAARANKFMPARSDRPNSPLADIAYAYHFDAGLYARYLREYAEARGVRRTEGKVASVQQHPESGFIESVTMESGECIPGQLFVDCSGFRGILIQQALKTGYIDWSHWLPCNRAVAVPCETRHAITPYTRSTARTAGWQWRIPLQHRVGNGHVFSSDFISEDEATSMLMANLEGKPLAEPRVLKFVTGKRRKFWNKNVVAVGLASGFMEPLESTSIHLIQSAIARLTAFFPHAGFDQTDIDEFNTHSHWEFDKIRDFLILHYHATERSDTPFWNYVRTMDIPSELRTKMDLFRSNGRVFRDGHELFAEPSWVQVMHGQRMQPRGYHALVDAQEDAAVQKHVETVRDVIAACVQAMPTHEQFIDRHCAARPKAA

SEQ ID NO: 85605 - protein, 501 aa, Cellvibrio sp.
  REGION 1..501: note = tr|A0A3D4PYC1|A0A3D4PYC1_9GAMM Tryptophan halogenase; OS = Cellvibrio sp. OX=1965322 GN=DIW64_04740 PE=4 SV=1
MQAPYKIVIVGGGTAGWMTAAALSTLYANNNFQITLIESKEIGSIGVGEATLPHMKDFNARLGISEVDMMKKTKATFKLGIKFVDWGKLGSNYYHPFGVYGTNQNTASFYGLYSKISQEKKIADLSDYSYAIALCRQNKFELFSNDANCISSTYKYGYHFDASLYAEYLREFCKNKSVSEIDGKIDYVERNKDTGNISSVRLESGLTIAGDFFIDCSGLRSLLLSKTLGVEFEDWSKWLVCDRAIALPSEKLPDLPPYTTSTAKEGGWQWKIPLQHRTGNGYVYSSAFLSDQKAVDSLVESVGGQSSETPRLIKFKSGRYKKSWVNNCLAIGLSSGFLEPLESTSIYLIQAAIINFTKLFSVSPSHGAESNEFNRLMDVEYDRIRDFLILHYHLNDRKDSELWNYCREMRVPEELTEKINIFKKRGHVEWYQFGLFTVPSWVSIFNGQGVKNVGYDPFVAGLPLSEIEKVLKETKYKIDARAENTPLHKTFLNSYLKTLQV

SEQ ID NO: 85606 - protein, 501 aa, unidentified
  source 1..501: note = Alphaproteobacteria bacterium
  REGION 1..501: note = tr|A0A257JQE8|A0A257JQE8_9PROT Tryptophan halogenase; OS = Alphaproteobacteria bacterium PA3 OX=2015571; GN = CFE32_08745 PE=4 SV=1
MAIETIVIVGGGTAGWMAAAALSRLRAGKPVNVIVIESEQIGTVGVGEATIPPFLDFNRLLEIDEAEMLSAVQGSFKLGIQFVNWGKIGDSYIHPFGNYGYQVDGISFHHIWHKYKEAGDKRPIQIFNIETMAAHFGRFARTEDYQRDDLPPINYAYHLDAGRYAKYLRGYAEKRGAVRIEGKVNDVALDGETGFVTSVTMDNGVVIEGDLFVDCSGFRGLLIEQTLKTGYDDWSNFLPCNRAVALPCKRDDGSPPPPYTRATAHRAGWQWQVPLQHRNGNGHVYCSEFMSDDEALDILVNNIAGKPQAEPNFLRFVTGRRKKFWNKNVVALGLAAGFMEPLESTSIHLINTGINKLIALLSLDGVTQAQEDAFNRLTGKEYARIRDFLILHYNATTRDDSPFWNYCRNMAVPESLTEKTDLFRLNGQIFREDDELFTETSWAAVMMGQGINMQGHNAMADALMEPKTGDELRGIEQSIQFVVQHMPTHSDYLKRYCPAPM

SEQ ID NO: 85607 - protein, 159 aa, Cellvibrio sp.
  REGION 1..159: note = tr|A0A3D4Q7R1|A0A3D4Q7R1_9GAMM Tryptophan halogenase (Fragment) OS=Cellvibrio sp. OX=1965322 GN=DIW64_21755; PE = 4 SV=1
ELSASMIAEQLPACREVMDIVAKRFNATFRYRWERIIDFLKLHYILSKRNDNSFWNDNRDPATIPHSLQELMQLWRYHPPGDHDFTSNNEVFPAASYQYVLYGMGFETDYRYSQHLLQDVAVAQEQFTKNQKNIEQVMRTLPSNRELLTKIHLHGLQTI

SEQ ID NO: 85608 - protein, 505 aa, unidentified
  source 1..505: note = Thalassotalea euphylliae
  REGION 1..505: note = tr|A0A3E0U144|A0A3E0U144_9GAMM Tryptophan 7-halogenase OS=Thalassotalea euphylliae OX=1655234; GN = DXX94_08045 PE=4 SV=1
MSHPVKNIVIVGGGTAGWLSAAVIASYHQGASDEQFRITLVESSDLPTIGVGEGTWPTMKNTLRQIGLNEREVFARCHAAFKQGGKFVNWVHGNGDFYYHPFTVPLGYGKLDLAPYVESVENFAVESNFQHHICEAGLAPRGHTDLDYQGPCNYAYHLDAGELANMLKEHCTQKLGVHHLVDTLCDTLIADDGSIEAIVLENTGQLAADLFVDCTGARSLLLGQALGVGYKSLSDVLFNDSALAMQVPYESADTPVASHTIATAQDAGWIWDIGLTHRRGVGHVYSSRFTSDEQAEANLRRYLGKAADGLAARKISFKPGHREKFWHKNCVAVGMAAGFVEPLEATAIMLIELSSRFIGENLPADKALMPVVAKRFNQQMDYRWQRIADFLKLHYMLTQRPEPYWQAHCDETTFPQSLKDDLAIWRYRGPATSDFDSAIELFPAASYQYVLYGMEFKPDFSSQAYLYNQRQQAEQLIKRNQQLTQQMLQNLPAHRDYIEQWLATG

SEQ ID NO: 85609 - protein, 496 aa, Sphingomonas sp.
  REGION 1..496: note = tr|A0A430EH81|A0A430EH81_9SPHN Tryptophan 7-halogenase OS=Sphingomonas sp. ABOLE OX=1985878; GN = CA234_14590 PE=4 SV=1
MDGQKFRVVIAGGGTAGWVAAAALVRHLGPNLDITLVESDAIGTVGVGESTIPTAWTFHKLLGINEQVFLRETNATFKLGIAFENWLRDGDRYFHPFGSVGRALPLCDFQHFWLEAQRRGFGGALGDYSLETQAALSEKFATGDPMPLAYAYHLDATAYAAFLRSLAEPAGVRRVEGRIVEVEQAADGDITALVLEGGLRVEGDLFIDCTGFRALLIEETLKTGFDDWSHWLPTNRAFAVQSETTEAPVPYTRAIAHGAGWRWRIPLQHRMGNGFVYASDYLSDEEAKAQLLAAVPGRALFDPRLIRFTTGMRKKAWNRNCVALGLSSGFIEPLESTSIHLVMIAVTRLLQNFPFRRDMGALSARFNAQSRAESEHIRDFIILHYKLNDRPEPFWRDHAARAVPDSLAARIALFEEGASSYQEGTDLFRVDSWNAVMLGQGVRPRDHHPMPAQIPSEDLERALGDLRAGIAAQLAKLPGHAEFIARYAAAKVPAAA

SEQ ID NO: 85610 - protein, 501 aa, unidentified
  source 1..501: note = Thalassotalea euphylliae
  REGION 1..501: note = tr|A0A3E0TTV0|A0A3E0TTV0_9GAMM Tryptophan 7-halogenase OS=Thalassotalea euphylliae OX=1655234; GN = DXX93_16360 PE=4 SV=1
MDKPFHIVILGGGTAGWMAANLFAKRWGNKVKLTLVESPDVGIIGVGEGSTPSLKRFFDILGIEESQWMPRCQATYKLNIRFNDWSPASGIQSYSHPFPAQVDTFTKRAFMVNAQTRRMGLATHTQPEDFLLNGVLAGQGKGPKVGAHFPFTQEYGYHFNSALLGEFLAEFAEQQGVSYRQVHIAQVNRAENGDISTLVTDNGEPLSADFFVDCTGFAGLLMDKTLGVAFTPYKENLFNDSAVVLQTPYSPEQASRIPVETESTALSAGWCWKIPLTERFGNGYVYSQDFINKEQAEQEFRQHLGVLDDSAQVRHLTMKVGRLNEHWSHNCLALGLSQGFIEPLEATALHLVQVSIELFIQQLEAGQFSAKHRAKYNELVSERFERVRDYIVAHYKLNTRNDSDYWRANRDNMALSDSLKEILHVWYSRGDLAKEIARQDISSHFDEISWHCLLAGYGAFPPLHPNQPGKGDLYQEKGIKEFLAGCALNFSAHHNNLADLV

SEQ ID NO: 85611 - protein, 518 aa, Cellvibrio sp.
  REGION 1..518: note = tr|A0A3D4Q328|A0A3D4Q328_9GAMM Tryptophan halogenase; OS = Cellvibrio sp. OX=1965322 GN=DIW64_14630 PE=4 SV=1
MSRKVLIVGGGSAGWITAAYLARQLSADLPGGIDLTLIESPDIDPIGVGEGTFPSIVNTLSRIGLDESVLFREADATYKQGVSFVNWIRGSDNYYHLFQPANKPNGLDLLPYWLLGEAGDVPWSSVASVQSRIVEACKAPKQFAPEGSTRSLAYAYHFDAAAFAGVLRRHATTMGVKHISDTVVDVQVSEDGAIHCVHTEKNGPMDADLYIDCTGFAARLIGKALGMPFTSCRHQLFTDRAVVIQQPYADLQKPIPSCTYATACKAGWIWDIGLRSRRGVGYVYSSSHTSDEDAIKQLKTYFGLVGASLEPRQIKFEAGYRKVQWHKNCVAIGLSAGFMEPLEATGLGLVESAAQTLAALFPWAGPLEMAAHQFNKKMARRYDNLVDFIKLHYCLSQRRDSEFWIDNCDPRSIPDSLQERLESWRYRTPDVIDIDYGHDTFIEGNWRQVLYGMGFRTDLSARRGAYRYHEAARKAFNDIARQADYAMSILPSHRDLIEDTVRRGSDPAKRNAVIAENN

SEQ ID NO: 85612 - protein, 440 aa, Streptomyces pactum
  REGION 1..440: note = tr|A0A1S6J3K0|A0A1S6J3K0_9ACTN Tryptophan halogenase; OS = Streptomyces pactum OX=68249 GN=B1H29_04755 PE=4 SV=1
MSSTLYGIPQHFDVIVIGGGPAGATTAGLLAQRGRSVLVLDRERFPRYHVGESLIPAFMRPMQELGLPERMDARGFERKYGGSLVWGNKQVPWNFSFIKGGAHAYAYHTRRADLDSLILDRARELGAYIIEDATVKEPLQNSDGRVTGIRFAVRGEDDIKEATAGLVIDASGQARVLSRRFTDLRWHDELRNVAIWTYFDNCDRLPGDEYTNILIEGLDEGWFWAIPIDKGTISVGYVTRSSTVGESDKSLQEHFEAEVGKSTKLKKMLAPGRRSAGYRTARDWSYHSDRFHGDGWVLVGDAAAFVDPLFSTGVALATLAGSVLSQIVDKIIEYPEIEEKALDRYATAYSGFFDEIREFVERFYDRTKYKEFYYSLAQEMIDPEKEKEPSADFVTLISGLSGRHPMFNISLDDLIPGGLEDSATGSPAPAASAESTEAAS

SEQ ID NO: 85613 - protein, 504 aa, Herbaspirillum sp.
  REGION 1..504: note = tr|A0A542LN56|A0A542LN56_9BURK Tryptophan halogenase; OS = Herbaspirillum sp. SJZ107 OX=2572881 GN=FBX97_5210 PE=4; SV = 1
MQDRVKNITIVGGGSAGWMAAAALATYLGKNASIRLVESEEIGIVGVGEASVPHIKLFNGQWLGIDEADFVRRTQGTIKLGIEFKDWSRIGDSYIHGFGAIGRSLGPLPFHQFWLKLHGQGRAAPIGAYSAQTVMAPLGKFAPADRNAAPNSPLADIAYAYHFDATLYARFLRELAEGRGVKRIEGKIVKVSQRASDGFIESVTLENGQTVDGELFIDCSGFRGLLIEDTLKTGYIDWTEWLPCDRAMAVPSERLQTITPYTRSTARAAGWQWRIPLQHRTGNGYVYSSRHTSDDEAAATLLANLDGKALAEPRKLAFTTGMRRKFWNKNVVALGLASGFLEPLESTSIYLAQSGITRLLSLFPTRDFNPLLIERYNRESVFEYERIRDFLVLHYHATERGDTPFWDHCRTMAIPDTLRETIDLFRADGRYFRNGEDFFALPSWVQVMLGQGIVPQGYHPIVDEMPEDKLVEHVEGVRRMLAHAAATMPTHEEWIDRYWKAPAP

SEQ ID NO: 85614 - protein, 513 aa, Sphingomonas sp.
  REGION 1..513: note = tr|A0A430EPM3|A0A430EPM3_9SPHN Tryptophan 7-halogenase OS=Sphingomonas sp. ABOLE OX=1985878; GN = CA234_02085 PE=4 SV=1
MKRVQNIVIVGGGTAGWLTAGVIAARHQSRMPGGFTVTLVESPNIPIIGVGEGTWPTLRTTLAKIGVSETEFFRECDAAFKQGALFARWTTGAEDDAYYHPLMLPQGFHQLSLVPHWIANANGRSFCDTVTPQGRICDAGLAPKTIATPEYDGQANYAYHLDAGKFAPFLTRHCTTRLGVRHVLADVRAVERAENGDIVAIDTEQAGRIEGDLFVDCTGFRSLLLGETMGVRFKDCGDILFCDAALAAQIPYPEENAPIATHTLSTAQGAGWIWDIGLPTRRGTGYVYSTAHTSDDQAEATLRAYLGPAGADMAVRRIPIRSGHREIFWKNNVVAVGLAAGFLEPLEASAIVLIELSAKLIAEQMPAVREVMDVVAKRFNATTLYRWGRIIDFLKLHYVLTKRTDTEFWRDNLLPETIPERLQELLTLWRYQPPWFHDEFDRVEEVFPPASYQYVLYGMGFRSEVEPEALSGDQRLAERAMRENAAQTERLCAGLPRHRDLIRKIHEHGLQPV

SEQ ID NO: 85615 - protein, 511 aa, Pseudoalteromonas sp.
  REGION 1..511: note = tr|A0A4P6SYW0|A0A4P6SYW0_9GAMM Tryptophan halogenase; OS = Pseudoalteromonas sp. DL-6 OX=1390185 GN=B1F84_09035; PE = 4 SV=1
MNIKKVAILGGGTAGWLAANHIGKELLKRKGVSVTLIESPDIPPIGVGEGTVPDIRNTLKTFGIREDEFIRQCDATFKQSIKFVNWMDKKKHGEGNFFHHLFDVPNPYDTKHLTQHWLNDKQKSKSHAQYLSSQHAICEAGLAPKSITNAQYEGELAYAYHFNAGKFAQLLSCNAKDKFSVSHVHTNVTQVKLANDGTIAALVTDSEGELEFDFYIDCSGFESLLIDKALKVPFVDVSDTLLINSALVVQVPTKEDDDIPPYTLATAHQAGWIWDIALTNRRGVGFVYSNNHMTDEQAHEKLDRYLGASKQGLSYRKIPMRVGYREKFWHKNCVALGLAQGFLEPLEATSILLTDFSAKFLTLRFPSSTEQLEQLETRFNHAMGYAWERTIDFIKLHYCISDRTDSAFWVANKSDDTISESLKEKLSLWEEFIPVRDDFFSQFEVFYLENFLFVLYGMHFNTKAPPCTSAEHEHCLVRLQQRAEIDQYLINKLPNHRALLDKIKQYGLQSI

SEQ ID NO: 85616 - protein, 502 aa, Herbaspirillum sp.
  REGION 1..502: note = tr|A0A542MED5|A0A542MED5_9BURK Tryptophan halogenase; OS = Herbaspirillum sp. SJZ107 OX=2572881 GN=FBX97_1641 PE=4; SV = 1
METKTMDTQGTGTPVRRIVIAGGGTAGWMAAAALSRTLGKRLDIKLVESDEIGTVGVGEATIPSLVHFHRLLDIDEREFMAATQATFKLGISFESWRARGEDYIHSFGMTGTDHWTAGFQHFWLKGRARGLAHDYGDYCLELLAGKEHRFAHLPNQGLNYAYHLDATRYARYLRRFSEHFGVERIEAKIESVEARDGSISALLLDSGKRIEGDLFIDCTGFRSLLLGQTLGVEYEDWSQWLFNDSAIAVQTESSGPAIPMTRSIGHDWGWQWRIPLQHRTGNGIVYASRYVDDDTARAALLGNIEGKVLTEPRVIRFKPGQRKQVWAGNCVALGLASGFLEPIESTSIHLIQRAVIRLLQIFPTHGIVNADVDEFNAQAHEDIRTIRDFIILHYKVTNRRDTPYWTDAATMQVPDSLQHRIDLFRDTGRVFRLQNELFAENSWVQVMLGQGLSPASYHQSADLMGDEELAGFLDGIRANVRRTASQLPQHADYVKQYCGSKP

SEQ ID NO: 85617 - protein, 508 aa, Sphingomonas sp.
  REGION 1..508: note = tr|A0A430EH46|A0A430EH46_9SPHN Tryptophan 7-halogenase OS=Sphingomonas sp. ABOLE OX=1985878; GN = CA234_14645 PE=4 SV=1
MNPMRRILILGGGTAGWLTAAYLARYLDIAQQRRFAITLLESPALGIVGVGEGGFPTIRETLQFLGIDERSFVRRASATFKQGIRFDDWLHAPRPDGSRHQFLHPFEAPFHTEGAGLVPYWLLQPEARRAPFAEAMTIQNRVAAHGRAPKRAEEAGFGGPLTYAYHFDAVRLAQLLRDRAIELGVTHLEGEVFSAHADAEGAIDRIETREHGSLTADLYIDCSGFEAALIGKALGAPFTSVRHQLFTDRALACKLPDADPEAPIATTTVAAAHEGGWTWDIGLQHARGIGCVYSSAHLSDDRAAELLDAHLGGAAHEARLIRFEPGYRRTPWVKNCVAVGLSGGFLEPLEATGVVLIEAAAAMIAELFPHAGPVDAPAARFNALMTARYERIVDFLKLHYCLSRRDEPFWRDNRDPATIPDTLQALLDQWRHRPPSRFDFLLDVESFAFFNYQYILYGMDFRTDLSGARDGFPHGEAAARQFARIRGFGEQAVADLPAHRELIRQLAG

SEQ ID NO: 85618 - protein, 521 aa, Rhodopirellula sp.
  REGION 1..521: note = tr|A0A2D7E871|A0A2D7E871_9PLAN Uncharacterized protein OS=Rhodopirellula sp. OX=2024855 GN=CMM07_14705; PE = 4 SV=1
MMRDLSLETPERVVIVGGGSAGQMAAALLGRQLIPLGIEVVQVQPADGTGIGVGEATIPSLHRLLDNLAADEQDMMRACQATFKLGIQFSNWHHKDEDYWHPFGVCGAQIDGRELFPYWLAERFRRGVTRPYQTYSLQWAAALAGKSPHSFGGDSPISAHRSYAFHLDALAFSEWLRQRAADTGVQSIIGSVIAAVCRDDGSGIDHLVLDDGKRLTGDLFLDCTGFEQSPFSDFGENRFIDWSNCLLCDRAVAVALPARRALRPFTRSTALPSGWAWTIPLVHRTGLGYVYDSSSLTADEAVRDLLELAESDGYDTSQVTDANQPLNLKVGRLANPWRGNVISVGLAAGFIEPLESTALHLTQLAIELFLELFPLRTDNTQQCSEIYNERLGKITDEIKDFVQLHYHLSARDDSEFWRAARNAPISNELQSRLATYETCGWHGDMLGEAFPPESYYFLLSGNDRYPRQPSAVSLSCDPERIGQVLQEILDQNSKVMRELPLHEELLDWVHGAPKSTTGRLF

SEQ ID NO: 85619 - protein, 515 aa, Sphingomonas sp.
  REGION 1..515: note = tr|A0A430ECF0|A0A430ECF0_9SPHN Tryptophan 7-halogenase OS=Sphingomonas sp. ABOLE OX=1985878; GN = CA234_22590 PE=4 SV=1
MAQHILIAGGGSAGWMAAALFARLRPAPETRITLIESEAIGTIGVGEATVPILRDFNRLLGLDEPDFVAATQGSFKLGIEFVGWGEAGNRHFHGFADFGPPIEGVAPHHHWHRVREAGRIADPIDAWSMPACAAAEDRFAPPEALRGEAGEYRYAYHFDAGLYARLLRSYAEARRVVRVEGRILGVERDPGTGDLATLRLDGDRAIAADLFIDCTGFASRLLGEALGTPFVDWSRWLPADRALAQGCTRAGRFTPFTRATAHTVGWQWRIPLQHRTGNGLVYSSAHLSDDEAAARLAANLDGDAIGDPRPLRFTTGRRERFWAHNVVAIGLAAGFMEPLESTSLQLVQTGLGRLAELMPSQGPTDPAIVAEYNRQTIGEYARIRDFLIAHYCSSRRPEPFWRDMAAMALPDSLAHKLALWDAMGRVPLQDLESHAEASWVAVLLGQGRMPRGHDPAADRPPLQAVEKMFAARRAALLAALPRLPAHDHFVARTCRADAAREPRIQCRYPKGETIS

SEQ ID NO: 85620 - protein, 519 aa, unidentified
  source 1..519: note = Unknown
  REGION 1..519: note = tr|A0A0N0JDU5|A0A0N0JDU5_9PROT Tryptophan halogenase; OS = beta proteobacterium AAP65 OX=1523424 GN=IP80_06665; PE = 4 SV=1
MNAASPHPAAPAPGPALLQQVVILGGGTSGWMTAAMLAKVLQGKVAITLIESDEVGTVGVGEATIPPIRLFNKILEIDEDEFVRETMGSFKLGIEFVNWGRQGERYLHGFGDFGQQLWTVDFHQYWLKMWLAGKAPDLERYSITRMASRANRFRRPAADMPNSPLGQITYAFHFDASLYARYLGRYAQARGVRRIEGKVEHVQLHAHNGHVQSLQLKDGTRVEGDLFIDCSGFRGLLIEQTLGTGFEDWSHWLPCDRAAAVPSAALPEITPYTRSTAHGAGWQWRIPLQHRTGNGHVYCSQRVSDDEAIATLLAHLDTPALAEPRLLRFKAGMRRLQWNRNVVAVGLAGGFLEPLESTSIHLVQAAIGKLLTLFPTRGFAQPDIDEFNAQMAFEYTRIRDFIILHYHLNQRTDTPFWTACREMAVPASLKHRMALWKSSGRLFREGSELFTEVSWLQVLHGQNLRPDSYNPLVDLYPEEDIGRFLQGISGVIDKCVEVMPGHAEFIRQHCAAPASGLRP

SEQ ID NO: 85621 - protein, 511 aa, Catenovulum agarivorans
  REGION 1..511: note = tr|W7QA12|W7QA12_9ALTE Tryptophan halogenase; OS = Catenovulum agarivorans DS-2 OX=1328313 GN=DS2_15649; PE = 4 SV=1
MQQTAPKAIQHIAIVGGGSAGWMTAATLAKVLPKEFCKVTLIESPQIKTVSVGEASIPQIQLFNRILEIDENEFLQRTKATFKLGIEFHNFAREGDCYFHPFGSYGTNMDALPFHHFWLKQSQTGNTLDIENYSLAALAARQNKFQRPTNSGNSPLSSINYAFHFDAKLYADFLQDYAVKRGVQHIEANVTNVSLKADNGFIDSLFLNDGQKITADLYIDCSGFKGLLIEQVLKTGFEDWSHYLPCDSAVALACKNTLGLTPYTQAIAHQSGWRWRIPLQHRVGNGLVYASEFMQHQQASKLLQEEIEGQALADINSLKWTTGMRNKSWNKNCIAIGLSAGFLEPMESTGLHLIQSAIAKLMTLFPTKEFAQCDIDSYNAQTRKEFVNIRDFLILHYKATEREDSEFWRYCKNMQVPDSLHEKLTMYQETGRIFRQDNELFNETSWLAVMHGQGIKANRYHPLVDRLEPSEISRRLQHIEDVIKRSVATMPDHSHFINQCFSNNFCDIQSG

SEQ ID NO: 85622 - protein, 500 aa, Streptomyces canus
  REGION 1..500: note = tr|A0A101S7S8|A0A101S7S8_9ACTN Tryptophan halogenase; OS = Streptomyces canus OX=58343 GN=AQJ46_21215 PE=4 SV=1
MDPEYDLIVVGGGPAGSTAAAAVAMRGHRVLLLERETFPRYQIGESLLPATVHGLCGILGVAEEVAEAGFTLKRGGTLRWGRDPKPWQFSFSMTPRLPEPTATAFQVERSRFDEILLRNAARVGAEVREGSTVRRVVADDERVRGVEYTDGDGNARTEYGRYVIDASGNTSRVHSGVGGRRVYSDFFRNLAVFGYFAGGRRLPEPNRGNIFCAAFDAGWLWYIPLRDDLTSVGAVISPEHTAAVQRDPRAAWQDMIRACPEVAELLDGVPAATEPPYDQVRVRKDWSYWKTFFWTPGMALVGDAACFVDPVLSSGVHLATYGALLAARAVNSALDGSVPEERGFAEFEARYRREYGVFYEFLIAFYDMERNDESYFWSAKKVTKVDSTEVAAFAELAGGLVSGDSAVLGPDRLGDHWSAAAAELDGAVGRLATADDRVNPLLSTRVVGETFRTGNELQEQALYGGPLDGTGPAGPGHLVASADGLGWDTVRGTAAQPGDE

SEQ ID NO: 85623 - protein, 500 aa, Streptomyces corchorusii
  REGION 1..500: note = tr|A0A101PZ56|A0A101PZ56_STRCK Tryptophan halogenase; OS = Streptomyces corchorusii OX=1903 GN=AQJ11_29635 PE=4; SV = 1
MTASYLRAAFADRVDITVVESRRIGTIGVGEATFSTVRHFFDYLGLSEADWMPECNGTYKLAVRLENWRAPGTYFYHPFERMRVVDGVPLTDWWQKVGGTGSFDRDCFLIPWLCDAKASPRYLDHRLFEQDFDEDPDRPLYRTTLAEQNTQFPYAYHFDASLLADFLCRYAVGRGVHRIIDDVVDVRLDERGWIDRLVTREHGDLTADLYVDCSGFRSRLLGDALGEPFVSFQDSLPNDRAVALRVPVDTAVRGIRPCTTATAQDAGWIWTIPLYDRIGTGYVYAADYCEPEEAERVLRDFVGPAAADLEANHIRMRIGRSHRAWVNNCVGIGLSAGFVEPLQSTGIFLIQHAIEQLVRYFPGTDRDPVLRDTYNLSTARAIEGVREFLILHYRGAARADNDYWRDAKKRPVPEDMAVRMEQWQSKLPDNDTTYPYYHAFEPYSYVCMALGLGGIPLRHPPALDLLDTRAARAELTRVREQARKLVDTLPSQVEYLSGLR

SEQ ID NO: 85624 - protein, 501 aa, Sphingomonas glacialis
  REGION 1..501: note = tr|A0A502FIU4|A0A502FIU4_9SPHN Tryptophan 7-halogenase OS=Sphingomonas glacialis OX=658225; GN = EAH76_18850 PE=4 SV=1
MRDGPVRSVAIVGGGTAGWMAAAALARNFAADRVAVTVIESPEIGTVGVGEATIPPILQFNALLGIDEDELVRRTQATYKLGIEFRDWGAIGERYFHPFGRYGADLGGVAFHHHWLRTREGAWSEYSLPAVAASEGKFARPSDDPRNVLSNISYALQFDAALYADFLRELAIGQGVQHVQGRVVDVRLDGETGFVEDLKLADGRVCRADLYIDCSGFRGMLIEQALETGYVDWSHWLPMDRAIAVPTPAIEAPTPYTRATAGSAGWRWRIPLQHRTGNGHVYASGFIGEDEATAQLLAALDAPALAEPRHLRFTTGRRRLSWNRNVVALGLASGFIEPLESTSIHLIQRGIATLMSLFPSNGFAAPEIDLYNSLMRSEIEAVRDFVILHYKLTRRDDSPFWRHTRAMAVPDSLAQRLAIFDNLGRLILDPSELFREPSWLAVLLGQGAMPRGHDPLADGLPEDAVRAQLQRMRAVIRQGAAVLPSHADFLSGVRAASPARS

SEQ ID NO: 85625 - protein, 501 aa, Catenovulum agarivorans
  REGION 1..501: note = tr|W7Q651|W7Q651_9ALTE Tryptophan halogenase; OS = Catenovulum agarivorans DS-2 OX=1328313 GN=DS2_18338; PE = 4 SV=1
MQNNQIESYVILGGGTAGWISAAVLAQALKNSKVNITLIESPNVATVGVGEATIPSIVDLLEYLRIPQKDFILKTNATFKLGIKFVDWLEKGQHYWHQFGYIGNNIDGLPFYQHWARHISQGGQFGLTDFSPAVALAKQNKFFIPDPKRPNNLSGSTYALHFDAGLVAEYLKEYCLKKHNLEVVYDHLVDTELDIQGQIKTLHLQSGKHISADFFIDCSGQRALLINKALRVGYQNWQHYLPANKAIAVQTDISNPLPPYTEATAHEHGWRWRIPLQNRTGNGYVYCDDFCSDNHAEALLIDHATKHNCVINQSKLISFTTGKRDKMWFKNCLAVGLSSGFLEPLESTSIYLIMRAMLNFVQSLPDKMPHPATIKEFNRRMDIEYQCIRDFIVLHYCRTQRTDSAFWRMWQTLAIPDSLQQKLALFEAQGRLMHNPQDLFAQDSWYAVLEGMGVRAKSLDPRVYQSNFTMVEKAFADSANALVQVASKTLDHAEYIQRLKL

SEQ ID NO: 85626 - protein, 506 aa, Sphingomonas glacialis
  REGION 1..506: note = tr|A0A502G4H9|A0A502G4H9_9SPHN Tryptophan 7-halogenase OS=Sphingomonas glacialis OX=658225; GN = EAH76_02700 PE=4 SV=1
MDTAISTVVIVGGGTAGWLAACRIAAAARPTAQPITVTLVESPDVATIGVGEGTWPTMRATLERIGIGEAEFLLACDASFKHGSRFRGWATGAHDDVYFHPFTPPAEPDARALVAAWQAEAAGASFADAVTPQPQVAAQSLAPRQRAMPDYAGALNYGYHLDAGKLAALLMRHATERLGVRHVRDHVIDVDRAENGDVIAVRTRDNGAITGDLFLDCTGHAALLVGDVPFVDRSDVLFNDRALAVQIPVAADSPIAAQTDATAHEAGWIWDIGLPTRRGVGCVYSSAHMSDDAALETLTAYLGTAQPIAPRRLTFRSGHRAQFWTGNCLAIGLSAGFLEPLEASAIVTIELSLDALLDDWPTRATMPLTAARFNTLFRYRWDRIVEFLKLHYVLSRRDGRYWQDHRDPASIPPRLAELLALWANRPPTRADFPMIDELFPAASYQYILYGMGAHVPGPGPFDAHKPVPLAPIAQRTRSMVATLPPIRAYLGACRAAYQPIAMEHIS

SEQ ID NO: 85627 - protein, 521 aa, Acinetobacter sp.; identical to SEQ ID NO: 83693
  REGION 1..521: note = tr|N9NWI7|N9NWI7_9GAMM Uncharacterized protein; OS = Acinetobacter sp. CIP 102136 OX=1144665 GN=F893_00166; PE = 4 SV=1

SEQ ID NO: 85628 - protein, 516 aa, Sphingomonas glacialis
  REGION 1..516: note = tr|A0A502FJT5|A0A502FJT5_9SPHN Tryptophan 7-halogenase OS=Sphingomonas glacialis OX=658225; GN = EAH76_18670 PE=4 SV=1
MRKRVLIVGGGTAGWLTAGYLAKRLGADLPDGVAITLVESRDIGVLGVGEGTFPTIRRTLATIGIDEAELVRRCGATFKQGAKFVHWRHAPGQGATDHYSHPFQVADASDGLDLLPYWLLGHGGAENWDEVSNPQKKAADRQRAPKLPTNPDYVGPLNYAFHFDAIALAGLLREQAIKNGVRHLTDTVNEVLLAEDGAIAGVRTEQNGVLDADLYVDCTGFRAELIGKAMKVPFRSCRDVLFCNRAIAAQLPYARPSDPIASYTISTAQESGWIWDIGLDRRRGIGHVYSSDHTDDEAAERVLRGYLGAAGADADVRHFKFEAGYREVNWVKNCVAVGLSSGFFEPLEATGIAFAEVSAGMIANLFPWGGDYETSARQFNANLLRRYERALDFIKLHYCISERRDTAFWRDNVADASVPDSLLEMLDRWRFRPPNELDIDGQIDIFTEASWQYVLYGMGWKTDLSAKAGALRYHEDARRAFAEVRRQAEYAIANLPSNRDLVEYAQTRRFGGRAAA

SEQ ID NO: 85629 - protein, 529 aa, unidentified
  source 1..529: note = Dyella jiangningensis
  REGION 1..529: note = tr|A0A328P2C6|A0A328P2C6_9GAMM Tryptophan halogenase; OS = Dyella jiangningensis OX=1379159 GN=CA260_11570 PE=4; SV = 1
MARLKKILVVGGGTAGWLAACYLAKAVNAVDPASVQVHLVESSNIGLLGVGEATFPSIRGTLSAIGLDERRFLVGATATYKQGIHYRHWVRPPGSPGHSHFFHPFSQPSQRPGGPELLPYWLLGAAPDGMSFADAVTMQSALVERNRAPKRPTDPDYQGPMNHAFHFDAACFAKVLAEHGQDALGVKRHVATVDRVELDEHGAIDRVITHELGELTADLYVDCTGLRGSLIGSAMQSPFRSRRDVLFADRAVAMQVPYERPDTPIPSYTISTAQEAGWIWDIGLQKRRGVGYVYSSRHTDDARAEEVFRRYLGPAADDLKAMHIKFETGYRPEHWRRNCVAVGLAGGFVEPLESTGIALIELATYLLTHLLPGDTGDMERAARHFNEMMVARYDRIIDFIKMHYCLSQRRDSKFWTDNADPASIPQTLQDKLALWRHRPPHRLDFVSDLEMFLVSSWQYVLYGMEFKTDLEPMRSAYPHLEEARQEFAMIRQVADHAAHDLPNHRSLVEQFCREYHERPGAVLSNEAVA

SEQ ID NO: 85630 - protein, 539 aa, Sphingomonas glacialis
  REGION 1..539: note = tr|A0A502FYN1|A0A502FYN1_9SPHN Tryptophan 7-halogenase OS=Sphingomonas glacialis OX=658225; GN = EAH76_05425 PE=4 SV=1
MAGGRRAARHDRARYQRDRGNHPARLCRVGAAPVNHSARDFARDGAIVILGGGTAGWIAACLIAQRWPQGRVTLVESPEIGIVGVGEGSTPQLKYFFDRLGIAEAEWMPACDATYKLGIGFEGWSDRQGFERYFHPFPTALDSHTAGSFFYNTRARRTGRDVAAHPDQFLLPARLAAAGCAPQSDESFPFEVSYGYHFDAYKVGAFLGRHAVAKLGVTHLQHRVEGIERRADGGIAALLCDGGERIAGDVFIDSSGFRSLLFEGTLGVPFVSYGDTLFNDSAVVMPTSRDAAEPLASQTRATALSAGWVWDIPLTSRTGNGYVYSSAYLGSDQAEAELRAHLAIGNEGTARHLSMRVGRVAESWSHNALAVGLAQGFLEPLEATALHIVIATVEAFLDAVDQDGFTEKARAPFNARIAARYDGVRDYIVAHYRLNQHHADPHGYWAAARAVEPSDTLKRVMSAWFTGADLAATIDQLDIARYYNAISWHCLLAGYGTFPEDARLVPPGPDIDRIDMAGIDDFLRRCALNFRPHTDHLPR

SEQ ID NO: 85631 - protein, 532 aa, Actinomadura sp.
  REGION 1..532: note = tr|A0A372JF38|A0A372JF38_9ACTN Tryptophan 7-halogenase OS=Actinomadura sp. NEAU-G17 OX=2293572; GN = DZF91_26650 PE=4 SV=1
MGDERIRRIVVLGGGTAGWMAGSYLAKALGTAVDITVLEAPAIPRIGVGEATIPNLHKVFFDFLGIPEDEWMRECNASFKMGVRFINWRTPGTGEATARTLPDGRPDRFDHLFGILPDHENLPLSHYWTYRRLRGETDEPFDHACYAQPPVLDRKLAPRFRDGRRWASYAWHFDASLVADFLRRFATGKQGVTHVEDRFTHADLDHRGMITAIHTESGRRLEADLFVDCSGFRSLLINQVMREPFLDMSDHLLNDSAVATSIPHDDEKNGVEPYTSAIAMSSGWTWRIPMLGRFGTGYVYSSRFQDQDRATEEFCRMWGLDPGTQQLNQIRFRVGRNRRAWVRNCVGIGLSSCFLEPLESTGIYFIYASLYQLVKHFPDKRFEPVLLNRFNHEIEKMFDDTRDFIQAHFGFAPRDDTPFWRACKELELAPEFQEKVAMYKAGLGVELPITDESNYYGNFEAEFRNFWSNANYYCVFTGLDFLPDHPLPAMALRPETVDSSQAIFAEVKRRQAELVETLPSTYEYLRMLHHGG

SEQ ID NO: 85632 - protein, 503 aa, Sphingobium sp.
  REGION 1..503: note = tr|A0A4P7QTU2|A0A4P7QTU2_9SPHN Tryptophan 7-halogenase OS=Sphingobium sp. PAMC28499 OX=2565554; GN = E5554_04680 PE=4 SV=1
MHADFPTSDRVVKRVVVAGGGTAGWVTATALVRHLGPLIDIILIESDAIGTIGVGESTVPTFRGFHQLMKIREDRFMAEAQATVKLGIEFKNWGQIGDRYIHPFGTIGLQWSWMADFHHFWLYARAQGFGGELGEYCLEWVAGEANRMSLSSSVAPSYAYHIDAARYARFLRSLAEPAGVKRVEGKIRNVELAPESGHIAALVLESGTRIEGDLFIDCTGFRSLLLGEALGVGFEDWGQWIRTDRAVAVQSTSDGPAQPYTSAIAHEAGWRWRIPLQHRDGNGFVFTSDFMSDDEAHARLLAEIEGEPIVDPWLVRFKTGTRTRAWHKNCVGLGLAGGFIEPLESTSIHLMMAAVTRLIEDFPFHGFDDALLDHFNRKSRLEFENIRDFIILHYHVTQRDDSPFWDHCRTMEIPDSLKERLALWQENGRAYQLGHELFRVDSWSSVLLGQGMHPRGYHHVAAMMPEPQLREELARMRKDIAGVVAEMPSHREFLRRYCPAELV

SEQ ID NO: 85633 - protein, 504 aa, Catenovulum agarivorans
  REGION 1..504: note = tr|W7QHY8|W7QHY8_9ALTE Response regulator receiver domain-containing protein OS=Catenovulum agarivorans DS-2; OX = 1328313 GN=DS2_03245 PE=4 SV=1
MKNICILGGGTAGWMTACLMAKHWNNRQPDSQTEKVQITLIESDKVPSIGVGEGSTPQLKKLFDTLDISEQEWMPACHATYKNGIRFVDWSTRAGFKQYFHPFPAQVDDHTVPGFFHNSFLIRKGIDLDAHPDHFFLTTHLANQNKAPISAENFPFEVNYGYHFDAAKVARILKTKAQQLGVSVAVATIEHVEQDIAGNIKLLIGQDGQTFSADYFVDCSGFQSLLLQQSLAVPFQSFSDNLFNDKAVVLSVPRKSQQPLMSQTISTALKHGWMWQIPLQHRTGFGYVYSSQYTNAEQAEQELRNRLVAQSADISARHINMRVGQVTKHWHKNCVAIGLSQGFIEPLEATALHIVQEGIEGFIDALHKGGFSNQLQADYNQQMTARFNAIRDYIVAHYKLNTRKDTLYWRNNAANQNLSDSLQHIIKTWFSGQNLSDELARQKIDEYYPSVSWHCLLAGYGHFPDKQQLIEGNDFAKQYSIEQINKFIHACCLNYPSQVDCLGC

SEQ ID NO: 85634 - protein, 406 aa, unidentified
  source 1..406: note = Bacillus wiedmannii
  REGION 1..406: note = tr|A0A2A8MT89|A0A2A8MT89_9BACI Tryptophan halogenase; OS = Bacillus wiedmannii OX=1890302 GN=CN526_28040 PE=4 SV=1
MMEMYDVIVIGGGPAGSTVATLLARQNHKVLLLEKEKFPRYHIGESMVTGVIPILKELGVFEQIDSYGFQKKYGTTFLWGEQKEAWSVKFGEVSKIAGEEVPEYAYQVQRAEFDEILLRHSEKNGAKVLEEHFVKEFIFEEERCVGIKYQDSSGENFEARARYTVDASGQSTMLGRKMDVINYDNELKNIAVWSYFTKCDRYEGDLEGNILVENTSDGWIWYIPFSNGMTSIGWVSPNETFKQESNLSLEKRYAEVLENSKEIKNMMKDAKQVDKFYTAKDWSYINNSFYGPGCVMVGDAAGFVDPLFSTGVFLAMNGASSAAKCLHQALVKPEQEEEFFSNYESEYKQVLKVITLFVHHFYDSNRQLNSYFTKAQTLVDPQEMLTIRQDFIYLITGLAGRRALAK

SEQ ID NO: 85635 - protein, 521 aa, Catenovulum agarivorans
  REGION 1..521: note = tr|W7QF96|W7QF96_9ALTE Tryptophan halogenase; OS = Catenovulum agarivorans DS-2 OX=1328313 GN=DS2_07058; PE = 4 SV=1
MNQLVKHIVILGGGSAGWLTAGVLAAEHMPSDTNGIKITLVESPDIKTVGVGEGTWPSMRTTLQKMGVSETDFIRCCDAAFKQGSKFAAWHTADVEDAYYHPFSLPTEFTQHNLAMAWQQYRERVRFDHAVSFQSHICDRNLAPKQIATPEYAYVANYGYHLDAAKFAAFLTQHCTEKLGVKHIQANVLDVKSHTNGDIASLVTDAAGEISGELFIDCSGSRARLLGEHLGIENISLQHYLFNNTALAVHVPYHSEDENFASHTLSTAQRAGWIWDIALPSRRGCGYVFSDEHTSLDDAEQTIRNYVAQSSSLDFAKHVDLKQIKFNPGHKRKFWQNNCVAVGMAAGFIEPLEASALVLVELSAQMISEQLPQNRQVMDIVAERFNDKFSARWQQIIDFLKVHYVLSKRDDSAYWLDNRDESTIPQSLQDNLNLWRYQAPWHFDAIHTESLFSSASYQYVLYGMGFETVSRTHKTQTQTKLMQQAERLFAETIQKSNQVISQLPSNRQLNLKVQQYGFQKI

SEQ ID NO: 85636 - protein, 500 aa, Streptomyces canus
  REGION 1..500: note = tr|A0A101PPV3|A0A101PPV3_9ACTN Tryptophan halogenase; OS = Streptomyces canus OX=58343 GN=AQI96_01400 PE=4 SV=1
MDPEYDLIVVGGGPAGSTAAAAVAMRGHRVLLLERETFPRYQIGESLLPATVHGLCGILGVAEEVAAAGFTLKRGGTLRWGRDPKPWQFSFSMTPRLPEPTATAFQVERSRFDEILLRNAARVGAEVREGSTVRRVVADDERVRGVEYTDGDGNARTEYGRYVIDASGNTSRVHSGVGGRRVYSDFFRNLAVFGYFAGGRRLPEPNRGNIFCAAFDAGWLWYIPLRDDLTSVGAVISPEHTAAVQRDPRSAWQDMIRACPEVAELLDGVPAATEPPYDRVRVRKDWSYWKTFFWTPGMALVGDAACFVDPVLSSGVHLATYGALLAARAVNSALDGSVPEERGFAEFEARYRREYGVFYDFLIAFYDMERNDASYFWSAKKVTKVDSTEVAAFAELAGGLVSGDSAVLGPDRLGDHWSAAAAELDGAVRRLATADGRVNPLLSTRVVGETFRTGNDLQEQALYGGPLDDTGPAGRGHLVASADGLGWDTARGTAAQPGDE

SEQ ID NO: 85637 - protein, 521 aa, unidentified
  source 1..521: note = Mesorhizobium oceanicum
  REGION 1..521: note = tr|A0A1L3SMB1|A0A1L3SMB1_9RHIZ Uncharacterized protein OS=Mesorhizobium oceanicum OX=1670800; GN = BSQ44_03455 PE=4 SV=1
MNKSRTHYVVVGGGTAGWLAAHMLKRQADNAGLAVDVTVVESSRIPTIGVGEGTTGVFRQLLDLLEIDEAEFIRSTGATIKFGIRHKDWLRKGHHYDGPIDDPNALAARPDFRPDEQFCALDVYAVAKNIRLADIHLFGELMRRGRSPYGLIDGEFVSASPFLYAYHFDQAKVGAFLRDKAKGIAQVDAEVLGARKNPETGDIEALLLDEDREVAGDFFIDCTGFRRKLIRGEMGAQWISYQSTLPVNRAMPFWLEHEEGAEISPFTLAWAQEAGWLWSIPTQDRIGCGYVYSDHFRTPEEAHAEIERALGRKIEPRADLRFDSGRLDRNWIGNCLALGLSSSFLEPLEATSIHGTVVQLFLFTRRFMARATSADERVRGMFNGVAERQLNDFRDFINIHYAGEREEPFWKHVHQNCLNEVTRERLQRWSREMPKRADFMPLPDNLPHLAEQLYYPVLDGLGHLCRKAANAEMAAKPALRAHARKAIEEQGREYKKAATKCLGHRRYLDLLAQGKPAGALQ

SEQ ID NO: 85638 - protein, 501 aa, unidentified
  source 1..501: note = Xanthomonadales bacterium
  REGION 1..501: note = tr|A0A2M7D197|A0A2M7D197_9GAMM Tryptophan halogenase; OS = Xanthomonadales bacterium CG02_land_8_20_14_3_00_62_12; OX = 1974108 GN=COS34_02565 PE=4 SV=1
MPDRSIRRIVIVGGGTAGWMTAAALANALQGHVQIDLIESDEIGIVGVGEATIPPIKIFNRSLGIDEHAMLAASQGSYKLGIEFVNWSRIGQRYFHPFGQFGADFDVVPLHHYWLRERARGSTIPLQEYALAWVAAEAGKFDRPINDRQRVQSTYDYAYHFDASLYAKLLRAYAEARGVRRSEGKVVDVGVRAEDGFLSGVTLADGRVLEADLFIDCSGFRGLLIEGALKTGYEDWSHWLPCDRAVAVPCAHGAALSPYTRSTAHAAGWQWRIPLQHRMGNGLVYCSQFSSDDAAANVLLDHLEGAPLAEPRFLRFTTGRRKQFWHRNCVAIGLASGFLEPLESTSIHLIQSAISRLLALFPDRDFDPIVAREYNRITELEYARVRDFIILHYHANQRDDAPLWRYTRNMPIPEPLQTKIDHFRRHGRLVAEVLELFQNPSWLAIFIGQEVWPERYDPLVDMRSDIDAARLLSGLHRVIAESVQVMPTHQQYIERHCRARA

SEQ ID NO: 85639 - protein, 507 aa, Catenovulum agarivorans
  REGION 1..507: note = tr|W7QJC1|W7QJC1_9ALTE NAD(FAD)-dependent dehydrogenase OS=Catenovulum agarivorans DS-2 OX=1328313; GN = DS2_18333 PE=4 SV=1
MLLLTFDYGPGVVMQLKNQKILIVGGGTSGWMAASLLAKKWPNCQIKLIESQNIGTVGVGEGSTPYIKQFFNALEIEESDWMPFCNATYKNGIEFINWSTQPGYNRYFHAFLSDLDEQHTPLFEQATLNRRQGQAVKAHPDGYFFLQTLAQQHRQPTLEVQSNNNAAPHNIYAYHFDSGKLAEYLKQYCLNLGVEHQFVDIETVELAGNGEIAAVIAKDKCRFEADLYLDCTGFSSLLIEKTLKERFISFDENLYNDRAVTVASKAQMHYQPQTTSTALTNGWAWQIPLTSRTGNGYVYSSKYISDEQATQELIEFVGRDNLIGEPRVIPMKVGRVERAWVKNCVAIGLSQGFIEPLEATGLHFIQTSIESFILLYELGEGSAEYRQVYNREIEHVFERVRDYIVSHYLTNSRNDTEYWRVCRDKINISDTLDGLMRQWCSGKDFKAALKKAELDHIYPSASWHMLLAGMGFLPPIDGAHRLSDSEKRTLAQIAEVHQQHINVYGKT

SEQ ID NO: 85640 - protein, 497 aa, Pseudoalteromonas sp.
  REGION 1..497: note = tr|A0A4V0ZVL0|A0A4V0ZVL0_9GAMM Tryptophan halogenase; OS = Pseudoalteromonas sp. DL-6 OX=1390185 GN=B1F84_06655; PE = 4 SV=1
MKPIKHVVIAGGGTAGWITAALLNKVLGKVINITLIESSSIGTIGVGEATIPPIIRLNNALGINEQDFINATNASIKLGIEFENWKTPGHSYMHAFGSFGKDFPFCDFYNFWVKGHINGSEDSLWDFSLNYQAAKQHKFTLLNTIPNTQLPGLSYAFHFDATLYAEYLKNLALSRGVKHIDAKIEHVEQCPDTGNITNLTLDDNSQIQGDLFIDCTGQRALLIEQTLNTGFVDWSYYLPCDRAVAVQSTGSNELKPYTRSIAHDAGWQWQIPLQNRTGNGLVYCSRYLSDESATALLLNNLPGEPTTSPRLIKFKTGRRLKQWHKNVVAVGLSSGFLEPLESTSIHLIQSAVTRLIKLFPHNGVSDALVTEFNKQSISEIEHIRDFIILHYKLTEREDTPFWRQCKQMEIPQSLAHKMDLFKHTGKVVRENDELFAEVAWQQVFIGQGLIPDDYNSIVDSLSSEQLTDLFVTLKTLINSTVDKLPTHKEFLAKLKTN

SEQ ID NO: 85641 - protein, 280 aa, Pseudoalteromonas sp.
  REGION 1..280: note = tr|G7G3I5|G7G3I5_9GAMM Tryptophan halogenase; OS = Pseudoalteromonas sp. BSi20495 OX=386429 GN=P20495_2468; PE = 4 SV=1
MNDDIKSIVIVGGGTAGWLSAGIIAAYLQKHHSKKINITLLESSDIPTVGVGEGTWPTMRRTLKDMGIRETEFIQQCNVSFKQGAKFAKWVTGENDDYYYHPLELPTGMFENNLATSWLNINNAQPPFAQYVSAQQSICESGLAPKQITTPEFSAIANYAYHLDAGLFATFLKNHCIDNLNVKHIVGTVVGVNNCTNGDIKSVSLNNKIEIAGDLFIDCSGFKSLLLGENLGVGFKSCKDVLFADSALAIHMPYTCHTKMTNQYARILYLQHKHRAGFGI

SEQ ID NO: 85642 - protein, 504 aa, Sphingomonas sp.
  REGION 1..504: note = tr|A0A430EFK8|A0A430EFK8_9SPHN Tryptophan 7-halogenase OS=Sphingomonas sp. ABOLE OX=1985878; GN = CA234_17265 PE=4 SV=1
MTGQPSLRVVIVGGGTSGWMTAAAIARLLPARCSLHLIESEAIGVIGVGEATLPHIRGFIEKLGIREADFMAWTRGTFKLGIEFRDWGKIGDSYVHPFGTFGRGTGEVDFHHYWTRLRLAGVDVPPLERFSYGCMLARANRFDLPAADPSQLASTYGYAYQFDALLFAPYLRSIAEGLGAVRTEGKVVEVLRDGASGNITAVRLDNGECIEGDLFVDCSGFRSLLLGEALAEPFEDWNHWLPADRAVAMPCRTATSVTPYTSAIAMPAGWRWRIPLQHRTGNGYVYASAFTSDAAATQALTGAVEGAALADPRVLRFRAGRRRRSWVKNCVAIGLASGFLEPLESTSIYLVQQAITALIELFPEAADAPIERDEFNRLIDLEYDRIRDFLILHYHATTRTDTDFWNYVRTMTVPDSLAEKIELFRRAGRVVKYREGVFLDASWIAVYVGQGILPEGYDPRADAADAAALLQGMRALEAEIAATVARVPEHLRYIDRYCAMAAAA

SEQ ID NO: 85643 - protein, 497 aa, Sphingomonas glacialis
  REGION 1..497: note = tr|A0A502FUA5|A0A502FUA5_9SPHN Tryptophan 7-halogenase OS=Sphingomonas glacialis OX=658225; GN = EAH76_14085 PE=4 SV=1
MTAAPSPDQVIKRVVVAGGGTAGWIAAAALAKHLGPLLEIVLVESDEIGTVGVGEATIPTIRTFHRLLELDEREFLRATQATFKLGIAFENWAQDGDRYIHSFGRVGQSIWMGDFQHMWLRGRAAGIADELGAYCFELAAAEAGKFATADDAKINYAYHFDAGLYARYLRAFSEARGVTRIEGKISSVVQNAETGFIEAIELDDGRRVEGDLFVDCTGFRGLLIEQTLRAGYEDWSHWLPTNRALAVQTKAVAPARPYTRAIAHEAGWQWQIPLQHRVGNGLVYCSDHLSDDAAREKLLAQVDGETITEPRLIRYVTGRRKRVWDKNCVALGLASGFVEPLESTSIHLIMIGITRLIQSFPFAGMKESVVRRYNDLAETELERVRDFIILHYHLNERPEPFWQRCATMEIPDTLAQRIALFRESALTPQTADDLFQADSWLQVMLGQRLEPTDYHHMGHVLSDAHLARAFADLKGNIAGAVGRMPTHQAFLDGYCAR

SEQ ID NO: 85644 - protein, 514 aa, unidentified
  source 1..514: note = Paucibacter aquatile
  REGION 1..514: note = tr|A0A2N8L198|A0A2N8L198_9BURK Tryptophan 7-halogenase OS=Paucibacter aquatile OX=2070761; GN = C1O66_19420 PE=4 SV=1
MKTKKIAIIGGGTAGWLAANHLGRGLQGDPEIEITLIESDEVPVIGVGEGTVPFIKTSMQKFGISEADLLLSCETTFKHGIKFQNWMAAPQGAAEHFYYHPFSSPFPGGMDVTPHWLRQGQARPFADVSSSARLAEARRSPKHIESDAYAGAVDYAYHVNAHKFAALLSRNARQRFGVKHLIATIVGADRGESGDVLALRSKSGERLAFDFYVDCSGFASLLTHTSLKVPFVDKSHQILTDTALVQQVPLAPDAEIPPYTLARAHEAGWIWDIPVTERRGTGFVYASQYMTQDQATLAFARHLGIHPDQFSPRKIAMKIGYRERVWAHNCVALGLAQGFVEPLEATSILLTDFAAGLLARNFPRQREDAPPLREHVNQAVRYAWERIIDFVQLHYHLSDRDDTDFWRDNRYNDHLSDVLRLRLDKWRAMPPQQTDFFSRFDLFSVENYLYVLHGMRYPCRGFELADEEHAEARRQLARVDGLTRQLMADLPGHRAWLQGLRAAVEGQSRTGESG

SEQ ID NO: 85645 - protein, 503 aa, Sphingomonas koreensis
  REGION 1..503: note = tr|A0A430G3Z9|A0A430G3Z9_9SPHN Tryptophan 7-halogenase OS=Sphingomonas koreensis OX=93064; GN = DAH66_09315 PE=4 SV=1
MTEEQGEDAIRTIAIVGGGTAGWMAASYLARTLAHTNIAITLIDSSEIGTVGVGEATVPAIRDFLAVVGLADADVLAATEGTIKYGIHFADWAEPGHRFYHPFGLYGVSARGVPFHQYWLKLRAAGHDLSLEDYCLCTQLAEQGRFLPPPEQPGSELGVFDFALHFDASMFATLLRDLSLSLGVTHIDARIDGVEQAPEDGQVRAVRLADGRSVAADLWIDCSGFRGLLIGEAMGVPFVDWRNWLPCDRAIALGCEPSGAYRPVTTSTARAAGWQWHIPLRHRIGNGYVYCSDYISDDEAEAVLRANIEGPALGEARRIRFTPGHRASFWKGNVVAIGLAGGFLEPLESTSITLIQSGLERLVRLFPDRRFDPALAALFDRQSQLEFERIRDFLLVHYCLNRREGEPLWDRMRTMELPGHLQGKIDAWRAQGELVRYEWETFQDPSWLSMYAGFGIEPRRYNVRADQFDGAELLATFGRMRTAIDDTVKLGVPAAEFAAALRR

SEQ ID NO: 85646 - protein, 507 aa, Sphingomonas sp.
  REGION 1..507: note = tr|A0A1Q4EAY7|A0A1Q4EAY7_9SPHN Tryptophan halogenase; OS = Sphingomonas sp. 67-41 OX=1895850 GN=BGP17_07190 PE=4; SV = 1
MGKRRILIVGGGTAGWLAAAYLARFLDLADQAQIEITLLESPELGIIGVGEGTFPTIRSTLKFLGIDETQFIRATSATFKQGIRFNDWLHAPLPDGTRHHYLHPFEAPFYTEGTSLVPYWLLQDAATRPPFAEAVTIQNRVAESRRAPKKQGEGEFSGPLNYAYHFDAARLARILRERAEELGVRHVAGLLTDVELGEDGAIARIVTREQGALEADLYIDCSGFRAELIGKALGARFKSVRDILFTDRALACKIPYAEPDAPIESFTIAAAHPAGWTWDIGLEGARGIGTVYSSTHMSDDEAAQVLRAYIGHDDYKARIIPFEPGYREAQWVKNCVAVGLSGGFLEPLESTGVVLIEAAVGMIAELFPHNGPVDAPARRFNALIVGRYERIIAFLKLHYCLSRRDEPFWRDNADPASIPEELQELLRQWRHRPPGRFDFLLDLESFAFFNYQYILYGMDYRTDLSGGRGDFPNVEAAEKLFARIRTFSERATEDLPTHRALIRAING

SEQ ID NO: 85647 - protein, 509 aa, unidentified
  source 1..509: note = Marinimicrobia bacterium
  REGION 1..509: note = tr|A0A2E0HZH0|A0A2E0HZH0_9BACT Uncharacterized protein OS=Candidatus Marinimicrobia bacterium OX=2026760; GN = CMG17_07035 PE=4 SV=1
  VARIANT 56..57: note = Xaa can be any naturally occurring amino acid
  VARIANT 65..66: note = Xaa can be any naturally occurring amino acid
  VARIANT 71: note = Xaa can be any naturally occurring amino acid
  VARIANT 100: note = Xaa can be any naturally occurring amino acid
  VARIANT 105: note = Xaa can be any naturally occurring amino acid
  VARIANT 107: note = Xaa can be any naturally occurring amino acid
  VARIANT 111: note = Xaa can be any naturally occurring amino acid
  VARIANT 188: note = Xaa can be any naturally occurring amino acid
  VARIANT 371: note = Xaa can be any naturally occurring amino acid
  VARIANT 379: note = Xaa can be any naturally occurring amino acid
  VARIANT 411: note = Xaa can be any naturally occurring amino acid
  VARIANT 413: note = Xaa can be any naturally occurring amino acid
MKIAKKITIVGGGTSAWMTAALLVNNIGKECEITLIDKKDGNPVGVGEATILSFKXXMDDCGFDXXDYFKXIDCTFKGGILFENWKGEGKDIWHPFGFPXLDSLXIXEGSXTTIHEIWTNYQREYTNKKTDCEIHYNLAVRDNKMDPDNLRIYALHIDAGLLVKYIQKKIKDRITFIQGEVSSKATTXDGYIESLSLTDGSCHKADLFVDCTGFNGLLKDQDRVDLTDRLFCDTAIAGHVPYNDRPNELKPYTACDAVEHGWIWKIPVDQRYGTGLVFNRSITPVEDAVDFFVEYWDKRLVKNHLKVLDWTPFYIRNFWEKNVVNVGLSAGFIEPLESTGIGLIAAGAWELLNRIKTRTYDDNDINLYNAXMTCFFENXVDFVNMHYSRSKNEGKFWQWVHKVYKPSETLXWXADDYAYAIKDIESEGKEMFSGANWFCWMNQLDYPVCSKDLDMPPHISRDILEKFYEQEEQKFKYLPTADVCNDNFRNIQPPVTYEKVNPWNENPFH

SEQ ID NO: 85648 - protein, 482 aa, Sphingomonas sp.
  REGION 1..482: note = tr|A0A1Q4E6U2|A0A1Q4E6U2_9SPHN Tryptophan halogenase; OS = Sphingomonas sp. 67-41 OX=1895850 GN=BGP17_07905 PE=4; SV = 1
MAAAAFARFLGPGFRITLVESEEIGTIGVGEATIPQIRLFNAGLGIDEDAFMAATQASFKLGIEFVGWTKGGRYMHAFGDVGRANGLLAFQHSWLRGLAEGVARPLAAYSLNNVAALANRMQRGPARTAKLLPEMPYAFHFDAGLYARFLRGLAESGGVTRVEGRIVAVARDGESGDVSALELEGEREVAGDLFLDCTGFRALLIGEALGTGFEGWSDLLPCDRAIAVPSARARDFTPYTRATAHAAGWQWRIPLQHRTGNGLVYASAHLSDDEAAARLLAGLDEPALADPRPLRFAAGKRRGFWKHNVIALGLASGFLEPLESTSIHMIQSAIERILSLLPGRQTSPAQREEYDRQTHLEYDRIRDFLVLHYWANDRDEPFWAERRAAALPACLRHKVALWRASGRIVRGEADLFSEVAWLQVLAGQGIAAAAHHPLADAPPREHIAEYLGLIELLNAREAGQMSDHAAYVAQHCAGAAAA

SEQ ID NO: 85649 - protein, 513 aa, Sphingomonas sp.
  REGION 1..513: note = tr|A0A1Q4EBW3|A0A1Q4EBW3_9SPHN Tryptophan halogenase; OS = Sphingomonas sp. 67-41 OX=1895850 GN=BGP17_03180 PE=4; SV = 1
MNNPDALRKVCIVGGGTAGWIAAAVMAHHMKGRLFEIELVESDDIGTIGVGESTIPPFMELIAKLDIDEQDFVRQVQASFKLGIEFKDWFRKDESYFHPFGDVGQRVELSDFYQCWRKATLAGHDFPLQDFAPATVMAHAGRFMLPFKARNTPIAGASYALHVDAKRVAQFLRGHAEARGVKRTEGIVTDVALDARGFVSTLTLKDGRTIDADFFIDCSGFRALLIEKALGSGYTDWSNYLFCDRAIAAQTENVGPPRPYTLAEAQDAGWRWRIPLQHRTGNGHVYSSEFMSDEEATRILLEKVEGEVVAGPMVVPFRTGVREKIWHRNVLAIGLSSGFIEPLESTAIHLIYRGMDFFFRFLPDRHCDPALADEYNRRMVADYTEIRDFIVLHYCTTARDDTPFWRKCRDMDWPDSLKERVELFRSNGTLREGLDELFRSVSWFSVLEGMGIRPRTYHPLVDRIDEAMLYAGLDKAREQLAGFVRQLPTQQQFIDAHCRAEKVDLTRPVMAGV

SEQ ID NO: 85650 - protein, 519 aa, Sphingomonas sp.
  REGION 1..519: note = tr|A0A1Q4EBU8|A0A1Q4EBU8_9SPHN Tryptophan halogenase; OS = Sphingomonas sp. 67-41 OX=1895850 GN=BGP17_03075 PE=4; SV = 1
MSTDNRIRNIVVVGGGSAGWMAAVVLATYLGRGASVRLIESEEVGIVGVGEASVPHMKTFNTEMLGIKEADFVVETQATFKLGIQFNDWGRLGDSYVHGFGKIGQGIGPLPFHQFWLKQYLAGRAAEIGAYSLQTVAAPLNRFMPSPANAPEGSPLADIAYAYHFDASLYARFLRNLSERRGVQRTEGKIVEVIQRAGDGFVEAVVMESGERIEGELFVDCSGFRGLLIEQALETGYADWTHWLPCDRAMAVPCENVGPLTPYTRATALGAGWQWRIPLQHRCGNGYVYSSQHVSDDEAAATLLANLDGKPLADPRPLRFTTGMRRKFWHKNVVAAGLAAGFLEPLESTSIYLAQSTIQRLIGLFPNKDFDPLLAERFNRESAFEWERVRDFIILHYHATERADTPFWDHCRTMSVPAPLQETMALFRSDGRYFRNGEDFFALPSWVQVMLGQRIVPHGYHPIVDEMPEHQLAEYLERTRATLANCVGAMPLHQAFIDEHCKAPPELAQAGAAPHMVKA

SEQ ID NO: 85651 - protein, 507 aa, Sphingomonas sp.
  REGION 1..507: note = tr|A0A1Q4EC92|A0A1Q4EC92_9SPHN Tryptophan halogenase; OS = Sphingomonas sp. 67-41 OX=1895850 GN=BGP17_03175 PE=4; SV = 1
MASGAIERVVIVGGGTAGWMAAAALGAYLAGAGTRITLIESSEIGTIGVGEATIPTIRRFYAALGMTDAEVMRACEATAKLGIRFVDWKPGTSFVHPFGRFGQDLRGIDFHQYWQKARQAGRAAPLEEYSLGAMLAREGHASVPLPNPPSQLSVFDWALHFDAARFAAHMRAYAERAGVARIDARITDVTLHGETGFIEAVTLDSGERVAGDLFVDCSGFRGLLIGEALGTPYRDWSHWLLCDGAFAVQSERVGEPPSCTTVTARTAGWQWRIPLRSREGNGLVFASDFQGDDEARAELLANIPGAPTMEPRRLRFTPGRREVAWARNCVSLGLASGFLEPLESTSIALIETGIERLKQLFPDKGFDPAVIAEYNAQSAEEMERVRDFILLHYHLSTRDGPFWQACREMTLPDSLAAKLELWRARGAFLRYRWEMFSPASWLAIYGGFEHLPERLDPGVAAVGTDELAQGLEQMRAAIARTVADTPTHSEFLATVDGAAAEPMRTSA

SEQ ID NO: 85652 - protein, 504 aa, unidentified
  source 1..504: note = Amphiplicatus metriothermophilus
  REGION 1..504: note = tr|A0A239PV98|A0A239PV98_9PROT Tryptophan halogenase; OS = Amphiplicatus metriothermophilus OX=1519374; GN = SAMN06297382_2131 PE=4 SV=1
MHGKRIERIAIIGGGTAGWMAAALFARLLGPLGTRIRLVESEEIGTVGVGEATVPTIRLFNQLLGFDERDFLARTHGSFKLGIEFRDWGGPGCAYFHGFGDFGADIEGIAPHHHWLKLRMEGDGTSHEAYSFPAVAARKGRFAPPPKDPVSSAPYYQHAYHFDAALYARYLREYAEARGATRVEGRVVDVARRAADGFVEAVVLADGRRVEADFFVDCTGFRALLIGEALGVGFEDWRGWLPCDRAVAIPCARRGPLTPYTIAAAKEAGWRWRIPLRHRIGNGYVYCSAHVSDDEAAAALLADLEGPALAEPRLLRFAAGRRKAFWAKNCVAIGLAAGFLEPLESTSIQLIQNGLTRLIEYFPDADYDPAMIAEYNRVTANEYARVRDFLILHYCAAGRRDAPLWRDCAATPLPDTLRHKVDVFVSTGRVPMLTEESYAEASWVAIFLGSGVAPRRYDPLVDRIDSAVLAQGMRRRREEIRRVAEAMPTHEAFLERACPAPAMA

SEQ ID NO: 85653 - protein, 497 aa, Pseudoalteromonas sp.
  REGION 1..497: note = tr|A0A0W1L4S7|A0A0W1L4S7_9GAMM Tryptophan halogenase; OS = Pseudoalteromonas sp. 10-33 OX=1761890 GN=ATS76_04525; PE = 4 SV=1
MKPIKNVVIAGGGTAGWIAAALLNKVLGKVINITLIESSSIGTIGVGEATIPPIIQLNNALGINEQDFINATNASIKLGIEFENWKTPSHSYMHAFGSFGKDFPFCDFYNFWVKGQISGSEDSLWDFSLNYQAAKKHKFAPLKSIPNTQLPGLSYAFHFDATLYAEYLKKLALSRGVKHIDAKIDHVTQCPNTGQINSLTLDNNSQIEGDLFIDCTGQRALLIEQTLNTGFVDWSHYLPCDSAVAVQSTGRDELKPYTRSIAHNAGWQWQIPLQNRTGNGLVYCSRYLSDESATALLLNNLPSEPTTSPRLIKFKTGRRLKQWHKNVVAVGLSSGFLEPLESTSIHLIQSAVIRLIKLFPHNGVSDALVTEFNKQSVTEIEHIRDFIILHYKLTEREDTPFWRQCKQMDIPQSLAHKMDLFRQTGKVVRESDELFAEVAWQQVCIGQGLIPEDYNNIVDSLSSEQLNDLFSTLKTLINSTVDQLPTHKEFLANIKRV

SEQ ID NO: 85654 - protein, 513 aa, unidentified
  source 1..513: note = Paucibacter aquatile
  REGION 1..513: note = tr|A0A2N8KT21|A0A2N8KT21_9BURK Tryptophan halogenase; OS = Paucibacter aquatile OX=2070761 GN=C1O66_23340 PE=4 SV=1
MSLPPVTSLPLLRRIVIAGGGTAGWMSAAALSTLLPPGYEIHLVESEEIGTIGVGEATIPNIKNFNAALGLDENDFIRATQASFKMGIEFVNWGRLGERYIHGFGSFGQDFGSVGFHHQWLRLRREGLASALDDYSINTSAPRQAKFMRARPEMAGSPLADIAYAYQFDAGLYAAYLRRHAEQRGARRSEGRIVEVLRAAEDGRIRALRLDSGEQIEGDFFLDCTGMRALLMGQTLGVGLEDWSHWLPCDRAWAVPCESAGPLLPMTRATAHSAGWQWRIPLQHRTGNGHVFASRFMDEGEARDLLMRHLDGKPLAEARSIRFQPGRRHQAWHQNCLAVGLSGGFLEPLESTSIHLIQTALARLMSFFPHGGLDAADIAEYNRQTQFEYERIRDFIILHYKATARDDSPFWNHCRQMAVPETLQRKIDLFCSNGRIVREADELFAELSWLQVMNGQGLQPRGYHPLAEQTPKAEAVDLLAHIRQVIARCVQVMPTQAAYLAEHCQALRPGSGT

SEQ ID NO: 85655 - protein, 531 aa, Lentzea violacea
  REGION 1..531: note = tr|A0A1G9JHL7|A0A1G9JHL7_9PSEU Tryptophan halogenase; OS = Lentzea violacea OX=128104 GN=SAMN04488074_110256 PE=4; SV = 1
MTGNQIRNIVVLGGGTAGWMSASYLGKALGPAVNITVLEAPAIPKIGVGEATIPNLHKVFFDFLGLSEEEWMRECNASFKMGIRFINWRTPGAGEATARPHGEGRKDHFDHLFGLLPEHGNLPLSHYWVNKKLAGETDEPFDYACYRQPPVFDRNLSPRYLDGTRWASYAWHFDANLVADFLRRFATEKQGAVHIQDTFTEAEVDHGGYITAIRTETGRRLEADLFVDCSGFRSLLINQVMKEPFLDMSDHLLNDRAVATAVPHDDEANGVEPYTSAIAMSSGWTWKIPMLGRFGTGYVYSSRFASQDEATEEFCRMWGLDPETQKLNHVKFRVGRNRRAWVKNVVGIGLSSCFLEPLESTGIYFVYAALYQLVKHFPDKNFEPILLDQFNREIETMFDDTRDFIQGHFSFAPRDDTPFWRACKELELASDFREKVAMYKAGLAVNMPVTDEGNYYGNFEAEFRNFWSNANYYCVFSGLDFLPEHPLPALGFRQETVESAEAVFARVKKEQEELVRTLPSTYEYLRQLHGR

SEQ ID NO: 85656 - protein, 503 aa, Massilia oculi
  REGION 1..503: note = tr|A0A2S2DLH1|A0A2S2DLH1_9BURK Tryptophan halogenase; OS = Massilia oculi OX=945844 GN=DIR46_18415 PE=4 SV=1
MENQAIRDIVIVGGGTAGWMTAAALSSMLNGRYNIRLVESDEIGIVGVGEATIPMIQRFNRVVGIDENEFMRETMGSFKLGIEFVNWGKLGERYMHGFGRMGQDLATVPFEQYWHKMRGLGLAAPLEEYSITRMAAKAGKFMPARTDVPNSPLADIAYAYHFDASLYAKYLRKLSEARGVTRIEGKIARATLREPDGFVDAVELESGQRIEGELFIDCSGFRGLLIEGALETGYEDWTGWLPADRALAVPCESAPAITPFTRATAHKSGWQWRIPLQHRTGNGHVYCSRFISDDEAAATLLANLDGRALAEPRLIKFQTGMRKQAWNRNVVALGLSGGFLEPLESTSIHLIQSGIARLVELFPDRRFSDVDRIEFNRQSRFEYERVRDFIILHYHLNQRTDSAYWTECANMAIPETLRQKMDLYKSRGKVVRVDNELFSEVGWLQVFEGQNMPIDGYHPLADTQSEADIADYMASVRDVIRKCVDVMPSHDDYIAKHCAARKS

SEQ ID NO: 85657 - protein, 498 aa, Sphingomonas koreensis
  REGION 1..498: note = tr|A0A430G4P4|A0A430G4P4_9SPHN Tryptophan 7-halogenase OS=Sphingomonas koreensis OX=93064; GN = DAH66_08445 PE=4 SV=1
MTEKRPTRVVIAGGGTSGWMAAAAISRTMGRTVDLTLVESEQIGTIGVGESTIPPLVNFNRILGIGEAEFMAAAQATFKLGILFDNWKHDGHSYFHSFGLSGKDHWSAGFQHFWLYARSRGFPEPYDDYCLELAAAMQGKFAHLPQDRMNYAYHVDATLYGRYLRKLAEESGTKRVEGKIQRVELNGETGDIAALHLDGERRIEGDVFVDCTGFRGLLIEGALHAGFEDWGHWLPNDSAIAVQARHLGPPQPYTQAIAHDAGWQWRIPLQHRMGAGIVYSSGYLSRDEARHRLISTVGEPLIEPFDIKFRGGVRRKQWYRNCVAIGLSGGFVEPLEATTVHLIQRAVLRFVRLMPNGRVSERDAAEFNEQQRQDIEQIRDFVILHYKATDRRDSAFWRHVAAMPVPDSLSQKIELFRETGRTFRRNEELFAENSWVQVMMGQGIDPQSWHPIAEKLSDEELMRLMATLREDVTRTVATLPEHHAYVAQYCGAADPLAA

SEQ ID NO: 85658 - protein, 511 aa, Sphingomonas koreensis
  REGION 1..511: note = tr|A0A430G6E1|A0A430G6E1_9SPHN Tryptophan 7-halogenase OS=Sphingomonas koreensis OX=93064; GN = DAH66_06615 PE=4 SV=1
MEAGQTGTGNPPIRRIVIVGGGTAGWMTAALLSKLLFRGYDITLVESDEIGIIGVGEATIPGIKDYNHLAGIDLTEMIRATQATFKLGIEFVNWREPGFRYIHGFGKIGTDLMWLHPHQLWLKLAAMGQAKHFDLYSLNTLAARQNKFCFPDPRNPGSPMGHLDYAYHFDASLYARFLRGRSEAQGVTRTEGRIVEVRQRPEDGFVESVVLADGQTVSGDLFVDCSGMRSLLLGQTLGVGYEDWSHWLPCDRALAVPCESVSPLTPYTRSTAHGAGWQWRIPLQHRIGNGHVYSSAHVSDDEAADVLLANLDGKALADPRPVRFAPGKRHKAWEKNVVAIGLSSGFLEPLESTSIHLIQTGILKLVALFPGQGFNAADIAEYNRQHNFEFDDVRDFIIAHYKVTNREDTPFWAHVRHMEVPDSLAERLELFRASARFFVHGKAELFREESWVQVLLGQGMAMTYDPVVDMIPDEDVIAFMRDIEEVNADVAAAMPTHEAFIDRYCKAAAQV

SEQ ID NO: 85659 - protein, 521 aa, Sphingomonas sp.
  REGION 1..521: note = tr|A0A1Q4E8H5|A0A1Q4E8H5_9SPHN Tryptophan halogenase; OS = Sphingomonas sp. 67-41 OX=1895850 GN=BGP17_04645 PE=4; SV = 1
MQPRSNPSPAPLRVVIVGGGTAGWMCAAGLARLLPPTDYALTLIESDEIGTVGVGEATLPHIREFNAMLGLDEAEFMRATQGSFKLGIEFVGWDKPGGRYVHPFGSFGERWGGIDFQHHWLRARAAGQDVGDWFDHSFAVAMCREGVFDLPDEDLRSIRSTFSYAYHFDAGLYAEYLRRWATPRGVRRIEGKIVDIARNAESGLVESVALQSGAAIAGDLFIDCSGFRSLLLGQSMGVAWHDWSAWLPCDRAMAVPCAGAAGITPFTRSTAQAGGWTWRIPLQHRTGNGYVFSSSFCSEEQARETILGAIDGAPLADPRLLRFQAGRRARGWEGNVVAIGLSSGFLEPLESTSIFLIQAAVTDLANLMPLPGGGPPDPRLAAEFNRLFAIHYDRTRDFLVLHYTANARHGEPLWDHVRNMALPDSLAHKIALFRSSGRAPDYKLGLFSRDSWLAVLMGQGILPEAHDRLADRAPLDEVADRLAELRERIATNAAALPAHAEFIASYCSAARGTADDRAVTA

SEQ ID NO: 85660 - protein, 545 aa, Nostoc sp.
  REGION 1..545: note = tr|A0A252DUJ0|A0A252DUJ0_9NOSO Tryptophan halogenase; OS = Nostoc sp. T09 OX=1932621 GN=BV372_20665 PE=4 SV=1
MSQYVQNVVIVGGGSAGWMTAAYLSKALDRNVQITLVESSNITKVGVGEATFSTIKVFFDFLGLQEYEWMPKCNATYKMAIKFVNWNAKGQHFYHPFQRYEVIDGFDISEWWLKMKKDQEAFDYACFLIPWLCDNQRSPRYFDGKVFDNKVQNEFSQENITKKNILDNLKIQYPYAYHFDANLLARFMKDYAIQRGVKQIVDDVVDVKLMGDGSIDSLNTKEHGILSGDLFIDCTGFRGLLINKALGEPFISYSESLLCDHAIAMQIPTDLKKDGINPYTTATALSSGWVWNIPLYGRNGTGYVYSSAFISAEEAEQEFRQHLGVAANNCKASHIKMRIGRNRNSWVKNCVAIGLSSGFVEPLESTGIFFIQHGIEELVNHFPTKSFNKELICSYNKAVADCIDGVREFLTLHYYASDRADTEFWKATKNDIKVPEELREKLRLWKNRLPSNKSINPKYHGFESYSYSVMLLGLNYLPESSLPVLEHIRNHNAQAAFVEIKERADYLSSTLPSQYEYLTHVIKSQEQSEYLSVVSDRTQQIPVPI

SEQ ID NO: 85661 - protein, 475 aa, Sphingomonas koreensis
  REGION 1..475: note = tr|A0A430G4F2|A0A430G4F2_9SPHN Tryptophan 7-halogenase OS=Sphingomonas koreensis OX=93064; GN = DAH66_09185 PE=4 SV=1
MTAAALGRALAGQSHSITLVESEAIGTVGVGEATVPPILDFNRYLRIDPDEFLRETNGSIKLGIEFEDWGGAGHRYFHPFGFFGVEMSGIHFHHFWLRHVAEVGPRDHSEYHLEAMALREGRFARMTRAGPVHHAVHFDASLYARFLRGRAEASGVVRVEGKVVHVRLDPENGYIDALALDDGRSIEGDLFIDCSGFRGLLIEGALETGYESWNHWLPCDSAVAVPAANAGDPLPFTRSTAREAGWQWRIPLQHRDGNGYVYSSAHLPHAEAARLLSERLPGPAQADPNFLRFTAGHRRKIWNRNCVAMGLAGGFLEPLESTSIHLIQTTIIRLLALLPRDGIDPNVVARFNRESLHEYRTIRDFVIAHYALAGRDDTPFWRDVAATGVPDTLAERIEAFRATGNILFEPGDLFGPTNWYWVMTGQGVWPRSWHPIADGLSSAELTARLAVLRGRVAEQLAELPPHVEFLRRLSA

SEQ ID NO: 85662 - protein, 501 aa, Sphingomonas sp.
  REGION 1..501: note = tr|A0A1Q4E6N4|A0A1Q4E6N4_9SPHN Tryptophan halogenase; OS = Sphingomonas sp. 67-41 OX=1895850 GN=BGP17_07960 PE=4; SV = 1
MAREPRRVRSVVVLGGGTAGWMTAAALSRQFGRTMRITLLESEEIGTVGVGEATIPTIHWFNELIGLDEAAFLRETKASFKLGIEFVDWVRPGHRYFHPFGEYGVRFPGVAFHHRWMKARAEGVDLPLSAFSLATELAGQGRFAMPTGDARSILSTLGYAYHFDASLYAKHLRGLAEAAGVIRVEGRLQDVERAAESGLVTALTTQRGERIEGELFIDCSGFRALLIDGAMGGAFEDWSHWLPCDRAVAVPCARTEHTTPFTRSTARPAGWQWRIPLQHRIGNGHVFSSRFMGEDEATAMLLANLDGEALAEPRTLRFTAGTRRRAWIGNVVAIGLSSGFLEPLESTSIHLIQSGIAKLLTLFPDRDMDPMLAERYNALLGADMDNIKDFLILHYHANPGRSDPFWVERREMALPETLVAREEQYRRSGRLMLGPEELFRDASWLAVLNGQEIVAEDYNPLADVFDSAANSTQVRQVAEVIKRAAPTLPLHDAALAAAMGG

SEQ ID NO: 85663 - protein, 512 aa, Massilia oculi
  REGION 1..512: note = tr|A0A2S2DNQ4|A0A2S2DNQ4_9BURK Tryptophan halogenase; OS = Massilia oculi OX=945844 GN=DIR46_23025 PE=4 SV=1
MNAHDGDTHDRVGRITIVGGGSAGWMAAAALATYVGRDATIRLVESEAIGIVGVGEASVPHLRLFNGQWLGIDEAEFVRRTQATAKLGIQFKDWGRIGDSYLHGFGAPGRSLGPLPFHQLWLKERLAGRAGPIGDYSAQGLMAPLGKFAPGERNATPDSPLADIAYAYHFDATLYARFLRELAESRGVQRIEGTISHVNQRAADGFVESVTLEDGQVVDGELFIDCSGFRGLLIGEALGTGYVDWSHWLPCDRALAVPSERVDPVTPYTRATAQAAGWQWRIPLQHRTGNGYVYSSRHVISDDEAHATLLANLDGKALAEPRRLAFTTGMRKQFWSRNVVALGLASGFLEPLESTSIYLVQSGITRLLGLFPRRDVSPLLAERYNRDTAAEYERIRDFLILHYHATTRDDTPFWNACRTMAIPDSLREAIELFRADGRYLRHGEDFFALPNWVQVMLGQGIVPRSYHPMVDQVPGQRVAEHVDGVRAMLAQAVATMPTHQEWIDRYWKAPVA

SEQ ID NO: 85664 - protein, 534 aa, Streptomyces lavendulae
  REGION 1..534: note = tr|A0A2K8PCX4|A0A2K8PCX4_STRLA Flavin-dependent tryptophan halogenase RebH OS=Streptomyces lavendulae subsp. lavendulae OX=58340 GN=rebH PE=4 SV=1
MTGTDNRIQKVVILGGGTAGWMTAAYLGKALQNTVEITVLEAPTIPRIGVGEATVPNLQRVLFDYLGINEDEWMRECNASFKMAVRFVNWRTGGQGEAEARELEEGGPDHFYHPFGLLPDYDQTPLSHYWYKRKFEGETNEPFDYACFREPPVMDAKLAPRWMDGRPATRYAWHFDAALVAKFLRRFATEKQGVLHVEDEMTRVEQDERGFVTALHTKSGRVLDADLFIDCSGFRGLLINEAMAEPFIDMSDHLLCDSAVATAVPHDDEANGVEPYTSAIAMSSGWAWKIPMLGRFGSGYVYSSKFASQDEATKEFSELWGLDQENTKFNHIRFRVGRNRRAWVKNVVSIGLSSCFLEPLESTGIYFITAAIYQLAKHFPNKDFNESLIGAFNNEIELMFDDTRDFIQAHFYYAPRNDTPFWRANKELTLPDNIQKKIAAYRAGLPINSPVTDESTYYGNFEAEFRNFWTNGSYYCIFAGLGLVPDEPLPALAYKPESVAGAQPLFQTVKRQQQDLLDTLPSTYDYLRQLHGAS

SEQ ID NO: 85665 - protein, 503 aa, Sphingomonas aerolata
  REGION 1..503: note = tr|A0A2T4YNR4|A0A2T4YNR4_9SPHN Tryptophan halogenase; OS = Sphingomonas aerolata OX=185951 GN=C8J24_3271 PE=4 SV=1
MTQAPLGSIVIVGGGSAGWMTAAALSSLVQTKDVSITVIESDAIGTVGVGEATIPDMLVFNQMLGISEAEFMRATEATFKLGIEFVDWGHKGDRYIHPFGQHGVDMEGIDFHQYWLRLNREGGTAPIEDYSLSAVAAGAGRFALPDPNPRSVFSHLRYAYHFDATLYARYLRRYAEKRGVKRIEGVVKEVHLTAQDDGIAAVTMDSGAHVKGDFFFDCTGFRALLTGQTLDIDFVDWSAWLPCDSALAVPSAHVGPPPPYTRSTARPAGWQWRIPTQRRVGNGHIYSRSFMDDDEAERVLRKGVEGALLAEPRSIRFKAGHRRQFWRGNCIAIGLAAGFLEPLESTSLYLIQEGISRFISLFPNGDIPDILRVEYNRYMQKKFEQVRDFIVLHYVATNRDDTPFWHYCRTMTVPDSLRHKMELFRETGRIFRYDDELFARPSWVAVMLGQGIMPERSDPIVAALPARDVANSLQSMASAMKDAASRMPTHASFIASYCAATEG

SEQ ID NO: 85666 - protein, 538 aa, unidentified
  source 1..538: note = Burkholderia puraquae
  REGION 1..538: note = tr|A0A1X1P685|A0A1X1P685_9BURK Tryptophan halogenase; OS = Burkholderia puraquae OX=1904757 GN=B7G54_35515 PE=4; SV = 1
MSNPIRNIVIVGGGTAGWMSASYLVRALQQQANITLIESEAIPRIGVGEATIPNLQKVFFDFLGIPEREWMPQVNGAFKAAIKFVNWRKSPDRSRDDYFYHLFGSVPNCDGVPLTHYWLRKREQGFQEPMAYACYPQPAALDGKLAPCLPDGTRQMPHAWHFDAHLVADFLKRWAVERGVNRVVDEVVQVHLDERGYISSLSTKEGRTLEADLFIDCSGMRGLLINQALKEPFIDMSDYLLCDSAVASAVPHDDAREGIEPYTSAIAMNSGWTWKIPMLGRFGSGYVFSSKFTSRDQATADFLDLWGLSDKQPLNQIKFRVGRNGRAWVNNCVAIGLSSCFLEPLESTGIYFIYAALYQLVKHFPDTSFDPRLSDAFNAEIVYMFDDCRDFVQAHYFTTSREDTPFWRANRHDLRLSDAIKDKVERYKAGLPLTTTSFDDSTYYETFDYEFKNFWLNGNYYCVFAGLGMLPERSLPLLQHRPESIDKAEAMFARIRREAERLRTSLPTNYDYLRSLREGDAGLSRSQPGQTLAVPEIL

SEQ ID NO: 85667 - protein, 415 aa, Pseudomonas fluorescens
  REGION 1..415: note = tr|A0A379I6J2|A0A379I6J2_PSEFL Tryptophan halogenase; OS = Pseudomonas fluorescens OX=294 GN=kmo PE=4 SV=1
MPTVEMERRQVVVIGAGPSGAIAAALLKRNGHDVLIIEREHFPRFSIGESLLSHCIDFIEEAGMLEAVNAAGFQLKTGAAFAWGERYSAFDFGDTFSDGKPTTFQVQRADFDKLLADQAALQGVEIRYGQTLVGVDFAAGHRYLHVRRENGREYHIKAGFVLDASGYGRVLPRLLNLEAPSNFPVRQAVFTHVEDRIEHPGFDRSKILITTHPTQRDIWFWTIPFSNGRCSVGVVAAKEHFAGCDGDLDACLRGFIEQTPSLSNVLANAVWDTPARAIGGYSANVTTLHGPGFALLGNAAEFLDPVFSSGVTIAMRSASMAAGLLHRQLKGESVDWQTEFAEPLKRGVDTFRCYVEGWYAGTFQDVIYHPGSSPQIRRMISSILAGYAWDERNPFVSEPKRRLRMLSQICAGDNV

SEQ ID NO: 85668 - protein, 498 aa, Sphingomonas sp.
  REGION 1..498: note = tr|A0A1Q4DUQ9|A0A1Q4DUQ9_9SPHN Tryptophan halogenase; OS = Sphingomonas sp. 67-41 OX=1895850 GN=BGP17_01850 PE=4; SV = 1
MQQIKRILIVGGGTAGWMTAALLGKLFQGLYEITLIESEEIGTVGVGEATIPAIKKYNELLELDENDFVRRTQGSFKLGIEFVDWAHRGDAYFHSFGVIGQDLGWLRCHQYWLKMRAMGRAADFSAYSINSAAARANKFMRADPKMAESPIGHIAHAFQFDAGLYARYLRGYAEAHGVTRREGKVADVTLRGDDGFVESVTMADGETIAADLFIDCSGFRGLIIEQAMKTGYENWTHWLPCDRAIAVPCARTEPFTPYTRATARTAGWQWRIPLQHRTGNGHVYSSAHISDEEAEAQLLANLDGAQLADTNKLRFTTGKRRQIWNRNCVAVGLASGFLEPLESTSIHLIQSTIIRLVRLLPDRGFDPATIAEFNRQTDFEYARIRDFIILHYKATSRDDTAFWRQCRDMEVPDTLQRKIDLFAANGRIFREDDELFTEESWIQVFLGQGVIPRGYDPLVDIKPEAQVEEYLGNIQRVIARCVGLMPDHAEFVAKTCAA

SEQ ID NO: 85669 - protein, 506 aa, Pelomonas sp.
  REGION 1..506: note = tr|A0A0Q6TBA0|A0A0Q6TBA0_9BURK Tryptophan halogenase; OS = Pelomonas sp. Root1217 OX=1736430 GN=ASC95_18340 PE=4; SV = 1
MRNGNLRKIVIVGGGTAGWITAAPLARMLCGQAEAGQHCQVTLIESSEIGTVGVGEATLPTIRFYNQMLGIGEDDFVRKTQASFKLGIEFRHWGRLGNRFFHGFGDFGPAIHNRPLWAYWLRMRAQEPTLPSYEEWSTATMMAAGMRFTTPQPGEQSPANAFNYAYHFDASLYGAYLREYALGHGAQRIEGTIVRVETSPENGFVDALHLSDGRRIEGDLFIDCSGFRALLIDGAMNSPYEDWSHWLPCDRALAVPCKRMDPMTPYTTSTAQSAGWQWRIPLQHRTGNGLVYCSSYLDDDAAANVLLGSLDGEPLDQPRQQRFTTGRRKQAWVKNVVAIGLSSGFLEPLESTSIQLIMDGVSRLTALLPDRSFQPALAAEFNRQMAYRYESVRDFIILHYKLGERDDSEFWRYCSNMSIPDDLAHQITLFRQTGRVAILEPEGFEEPSWASILLGLSVVPQRLDPYLDLVDPNLVRRHLMGVHDSISRTVRSMPTHASFLAEMGRR

SEQ ID NO: 85670 - protein, 412 aa, Xanthomonas citri
  REGION 1..412: note = tr|H8FHE5|H8FHE5_XANCI Tryptophan halogenase family protein OS=Xanthomonas citri pv. mangiferaeindicae LMG 941; OX = 1156940 GN=xanB1 PE=4 SV=1
MTLLEKAQHPRFHIGESLLPMNMPILERLGVLEDVRAIGVLKRGADFPNDSGGYNTFRFSHALDAKADFAFQVPRAQFDHVLFQRARAVGVDAREQVCVEQVAFDGEHPVLQARTADGGVQQFRPRYLLDASGRDTFLGNRLKLKRANATHQSAALFSHFRGVARRPGEDAGNISIYRHAHGWMWLIPLPEDIMSVGAVCYPDYMKTRQGDSEGFLMRTLALNAELSARMLGAERVAPVHATGNYAYECTRMAGPRWLMLGDAYTFVDPMFSSGVFLAMHGAERGAAMVDAALRAPQSEAKLQRALQRELTRGVDEFKWFIYRFTSPTMRALFAQPQNTWQVEQAVVAMLAGDVFDAPKVRIRLRAFRALYALTTLSMMPRAWQSWRHRRRQAKLGFDGDTLQRDTQQRDAP

SEQ ID NO: 85671 - protein, 515 aa, Streptomyces sp.
  REGION 1..515: note = tr|A0A3G2J7K0|A0A3G2J7K0_9ACTN Tryptophan 7-halogenase OS=Streptomyces sp. Z022 OX=1442032; GN = D9753_04005 PE=4 SV=1
MTQSVVILGGGTAGWMTASYLRAAFADSVDVTVVESGRIGTIGVGEATFSTVRHFFDSLGLSEADWMPECNGTYKLAVRLENWRAPGTYFYHPFERMRVVDGVPLTDWWQKVGETDHFDRDCFLIPWLCDAKASPRYLDHRLFEQDFDEDPDRPLYRTTLAEQNTQFPYAYHFDASLLAGFLSRYAVERGVRRVIDDVVDVRLDEQGWIEHLVTREHGDLTADLYVDCSGFRSRLLGDALEEPFISFQDSLPNDRAVALRVPVDTAVQGIRPCTTATAQEAGWIWTIPLFDRIGTGYVYAADYCGPEEAERVLRDFVGPAAADLEANHIRMRIGRSNRAWVNNCVGIGLSAGFVEPLQSTGIFLIQHAIEQLVRYFPGTNRDPVLRDTYNLSTARAIEGVREFLILHYRGAARVDNDYWRDAKKRRLPDDMAIRLEQWQSKLPDNDTTYPYYHAFEPYSYVCMALGLGGIPLRHPPALDLVDTRAARHELTRVRQQARKLVETLPSQVEYLSRLR

SEQ ID NO: 85672 - protein, 484 aa, Sphingomonas sp.
  REGION 1..484: note = tr|A0A1Q4E611|A0A1Q4E611_9SPHN Tryptophan halogenase; OS = Sphingomonas sp. 67-41 OX=1895850 GN=BGP17_12915 PE=4; SV = 1
MLAARILVVGGGTAGWMTAAALAHKLAGTPARIMLVESAEIGTVGVGEATIPHIRHFNATLGIDEADFLAATRGTYKLGIEFVDWGRKGDSYIHPFAEFGAPIGGVPFHQQWCAARGEAGPFEAYSLPIQAARRGRFRRPDGDPYNYAYQFDAGLYAKFLRGYSEARGVVRREGKVIDVARDGESGFVRSVTLEGGEVLEADLFVDCSGFRGLLIEQALHAGYEEWTHWLPCDRAIALPCANVGPIAPLTRATAQDAGWTWRIPLQHRTGNGHVYASGFTSDEEALRTLLGAIAAPPMADPNRLRFVAGKRRRQWVGNVVAIGLSSGFLEPLESTSIHLIQLAIGRLLDLFPTRDWDPLDAAEFNRLMALEYERVRDFLILHYHCTERDDSEFWRHCRTMRLPDSLAYKLALFRERGVVVQYREGTFLEPSWLAVYLGQHVTPRRCDPRAGGAGAAAAMAAMRAGIAATAEAMPAHEAALGMPA

SEQ ID NO: 85673 - protein, 489 aa, Sphingomonas aerolata
  REGION 1..489: note = tr|A0A2T4YNR7|A0A2T4YNR7_9SPHN Tryptophan halogenase; OS = Sphingomonas aerolata OX=185951 GN=C8J24_3273 PE=4 SV=1
MAAAALAAKLAGLPIAITLVESDEIGTVGVGEATLPHIRAFNLALGIDEAEMMRATEATYKLGIEFCDWGRRGDRYIHPFGDFGPTTNDVPFYQYWLKLRQSGDRSRIDEYSYPVIAAEQGRFRRPSGDLDAVESTFGYAYQFDAGLYAKFLRSFAEKRGVSRTEGRVVRVVQDGETGFVRDVVLTNGTTISADLFIDCSGFRGLLIETALQSGYDDWSAWLPCNRAIAVPTQSNGALRPFTRATARTAGWQWRIPLQHRVGNGHVYCSSFISDDEAHDQLVAGLDAPMQAEPRRLSFTTGRRREFWKKNVVAIGLAGGFLEPLESTSINLIQDGITELLAVFPDKGFGARDIAEYNRRIGLHYERIRDFLLLHYVATQRDDSEMWRHFRNLRLPDSLSERIDAWRTRGHLIQYEFGLFLSPSWVAVFLGQNLVPDRHDPRVESMSIDALTARASDVRAKVDAAVRRTPEHTAFIRESGGAARLAVAGA

SEQ ID NO: 85674 - protein, 510 aa, unidentified
  source 1..510: note = Xanthomonadales bacterium
  REGION 1..510: note = tr|A0A259R0F0|A0A259R0F0_9GAMM Tryptophan halogenase; OS = Xanthomonadales bacterium 14-68-21 OX=1970612; GN = B7X39_10990 PE=4 SV=1
METTDRRIRSVVIVGGGTAGWMTAAALAQALQGSCRIELVESEQIGTIGVGEATIPPIKLFNQTLGIDENAFLAATQGTFKLGIEFVGWGRAGHRYFHPFGQIGAEFDKVPLHHYWLRERMRGDTSSLQDHSLAWIAARDGKFTQPSTDRRQVLSTLDYAYQFDASLYAAFLRQYAETRGVRRTEGRVVGTDLRPDDGFIERIRLEGGATIEGDLFVDCSGFRGLLIEEALHTGYEDWRHWLPCDRAVAVACEHGDAFVPYTRSTAHEAGWRWRIPLQHRVGNGHVYCSAFTDDDTATQVLLAHLEGKPLGTPRPLRFTTGRRRRFWHRNCVAVGLSAGFLEPLESTSIHLIQTAITRLLALFPDRDFDPVTTAEFNRLTGLEYERVRDFLILHYHANTRDEPLWRHVATMDIPEPLAYKLAHFRGHGRLVAESLELFQNPNWLAVMIGQEVWPERYDPLADMRTRVDAASRLASLRQVIAEVAAAMPSHREYIDRHCRAPAAEAAAVMN

SEQ ID NO: 85675 - protein, 503 aa, Pelomonas sp.
  REGION 1..503: note = tr|A0A0Q6TK60|A0A0Q6TK60_9BURK Tryptophan halogenase; OS = Pelomonas sp. Root1217 OX=1736430 GN=ASC95_17085 PE=4; SV = 1
MQESQRLISNVVIVGGGTAGWMAAAALAKLLKNKINITVVESEEIGTVGVGEATIPMIQRFNQVLEIDENEFMRETQATFKLAIEFVNWGKVGERYMHGFGRIGQALGTVPFEHYWRKLHMAGQAGDLADYSITRAAAAQGRFLRPVADAGNSPLAEIAYAFHFDASLYARYLRKYAEARGVTRIEGRIVDARLSGLSGRVESVLLADGRAVAGDLFIDCSGFRGLLIEQVLHTGYEDWSQWLPCDRAIAVPCESSTQLLPYTRATAHAAGWQWRIPLQHRIGNGHVFCSRFMEEAEAERILLANLDGKPLAQPRTLKFTTGMRRQAWNRNVVSMGLASGFMEPLESTSIHLVQTALARLIDFFPSAGFDQADIDEYNRLSRFEYERIRDFLILHYHVNQRDDSAFWRYCREMSVPDTLAAKIELYRRNGRIVREGAELFAEVGWLQVMHGQNLKAQGYHPLADLIDEAETDAYLKSVRDVIANCVEVMPSHEEFIAKNCRAA

SEQ ID NO: 85676 - protein, 498 aa, Sphingomonas aerolata
  REGION 1..498: note = tr|A0A2T4YNR6|A0A2T4YNR6_9SPHN Tryptophan halogenase; OS = Sphingomonas aerolata OX=185951 GN=C8J24_3272 PE=4 SV=1
MIGAPGTPVAFTPGNDIRHIVVCGGGLAAWMTVATLARHLPDTVRVTLAEIDSDHRCADLFYGTVSGPGSYAFNLAAGVTEPALVLGSSAAFSWGSKYVHWAEGGRSWIQCFNLALPVIDGVLMHQYLVQQGMTRLDPFLLGAVAGSRGTFAHPPRSPGAAGQQPLARAEYGYHFDPASHARCFAAAVPPGRIHHLKGALTRVAVGDGAITGIALDGADMVTADLYLDCSGPSAELLSRLDPAWLGGRALQISADDVAEARLGPPVRSVSFHDKGWAAQTPLRGSTRSLTVSDATASCNARGGLSASATLGRRQRAWAGNCVGIGHAAGIVEPLTPAPMMLLERDIERLMTLIPVSTASMTVEEREYNRRHGEDHHHAMRFTRALLETSALPDSDFWRAARDTPDAELEHKLAMFAERGLLVSYDLEPFHPEDWLIMHFGIGRRPRRHDRLADRADAKRVRRYLDDAAQQVANAAAALPSNHVYMTQLERYLRQDPRK

SEQ ID NO: 85677 - protein, 501 aa, Sphingomonas koreensis
  REGION 1..501: note = tr|A0A2M8WBR4|A0A2M8WBR4_9SPHN Tryptophan halogenase; OS = Sphingomonas koreensis OX=93064 GN=BDW16_1641 PE=4 SV=1
MGRPFELVIVGGGTAGWMCAAACAAKLVPTGVRVRLVESEEIGTVGVGEATLPQMKDFNDFLGLDEVEFMKATQASFKLGIEFVNWGHEGHRYIHPFGTYGRPVGEADFFSYWIRARRSGIASRLDDYCFPIVAAWQNRFMLPNGDPNDVRNAFAYAYHLDAFLYARYLRGWAEARGIERVEGRIVDVERDGGSGAIAAVTLASGEPVAGDFFIDCSGFRSLLLGSMLGVELEDWSHWLPCDSAQAVPCARSQDFTPYTRSTRRKAGWQWRIPLQHRTGNGYVYSSAHVSDDEAAATLLANLDGEALAEPRVLRFKAGKRRLAWSRNCIGMGLAGGFLEPLESTSIYLVQMAIMHMLTLLPSTEGIDPALPAEFNRVMDVEYDRIRDFLILHYIANEADAPLWAHVTAVDLPDTLQDKIDRFRHRGHVQAYRDGLFGPPSWQAVFVGQGIEPLAADRLADVLPAEALAQRLEMLASTIARGAGSAPSHADFIARYCPAPAP

SEQ ID NO: 85678 - protein, 538 aa, Streptomyces turgidiscabies
  REGION 1..538: note = tr|L7FG73|L7FG73_9ACTN Tryptophan halogenase; OS = Streptomyces turgidiscabies Car8 OX=698760; GN = STRTUCAR8_08133 PE=4 SV=1
MTETGTTDTDSRIRKVVILGGGTAGWMTAAYLGKALQGTVDIQVLEAPAIPRIGVGEATVPNLHRVLFDYLGISEEEWMRECNASFKMAVRFVNWRTPGRGEPEARTLDSGRPDHFYHPFGILPDHDNTPLSHYWYKNRHEGRTDEPFDYACFREPPVMDAKKSPKWLDGTDSTRYAWHFDAALVADFLRRFATDKQGVEHIQDEMVRVEQDGRGYVTALHTKSGRVLDADLFVDCSGFRGLLINKALGEPFVDMSDHLMCDSAVATAVPHDDEANGIEPYTSAIAMSSGWAWKIPMLGRFGSGYVYSSRFTSQDEATAEFCELWGLDPAETKFNHVRFRVGRNRRAWVNNVVSIGLSSCFLEPLESTGIYFITAAIYQLAKHFPDRTFNPALVNSFNQEIEVMFDDTRDFIQAHFYYAPRNDSPFWQAQKELKLPENIQRKIEAYKAGLPVNSPIADESTYYGNFEAEFRNFWTNGSYYCIFAGLGLEPDTPLPALAHKPESVAGAQPLFDRVRQEQQRLLDTLPSAYDYLRGLHGK

SEQ ID NO: 85679 - protein, 503 aa, Catenovulum agarivorans
  REGION 1..503: note = tr|W7QQQ0|W7QQQ0_9ALTE Tryptophan halogenase; OS = Catenovulum agarivorans DS-2 OX=1328313 GN=DS2_08912; PE = 4 SV=1
MKPIKNIVILGGGTAGWLTAAVIAAHHKLNTHSNIQLTLVESSDIPTVGVGEGTWPTMKNTLQAIGINEHEFLKTCQATFKQGGKFVGWETGNDFYHHPFTVPLGYERIDAAPYLDDVRQFADLTNYQQAVCEAGLGPKAPTDAEYTAKLNYAYHLDAGAFADMLKKHCREKLGVNHIVNTVESVTQNIQGGIQSMLLTDGQVIDADLFIDCSGAPALLIGKALGVKKHSTKDILLNDSALAIQLPYANETSPIASMTIATAQTVGWVWDIGLQKRRGVGYVYASDYIEEQNAYDVLTQYAEKTHSKADIASLNIKKIGFDPGYRKQIWQHNCVAVGMAAGFVEPLEATAIMLVEQSAKYIAENLPVDEATMQVVSKRFNEKMQYRWQRIIDFLKLHYLLTKRPEAYWQAQANFATCPQSLKDDLLIWQSRGPQAADFDSSIELFPAASYQYVLYGMGFKPNYQQHAHLYKMAEQADAILTRNQSVKESLLNSLPTNREYFLN

SEQ ID NO: 85680 - protein, 508 aa, Enhygromyxa salina
  REGION 1..508: note = tr|A0A0C1Z5J5|A0A0C1Z5J5_9DELT Putative tryptophan halogenase OS=Enhygromyxa salina OX=215803 GN=DB30_00941; PE = 4 SV=1
MIVGGGTAGWLSAAYLNRALGSSVRITVVESASVSRVGVGEATVPTMVSTLAFLGIDERVFMRRCNATFKAAIKYVNWAHGGRGDRADEFYHPFYDRPELLARPFGDMHFPFVGEGFSSADVWAAQGSDRDPRFDRVSSAIPAVSDALAFSPERLPGSQTLQYAYHMDAMLFADMLAEVAQQRGVERRVDHVRGVELDERGFVRSLATESGAALTADLFIDCSGFRGLLINGALQEPFSSDAKYLACDAAVALPAASVPARDGILPYTTATALSAGWSWRVPLFQRFGCGYVYSSDHASPSEAEQELRDLLGPAAGQDAAHLRMRVGRCRRSWVNNCVAIGLSSCFLEPLESTAIFMVEYQLAQLVNLFPSRRFAPARIHRYNETLNDMYDHLRDFIVMHYCTTSRGDTAFWRRIRDDMPIPDSLATILDEYRVGVLPQDRLRFRLFRSRSYTAILSGMGVYPDYGPPILGHAPPAAGDALLADIAKRTAALLASLPAHYDYVRGLHE

SEQ ID NO: 85681 - protein, 493 aa, Catenovulum agarivorans
  REGION 1..493: note = tr|W7QF20|W7QF20_9ALTE Tryptophan halogenase; OS = Catenovulum agarivorans DS-2 OX=1328313 GN=DS2_03260; PE = 4 SV=1
MNKVTKVVIAGGGTAGWMAAAALTKLISNLEVTLIESEEIGTVGVGEATIPTLVFYHRLLKINEAEFMKAVNATFKLGISFENWRDVNEDYIHAFGVTGRDCWAAGFQHFWKKGREKGFASDFGDYCIEQVAAKRNRFAQLPKNGINYAYHMDASLYAKFLRGIAEQHGIKRIEGKIGKVNVCSENGFIQSLEMENGQVIEGDLFLDCTGQRGLLIEQTLHAGFEDWSHWLPCDSAIAIQTTAVEKPRAYTRSIAHPFGWQWRIPLQNRVGNGIVYSSKYVSDEEAKQTLLNNIEGEALTEPRVIKFRTGTRRKHWHKNCVAVGLSSGFLEPLESTSIHLIQQAIVRLLRIFPYDGVKQCDIDEFNQQTKVDVEAIRDFIIMHYKVTNRDDADFWHYCRNMQVPETLAHRLELFEQTGKVFRKNNELFDDSWQQVMIGQGLIPQHYHPIVDNMPDEELKRFLKSIKDGIDNTVNQLPEHWQFIQQFCPSPLAN

SEQ ID NO: 85682 - protein, 507 aa, Shewanella amazonensis
  REGION 1..507: note = tr|A1S440|A1S440_SHEAM Tryptophan halogenase; OS = Shewanella amazonensis (strain ATCC BAA-1098 / SB2B); OX = 326297 GN=Sama_0939 PE=4 SV=1
MKITKIAILGGGTAGWLAANHLGAELCADKEVEITLIESPEIPTIGVGEGTVPYIMKGLKRFGISESELLANCDTTFKQGIKFVNWLDPERHGDNHYYHPFDSPYPGGMDISHYWLTQKDKRPFDDVGIQARICEKNLAPKRISAPEYQGELAYAYHFNAVKFAALLAKNARERFGVKYLSATVAGATLNDDGAIASLNTKEVGSLAFDFYVDCSGFHSVLLDKVLKVPFVDKGKELLTDSVIVQQVPLKSGEALSPYTKATAHKAGWIWDIPLTTRRGTGFVYCSQYMSDEEAVSTFAQYLGMDVSEISPRKIPMKIGYREKFWAKNCATLGLAQGFVEPLEATSILVTDFSAELLAKNFPRETSDIEVLSPYYNDVITYVWERVIDFIKLHYCLSDREDTGFWAANRDSDTWSETLKSRLAKFALRPPQQSDFLSRFDLFDDKNFLYVLYGMGFSSRIKALDPREIEQSRQLLESNDKLADRAEELLMEHGKWLAGLKAAMARAS

SEQ ID NO: 85683 - protein, 567 aa, unidentified
  source 1..567: note = Streptomyces kanasensis
  REGION 1..567: note = tr|A0A117IWK2|A0A117IWK2_9ACTN Tryptophan halogenase; OS = Streptomyces kanasensis OX=936756 GN=ATE80_09960 PE=4; SV = 1
MRQGGLSVAVFEKEEFPREHIGESFAHPLIPVLEESGALEKVLASDCWVKKFGGIFQWRGEDPHVAFFDHDNTVRDGAHRWAVHANRSEFDAILLDHARDCGAEVFEGVSVSDCSPPADGTGQEVTLKDGRTVRAGYFVDASGRRNSVVTKKKREWLSGYRNIAIWQHYLGGKPTQSLEGDWNIFREHDMSPIGCFAFRDGWCWYIPVPKIIDGERVVTHSIGIVTDPGILKQPGTDFTDAEVFLRTIKEVPKLKELIGDIRPVGDKMLTATNYSMINDRFADFDGRWILLGDASYFVDPLFSSGVAFATNQARAAAALIRHSSGSQMSEEELRGLWEDYDTEWHGMASSFALSIDQWYHAIGKDNPESVYWNSRGTEGPAGPSHEKTFQALLNTAFTPDLLQVLAQGEGLAGLDVDGPFMTAFAKANKLELTADTKVSLKEGVAVLQGPALDIPGFKAAIPPNPDLVPAEEQQAIRAYWEDPVRNGHLVESPLDRPLDCHRFHIPGDPEAPQVRGLDERDGAADLWARLRGGPVLWSELVQDLHEGQERLLKRLLHAGMLELGNHA

SEQ ID NO: 85684 - protein, 614 aa, unidentified
  source 1..614: note = Hapalosiphonaceae cyanobacterium
  REGION 1..614: note = tr|A0A328I4T6|A0A328I4T6_9CYAN Tryptophan halogenase; OS = Hapalosiphonaceae cyanobacterium JJU2 OX=2109628; GN = C6Y22_24175 PE=4 SV=1
MYAAQSLKYDVVILGTSLAGLSQARHLMLNIPNIKVALVDLPAQELDNEPAINDSTIEIADLFFCKELGLHDYLIENHILRSTLSFHWPKRPDQTTTLDDYYHIWCNRQLSIASYQINRTKFEQDLLLMNEAMGATVYKGSVVDVELTEGDAVNTVKIQVADQQIALKADHVIDGAGRQFIIGRKTDNLLLGPQNLCGLNNGTAWLRVKNVNRTIFDDGYNPNETSTSRYYSTNHYFGYGHWSWMTPTDIPSRELSVGIVHYNEVLPAQGIDTQEKFVAFMQANHNLVYQLIESGEIIDFHYSPRIAYKSKKLFSEDNWYVIGNSASFFGGFYCIETTLLAFAVESVTEIIRAKIAGEADVDKKRSAYNEFNLYYHNLINHVYFDHAKQLGHASIMSWRIYLDWMWWFSIHVPTYAGKWHLNPEFTDMYLKLSYKNIGGFWIDLFKEFQQLVNQGTNIGLMDLYRADQLLGGYHTPKYFDNFLENTKFEPLRCNVFAGVKVNFFNAAIWYALFQWKSFGLAGCLNPRHLYHFFRLLSVSGQWAFLELIYRFQLKKGLSDNSSIEKMRQEFKNYQYRPELQPWISEESTQEKQLSQGELNSSLDQAKICATSAKI

SEQ ID NO: 85685 - protein, 496 aa, Catenovulum agarivorans
  REGION 1..496: note = tr|W7QAX8|W7QAX8_9ALTE Tryptophan halogenase; OS = Catenovulum agarivorans DS-2 OX=1328313 GN=DS2_14119; PE = 4 SV=1
MTNQVKKVVVLGGGTSGWMSAALIKKVLGDVVDVELVESESIGIVGVGEATIPPIQHVNETLGIDEAEFIRETKATIKLAIKFENWRVKGESYYHTFSAPGRSLPFCHFHHLWTRANQLGIDDNLWAHDINFHAAEAGRFAKLQTQDPLFDLKYAYHFDSGLYGQYLRKISERLGVKRTEGLVDQVNLNVQTGDVESLKLKNGHLVTGDLFIDCSGFRGVLINQKLGTGFEDWSHWLPCDRAVAMPSERHQHTTPYTRSIAHEAGWQWRIPLQHRNGNGLVYSSRYYSDEQAAELLASNLDTPALDDSRVIKFRTGRTRKQWNRNVIAVGLASGFLEPLESTSIYLVQSAVVRLIKFFPHMGIEDAQRDEYNRQSKLEYDLIRDFIILHYHVTDRVDSQFWRDMQNMEVPKRLVDKIAQFKKSGAITHEELDLFWEPSWLQVMLGQGIKPTDYHPLANQFSTEKLAEMMANMKKAKQAPSLQMPTHDEFLKMFAGV

SEQ ID NO: 85686 - protein, 492 aa, Sphingomonas glacialis
  REGION 1..492: note = tr|A0A502G3I6|A0A502G3I6_9SPHN Tryptophan 7-halogenase OS=Sphingomonas glacialis OX=658225; GN = EAH76_02685 PE=4 SV=1
MIASPRRIVVAGGGTAGWMAAAAIARTMGRTAEVTLIESNAIGTIGVGESTIPPLVTYNRLLGIGEADFMRATQATFKLGILFDGWKDGSDRYFHSFGTTGQDHWSAGFQHFWMNGRERGHDAAYDAYCLELVAAMEGKFAHLPDERMNYAYQLDSSLYAQFLRRMAEGDGARRIEGKIARVALDGESGDVAALHLESGGVVEGDLFLDCTGFRALLIEQALHAGFDDWSHWLPCDSAIAVQTENVRPPVPYTRAMAHDAGWQWRIPLQHRTGNGIVYCSRYLDRDTALERLLGNVEGTVLTEPNNIRFVTGARRRQWHRNVVAIGLSGGFMEPLESTSIHLIQRAILRLIRMMPGGEISPRDVAEFNDQQFADMEQIRDFLILHYKATNRRDSPFWRQCAAMEVPESLAQKIALFRETGRVFRRNEELFAENSWVQVMLGQGIEPAAYHPIADKLRDEELAKFLATLRDNVARTVAGLPAHADYVAQYCGG

SEQ ID NO: 85687 - protein, 507 aa, Sphingomonas glacialis
  REGION 1..507: note = tr|A0A502FZ10|A0A502FZ10_9SPHN Tryptophan 7-halogenase OS=Sphingomonas glacialis OX=658225; GN = EAH76_05410 PE=4 SV=1
MANLSEPTGPIRIVIVGGGTAGWMAAATFARFLETGFEIDLVESDEIGTVGVGEATIPQIRLFNDALGLDEDAFLRATQGTYKLGIEFVDWLRPGHRYMHAFGAVGRDVGLLPFHQYWLRAKALGSAKDLAAYSLNNQAALADRMQRGPARTARVLPDMPSAFHFDAGLYARHLRRYSETRGINRIEGKVVRVDQDETGDISTLVLEDGTTLAADLFIDCTGFRGLLIEQTLKTGYDDWTHWLPADRAIAVPSARSTAFTPYTRSTAKAAGWQWRIPLQHRTGNGLVYSSQHLSDDEATATLLAGLDGAPLADPRPIQFRTGKRRKMWNRNVVAIGLSGGFMEPLESTSIHLIQSAIARLLKLLPGRAIPQADRDEFNRQSDFEYERIRDFIILHYHANDRTEPFWRMCREAALPETLAVKIDLWRGNGHITREHEELFTEVGWLQVFAGQGVMPAGHHPLADAIPAADLAEFLDTIDQLNAREVAQMPSHADFIARHCAAPTPVTA

SEQ ID NO: 85688 - protein, 503 aa, Sphingomonas sp.
  REGION 1..503: note = tr|A0A4R2TD68|A0A4R2TD68_9SPHN Tryptophan halogenase; OS = Sphingomonas sp. PP-F2F-A104-K0414 OX=2135661; GN = C8J46_104516 PE=4 SV=1
MTNTPVRRVVIAGGGTAGWMAAAAIARTMGSTIELTLVESDAIGTVGVGESTIPPMITFNRLLGINEAEFMRETQATFKLGILFDDWKDRGESYFHSFGITGKDHWSAGFQHFWLHGLTKGHDQPYDDYCLELRAALQGKFAHLPDDRMNYAYQLDSTRYAKYLRGMAEADGTRRLEGRIAQVDLNGESGDIAALVLESGVRIEGDLFLDCTGFRALLIEGALHAGFDDWTHYLPCDSAIAIQTESVRPALPYTRAMAHDAGWQWRIPLQHRTGNGLVYCSRYLDRDAALDRLLGNIEGKTITEPNMIRFVTGARRQQWHRNCIAIGLSGGFMEPLESTSIHLIQRAVLRLLRLFPSGAVSPRDVAEFNDQQHTDMLQIRDFLILHYKATNRRDSAFWRQCAAMPIPASLEQKIELFRETGRVFRKNEELFAENSWVQVMLGQGIVPRSYHPIATKLRDEELARLLGGLRDGTNATVAGLPEHAAYVARYCGNAPTPSPVLTA

SEQ ID NO: 85689 - protein, 506 aa, unidentified
  source 1..506: note = Amphiplicatus metriothermophilus
  REGION 1..506: note = tr|A0A239PWA8|A0A239PWA8_9PROT Tryptophan halogenase; OS = Amphiplicatus metriothermophilus OX=1519374; GN = SAMN06297382_2266 PE=4 SV=1
MNNTRIRKIVIVGGGTAGWMTAAACAKILRNNYCEIELVESEQIGSVGVGEATIPQIGTYNRTLGIEENEFVRETRATFKLGIEFVDWGAPGERYIHPFGTYGLDMEGVSFHAFFLKAHPDWTARTLEQYSLQAQAARHGKFMRPVNAGNSPLSKIAYAFHFDAGLYAQYLRRYAQARGVARREGKIVDAVQNSQTGYIEAVILEDGCTVEGDLFIDCSGFRGLLIDQKLGAGYIDWSHWLPCDAAVAVPCESAGPPTPFTRSTAREAGWQWRIPLQHRIGNGLVFSRGYIDDDKAAGILLANLDGKPLADPRFLNFTPGRRKLFWIKNCVAIGLAAGFIEPLESTSIHLIQSGVAKLLQMFPDRRFNQADIDRYNRVTAFEFERIRDFIILHYKATQRRRQPFWDYVREMNIPDYLQDKIRLFKSYGRIFRENEELFNDTSWFAVMTGQNIRPNGYDPVADVLSIEETRARLDHIRATIATCAGHMPPHEEFIARHCAFDGFPYR

SEQ ID NO: 85690 - protein, 499 aa, Pseudoalteromonas citrea
  REGION 1..499: note = tr|U1KQ66|U1KQ66_9GAMM Tryptophan halogenase; OS = Pseudoalteromonas citrea DSM 8771 OX=1117314; GN = PCIT_08233 PE=4 SV=1
MAEQRIKNLTIVGGGTAGWLTASLFAKVMGKQLNITLVESDDIATIGVGEATIPPILPFNGALGIDEKAFIKATSATIKLGIQFEGWSKDVPSYMHAFGAIGKDFPFCEFYHHWLAAKSQGDQSNFWDFSLNYQAAKQHKFAKLHTIPNTQLKGLSYAYHFDAQQYAAFLSQHAQTLGVKRVAGTVNSVRVNEKSGFIEQLDLADGQQVSGDLFIDCTGMHGLLIEKTLNCGFEDWSHWLPCDRAIAIQSKPLSDDIAPFTRSIAHTAGWQWEIPLQHRVGNGLVYSSKHMSDEEAQASLLGGISGDTLGEPKRLRFRTGRRLTPWCKNVVAIGLSSGFLEPLESTSIHLIQTAAVRLLKLFPQHDIKQASRDMFNFETQQELEQVRDFVILHYKLNDCADSEFWRLCHAMPIPDSLKRKIALFKETGVIHSEVTDLFSSVAWQQVMLGQGVTPQQQHPLVDSLSAAQREELLSNLKTLIDSTAAALPKHVAFLASHSK

SEQ ID NO: 85691 - protein, 507 aa, Rubrivivax sp.
  REGION 1..507: note = tr|A0A437JP56|A0A437JP56_9BURK Tryptophan 7-halogenase OS=Rubrivivax sp. ICH-3 OX=2499835; GN = ENE75_22490 PE=4 SV=1
MIGQLAGDTDTRSPVRRIVIAGGGTAGWMTAAALSKTLGRRLDIRLVESDEIGTVGVGEATIPSLQVFHRLIGVDERDFMAATQATFKLGIRFEGWHDVGKAYFHGFGLTGKDHWTAGFQHFWLKGRQRQLAADYGAYCLEAQAARLGRFAHLPDDGLRYAYHLDATRYAAFLRRFSEALGVQRIEGRIVEVRRCEGTGDIRSLRLDGGAEVEGDLFIDCTGFRALLIGDALGVGYEDWSHWLFNDSAVAVQTAAVDAALPYTRSIAHGAGWQWRIPLQHRVGNGLVYSRRFIDDDQARQTLQAQLRGETLTTPRVIRFQPGQRHEAWRANCVAIGLAGGFLEPLESTSIYLIQRAIIRLLQMFPADGIQAPDATEFNRQMRADFEHVRDFIVLHFKVTERRDTPYWRACADMSVPPSLQHRIDLFRQTARIFRGDGELFSENSWAQVMLGQGLVPAQHHPVTELMGDAELGRFLGSLQSAAEQAAQQLPPHDDYVRRYCGAPAASA

SEQ ID NO: 85692 - protein, 504 aa, unidentified
  source 1..504: note = Novosphingobium sediminis
  REGION 1..504: note = tr|A0A512AN66|A0A512AN66_9SPHN Tryptophan halogenase; OS = Novosphingobium sediminis OX=707214 GN=NSE01_29530 PE=4; SV = 1
MNQSDRRIRSVLVVGGGSAGWMTAAMLATMLRQDCRITLVESDEIGIVGVGEATIPPIRLFNETLGISEADFIRETRGTFKLGIEFVDWGQVGSRYFHPFGPHGRNFDMVPLHQYWLRTRSEPGAFPLEDLSMAWHIARSGRMARPVPDQRSLLSTFDYAYHFDASLYAAFLRRHAEARGVTRVEGKIGDVSLNGETGFVESVTLEDGRKLEADLFIDCSGLRALLIEGALKTGFEDWSHWLPCDRAVAMPCAQAGQPTPYTRSTAREAGWQWRIPLQHRIGNGYVYSSQFMADDKAAELLASRLDGEALGDPRFVRFRTGRRKQHWNRNVIAVGLSSGFLEPLESTSIHLIQANISKLIGLFPDRDFDPATIDEFNRIAHAETDRIRDFIILHYKLTQRQDHELWRYVSAMDVPETLALKLEHFRRHGRLIAREMDLFAPASWLAVHIGQHNYPEGLDPLIEFRGIDARDYLAKLRAAMAAEAARLPSHESFIAGLTGAAAAA

SEQ ID NO: 85693 - protein, 513 aa, Sphingomonas glacialis
  REGION 1..513: note = tr|A0A502FQ95|A0A502FQ95_9SPHN Tryptophan 7-halogenase OS=Sphingomonas glacialis OX=658225; GN = EAH76_16355 PE=4 SV=1
MQSIQNIVIVGGGTAGWLTAGIIAARHQGRMPAGFTVTLVESPNTPIIGVGEGTWPTLRATLSKIGVSESDFFRECNASFKQGARFARWTTGEPDEGYYHPLMLPQGFARVNLAEHWLAGGDGQSFCDTVSPQGRLCDDGLAPKTIATPEFEAVANYAYHLDAGKFAGFLQRHCCEKLGVHHVLADVQHATQAENGDILSVVTEQAGEIPGDLFVDCTGFAALLIGKTLGVPFKSCSDTLFCDTALAVQIPYADPEDPIASHTISTAQSSGWIWDIGLPTRRGVGHVFSSSHISDDAAEQELRAYLGPAGRDLPVRKLAIRAGHRETFWKNNCVAVGLAAGFLEPLEASAIVLIELSAKLIAEQMPVCREVMDILAARFNATTHYRWGRIIDFLKLHYVLTKRTDSDFWRDNVRAESIPDRLRDLLTLWKYQPPWFHDEFDRVEEVFPAASYQYVLYGMGFQTEVARDAIAGDTRLAEQARREAASQTERLRAGLPRHRDLIRKIVERGLPAI

SEQ ID NO: 85694 - protein, 507 aa, Sphingomonas sp.
  REGION 1..507: note = tr|A0A4R2T7M7|A0A4R2T7M7_9SPHN Tryptophan halogenase; OS = Sphingomonas sp. PP-F2F-A104-K0414 OX=2135661; GN = C8J46_105328 PE=4 SV=1
MSSNPSPDRSETARGMTVVIVGGGTAGWMAAVAFGRLLVPAGGRVTLVESDTIATVGVGEATIPPIRTFHAMLGIDEDAFLAATGGSYKLGIRFEGWSHPTESYVHPFGQIGTEIAGLSFAAQWLRARQAGEAEDLGQYSLEARAAETGRFSKPIANGDSPLSRIGYAYHFDAARYADFLRKQAETHGVVRCEGMVVRVEQGPAGIAAVHLADGTRIAGDLFIDCSGFRALLIEGALAAGWEDWSSWLPCDRAVAVPSSADAAPLPLTRAIAQPAGWRWRIPLRHRTGNGHVFSSRYMSEDEATACLLDRIEGEALADPRVIRFATGHRRRFWSGNCVALGLAAGFMEPLESTSIHLVQSGLQHLLRMLPGTGVASSVVIERYNRVMTAEFVRIRDFLVAHYHLNARPEHFWRDRAAAPIPEGLAEKLAMFRDGGRIFREPDELFNETSWLALLIGQNAVVDGHDPLCAALPIARAAHRIAQIEQVVTASLAHMPPHADALARLERG

SEQ ID NO: 85695 - protein, 507 aa, Rubrivivax sp.
  REGION 1..507: note = tr|A0A3S2TP12|A0A3S2TP12_9BURK Tryptophan 7-halogenase OS=Rubrivivax sp. ICH-3 OX=2499835; GN = ENE75_20355 PE=4 SV=1
MDSDRRLRRIVVVGGGSAGWMSAAALTRAVGAACEIMLIESEQIGTVGVGEATIPPIRLFNQLIGLDEAEFLRRTQGSIKLGIEFVGWGRQGHRYFHPFGPHGLGFDMVPLHQWWLAAQAAGVPGLPPLHEWSMAWALAQRQRVTRPVADPRNVLSSFDYAYHFDAGLYARYLREVCEARGVQRLEGRIVHVALRAGDGFVEHVRLDDGREVAGDLFLDCSGFRGLLIEEALHTGYEDWRHWLPCDRAMAVPCASSADFTPYTRSTAQEAGWQWRIPLQHRTGNGYVYCSEHLDDTRAAELLLSRLDGAALADPRPLRFVTGRRRQFWQRNVVAIGLASGFMEPLESTSLHLVQSALSRLLALFPDRDMDPWTVAEYNRLGIEEFERIRDFLILHYKLTERDDTPLWRHCAAMPVPDSLQYRIDQFRARGRLVSPGPELFGPASWLAVQVGQFNRPERVDGLLPLRGVDGMAMLRRQHEAMHGTAQAQPGHRAFLQRIGAAAAPGPV

SEQ ID NO: 85696 - protein, 508 aa, unidentified
  source 1..508: note = Novosphingobium sediminis
  REGION 1..508: note = tr|A0A512AFS1|A0A512AFS1_9SPHN Tryptophan halogenase; OS = Novosphingobium sediminis OX=707214 GN=NSE01_03880 PE=4; SV = 1
MSNAVQHIVIVGGGTAGWLSACLLAARLPGKRITLVEAPDIPTIGVGEGTWPTMRETLATIGIPEAEFLEQCDAAFKQGSRFDGWRDGSAEDSYLHPFSAPPAAEMRELAAAWQAGGKQGPFAAAITPQHAICAANLAPRQRAMPDYAGALNYGYHLDAGKFAALLMRHGVGRLGVTRIAAHVIGVSRAANGDIAALMLRDGEALEGDLFLDCSGQAAILIAGECGAGWIDRSDVSFNDRALAVQVPVEPGSPIAAQTIGTAHEAGWLWDIGLPTRRGIGCVYASRFLSDERAEEVLRGYVAAKVPGADPASLTPRKLAFKTGHRDRFWIGNCLAVGLSAGFIEPLEASAIVLIELSLKALAENFPASRASMDIHAGRFNELFRYRWDRVVEFLKLHYVPSQRTESYWLAQRSPETIPQRLAECLVLWREQPPSAWDFPRIDEMFPAASQQYVLHGMGIPVPLHGAVPSPARLAEITVKSRALAAALPTTRDYLDRLAAQSPAARIPA

SEQ ID NO: 85697 - protein, 568 aa, Pseudoalteromonas citrea
  REGION 1..568: note = tr|U1JIT5|U1JIT5_9GAMM Tryptophan halogenase; OS = Pseudoalteromonas citrea DSM 8771 OX=1117314; GN = PCIT_19459 PE=4 SV=1
MYDKARNAATPILVKLRLKSAVESMVENMGHNTTAKTSGDSASDDSTSENSASKNSASNSTVTRIVIIGGGSAGWLTAGVIAAHHGEQVHVTLIESANIKTIGVGEGTWPTMRDTLQKIGITETDFMRSCDASFKQGSQFINWGSSQMPDNYYHPFSLPAGYIQGHSAHVPRSSDLSFAHMLCPQATWCDAKLAPKLGSDKEFTGQGNYGYHLDADKFAKLLKKHCTEQLHVAHIVDEVIGVIGQCTDNIEGVSTTTHANVMGDLFIDCSGGAALLIDKHYKVPWLSQQQVLKNDSAVAVQVPHKSSECDINSCTLSTAQTEGWIWDIALPTRRGIGYTFASEFTSEHIAKAALLNYIKKQGLSKPDAEAIRTIKFNPGYRQTLWYKNCVAVGMSAGFLEPLEASALVMIELSAAYITENLPQNSIHMETVSARFNREFSHHWQSAVAFLKLHYVLSNRADSEYWQIMRSQGIPQNLSELLALWRYQVPKHQDLTHSNDIFSVASYQYILYGMGFDTAITQSVLPTHSEALFKDIQLSVNRFAEHGKQTLPTNRALLLNIKNHGIPKI

SEQ ID NO: 85698 - protein, 193 aa, unidentified
  source 1..193: note = Gammaproteobacteria bacterium
  REGION 1..193: note = tr|A0A1J5ML15|A0A1J5ML15_9GAMM Tryptophan halogenase (Fragment) OS=Gammaproteobacteria bacterium MedPE; OX = 1860093 GN=BM565_11000 PE=4 SV=1
MPYDKYGIFYGVYMDKTIKNIVIIGGGSAGWLTAGILAKEHNERVNITLIESPHVATIGVGEGTWPSMRNTLERIGIKESDFLTQCDASFKQGSQFIDWVDKSKHDKYYHPFMTPDGYGHIDLHAVWHSADSRRTFADTINHQSAICQHGLAPKQASTPQYAAVTNYGYHLDATKFSNMLQAHCVTYLKVNHI

SEQ ID NO: 85699 - protein, 506 aa, Rubrivivax sp.
  REGION 1..506: note = tr|A0A437JVZ8|A0A437JVZ8_9BURK Tryptophan 7-halogenase OS=Rubrivivax sp. ICH-3 OX=2499835; GN = ENE75_11910 PE=4 SV=1
MNPNTQAPLQRVVIAGGGTAGWMTAAALSKVLRGRIAVTLVESEEIGTVGVGEATIPMIQLFNRVLEIDEDEFIRETRGSFKLGIEFVNWGRLGARYMHAFGRFGQDLWTVPFYQYWLKQHLAGDAPPLGDFAITHRAAYRNRFMRPPGDVQNSPLNDIAYAYHFDAGLYAAYLRRQAEARGVVREEGRIAEVAVDPGRGHVTALTLTDGRRIEGDLFIDCTGFRALLIEQTLKAGWEDWTHWLPCDRAIAVPCSSASPFTPYTRSTAHRAGWQWRIPLQHRTGNGHVFCSAHVSEDEATAVLLANLDGEALAEPRTLRFATGMRRHCWQGNVVAIGLSSGFLEPLESTSIHLIQTAIARLIDFFPAQRFSAVDIDEYNRLSRFEYERIRDFIILHYHLNERTDSPFWTACREMAVPETLQAKLMLFRTHGRILRENNELFSEVAWLQVMLGQGLVPEGYHPLVDSLDGAEVARYLQEVHALIGRCAEAMPDHAQFIGQHCRAPAN

SEQ ID NO: 85700 - protein, 408 aa, Dokdonella koreensis
  REGION 1..408: note = tr|A0A160DXD6|A0A160DXD6_9GAMM Tryptophan halogenase; OS = Dokdonella koreensis DS-123 OX=1300342 GN=I596_3389; PE = 4 SV=1
MQTETTQILIVGAGPAGSVAAGMLRKQGRQVLVLEKEQFPRFSIGESLLPQSMQYIEEAGFLRDVVEAGFQYKNGAAFVRGARSTAFDFRDKFSPGWGTTYQVQRADFDHVLAKAAEKAGAEVRYRHQVVAVHVDGDQPTVEVVGPDGAMYQVRARFLLDASGFGRILPRLLNLETPSDFPVRGAYFTHVEDHIPSGTFDRNKILVSVHPEHVDVWFWTIPFSNGRCSQGVVARTDFLERYAGSETDRLRAIIAETPTLAGLLKDAVWDTPARKLVGYAANVKSLWGKGYALLGNAGEFLDPVFSSGVTIAFKSASLASAAIAREFDGERVDWQRDYADPLKSGVDAFRAFVESWYAGGFQDVIFHPNQSAEVRRMISAILAGYAWDRSNPYVAEPRRLKTLEQLCAA

SEQ ID NO: 85701 - protein, 503 aa, unidentified
  source 1..503: note = Novosphingobium sediminis
  REGION 1..503: note = tr|A0A512AFA0|A0A512AFA0_9SPHN Tryptophan halogenase; OS = Novosphingobium sediminis OX=707214 GN=NSE01_02170 PE=4; SV = 1
MAAARRFVILGGGTAGWMAAALIAHRCRELAVSVTLVESPEIGIIGVGEGSTPQLKVFFDELGIAEREWMPACHATYKTGIRFAGWSDAPGFESYFHPFQSALDGHTAPAFYFHTRARRTGRDVVAHPDRFFLAARLAEARLGPVPGENFPFDLGYGYHFDATLVGQFLAAHATEKLGVHHVPRRVSGTRRDAAGGIAALVLEGGEEIAGDFFIDASGFRASLIGEALGEPFESFAGNLFNNAAVALPGARDAGATSCETVSTALSSGWAWRIPLTDRTGNGYVYSTDFLSPDVAETELRRHLGLLDADIPARHLSMRVGQVRRSWVGNCLAIGLAQGFIEPLEATALHIVHATLSGWLEALLADGFGPSHRDQFNAAIHARYEGIRDYIVCHYRMNRRDGEYWRANAANDHLSDNLKSLMTCWFRGGELDEEVARLGIDRYYAPLSWHCLFAGYGQFPDAARLRPPEADLPLADMAKIDRFIAGCALNFPAHDDLLARLEEA

SEQ ID NO: 85702 - protein, 519 aa, unidentified
  source 1..519: note = Amphiplicatus metriothermophilus
  REGION 1..519: note = tr|A0A239PR14|A0A239PR14_9PROT Tryptophan halogenase; OS = Amphiplicatus metriothermophilus OX=1519374; GN = SAMN06297382_1402 PE=4 SV=1
MTDEVVKSVMIVGGGAAGWLTAAVIAAEHCAHSEEGLEVTVVESPNIPIIGVGEGTWPSIRDTLRRIGIRETEFIRRCNASFKQGTRFDGWRDGSSGDSYFHPFDPPPGPDEVDMLALWRAAPAGAPFAQAIGCQAALCLAGKAPKQKTTPEYAAVVNYAYHLDAPAFANLLREHCVRRLGVRVVPDDVVGVETDEAGFVRTLNTRRHGALQSDLYIDCTGSRALLIGDALGVKAKDVSHILFNDRALALHVPYMDENAPIASQTTGTAMGAGWIWDIALQSRRGVGYVYASGCESEEDARAELASYLRRVSPPSGANAEDARLIRFSSAYRETPWVRNVVAVGMAQGFVEPLEASAIVMVELSARMISDTLPARRTMMQRAAERFNARFAYRWERIVDFLKLHYALSRRAEDYWRAHAERETWPARLAGLLEQWRFDPPSREDFTDALEIFPAASYAFVLYGMGFETARRPLRRRKDDPRRVARHLSEIAARGEKFLGGLPSNRELIDHALTNGLMRV

SEQ ID NO: 85703 - protein, 496 aa, unidentified
  source 1..496: note = Amphiplicatus metriothermophilus
  REGION 1..496: note = tr|A0A239PWU9|A0A239PWU9_9PROT Tryptophan halogenase; OS = Amphiplicatus metriothermophilus OX=1519374; GN = SAMN06297382_2215 PE=4 SV=1
MEGQAVKRVVIAGGGTAGWVAAAGLVSQLGPLLDIALVESEDIGTVGVGEATIPTFRGYHGLLGVDEREFMRATQATFKLGIAFENWARRGDRYIHSFGRIGKSTWMGDFHHYWLQAKAEGYGGAIGEYCFEHQAAEANRFFASEKSPINYAYHLDAGLYARFLRAFSEPKGVRRIEGKIVGVDQDGESGFIRALIMESGERIEGDLFIDCTGFRGLLIEQTLKAGYEDWRRWLATDSALAVQTASTGDIPPYTRAIARQAGWQWRIPLRHRVGNGLVYCSEHLADEDAHAELLGHLEGALLTEPKLIRYRTGRRRKVWEKNCIALGLAGGFVEPLESTSIHLIMIGVTRLIQLFPFGGVNDALAKRYNDQARNELEKIRDFIILHYKLTERDDAPFWRRCREMAIPDSLAQRIALFRENAFAWQDPDELFRVDSWVQVMLGQRLEPRGRHHMGRLLEGERLRRALDSLRRNIADAVAKLPSHQAFLESYCAPAGD

SEQ ID NO: 85704 - protein, 508 aa, unidentified
  source 1..508: note = Xanthomonadales bacterium
  REGION 1..508: note = tr|A0A259R157|A0A259R157_9GAMM Tryptophan halogenase; OS = Xanthomonadales bacterium 14-68-21 OX=1970612; GN = B7X39_09990 PE=4 SV=1
MSDSRIRNIVIVGGGTAGWMAAAAFAKVLGPDIAIRLVESEQIGTVGVGEATVPHLKLFNNLLGIDEIEFVRRVQGTFKLGIQFNDWGQLGESYIHGFGELGTLLGLLPFHQYWIRAAQLGLAGDLGDYSLNTLAAPRGRFMAAASDAPANSPLANIAYAYHFDSGLYAKLLREYAEARGVRRTEGRIAQVRQRPEDGFVESVVLESGETVAGELFIDCSGFRGLLIEQTLHAGYDDWTHWLPCDRALAVGCETVGPPTPYTRSTARPAGWQWRIPLQHRTGNGYVYASAHVSDDEAAATLLAHLDGRPLGDPRPLRFTTGLRRKVWDRNVVALGLASGFMEPLESTSIFLIQSGISRLLNLFPRQGFSPVLTERYNAQTRFECERIRDFLILHYHATQRTDTPFWDQCRTMDIPASLKDNIALFRDSGRFFREGEEMFALVSWVQVMIGQGIVPTGYHPLVDQLSPRELQAFMQHVQRVIADCVQAMPPHEGFIARYCTSPGTPMPA

SEQ ID NO: 85705 - protein, 507 aa, Duganella sp.
  REGION 1..507: note = tr|A0A3E1RLX4|A0A3E1RLX4_9BURK Tryptophan 7-halogenase OS=Duganella sp. BJB475 OX=2233914; GN = D0T23_23640 PE=4 SV=1
MVRRIVIVGGGSAGWLTAGLIAADHQGSSLHVTLIESPDIAPIGVGEGTWPSMRDTLRRIGVSEADFFRECDASFKQGSRFNCWVNGSDHDYYFHPFVLPQGYGEVNLPEQWQAQHPNIPFADLVSYQPHLCVNGRAPKQVVTPEFSSVANYGYHLDAGKFGAFLRKHCLEKLGVHYVPDNVVGIANHDNGDIAALQTQTHGALEGDLFIDCTGMQSLLLGKHYEVPFLSQKHVLYNDSALAVQIPYPDDNYPIASQTSSTAQSAGWIWDIGLPTRRGIGHVYSSAHIGDEQAEAELRRYIAATGGPQDIPQPRKLSFNPGYRERFWHRNCVAIGLSAGFIEPLEASALALVEMSAAMVSDELPATRAAMDIVAQRFNDAFSYRWERVIDFLKLHYVLSQRRDSDYWRDNTAAIPDRLNDLLTLWRHRAPSRNDFNRIEEVFPSASYQYVLYGMGFRSEFMNPQPRQAALADGYFREAAALTHKMLGALPDNRELINHIKRHGLQKI

SEQ ID NO: 85706 - protein, 530 aa, Sphingomonas aerolata
  REGION 1..530: note = tr|A0A2T4YP31|A0A2T4YP31_9SPHN Tryptophan halogenase; OS = Sphingomonas aerolata OX=185951 GN=C8J24_3372 PE=4 SV=1
MTGRTPGPASARGPLRSIVIVGGGTAGWMAATLLARRLERQPVKITVIDSSAIGTVGVGEATVPGIRDFFREIGVTEQEVMAATQGTVKLGIEFVDWKREGERFFHPFGLYGMRSRGVAFHHYWRKMNVAGHASPLADFCLATALAERNLFMPPTDRPVHDLLFFDWAVHFDAGLFARFLAQKAIAWGVEHIDATITDVRVDGRTGFISGVDTSCGKAIDGDLFVDCSGFRSLLLGGALGVPYEDWTNLLPCDRAVAMPCTRSGPLTPYTRSTALEAGWQWRIPLQHRVGNGYVYSSRHISDDEAVATLKRRLEGEGLGEPNMIRFRTGRRTAFWQGNCVALGLAAGFMEPLESTSITLIQTGIEKLLALLPDRGFDPALAEEYNRTTGLEYERIRDFLLLHYFANVRRGEPMWDRCRDTALPEALAHKLRLFKARGHLVRYEWESFQDPSWLSMYAGFGIDAAAHDPGADHFSIPALESAFARMKESIAQAVALAQPHDAFLGLSARHPARAQAAEPGGAPDRLMMPAR

SEQ ID NO: 85707 - protein, 523 aa, Duganella sp.
  REGION 1..523: note = tr|A0A3E1RNW5|A0A3E1RNW5_9BURK Tryptophan 7-halogenase OS=Duganella sp. BJB475 OX=2233914; GN = D0T23_20565 PE=4 SV=1
MKTMPAPVKNVLIVGGGTAGWLTAAFLARTLGAGADEDSVRITLVESKEIGIIGVGEGTFPSIRGTLAAIGIDEARFIRECHATFKQGIKFTDWVRPPGAPGNDHYFHPFSLPSQRPGGPELLPYWLQGAAAPGTGFAAAATMQKRVADAAHGPKRFNDADFMGPLNYAYHFDAGKFATLLSTHAQSLGVHHVQATVDRVELDEHGAIGAVHTREAGVLTADLYIDCTGFRAALIGDALGTPFRNINDTLFVDRALAMQVPYETADTPIPSYTIATAHEAGWTWDIGLHQRRGIGYVYSSRHTEDTRAEEVLRQYIGPASDGLNPRQLKLNVGYREQHWVKNCVAVGLSGGFLEPLESSGIGLIETAAYLVSYLFPHNGDLAPVAKVYNEMMKARYERIVDFVKLHYCLTQRRDNAFWTDNTDPASIPESLRDKLSMWSRRAPHRMDFVVDLEMYPPSSWQYVLYGMEYPTAQYANARTLPRFDEARKEFQMIEQMSHRALADLPTHRALIDHFLQRGERKIA

SEQ ID NO: 85708 - protein, 489 aa, Pelomonas sp.
  REGION 1..489: note = tr|A0A0Q6SZN9|A0A0Q6SZN9_9BURK Uncharacterized protein OS=Pelomonas sp. Root1217 OX=1736430; GN = ASC95_25235 PE=4 SV=1
MTSPKHIAIVGGGTAGWMTANLLRHRWATLNVEVTLIESADIATIGVGEGSTPFLRHFFRTLGIEERDWMPACDATFKSSIRFPGWSSVAGYESYVHPFFCEADRQLGNQFFTNACLRRRGQAADANPQDFFLAAELARQRRAPVGTDYAYHFDAGKLGAFLRSHAVGLGVRHVVDTVARVEQHENGDIAALHLRSGARIDADLFVDCSGFKGLLITETLGEPFHTYRDNLFNDRAIAIPTPLVDGEDIPCETVSTALRHGWAWQIPLTTRYGNGYVYSSDFVSDDEAERELREHLGAAAEGASARRLRMRVGCVKRHWRQNCVAIGLSQGFIEPLEATALMLIQLSVEQFIAALESGDFERHHQDTFNHRVSEMFEGVRDYVVAHYQLNTRRDTDYWRTNRANRNISARLASLLDIWDRGGDFEVELERHGAGLMYLRPSWYCLFAGMGRFPAELRATPQAVTAAVARQSLARMVREFRSHRRYLAGE

SEQ ID NO: 85709 - protein, 121 aa, Rubellimicrobium mesophilum
  REGION 1..121: note = tr|A0A017HVB6|A0A017HVB6_9RHOB Tryptophan halogenase; OS = Rubellimicrobium mesophilum DSM 19309 OX=442562; GN = Rumeso_00400 PE=4 SV=1
MRLHYVSERRDTAYWRDVTASHPPVVTERLEKWSRKFPSREDFEPFPLGLAHVQEQLYVPVLNGLGLLSQDLARAEMARDPKLRQRARETHASLVAEYSRAAEKCLPHRAWLESLHKETVA

SEQ ID NO: 85710 - protein, 514 aa, Pelomonas sp.
  REGION 1..514: note = tr|A0A0Q6T3J7|A0A0Q6T3J7_9BURK Tryptophan halogenase; OS = Pelomonas sp. Root1217 OX=1736430 GN=ASC95_24805 PE=4; SV = 1
MNTSTKPPRRVVIAGGGTAGWMMAALMSKLLGKQLDIKLVESEEIGTVGVGEATIPALHTYHNLLGINEAEFMAATNATFKLGINFEGWKDIGQDYFHSFGTTGNDHWSAGFQHFWLKGRAEGIAKTYTDYNPETVAAFANRFAHVPRNGLNYAYHLDAGRYAKYLRAMSETCGVQRIEGKIAAVLMDSPEGRDGDITALQMQDGTRIDGDLFIDCTGFRSLLLGEALGVGYEDWSHWLPCDSAVAVQTASVREAWPYTRSICHRFGWQWRIPLQNRVGNGLVYSSKELSDADAPEVLKNHVEGELLTTPRVIKFTPGQRHKVWHRNCIAVGLASGFIEPLESTSIHLIQRTAIRLMQLFPTQGVNPADVDEFNAQCERELTHIRDFIVLHYHVTNRSDSALWNHVRTMEVPATLRHRIELFRESARAFRPSDELFAENSWIQVMMGQGITPQSYHPVADLMGPEELSRFLGDIHLKVSRTVAGLPQHQAYVEQLCAPYRNATTAQLAATPLRA

SEQ ID NO: 85711 - protein, 536 aa, Pelomonas sp.
  REGION 1..536: note = tr|A0A0Q6TBZ1|A0A0Q6TBZ1_9BURK Tryptophan halogenase; OS = Pelomonas sp. Root1217 OX=1736430 GN=ASC95_25355 PE=4; SV = 1
MNDQAIRRIVIVGGGSAGWMAAAPLSQVFGTLPGGPANPVGCEIVLIESPEIGTVGVGEATLPSIRYYNDALELDNAEFMRRTQASFKLGIEFKDWGHVGNRFFHGFGGFGPPIVNRSSVAHWLRLDRAGAMPSYEEWSTAAVMAQRNRFVPPEGGPPSAANSYSYAFHFDAGLYAAFLREYAMARGVKREEGTIVDVSLRPGDGFVTAVTLADGRRIEGDLFVDCSGFRALLIEGVMKAGYHDWTHWLPCDSAQAVPCSHASPHAAAAQLLPAEGDGQARGGPSPSRVPPLTPYTTSTARSAGWQWRIPLQHRTGNGHVYCSSYISDEAAGRVLMSNLDGAPQGEPRQLRFKTGMRKRIWEKNVVAVGLSSGFLEPLESTSLSLVIHGISSLVELFPDRKCEPHLVDEYNRRMTRQYESIRDFIILHYKQTQRDDSEFWRYCAAMPIPDTLAHQIETFRRNGRVVILDRDSFGEDSWYSLYLGLGLKPEGLDPLLKQVNEVTLREHFQRLHTAVARTVDGMPDHAAYLDRLVSAS

SEQ ID NO: 85712 - protein, 516 aa, Sphingomonas aerolata
  REGION 1..516: note = tr|A0A2T4YTC3|A0A2T4YTC3_9SPHN Tryptophan halogenase; OS = Sphingomonas aerolata OX=185951 GN=C8J24_0432 PE=4 SV=1
MRKRILIVGGGTAGWLTAGYLAKRLGADLAGGVSITLVESKDIGILGVGEGTFPTIRRTLATIGIDEAELIRRCGATFKQGAKFVHWRHAPGQGRTDHYSHPFQVADASDGLDLLPYWLLGHGGAENWDEVSNPQKKAADAMRAPKLATNPDYVGPLNYAFHFDAVALAGLLREHAVRNGVRHLTDTVSEVLLAEDGAIGGVRTERNGMLDADLYIDCTGFRAELIGKAMKVPFRSCRDVLFCNRAIAAQLPYAKPGDPIASYTISTAQESGWIWDIGLDRRRGIGHVYSSDHSDDETAERVLRGYLGAGGDKAEVRHFKFDAGYREVNWVKNCVAVGLSSGFFEPLEATGIAFAEVSAGMIANLFPWGGDYETSARQFNANMLRRYERALDFIKLHYCISERRDTAFWRDNVADTSIPDSLLELLDRWRFRPPNELDIDGQVDIFTDASWQYVLYGMGWKTDISAKAGALRYADDARRAFAEVRRQADYAIRNLPSNRDLVAYAQHHHFGARAAA

SEQ ID NO: 85713 - protein, 529 aa, Sphingomonas aerolata
  REGION 1..529: note = tr|A0A2T4YMJ5|A0A2T4YMJ5_9SPHN Tryptophan halogenase; OS = Sphingomonas aerolata OX=185951 GN=C8J24_2844 PE=4 SV=1
MTVSDMQTDGLDMDRAITSIVIVGGGTAGWLAACLIAARADRDAERPLQVTLIESPDVATIGVGEGTWPTMRRTLERIGISETEFLLACDAAFKQGSRFDGWRTGAPDDRYLHPFTTPADAAPRDLASAWSDSGLAFAEALCAQHAVCSQDLAPRQRAMPDYAGTLNYAYHLDAGKFAALLARHATERLGVRHLRDHVVGVDGAADGDITAVRTRASGRIEGDLFLDCTGHAALLIGEHYGVGTIDRGRELFNDRALAVQLPVAADSAIASQTNATAHAAGWIWDIGLPARRGIGCVYSSAHLDDDAAADTLTRYLRATAPDAPLPDFRPLRFQSRHRNRFWHRNCLAIGLSAGFLEPLEASAIVLVELSVDALLDNFPATRRTMDLHAARFNTLFRYRWDRIVEFLKLHYVLSQRDEPYWRDHRDPGSIPPRLAELLQLWADQPPSHADFPMVDEIFPAASYQYVLYGMGFPAPRRTPVRTGTRGAADMLVQQVDRHGRMLAAALPTNRAYLDALRHAMTSATMETRA

SEQ ID NO: 85714 - protein, 508 aa, Duganella sp.
  REGION 1..508: note = tr|A0A3E1RN21|A0A3E1RN21_9BURK Tryptophan 7-halogenase OS=Duganella sp. BJB475 OX=2233914; GN = D0T23_23655 PE=4 SV=1
MNPGTRDPNHRRPVHRVVIVGGGTAGWMAAAGIAKVLGKRLDIKLIESDEIGTVGVGEATIPTLMNFHNLLEINEQEFMAETQATFKLGISFEGWRNVKEDYIHSFGITGTDHWTAGFQHFWHKGVERGLAGDYGDYCLELKASLENRFAHLPDNGMNYAYHLDASRYAKYLRRLSEPRGVLRIEGKIVRYTKHEDNGDVRSVVLESGQEIEGDLFIDCTGFRGLLIGDAMQEPMEDWSQWLFCDRAIAVQTESVGDAVPLTRSMAHQAGWQWRIPLQHRVGNGIVYSSRHLDDDAAMQQLMSNIEGKALVTPRVIQFKPCQRKHTWKGNVVAVGLASGFLEPIESTSIHLIQRAVVRLMQTFPTDGISQADIDEYNKQCNDEIEHIRDFIILHYHVNNRTDSQFWIAAREMSIPASLQHRINLFRETGRVFRVPNELFAENSWIQVMLGQGIMPRSHHQTADLMGDAELKHFLGGIKSRVDRIVVQLPTHQAYVERYCGRAESAKAA

SEQ ID NO: 85715 - protein, 494 aa, Pelomonas sp.
  REGION 1..494: note = tr|A0A0Q6T2I0|A0A0Q6T2I0_9BURK Uncharacterized protein OS=Pelomonas sp. Root1217 OX=1736430; GN = ASC95_18315 PE=4 SV=1
MSAMSQKFDRIVVVGGGSAGWMTAAALVTGLKGRAIVEVVESEEIGIVGVGEATFPSIRDYNQLIGIDERDFLRATNGAYKLGARFRDWLEPGKDYFHTFGEFGNLTGAQTLWAQHRRMGQTEPLGLQCLPTVMAMNGRFGLQEDGREEFKYAYHFDAIQYGALLRKLAMQRGARHTQGRIVEVLRRPDGGVAALQLDDGRRIEGDLFVDCSGFRSLLLGGALSEPFVDFSHWLPVDRAWACPCERTGEELTPYTQATALEGGWAWRIPLQNRTGHGHVFSSRFIDEDRAREQLLARLDGKPLVEPRLLRFTTGHHERFWVHNVVAIGLSAGFLEPLESTSIFLIQDGIFRLMSSLTAGRPLDASDPARFNELVMRRFTRVRDFIILHYHLTRRRDSELWRYVAAMELPETLTFRMDLWRRFGVLHEYDEDPFYAPSWLAIYAGMDYWPERHDPVCEEIPGERAGRALRSRQQAIAASVERMPLHHLTLQKMLG

SEQ ID NO: 85716 - protein, 518 aa, Pelomonas sp.
  REGION 1..518: note = tr|A0A0Q6TJI2|A0A0Q6TJI2_9BURK Uncharacterized protein OS=Pelomonas sp. Root1217 OX=1736430; GN = ASC95_10720 PE=4 SV=1
MSDIQSIVIVGGGTAGWLAACFLQRALGAVRQTPLPITLIESPHIAGIGVGEATLPTLRGMMQALGLPEAALFGAADATLNNGVRFHGWRSGGSAADDSYDHPFDAPPPFGGFATTAHWLNLMQRGLTQQPMAQACTVQTTLFDGHQSPKLMDSPDYQAPVSYGYHLDAAKLAMLLQQTALRRGVRHVQGEVAQVQRGAAGIEAVELADGRRFSASFFVDCSGADSLLLQQALGVPWVSYADWLPCDRSVTLPVAYTQADQPLRSHTAITAQDSGWSWEIDLQSRRGTGHVYASRFCSDDAALQRLQQLNAGHRPLAAPHFTSLRIGHAARIWEGNCLALGAAGGFVEPLESTNLYLVEWALQMFVDHVAPSGNSMACRDRLNRLAGDFHEELRDFIVAHYALSQRRDTAFWRACTDEAALPPRLVELLALWDAKVPTATDLDRRLSPFGPSNWSYLLAGLHRLPSQGIGLAAHISAEVSQQALAHVRDIRRAASEQSPTMQDYLRSQRGAAPQATAH

SEQ ID NO: 85717 - protein, 503 aa, unidentified
  source 1..503: note = Xanthomonadales bacterium
  REGION 1..503: note = tr|A0A259QX53|A0A259QX53_9GAMM Tryptophan halogenase; OS = Xanthomonadales bacterium 14-68-21 OX=1970612; GN = B7X39_12515 PE=4 SV=1
MQANPIQRVVIVGGGTAGWMTAALLARAIGPQLSITLVESDEIGTVGVGEATIPQIRHVNAFLGIDEDELMRAVKGTFKLAIQFNDWGRIGDSYLHAFGDIGLPLGLVPFQHYWLRDRHERGGAAPDLWSYSINAQACAQMRFGRVERIGSSPMTGTRYAYHLDAGLYGQYLRRRCDPRQVRRVEGRIVDVRLRADDGFIESVQLASGEIVEGDLFVDCSGFRGLLIEGALKAGYDDWTHWLPCDRAVAVPSARVAPMRPFTQSTARAAGWQWRIPLQHRNGNGHVFCSRFISDDEATATLLANLDGEALAEPRMLRFTTGARRRFWIRNCVALGLASGFMEPLESTSIHMIQSGISRLISLFPDKHCDSALSAEYNRQTRFEYERIRDFLVLHYRATERDDTAFWRHCRSIVMPEGLAERTELFRRSGQVFRHGEELFTEVGWLQVMLGQGIVPQAYHPAADALPPAELEGFLGNMRTLIQRAVATFPEHGQFVATHCRATD

SEQ ID NO: 85718 - protein, 496 aa, unidentified
  source 1..496: note = Paraglaciecola polaris
  REGION 1..496: note = tr|K7A931|K7A931_9ALTE FADH2 O2-dependent halogenase I OS=Paraglaciecola polaris LMG 21857 OX=1129793 GN=prnA; PE = 4 SV=1
MKNLIKKVVIVGGGTAGWMSAALLQKVVGPSITIELVESEEIGSVGVGEATIPPIRHVNQVLGIDEAEFLRETKATIKLGIQFENWRVQNEHYFHSFGAAGKSFAFCQFHHFWKRGQQLGIDTSLWEYDLNYLCAREGKFAQIKSKDAILELPYAYHFDASLYAVYLRKYCEKLGVKRTEGKVEQISLNKDSGFVESLILQDGGTITGDLFIDCSGFKGLLIQEKLGTGYDDWSHWLPCDRALAVPSERFDKTLPYTRSIAHSAGWQWRIPLQHRNGNGLVYSSSHSTDEQAHATLLSNLDSKALGEPKMLRFKTGRRRKQWDRNVVAIGLSSGFLEPLESTSIHLIQSAIVRLIHLFPHKGIDDSAVKEYNMQSKLEFEQIRDFLILHYHVNERTDSDFWRDMRTMDIPDSLAHKIQLFAQNGKLFREQNDLFLESSWLQVMLGQGIIPKDYHPIANNLPEHKLREMLTNIKNIKHEPLSSLPSHDEFLQQFCKV

SEQ ID NO: 85719 - protein, 507 aa, Pelomonas sp.
  REGION 1..507: note = tr|A0A0Q6TKG8|A0A0Q6TKG8_9BURK Tryptophan halogenase; OS = Pelomonas sp. Root1217 OX=1736430 GN=ASC95_29595 PE=4; SV = 1
MSDPSIRKIVIVGGGTAGWMAAAPLAQRFAQAGQGACEIVLIESPDIGTIGVGEATLPPIRAYNQTLGLDGAEFVKRTQGSFKLGIEFRDWGHVGNRFFHGFGDFGPAIDTRAPWQHWLSLQRQVDGLPSYEDWSTPTVMARRNRFTPPEGGAPSAANAYSFAYHFDAGLYAACLREYAMARGAQRIEGLIVNVELRPDDGFVAAVKLEDGRRIDGDLFIDCSGFRALLIGGAMQSPFEDWSALLPCNSAQAVPSERVEPLTPYTMSTAKAAGWQWRIPLQHRTGNGHVYCSHFISDDEAASTLLAGLDSKALDAPRQLRFTTGRRKQGWVKNVVAIGLASGFLEPLESTSIQLIMDGVGRLIQFFPDQQFKPHLAAEFNRRMALQYESIRDFIVLHYKLTDRRDAELWRYCAAMPIPDTLAHQIELFRSAGRVAILDPDGFAEPSWVSLFFGLGLRPESYDPFVDHIDAQALLQHFVRLRQAITQTVSGMPEHGDYVARHVKAPSA

SEQ ID NO: 85720 - protein, 520 aa, Novosphingobium sp.
  REGION 1..520: note = tr|A0A3N9RX80|A0A3N9RX80_9SPHN Tryptophan 7-halogenase OS=Novosphingobium sp. LASN5T OX=2491021; GN = EH199_08715 PE=4 SV=1
MVRAVRDVVIVGGGTAGWLTAAIIAAKHRPRIGHDFSVTLVESPNVPIIGVGEGTWPTLRSTLKSVGISETDFFRQCDAAFKQGALFAKWTTGADDDAYYHPLVLPQRFGQLNLAPHWLAGTLVENEDADETFCDAVCPQGRICDENLAPKTMADAEFEGQANYAYHLDAGKFAPFMQRHCTEKLGVRHVLADMRQVLQDESGDIRAIVTEQAGEIAGDLFVDCTGMRSLLLGETMGVGFKDCNDVLFCDTALAVQVPYPDPDAPIATHTISTAQSAGWIWDIGLPTRRGVGHVYSSRHISREQAEAELRAYIGPAADGLAVRKIDIRSGHRELFWKGNCVAVGLAAGFLEPLEASAIVLIELSAKMIAEQMPPAREVMDIVARRYNEKTLYRWGRIIDFLKLHYVLSQRRDTAFWRDNMDPATIPERLRELLALWRWQPPYLHEEFDRVDEVFPSASYQYVLYGMGFRSEVSARALEPEVRDARRARGQNADITTRMLTALPRHRDLINRIVEYGLQPV

SEQ ID NO: 85721 - protein, 500 aa, Sphingomonas aerolata
  REGION 1..500: note = tr|A0A2T4YTT5|A0A2T4YTT5_9SPHN Tryptophan halogenase; OS = Sphingomonas aerolata OX=185951 GN=C8J24_0607 PE=4 SV=1
MTGTLGSVVIVGGGTAGWMAAVAFGRLLGPAGTRVTLVESDDIATIGVGEATIPPIRTFHAMLGIDEDAFLRATGGSYKLGIRFEGWTRPGESYVHPFGQIGTDIAGVPFAAQWLRARQAGAADALGAYSLEARAAQAGRFSRPIANGDSPLSRIGYAYHFDAGRYAVFLRAQAEAHGVIRREGRVDRVERGPAGIAAVHLADGSRVEGDLFLDCTGFRALLIEGALQAGWTDWSQWLPCDRAVAVPSAADAAPLALTRAIAEPAGWRWRIPLQHRTGNGHVFSSRHCSEDEATATLLAGLHGEALADPRVIRFATGHRTRFWSGNCIALGLAAGFMEPLESTSIHLVQSGLQHLLRMLPAGGPPAQAIVDRYNRTMTGEFVRIRDFLVAHYHLNARTEPFWRERAAAPIPDGLAEKLALFRAGGRIFRETDELFNEVSWLAVLTGQDAPVTGHDPICDALPIAIAAKRLAQIERVVSTSLTHMPPHATALAQLATNRML

SEQ ID NO: 85722 - protein, 520 aa, Pelomonas sp.
  REGION 1..520: note = tr|A0A0Q6T3T4|A0A0Q6T3T4_9BURK Tryptophan halogenase; OS = Pelomonas sp. Root1217 OX=1736430 GN=ASC95_21955 PE=4; SV = 1
MSSEVTTAVRRIVVLGGGSAGWLTAATLAAELGGDGPDALQITLIESPDVPSIGVGEGTWPTMRATLHRIGLSEVDLIRECDAAFKQGSRFDGWLHGGDGDRYYHPFTLPHGWGDVELAGAWLQGGREQPFAESVGGQPPVCDAHLAPKQTTTPDFGGVMNYGYHFDAVKLGHLLQRHATTKLGVRHVVDHFTTVRSHENGDIAALTTRGHGDIEGDLFIDCSGLASLLLGQHYGVGLRSEKGVLFNDRALAVQVPHADAQVPLASATVSTAHAEGWTWDIALPTRRGVGLVYSSSHTDDAAAERALLGHLQRKGLSLGDMAPRRLGFSPGYREQFWHRNCVAVGLSAGFIEPLEASALALVELSAAFIRDEMPAGRADMALVAKRFNEAFAYRWSRIIDFLKLHYVLSRRDDADYWREHRAPATQPDSLRELLQLWRHRAPSRNDFYRVEEVFPAASYQYVLYGMQFEPEARALRADRLAAAQACMKDVATITRRLLGGLPRHRDLIQHIREHGMPPAA

SEQ ID NO: 85723 - protein, 510 aa, Pelomonas sp.
  REGION 1..510: note = tr|A0A0Q6TG35|A0A0Q6TG35_9BURK Tryptophan halogenase; OS = Pelomonas sp. Root1217 OX=1736430 GN=ASC95_09475 PE=4; SV = 1
MTSKRRILIVGGGTAGWLTAAYLAKALKLAERSHLEVTVLESPDISSVGVGEGTFPTIRNTLQFLGIDEARFIRETSATLKQGIRFVDWARPPAAGQHQQFFHPFEAPFYTEDLNLVPYWLLQPEAGRPPFAEAMTLQVRVAEAHRAPKRAGEAAYAAPLNYAYHFDAIKLAKLLAERARELGVRHVQGTVTDVSLDATGCIAHLDTVQQERFEAELYIDCTGFRAELIGRAMGSPFKSVRHQLFVDRALACKVPLDAHATMESSTIATAHEAGWLWEIGLNGARGIGCVYSSDHLSDDRAADILRAYCGAGHEDLGMRSIPFTPGYREQQWVKNCVAVGLSAGFLEPLEATGLVLIEAAVGMIAEMLPHSGPIHAPARRFNELMTARFENIINFLKLHYCLSQRQEPFWRDNAAPASIPDRLAGLLEEWRLRPPGRFDFLLDTETFAFFNYQYILYGMGFATDLSAGRSDFPQVEEAGKLFAKIQRFADRAIADLPSHRALIQQINAGR

SEQ ID NO: 85724 - protein, 509 aa, Pelomonas sp.
  REGION 1..509: note = tr|A0A0Q6T1J2|A0A0Q6T1J2_9BURK Tryptophan halogenase; OS = Pelomonas sp. Root1217 OX=1736430 GN=ASC95_25015 PE=4; SV = 1
MRNRPLQRIVIVGGGSAGWITAAPLARMLCRPDQPDQHCEVTLVESADIGTVGVGEATLPTIQFYNQLLGIDEADFVRRTRATFKLGIEFQDWGRIGNRFFHGFGGFGPAIHNRPLWAYWLRLQALGDQLPSYEEWSTATVMARQMRFVPPTPGEPAPSNAFNYAFHFDASLYGAYLREYALKHGAQRTEGTITRVETRPEDGFVTALHLSDGRRVEGDLFIDCSGFRALLIDGAMKSPYEDWSHWLPCDRALAVPCESAGPMTPYTRSTARTAGWQWRIPLQHRTGNGLVYCSGYLSDDEAQRTLLDNLDGKALDEPRQQRFVTGRRKQGWVKNVVAVGLSSGFLEPLESTSLHLIMDAVSRLTAMLPDQSFQPALADEFNRQMAYRYESVRDFIILHYKLGERRDSEFWRYCADMPIPDDLAHQIALFRKTGRVAVIEPEGFAEPSWASILLGLGVYPERYDPYIDLVDPQLIRRHLHSVHSSISRTVASMPSHADFLNRISAPPKA

SEQ ID NO: 85725 - protein, 498 aa, Pelomonas sp.
  REGION 1..498: note = tr|A0A0Q6TZN7|A0A0Q6TZN7_9BURK Uncharacterized protein OS=Pelomonas sp. Root1217 OX=1736430; GN = ASC95_28030 PE=4 SV=1
MSQSFNRIVIVGGGTAGWMTAAAIATGLKGRCTVEVVDSEEIGIIGVGEATFPSIRNYNRLVGIDEAEFLRATHGTYKLGIEFRDWRVQGERYFHTFGDFGETQGPHALWGQYRRLADPAFGELGEQCLPTVMAMQGRFVPPDDEGRAPYKYAYHFDATLYAGFLRRLAFGRGARRTDGRIVGVTRRADGGVHSLRLADGREIEGDLFIDCSGFGSLLLGKTLEEPFVDFSRWLPVDSAWACACERTGTALTPYTRATALEGGWAWRIPLQSRTGHGHVFSSRHIDADRAREQLLRQLDGKPLAEPRLLRFTTGHRERFWVHNVVALGLSSGFLEPLESTSIFLIQSGLGHLMGLLTSGQPISDGVVADYNARAVREFNRIRDFIILHYCLTARRDSALWRDMATMELPETLAFKIDAWRRLGLLHLQGDEGFDEHSWLAIHAGMQHWPERTDPVLQELPPDEARQSLQQRRHAIAESVARLPSHEAFLGQVLARGGT

SEQ ID NO: 85726 - protein, 505 aa, unidentified
  source 1..505: note = Planctomycetes bacterium
  REGION 1..505: note = tr|A0A5C5Z161|A0A5C5Z161_9BACT Tryptophan halogenase; OS = Planctomycetes bacterium CA13 OX=2527986 GN=CA13_25650; PE = 4 SV=1
MSSQSKVFDVIILGAGFAGSLLGTLLSKRGMSIAVVDRDKHPRFTIGESSTPAADFLLQHIVTQFGIEELQPLVRFGSWRKTHPEILCGCKRGFSYFDHGRSGGFEATSNHRDELLVAASVSNEVADTQWYRADVDQFFADVARKYGVTMMEQTEIESIRRAAPNDWRVNIQSEQGTSQLAAPMIVDATGSGRCLAKRLGIQDISDRFMTKSSAIYSHWENLTPLTDWLAARGAALNDYPYRAEDSAVHHLFRDGWLWHLQFANGRTSVGFVFDESESDRDVSIAQQTDWQGVLRDHPVINEWMSDANICAFPGKVFRTPRLQRLASVAAGEDWVAMPFTTGFIDPMHSTGIAHSLSGVERIAQILLNETNESRGDSLRHYSDTVLQEFETIDRLVWGCYVGLRDFRLFNAWSMIYFAVVTTYERLFSQSADRPTGFLGADQTDIRDRVGGLTDELRSIQASDRIKDHSVIESFIETIRMTIQPINQVGLFDPPIQNMYHRTAAK

SEQ ID NO: 85727 - protein, 505 aa, Duganella sp.
  REGION 1..505: note = tr|A0A3E1RWJ3|A0A3E1RWJ3_9BURK Tryptophan 7-halogenase OS=Duganella sp. BJB475 OX=2233914; GN = D0T23_00040 PE=4 SV=1
MTNNRIKRVVVVGGGSAGWMAAAALATYLGKQASVRLIESEEIGIVGVGEASVPHIRMFNSQMLGIDETEFVKRTQGTVKLGIEFKDWSRIGDSYIHGFGVIGRSLGPLPFHQFWLKLFQSGRAAAIGDYSVQTVMAPQGKFVPGDGNAPPNSPLADIAYAYHFDASLYARFLRELSEQRGVQRIEGKIVGVNQRADDGYVESVTMENGEVVEGELFIDCSGFRGLLIEQTLKTGYVDWTHWLPCDRAMAVPSERVDSITPYTRATAREAGWQWRIPLQHRTGNGYVYSSRYLGDDEAAATLLANLDSKALGEPRPLRFTPGMRKKFWNKNVVALGLASGFLEPLESTSIYMVQSGISRLLALFPGRDFNPLLAERFNRESAFEYERVRDFLILHYHATERNDTPFWDYCRTMSVPDSLQEAMELFRSDGRYFRNGEDFFALPSWVQVMLGQRIMPQSYHPIVDDMPEEKLVQYVEGMRATLAQAVAAMPTHGEWINRYWKAATP

SEQ ID NO: 85728 - protein, 534 aa, Glycomyces sp.
  REGION 1..534: note = tr|A0A426V0U3|A0A426V0U3_9ACTN Tryptophan 7-halogenase OS=Glycomyces sp. YIM 121974 OX=2493553; GN = EIW28_08130 PE=4 SV=1
MDTSPTDHRIRNVVVLGGGTAGWMTASYVAKAFQGTVNVTVLEAPAVPRIGVGEATVPNLHKAFFSFLGIEEDEWMRECNASFKMAVKFVNWRTEGEGEPVSRTHRGRPDHFYHTFGILPAHDQLPLSHYWFADRAAGRTDEQFDYACYREPAAMDAKLAPRDRDGNRWTNYAWHFDAQLVADFLCRFSVKSLGVTHVQDRFTEAVRDERGFVTALKTESGRVLEGDLFVDCSGFRGLLINQTMREPFLDMSDYLLCDSAVAAAVPHDDEAEGIEPYTSAIAMKSGWTWKIPMLGRFGSGYVFSSRFTDRDTASEDFCRLWGLDPDNTALNQISFRVGRNRRAWVKNVVSVGLASCFLEPLESTGIYFIYAAIFQLVKHFPDKRFDPVLAKRFNAEIETMFDDSRDFIQAHFKFAPRNDTPFWRENKNLVLDAGMQEKVDMYRAGMPVNMPVADESTYYGNFEAEFRNYWTNGSFYCIFSGLDLVPDHVYPTQALRPDAAAGAREVFAGIAAERDRLLETLPTAYEYLRGLHGK

SEQ ID NO: 85729 - protein, 511 aa, Pelomonas sp.
  REGION 1..511: note = tr|A0A0Q6T9L8|A0A0Q6T9L8_9BURK Tryptophan halogenase; OS = Pelomonas sp. Root1217 OX=1736430 GN=ASC95_24790 PE=4; SV = 1
MNDRLREVLVLGGGSAGWLVAGLLAAEHAELKITLIESSDVPTIGVGEGTWPSMRDTLRRIGLSEPEFIRRCQVSFKQGSRFDGWARGAAGSEGDRYYHPFMLPVGYGDVDLASAWLALPGERRPFADVVSPSVQVCEAGRAPKQVQTPDFAAVANYAYHFDAGLFGQLLREHAVAKLGVHHVIDHVEAIVSHQNGDIAALQTREHGELKADLFIDCSGLASRLIGQHFGVALKSERDVLFNDAALPVQVPYATPDAPLAPVTIATAWAKGWIWDIALPARRGVGCVYSRAHASDDEAHAALQAYLDATGAPAERPTPRSIRFDPGYRERFWVRNCVAIGLSAGFIEPLEASALALVELSAQRLCDELPMTRASMDAVARRFNDDFSYRWARVIDFLKLHYALSTRDDSDYWRAHRAPATWPQRLRELLPQWQLRAPARHDFGRIDEVFPSASYQYVLYGMGFRPDTQPLSTTKLKAAQAAFDEAARQARRLVPGLPGHRSLIDHIRKAET

SEQ ID NO: 85730 - protein, 530 aa, Xanthomonas translucens
  REGION 1..530: note = tr|A0A1C3TQJ8|A0A1C3TQJ8_XANCT Uncharacterized protein OS=Xanthomonas translucens pv. translucens DSM 18974 OX=1261556 GN=BN444_02972 PE=4 SV=1
MGRAAATAARECRDAHASTLGRAAPPVATHVNAGEPLRHIAIVGGGTAGWMAAAALVRVLGAGATRITLVESEAIGTVGVGEATIPPIALFNALLGIDENAFLRATQGSFKLGIEFVDWLQPGQRYFHPFGAYGVDFGTVPFDGLWQRMHRAGRAAPLAAYSLNTLAAMRGRFLRPQQGDALLSRLGYAFHFDAALYARLLREYAEGRGVMRLEGKVEQVLRRSPDGDIASIVLACGTRIDADFFIDCSGFRGLLIEDAPGAGFVDWSHWLFNDRAVAVPSARASAFTPYTRSTAREAGWQWRIPLQHRTGNGYVYSSAHLSDDAAAATLLANLDKEALAEPRTLRFRTGRRAVFWSGNCLALGLAAGFLEPLESTSIHLIQAGIARFLEMLPDRAGNPAAIRRYNRLMAQEFDSIRDFIILHFHATARPGAYWERARTMPIPDSLAERLQIFAHSGRVLREADELFSKTSWLAVMQGQGLSARGFDPLAAAMPDAEAAARLQRVAAAAAMAVERMPAHADFIRAHCAAT

SEQ ID NO: 85731 - protein, 510 aa, Streptomyces rimosus
  REGION 1..510: note = tr|A0A0M9XKR3|A0A0M9XKR3_STRRM Tryptophan halogenase; OS = Streptomyces rimosus subsp. pseudoverticillatus; OX = 1464079 GN=ADK70_26550 PE=4 SV=1
MGERAVANSANAGNPANPETYDVVIVGGGPAGSTLGALVARQGHRVLILEKEFFPRYQIGESLLPSTVHGVCRLTGVADDLAAAGFTRKRGGTFRWGATPEPWTFSFSVSEHMAGPTSYAYQVERSKFDEILLRHAGRCGAEVREGCAAADVIADEERVRGVRYTDADGAEREAYGTFVIDASGNKSRLFQRVGGQRTYSEFFRSLALFGYFEGGKRLPEPNSGNILSVAFDSGWFWYIPLSPTLTSVGAVVRREMAEKIQGDQEEALRALIAECPLISEYLANARRVTTGQYGQLRVRKDYSYHQTTFSRPGMLLVGDAACFVDPVFSSGVHLATYSGLLAARSINSVLAGLVDEAVALREFEARYRREYSVFYEFLLSFYEMHHSEQSYFWRAKKVTHHKRSEMEAFVDLVGGVSSGETALTDADAMAERLRADSAEFAGAVDQLAHSEDGSMLPLFKSSVVSQVTREGSQVQMRALLGADAEPETPLLPGGLVSSPDGMFWLPASSG

SEQ ID NO: 85732 - protein, 505 aa, Sphingomonas sp.
  REGION 1..505: note = tr|A0A1Q4E5J9|A0A1Q4E5J9_9SPHN Tryptophan halogenase; OS = Sphingomonas sp. 67-41 OX=1895850 GN=BGP17_12925 PE=4; SV = 1
MTAPAPIRRIVIVGGGTAGWMAAAALARLIPAGVSVTLVESEEIGTVGVGEATIPPIRNFNALLGLDERDFLSRTQGTIKLGIAFVDWTREGHRYVHPFGEFGFDVEGVKFHQIWRKLHAEGRAREIDAYNVCALAMAAGRYQPPVADPGSILSRMAYAYQFDASLYAKYLRAHAERRGVVRVEGKVAQVPLRAGDGFIEAVVLEGDRRVEGELFLDCTGFRALLIEQALGAGWESWAHWLQCDRAVAVPSASPGPEITPFTRSTAHRAGWQWRIPLQHRVGNGHVYCSADISDDAACETLLANLDGAPLRDPFLLRFEAGRRKRAWHRNCVALGLSSGFLEPLESTSIHLIQSGIHRLMALLPDSGFSPVERDEYNRLTDAQMEQVRDFVILHYHANERRDGDLWRRVREMAIPETLRRKLDLFRGRGRFFRHEDELFAESSWIAVLLGQGVIPAGWDPLADGLDENKLATSFERIHEMFARAARAMPRHEEWLARNAPAGTTA

SEQ ID NO: 85733 - protein, 505 aa, Pelomonas sp.
  REGION 1..505: note = tr|A0A0Q6U085|A0A0Q6U085_9BURK Tryptophan halogenase; OS = Pelomonas sp. Root1217 OX=1736430 GN=ASC95_27775 PE=4; SV = 1
MRSRSLRRVVIVGGGSAGWITAAPLARMLCRPGEPDHCEVMLVESDEIGTVGVGEATLPTIRFYNQLLGIDEADFVRATQASFKLGIEFKDWGRLGARFFHGFGGFGPPIHNRPLWSYWLRLREREPGIESYEDWSTATVMARALRFTPPQPGEPSPANAFDYAYHFDAALYGRYLRDHAVRHGAQRIVGTIVSVKTSEQSGFAEALHLSDGRCVEGDLFIDCSGFRALLIDGAMKSPYEDWSHWLPCDRALAVPCERTDPMTPYTTSTARSAGWQWRIPLQHRTGNGLVYCSSHLSDDEAAQTLLANLDGKPLDDPRPQRFTTGRRRLAWTKNVVAIGLSAGFLEPLESTSIQFIMDSVGRLTALLPDRDFAPSLADEFNRQMAYRYESARDFIILHYKLGERRDSEFWRYCADMSIPDVLAHQIELFRDTGRVAIIDPEGFAEPSWASLMLGLGILPRRRDPYVDLVDLDSVKRHLSTVRSVIHRTTQAMPLHAEFLARIASR

SEQ ID NO: 85734 - protein, 510 aa, Pelomonas sp.
  REGION 1..510: note = tr|A0A0Q6U4Y9|A0A0Q6U4Y9_9BURK Tryptophan halogenase; OS = Pelomonas sp. Root1217 OX=1736430 GN=ASC95_28850 PE=4; SV = 1
MKHVCVVGGGSAGWMTALMLATTAYGPRLKVTVLESPQVGIIGVGEGSTPWLRRFFEILGIEESEWMPACNATYKSGITFDGWSTKPGFERYFHPFVSMLDNMTMHPFVDNVHARLDGADVHAHPDRFFLSAALARQARGPRAKDNFPFDVWYGYHFDATLLGQFLGRKAVQRGVTHLQRHVTQVQLNERGDIGGLQLDDGEILTADFFVDCSGFSSLMIGKALQTPFVGFGENLFNDAAVAMPTPLEGPIESQTVSTALRHGWAWKIPLTQRQGNGYVYSSAHCSADEAETELRRHLGLLDADTPARHLKMRVGRMAKVWNRNCVAIGLSQGFIEPLEATALLFVQVTASMLVEVLEKGDLGSSAQEQFNAAMHKRFDNTRDYIVAHYKTNSRTDTDYWRENAENMHLSDSLQGVLMTWMSRKPLVAALKTGRFGGGYPAVSWYALLAGMGIFPDVEDLQVPTAHQARHRLEAVDDFIARSATNFPDHRELLADIPPGVGDKALQIYTW

SEQ ID NO: 85735 - protein, 498 aa, unidentified
  source 1..498: note = Xanthomonadales bacterium
  REGION 1..498: note = tr|A0A259R511|A0A259R511_9GAMM Tryptophan halogenase; OS = Xanthomonadales bacterium 14-68-21 OX=1970612; GN = B7X39_01165 PE=4 SV=1
MQRNRVRRVVIAGGGTAGWMAAAALSRTLGKYVDITLVESDDIGTVGVGEATIPTLLTFHRLIDINEQEFMAASHATIKLGIQFENWRQVGHKYFHSFGTTGRDHWSAGFQHFWLKGRERGLAGEYGEYCLELSAAMQGRFSHLPNNGINYAYHIDSTRYAQFLRRFSERYGLRRVEGVISDVAMAENGDIQALVLNDGTRIEGDLFIDCTGFRALLIGKALGVEYEDWSHLLLADSAYAVQTESVRDAIPYTRSIAGDACWQWRIPLQHRGGNGIVFASRYMDDDTARKTLMDTIEGTPRTEPRLIRFKPGQRKRCWERNCVALGLASGFLEPLESTNIHLIQRGITRLLQAFPEVVNQVEIDEYNMRMREDLEHVRDFVVLHYHVTDRRDTEFWRECADMNVPPSLRHVIDLFAETGKVYNLANQLFAENSWIQVMMGQGITPRHRHPAPDLMGDPELKRFLDAISGSVSNTVSRLPRHMDYIRSYCAMARESAEA

SEQ ID NO: 85736 - protein, 505 aa, Xanthomonas phaseoli
  REGION 1..505: note = tr|A0A1V9GVN2|A0A1V9GVN2_9XANT Tryptophan halogenase; OS = Xanthomonas phaseoli pv. dieffenbachiae OX=92828; GN = IM53_020330 PE=4 SV=1
MTQAQIRKVVIAGGGTAGWIAACALSHQFRNLLDITLVESEQIGTVGVGESTVPPIRTFHRFLQIDEQEFLRAVAGTFKLSISFEHWRRQGERYIHPFGITGQSTLVCAFHHLWLESQRRGMPGNFGDYCLETVASRVDRFALHGEPAVNYAYHLDAALYAKFLRARSEACGVTRIEGRIQQVTVQPHSGDVASLVLEDGQVIEGDLFIDCSGFRGLLIEQTLHTGYEDWSHWLPCDRAVAVQTQALGPPVPYTRAIAHEAGWRWHIPLQHRVGNGLVFSSKHLSDDEAHAKLLRDVAAPAVKDPWMVPFRTGRRLKAWNKNVVSLGLASGFIEPLESTSIHLTISAVVRLLALFPAEGIAPSQVQLFNDVSRAEMEHVRDFVTLHYHATQRDEPLWQQCRQMELPESLALRLRAWRERAHAWQGADELFRVDSWTHVLMGQGIAPEQHHPLTRAFSDHDLRRLLDGIAQPIQHAVRQMPSQQDFIERYCKAGEQVWGMRSPVPA

SEQ ID NO: 85737 - protein, 505 aa, Sphingomonas aerolata
  REGION 1..505: note = tr|A0A2T4YU08|A0A2T4YU08_9SPHN Tryptophan halogenase; OS = Sphingomonas aerolata OX=185951 GN=C8J24_0606 PE=4 SV=1
MTIGAPVRRIVIVGGGTAGWMAAAALARLIPTGASITLIESDAIGTVGVGEATIPPIRGFNAMLGIDEAEFLAATAGSFKLGIEFVDWGALGERYLHPFGGFGFDIEGVRFHQYWRRRRAAGIVEDIEAYSLCAVAARAGRFIPPSPDPASVLSQMAHAYHFDAGLYARFLRGRAERDGVVRVEGDVVDVALDGETGHVRHVTLAGDRVIEGDLFLDCSGFRGLLIEQTLGAGYEDWTHWLPCDRAVAMPTANTGAAITPYTRSTARAAGWQWRIPLQHRTGNGYVYSSAHCSDDEAAATLHAGVDGTPLAEPRLLRFTAGRRRKQWIGNVVALGLASGFTEPLESTSIHMVQTGISKLLALFPDQGFSPVEIDTYNRLAATQFDQVRDFLILHYHATRREDSPFWRETRARAIPDSLSEKLALWRRRGRLFRWEDDLFAEASWVAVLLGQGIVPDGWDRLADAVDAREVDARFDRLHAMFADAASRMPRHEDYLARTCPTRVRA

SEQ ID NO: 85738 - protein, 482 aa, Sphingomonas sp.
  REGION 1..482: note = tr|A0A1Q4E8E3|A0A1Q4E8E3_9SPHN Tryptophan halogenase; OS = Sphingomonas sp. 67-41 OX=1895850 GN=BGP17_04640 PE=4; SV = 1
MSRPFTVIVAGRDAPLWLAAAALARGLAPSGVQVEAVELPSALASVDAHATFPALEALHNQLRIDETMLLRATGGNLTLGRNFTDLAGAWPAFLHAYGSAGTQIGGRDFFAHWVKARAHGLGVPLDDFSLTAAAARQGRLMLPDAENAIYGRCDYGYHLPAIPYARLLRAAAIGHGATAHAAEQLTVERAGDAIVALDLGAGRRLAADLFVDAGGVLGGAHLSWRAHFPVDRVLTAAGPPFANIPVYAEDRAGPTGWTALHPGRPATFVVHAWSSAHATDEEALRAAGAAAGLPLAGVRIAAVEPGRPARPWTGNCVTLGAVFDPVHGLDLLGLQVGLVQLLADFPATAHFAAERDEYNRAAGAALDRLRDFQSAHYALARYAGPFWDAARAGTVSPDLAHAVALFRARAELAPFEEENLPPDSWRALFLGHGVEPESWPPAIDRVPPEEAKAQFRRMLGFVREQVLRQPTQEAYLAGLADG

SEQ ID NO: 85739 - protein, 487 aa, Sphingomonas aerolata
  REGION 1..487: note = tr|A0A2T4YTS4|A0A2T4YTS4_9SPHN Tryptophan halogenase; OS = Sphingomonas aerolata OX=185951 GN=C8J24_0604 PE=4 SV=1
MTAATLGLTTGTPSAARLADITLVESEEIGTVGVGEATVPHIRFFNQRLGIDEADFVRRTKATFKLGIEFCDWGRIGDSYIHPFGDFGHDIDGLPFHQHWLHATRGKPDETPALAACSLPIVAARAGRFTPPLDDPRSVGSTYSYAYQFDAGLYAAYLRDYAETRGVTRVEGRVEHVERGPSGIAALRLADGQRIEGDLFVDCSGFRALLIEGALKAGHEDWAHWLPCDAAWAVPTANAGPLVPYTRATARDAGWQWRIPLQHRTGNGHVFSTRFTDPDRARAVLLDNLEGEVLAEPRMLRFRTGRRHRQWIDNCVAIGLSAGFLEPLESTSIHLIQLAIGKLIELFPNDAVLDPADAAEFNRAMALEYDRVRDFLVLHYCATERDDTPFWRHMRTMDLPPSLAGKIAAFRDRGIVEQYREGMFLPASWLAVYYGQRIMPERINPLVAALPVADARARVAAVADACRRTAEGMPTHADYLARIGAAA

SEQ ID NO: 85740 - protein, 502 aa, Sphingomonas aerolata
  REGION 1..502: note = tr|A0A2T4YNR8|A0A2T4YNR8_9SPHN Tryptophan halogenase; OS = Sphingomonas aerolata OX=185951 GN=C8J24_3270 PE=4 SV=1
MDELAIRRIVVVGGGTAGWMAAAALSRVLGRAVEIELIESEAIGTVGVGEATIPHLQYFNRLLGIDEDDFVRRTAATFKLGIEFVDWGRIGDRYFHPFGTYGQEMEGLHFHHFWLRQAQLGGALELDRFSIGADAARAQRFQRPDHSRAGSPLGTISYAFQFDASLYARYLRERAEASGVRRTEGRIVDVALDSGNGHVQAVTLEDSSRVAGDLFIDCSGFRGLLISKALGAGFEDWSHWLPCDRAVARACRRTTDPLPYTRATAKAAGWQWRIPLQSRTGNGYVYCSDHLSDDEALAGLNAALDGDPLSEPNFLKFKAGVRHKAWDRNVVALGLASGFLEPLESTSIHLIQSAIARLLTNFPDRRFNQHDIDYYNRRTRVEYEQVRDFIILHYAATTRDDSPLWRYCRSMALPTSLEERIAIFRENGRLYRHDNELFSETSWLAVMHGQGLVPRRYHPLADLLPEGELDKRMTHIANAMRLAVDRMPSHQQFLDQIGRTAA

SEQ ID NO: 85741 - protein, 505 aa, Xanthomonas citri
  REGION 1..505: note = tr|H8FK34|H8FK34_XANCI Tryptophan halogenase family protein OS=Xanthomonas citri pv. mangiferaeindicae LMG 941; OX = 1156940 GN=XMIN_3713 PE=4 SV=1
MTQAQIRKVVIAGGGTAGWIAACALSHQFRNLLDITLIESEQIGTVGVGESTVPPIRTFHRFLQIDEQEFLRAVAGTFKLSISFEHWRRHGERYIHPFGITGQSTLVCAFHHLWLESQRRGMPGSFGDYCLETVASRVDRFALHGEPAVNYAYHLDAALYAKFLRARSEACGVKRVEGRIQQVTVQPHSGDVASLVLEDGQTIEGDLFIDCSGFRGLLIEQTLHTGYEDWSHWLPCDRAVAVQTEALGPPVPYTRAIAHEAGWRWHIPLQHRVGNGLVFSSKHLSDDQAHAKLLRDVAAPAVREPWMVPFRTGRRLKAWNKNVVSLGLASGFIEPLESTSIHLTISAVVRLLALFPAEGIAPSQVQLFNDVSRAEMEHVRDFVTLHYHATQRDEPLWQQCRQMELPESLALRLRAWRERAHAWQGADELFRVDSWNHVLMGQGIAPEQHHPLTRAFSDHDLRRLLDCIAQPIQHAVQQMPSQQDFIERYCKAGEQVWGMRSPVPA

SEQ ID NO: 85742 - protein, 500 aa, Sphingomonas aerolata
  REGION 1..500: note = tr|A0A2T4YMM1|A0A2T4YMM1_9SPHN Tryptophan halogenase; OS = Sphingomonas aerolata OX=185951 GN=C8J24_2861 PE=4 SV=1
MDTPPKTRVIIAGGGTAGWLAAALLTRQLGALVDVTLIESDEIGTVGVGEATIPTVQAFHALLGLDERAFMAATGATFKLGIAFEGWARPDDRYVHSFGDVGRSTWMGDFQHFWLEARANGLAGDFGDYCLELQAAEARRFTIGQQGPQLNYAYHFDAGRYARFLRERCETAGLTRIEGRIAGIDRSAETGHIDAVILANGSRVAGDLFLDCSGFRGLLIGDALGVGYEDWSHWLPANRALAVQTTSVEPARPYTRAIAHDAGWQWRIPLQHRVGNGIVYSSEYLSDDAAQDRLLASVQGRPLTDPRLLRFTTGRRLRAWEGNCIALSLAGGFVEPLESTSIHLVMTALTRLLRAFPFDGISHAVVTQFNAQTRRELEGVRDFVILHYHLNQRSEPFWKACAAMPIPDTLAERIALFADAAQAYQSPDDLFRVSSWTQVMLGQRLEPRDWHRLARMMPPERLGSSLAELKAGIAQQVDRLPAHQAFVDRYCAQAATGVAA

SEQ ID NO: 85743 - protein, 533 aa, Xanthomonas phaseoli
  REGION 1..533: note = tr|A0A1V9HCJ1|A0A1V9HCJ1_9XANT Tryptophan halogenase; OS = Xanthomonas phaseoli pv. dieffenbachiae OX=92828; GN = IM53_000375 PE=4 SV=1
MGMWPVERGQLAPFAYSSAVLAQECIGMIPAPLRNIVIVGGGTAGWMAAAAFARVLGPTFKVQLIESEQLGTVGVGEATVPHIKAFNNLLGIDEAEFVRQTQGSFKLGIEFVDWQRPGSTYMHGFGSQIGHPLGLLPFHQYWIKQHARGKAQPLGAYTLNTVAAARGKFMTSAGDVPANSPLANIAYAYHFDATQYAHFLRRYSQQRGVTRIEGLVEQVQLHPESGHVQSLQLASGQTVHGDLFIDCSGFGGLLIEQALHTGYHDFTHWLPCDRALAVPCEKVGPPTPYTRSTAHAAGWQWRIPLQHRTGNGYVYCSAHISDDEAAATLLANLDGKPLADPRPLRLTTGRRKQCWNRNVVALGLASGFLEPLESTSIHLIQSGISKLLELFPREGISPVLVQRYNDRLAFEFDRIRDFLLLHYHATERDDSAFWRHCRQMPITPELQATLDLFRDSGRFYRNAEEMFAEISWVQVLVGQGILPQGYHPLVDQVPDRDAEGFLASVAQTISHCVDVMPSHQHFIDRYCKAAAVP

SEQ ID NO: 85744 - protein, 477 aa, Zunongwangia profunda
  REGION 1..477: note = tr|A0A3D5IVE0|A0A3D5IVE0_9FLAO Uncharacterized protein OS=Zunongwangia profunda OX=398743 GN=DGQ38_01760; PE = 4 SV=1
MKKILIVGGGTAGLVSALIIKARFSKLQVDLVKSENIPIVGVGEGTTEHWGEFMTFCNISLKELLQETDATFKYGIMFEGWTKKPYFHNVNTPLSQIQFGQYLGVYAYAIINNLDPKKYTNGHCFTQKVIPHELPHQFHFNTFKLNTFLRKKCLEAKIRILEDEIINVNTNKNHINYIESKNKKYKYDFYIDSTGYSKGTLITKLGSKWQSHGDYLPMNQAIAFPTPDTEEYNPYTLAKAMSAGWMWKIPTRGRCGNGYVFNNKYINAKQAQKECERSLGFKIKVAKDIKFDAGYIDKPWVGNCVAIGLCASFLEPLEASAIGTSLQQAFLLSHLLINHKQTDRDLYNQRVTGIVQNIRDFVVLHYMVKKKDSKFWKELKVKIPPTLQHNLNKWKQRLPIAEDFIGGYKLFGPHNFTILLKELGLVNKKLIKKEYGMLSEVYKDCAKENVTKHIQHTYYNKNVIGHKESINAIIKRT

SEQ ID NO: 85745 - protein, 490 aa, Pelomonas sp.
  REGION 1..490: note = tr|A0A0Q6TBZ0|A0A0Q6TBZ0_9BURK Uncharacterized protein OS=Pelomonas sp. Root1217 OX=1736430; GN = ASC95_18320 PE=4 SV=1
MSQKFDRIVVVGGGSAGWMTATALATGLKGRAGVEVVESEDIGIIGVGEATFPSIRDYNRRVGIDEAEFLRATQGTYKLGIRFCDWLAQGHDYFHTFGHFGNLFGSQTLWPQHRRLEKGLPLGVQCLPTVMAMKGRFVLPQEQAHFKYAYHFDAIQYGAFLRKLAMQRGARHTQGRIVEVLRRPDGGVAALQLDDGRRIEGDLFVDCSGFRSLLLGGALGEPFVDFSHWLPVDRAWACPCERTGEELTPYTQATALEAGWAWRIPLQNRTGHGHVFSSRFIDEDRAREQLLARLDGKPLVEPRLLRFTTGHRERFWVHNVVAIGLSAGFLEPLESTSIYLIQDGIDRLMTALMAGRPLHEDELALVNDGSARRFSRIRDFIILHYCLTRRRDSELWRHVATMELPETLAYKLALWRECGVLHMQDEESFDATSWLAIHAGMDHWPERDDPVFAEVPAERAALVLSRRRAAIAASVERMPQHHRMLKQVLG

SEQ ID NO: 85746 - protein, 132 aa, Rubellimicrobium mesophilum
  REGION 1..132: note = tr|A0A017HUU0|A0A017HUU0_9RHOB Tryptophan halogenase; OS = Rubellimicrobium mesophilum DSM 19309 OX=442562; GN = Rumeso_00402 PE=4 SV=1
MAGGWPERIVVVGGGTAGWLAAMMLSEVAGRKAPGTSVTVVESSKIPVIGVGEGSTAVFRQMLRRFGLDEEEFLRETGATIKFGIRHRDWRRLGHHYDGPIDDPHLVAPGCRWTATPSRRGSRCRRRTFSST

SEQ ID NO: 85747 - protein, 511 aa, Sphingomonas aerolata
  REGION 1..511: note = tr|A0A2T4YTA3|A0A2T4YTA3_9SPHN Tryptophan halogenase; OS = Sphingomonas aerolata OX=185951 GN=C8J24_0431 PE=4 SV=1
MTDPGPARITRIVIVGGGTAGWMTAAAMARLVESGVAVTLVESEEIGTVGVGEATIPSLLDYNRMLGIDEDDFVRATGATFKLGIEFRDWGRLGDAYFHPFGTHGRDVEGVAFHQLWLRQARLGRADMPGPIGDYCLSAVAARNGRFTRPSANPQSVLSTLSYAFHFDAALYARYLRDRAEAAGVVRIEGRVAAVDRHAGTGFIEAVRLADGRAINGDLFVDCSGFRSLLLGDAMDVGFTSWQHWLPCDRAWAVPSAPRDAPAPHTRATAEAAGWRWRIPLQHRVGNGHVYASDHVDDETALRVLLDGLDGPPLADPRQLRFVAGRRDRLWDRNCVAIGLAGGFLEPLESTSIHLIQSGIARLMSLFPDTGFSAVEIAEYNRQMLREYDQVRDFIILHYHATTRTDSAFWRHCQSMTLPPSLQAKLDLWAGRARIFREQGELFTPDSWIAVLLGQGIWPASVDPLTAGLPVAESAMFLDHVREMVAKTAEAMPRHADFIARHCAAPLRTAA

SEQ ID NO: 85748 - protein, 531 aa, Shewanella sp.
  REGION 1..531: note = tr|A0A3N4E932|A0A3N4E932_9GAMM Tryptophan 7-halogenase OS=Shewanella sp. R106 OX=2487741; GN = EGC77_03455 PE=4 SV=1
MQNAITEIVIVGGGTAGWITAGLLAAEHNVDNGVLAHSPKLNITLIESPDVATIGVGEGTWPSMRSTLSKIGIDENEFIRRCDASFKQGSRFIHWRRDPASHNAQVGNPAQSDSYLHPFSLPHGHQELDLCPFWLSHADQVSFAEAVSSQEVLTQLGLAPKSISSAQYHFQNNYGYHLNAGKFSQLLTEHCTQKLGISHIRDHVSHIVNHDNGDIAKLVTLENGEISGQLFIDCSGTKSLLLGEHLHVPFLCQKAVLFNDTALAVQVPYSGDGSPIASCTHSTAQQNGWIWDIGLPTRKGVGYVYSSSHTNDADAERTLFTYLGDAATIDKLQPRKLSFNPGYRAKCWQNNCIAIGMAAGFIEPLEASALALIEWTASTLAQQLPPNRQVMDTIAARVNDRYQLHWQQIIDFLKLHYVISQREVDGYWRDHRDNQSIPDSLQAKLELWRYQVPSQYDISYKEALFPAASFQYVLYGMGFQTQLPTHVKPSMQQLAQQLFNDNQQRTQALSKSLPSNRALLEKVAQYGFPKL

SEQ ID NO: 85749 - protein, 502 aa, unidentified
  source 1..502: note = Xanthomonadales bacterium
  REGION 1..502: note = tr|A0A1M3QRL6|A0A1M3QRL6_9GAMM Tryptophan halogenase; OS = Xanthomonadales bacterium 66-474 OX=1895868; GN = BGP23_11925 PE=4 SV=1
MNASPIHDIVIVGGGTAGWMAAAALARVFPGKLSIRLIESEQIGTVGVGEATVPHLKAFNQLLQIDEAEFVRTVKGTFKLGIEFVDWARIGDRYFHGFGTIGHDHDLLPFHQYWIKAHQQGIAAELGEYSLHTRAGPNGKFMVSATDVPANSPLADIAYAYHFDAGLYAKYLRRYAEQRGVHRTEGKVARVEQRGEDGFVEAVVLESGERIAGELFLDCSGFRGLLIEQTLHAGYEDWSHWLPCNRAVAVACETSGPPTPFVRCTAREAGWTWRIPLQHRVGNGYVYSSSYLSDDEAAATLLKQLDAPALGDPRVLRFTAGQRRKTWDRNVVAIGLAAGFLEPLESTAIYLIQSGIARLVNLFPDTSFDPVVIERYNAQTAFEIERIRDFIILHFCATERDDTPFWNYCRNMDIPAPLADNIRLFRDSGRFYRNAEEMFALTSWVEVMIGQHILPRTYHPAVDQLSDAELKQLMDGVQRVIAACVEAMPSHQQFIARCCAAV

SEQ ID NO: 85750 - protein, 513 aa, Devosia sp.
  REGION 1..513: note = tr|A0A0Q6P4F6|A0A0Q6P4F6_9RHIZ Uncharacterized protein OS=Devosia sp. Root105 OX=1736423 GN=ASC68_08655; PE = 4 SV=1
MAGQPHFVIVGGGTAGWIAAFIIQDSIKRLKLDAKLSVVESSKIPTVGVGEATTAAFHVFLTHFGIDIFEFFRKTEATYKLGIRHEDWRRKGFTYYGPIDDPHAVVRPPPGAPSDYLNVYAVSVNEPVQDMHLFGPLLKQKKAPWTKKADGSLIPLGPFLPAYHFDQSLVGKFLKEKSQGVEIVDNVLTGVERNGETGDVTALVFEDGQKLEGDFFIDATGFRKRLIVGEMQAPWISYQHELPVNRALPFWLPVEPGEEIANYTRAWAQEAGWMWQIPTQYRYGCGYVYSDEFRTPDEAHAEVERVLGRKIEVRGDIQFKIGRLEKAWINNVVAVGLSSSFLEPLESTSIHGTIVQMMMFAGQYLRDPAQMGQPLRDDYNRRVGRQVDDFRTFVNTHYMTERDDTPFWREVREHRIHPETKQRLERWKTEMPRREHFADYLFGLPHVETQLHYPVLDGLGLLDPSVAKAEMARDPKLRKFARETHAGLVKEYKQAASKALGHAEFLELVRGMG

SEQ ID NO: 85751 - protein, 412 aa, Neisseria flavescens
  REGION 1..412: note = tr|A0A154TLD0|A0A154TLD0_NEIFL Tryptophan halogenase; OS = Neisseria flavescens OX=484 GN=TW89_1047 PE=4 SV=1
MSVEFDVAVIGAGPSGSVASALLNKQGFKVCVLEKQHFPRFVIGESLLPHCMEMLEEAGFADAVHAEPSFQFKDGAAFSWGSRYTDFNFTEKFSDGPGTIYQVRRGIFDKILIDEAAKQGVDVRFGHGVTAFDNSGDMARLSVATDTGENYELTAKFVLDASGYGRVLPRLLDLESPSELPPRQAHFTHIDDNITSPKFDRNKILINTHPEHRDVWIWLIPFGDNRCSIGVVGTPDKLVGESEAVLKKFVYECPMLAEILDKAVWENDFPFRSIQGYSANVKTLYGKHFALLGNAAEFLDPVFSSGVTIALHSAKLAADLLGKQLKGEAVDWQTEFADQLMIGVNAFRTYVNGWYDFRFQNAIYAPNRSPEISRMISSILAGYAWDTNNPFVEKSEQRLSTLAALVGDLKVE

SEQ ID NO: 85752 - protein, 537 aa, unidentified; identical to SEQ ID NO: 82294
  source 1..537: note = Pseudomonas protegens
  REGION 1..537: note = tr|A0A2C9EP12|A0A2C9EP12_PSEPH Uncharacterized protein OS=Pseudomonas protegens (strain DSM 19095 / LMG 27888 / CHA0) OX=1124983 GN=PFLCHA0_c36450 PE=4 SV=1

SEQ ID NO: 85753 - protein, 520 aa, unidentified
  source 1..520: note = Paraglaciecola polaris
  REGION 1..520: note = tr|K6ZXP5|K6ZXP5_9ALTE Tryptophan halogenase; OS = Paraglaciecola polaris LMG 21857 OX=1129793; GN = GPLA_4118 PE=4 SV=1
MNNRSIKKIVIVGGGSAGWLTAGLIAAEHRCGSDQSQIQVTLIESPDVNIVGVGEGTWPSMRNSLQRMGISETEFIRYCGAAFKQGSKFVGWQNGAKNDFYYHPFVVPTGYGQANQYSSWQTYGKDHPFADAVSAQSQICQAGLGPKQNATPEYAGVLNYGYHLDAGKFSQMLQQHCTQQLGVTHIQDHVEGVLSNDNGHIASLQTRHSGELVGDLFIDCSGARSLLLGQHFNVPFIDKKSVLFNDSAMAVHVPYMTPDAAIASATVSTAQASGWVWDIGLQDRRGVGYTYSSAHATDEQAELTLKAYIAKSIGREQAAALTARKIVFNPGHRAHFWHKNCVAVGLSAGFLEPLEASALALVELSATAIAENLPVTPEHMDVISDNFNQRFLLHWENIVEFLKLHYVLSERSEPYWQQMRNPDSVSPRLKALLTQWRYQPPNRSDFVQNEIMFPSASYQYVLYGMGFNTLNDVSSREFDQPQSAMKYLQENQQLVRKLMGGLKSNRQLLEHAKHQGFPKI

SEQ ID NO: 85754 - protein, 530 aa, Saccharothrix sp.
  REGION 1..530: note = tr|A0A0M8YIY4|A0A0M8YIY4_9PSEU Tryptophan halogenase; OS = Saccharothrix sp. NRRL B-16348 OX=1415542; GN = ADK67_13260 PE=4 SV=1
MEDRRIKKVVVLGGGTAGWMAASYLGKALGPAVTITVLEAPAIPKIGVGEATVPNLHKTFFDFLGIAEEDWMRECNASFKMGIKFTNWRTPGVGESTGRPYQGTTDHYYHLFGLLPNHENQPLSHYWTHKKLAGQTDEPFDYACYREPPIMDQNLSPRFLDGTKWTNYAWHFDANLVADFLRRFATTKQGAIHIEDKMVEAVIDQRGHVSALKTEAGRTIEGDLFIDCSGFRGLLINQAMKEPFLDMSDHLLNDSAVAAQIPHDDAVDGVEPYTGAIAMSSGWTWKIPMLGRFGSGYVFSSRFQSRDDATLEFCNMWGLDPENTQLNQVKFRVGRNRRAWVKNVVSIGLASCFLEPLESTGIYFIYAALFQLAKHFPDKNFDSILQDRFNAEIETMFDDSRDFVQGHFSFAPRNDTAFWQACKELELADDFKEKVRMYKAGLAVNMPITDESTYYANFEAEFRNFWNNSNYYCIFAGLEYLPDHTLPALAARPEVLDSAEPVFAEIKRKQKELLSTLPSTYEYLKQLHGK

SEQ ID NO: 85755 - protein, 421 aa, Amycolatopsis sp.
  REGION 1..421: note = tr|A0A429D588|A0A429D588_9PSEU Tryptophan halogenase; OS = Amycolatopsis sp. WAC 01416 OX=2203196 GN=DL990_19835; PE = 4 SV=1
MSATLHGMPERFDVIVIGGGPAGATCAGLLAKEGRTVLVLERERFPRYHIGESLIPVGMRPLQELDLLERMEARGFERKYGGSLVWGNRDVPWNFSFMKAAEGTYAYHTRRADLDTLILDRARELGAYVVEETTVKDVLQSDTGRVTGVRFALRGSAGDYEASASLVVDASGQSRVIGRKFSDITWHNELRNVAVWTYYDNCDRLPGDEWTNILIEGTADGWFWGIPIDKGTMSVGYVTKSDLANADDQSLEQLFLSERDKTTRLKGLLANARQHAGYRTARDWSYTNETFYGDGWVLVGDAAAFVDPLFSTGVALATLAGSSLSKVVHQVLEHPAIEEKALDRYAGNYRAFFDEIRNFVERFYDRTKYKEYYYDLAQEVVDPEQLHAPSVDFVTLVSGLSGKHPLLNISLDDLIANVTEP

SEQ ID NO: 85756 - protein, 508 aa, unidentified
  source 1..508: note = Paraglaciecola polaris
  REGION 1..508: note = tr|K6YR09|K6YR09_9ALTE Uncharacterized protein; OS = Paraglaciecola polaris LMG 21857 OX=1129793; GN = GPLA_4285 PE=4 SV=1
MSKAVKKIVIVGGGTAGWLTAAIVAAQHKTNRCDGLQIVLVESSDIPTVGVGEGTWPTMKNTLQQIGLKESEVFARCHATFKQGGKFVDWVQDTGDFYYHPFTVPLGYGRIDLAPYVDKIENYAVESNFQHHVCEAGLAPRSMAEAEYKGQCNYAYHLDAGEFAEVLKEHCKNNLNVTQVIGTVEKVNLTDDGAIASITLKSNEQIDADLFVDCTGFASLLLGQTLDVPFISADKVLFNDSALALHMPYEDVTSPIASHTIATGQSAGWIWDIGLTHRRGVGHVYSSQYLSDDEAEVNLRRYLGPRSDDIPVRKISFQSGHRAQVWKKNCVAVGMAAGFVEPLEATAIMLVEISARFIADNIPPDDSLMPIIEKRFNQQMAYRWSRIIDFLKLHYMLTKRPEPYWQAHTELASIPQSLQDDLALWKYRGPITADFDAAIELFPAASYQYVLYGMGFKPDFSRQPHLYNDQANAEKIMTRNQQLTQQLLQTLPPHREYIERWLHTQNMR

SEQ ID NO: 85757 - protein, 534 aa, unidentified
  source 1..534: note = Paraglaciecola polaris
  REGION 1..534: note = tr|K6ZEU1|K6ZEU1_9ALTE Tryptophan halogenase; OS = Paraglaciecola polaris LMG 21857 OX=1129793; GN = GPLA_3711 PE=4 SV=1
MQQSNPIKHVVIVGGGTAGWLTAGLLAARLSSRINNSELTITLCESPDMPTVGVGEGSWPTLRSTLHTIGISETDFIRQCNVSFKQGSRFIHWENEHSSQYDHPFDVPEQASHGAQAQHWLHTNKQVPFSQAYCLQSALANQRLAPKLITTTEYSGFANYGYHLDAGLFAKLLREHCVNSLQVKHIPAKVKHVIQDQNGDISGLQLAEAEAERLPTTKPPTSNSRLTPLTGDLFIDCTGFSALLLGQTLGVKNTPVNDVLFANNAIATHVPYATDQDPIESFTLSTAQDSGWIWDIGLPNRRGVGYVYSDRYTDDESAKDTLLQYIQQRHQDTDSLSFKHIRFTPGYKQQFWKNNCVAIGLSAGFIEPLEASAIVLVEMSANMLAEQFPATRQSMGIVAERFNQTFSYRWQRIIDFLKLHYVLSKRPSAFWKDNRAERSIPASLKKLLLIWRHKVPDFADFPARDEVFQAASYQFVLYGAGFKSNLLCTPDPRMLESSEQLFSSIQSFTTQLTDKAISNRALINKIYRYGLQKI

SEQ ID NO: 85758 - protein, 412 aa, Neisseria flavescens
  REGION 1..412: note = tr|A0A154TRV2|A0A154TRV2_NEIFL Tryptophan halogenase; OS = Neisseria flavescens OX=484 GN=TV01_0859 PE=4 SV=1
MSVEFDVAVIGAGPSGSVASALLNKQGFKVCVLEKQHFPRFVIGESLLPHCMEMLEEAGFADAVHAEPSFQFKDGAAFSWGSRYTDFNFTEKFSDGPGTIYQVRRGIFDKILIDEAAKQGIDVRFGHGVTAFDNSGDVARLSVATDTGENYELTAKFVLDASGYGRVLPRLLDLESPSELPPRQAHFTHIDDNITSPKFDRNKILINTHPEHRDVWIWLIPFGDNRCSIGVVGTPDKLAGESEAVLKKFVYECPMLAEILNKAVWENDFPFRSIQGYSANVKTLYGKHFALLGNAAEFLDPVFSSGVTIALHSAKLAADLLGKQLKGEAVDWQTEFADQLMIGVNAFRTYVNGWYDFRFQNAIYAPNRSPEISRMISSILAGYAWDTNNPFVEKSEQRLSTLAALVGDLKVE

SEQ ID NO: 85759 - protein, 495 aa, Acinetobacter sp.
  REGION 1..495: note = tr|N9PIX7|N9PIX7_9GAMM Uncharacterized protein; OS = Acinetobacter sp. CIP 64.2 OX=1217694 GN=F895_00815; PE = 4 SV=1
MLNLRGLNRVAVVGGGTAGWFAALQLRQVFGPSVEVMVISAPEIPIVGVGEGGVLNLLTVLRDLEIDLKDFIDKTGATLKLGFRYERWRTGKEDDYYYHLFPLPTEDFAWNEFGFNPYLSGLFNHGIDVSRYMASYQFSEDRKPFQEVLQILLEGKNNFGASLHFDTFRVGQYLKKIALSRGIVHIENKIEDFELDPATGYVSAIQCIDQKISCDFVIDASGFSKLLIGKKYQSYWCSFADILPMNRALPFHLPHKNKIELVTRATALSSGWVWQIPLQERIGAGYVYHDQFITDQQAQQEVEQWLGYSINPVKPIAFEAGYFQEVWIKNVVAIGLASGFIEPLEATSIGQMLSQLALLISFIQENHGVISQQNIDFYNHQNAQYWQGIRDFIRMHYDTGRSDTPFWQYMLTVPQSESYQELKKCWLHRTPRDIDFVEHSMGGMSMFSAASWFAVGAGVGVIKPEATSAELYALSPEKKQKLAKYLQEIKQQLAL

SEQ ID NO: 85760 - protein, 518 aa, Colwellia sp.
  REGION 1..518: note = tr|A0A1Y5CV72|A0A1Y5CV72_9GAMM Tryptophan halogenase; OS = Colwellia sp. 39_35_sub15_T18 OX=1856279 GN=A9Q74_17700; PE = 4 SV=1
MNEQVKQVVVVGGGTAGWLTAANLAKKFNSVENGAIQVTLVESPDIPTIGVGEGTWPTMRKTLAKLGISEADFLSKCNASFKQATKFVNWQQAPKNGINSHYYHLFTSINDPLEFNLAPYWKLGMIGDNNSYADTVSMQAAICEQGLAPKLITNREFEGVQNYAYHLDAGLFTDLLREHATTKLGVKHISANVTDVNLDDDGYIKNIHCDSVGVVSGEFFVDCTGFKSLLIGKALGIPFKSISDTLLCDHALAIQVPYKNEQSAIASCTVSTAHEAGWTWDIGLSNRRGTGYVYSSAHTSHERAEQVLRNYIGPQADRLESRLIKMNVGYREKFWHKNCFAIGLSAAFVEPLEASAIFLIEASANMLSELFPRDRHAMLAVEKKVNKSFKFRWDKTIDFIKMHYFLSKRTEPFWQDNKLLNTVPDTLLASLDSWQHQLITAYDFDNVYEPFPLDSYQYVLYGMGFEQSLAFNENSYAMQSLAKQQYNKVQELTQQMQQQLPENRALLNKIAQYGFQKV

SEQ ID NO: 85761 - protein, 498 aa, unidentified
  source 1..498: note = Paraglaciecola polaris
  REGION 1..498: note = tr|K6YQU7|K6YQU7_9ALTE FADH2 O2-dependent halogenase I OS=Paraglaciecola polaris LMG 21857 OX=1129793 GN=prnA; PE = 4 SV=1
MNKKPIKRVVIAGGGTAGWMAAAALSKLLGKNLSVALIESDDIPTVGVGEATIPTLHIFHRLLGINEQEFMAATNATFKLGIQFENWKVQNQDYIHSFGFLGQGCWAAGFQHFWLKGQQKGMVTQIGDYIPEHLACRESRFAVLANQEQNHAYHLDAGLYAQYLRKIAEQHGCKRIEGKIETVTLDDNSGDICALTLASCEVIEGDLFIDCTGFRALLIEQALHTGFEDWSHWLPCDSAVAVQTTAKPNPVPYTRSIARDAGWQWRIPLQNRTGNGLVFCSKYMSDDQAKAALLANIEGELLNEPRVIKYKTGTRRKHWNKNCIAVGLSSGFIEPLESTGIHLFQRAIVRLMLMFPSNGIAQADVNEFNAQSRADVDDIKDFIILHYHQTQRTDTPFWRYCKNMPIPDTLRHRMDLFESTGKVFKKAEELFGETSWIQVMLGQGITPQQYHPIVDIMSDEELKQFLDNIKSNVKRKVANWPNVNDFIRHYCQTNIPTL

SEQ ID NO: 85762 - protein, 513 aa, Devosia sp.
  REGION 1..513: note = tr|A0A0Q4NPH5|A0A0Q4NPH5_9RHIZ Uncharacterized protein OS=Devosia sp. Leaf64 OX=1736229 GN=ASE94_12405; PE = 4 SV=1
MAKPAHFVVVGGGTAGWIAAFIIQDEARRRGFDFRISVVESSKIPTVGVGEATTAAFRVLLKHFGIDEFEFFRKTDASFKLGIKHEDWRRKGYTYYGPIDDPHQVIQAPPGTPSDYLNVYAVAAGRGVQEMHMFQPLLEQKKAPYALKADGSLIPLGPFHHAYHFDQALVGKFFASKSKGVEKVDALVAGVERDGESGDISALVLDDNSRLEGDFFIDATGFRKQIIVKALDAPWKSYAHELPVNRALPFWIDVKEGEELPNYTRAWAQSSGWMWQIPTRTRFGCGYVYSDEFSTPEQAKEEVERVLGHEIEVRSDIRFQIGRLEKAWIGNCVAVGLSSSFLEPLESTSIHGTIVQMMLFAQRYMDQPSKISQKARDDYNARVGRQVDDFRTFVNTHYMTERDDTPFWREVRANRIHLETKERLARWQKQMPRHGDFPNYLGGLPHIETQLHYPVLNGLGLLDQNLARREMAADPKLRRFAQQTFDGLVREYRAAANQALGHREFLDIVQGMA

SEQ ID NO: 85763 - protein, 491 aa, Amycolatopsis sp.
  REGION 1..491: note = tr|A0A429CUB1|A0A429CUB1_9PSEU Tryptophan halogenase; OS = Amycolatopsis sp. WAC 01416 OX=2203196 GN=DL990_27065; PE = 4 SV=1
MSVEEFDVVVAGGGPGGSTVASLVAMQGHRVLLLEKEVFPRYQIGESLLPSTVHGICRMLGVTDELAAAGFPVKRGGTFRWGARPEPWTFSFSVSPRITGPTSFAYQVERARFDEILLNNARRKGVVVREECTVTGVLEEGERVTGLRYTDPDGEQREVSATFVIDASGNKSRLYSQVGGTRNYSEFFRSLALFGYFEGGKRLPAPYSGNILSVAFDSGWFWYIPLSDTLTSVGAVVRREDAEKIQGDQEKALKTLIAECPLISEYLSDARRVTSGKYGELRVRKDYSYHQTSFWRPGMILVGDAACFVDPVFSSGVHLATYSGLLAARSINSVLGGDTDEKTALTEFEARYRREYGVFYEFLTSFYQMNVNEDSYFWQAKKVTNNQHTEIESFVDLVGGVSSGEAALTPTDRIVERSAEFSAAVDQMAGGDEDSMVPLYKSQVVKQVMQEAGQEQMRAVLGEDAEPELPLFPGGLVTSPDGMSWLPYRPA

SEQ ID NO: 85764 - protein, 806 aa, unidentified
  source 1..806: note = Methylorubrum extorquens
  REGION 1..806: note = tr|A9W5E3|A9W5E3_METEP Tryptophan halogenase; OS = Methylorubrum extorquens (strain PA1) OX=419610; GN = Mext_2404 PE=4 SV=1
MRGDIRGADNSMFRSERSAPPRLVVAGGGPASWMAALYLKRVLRRAGWTVTLVGSAPAAGASAALATRPAFTRFLKGFGIDEAIFMRRCAATYRLASRYDDWFAEGQGHWHPFGACGPRIAGRDLFHYWMKLRGEGAEDEAGRYADYAPQALMAAEARGPRPLADRSSLIDSGDYGYHLDRKALVRFLRELALSEGVRGVTGRVREIERNLYGDVGALILDGGQTIEGDIFLDCTGAAAQLIGTALDEAWVAGSGPGDRVARLSLPRSPEVPPFTAYRGRAEGWTASLPLADRTEHLFVYDSRTTPPDAAAATLRRAFDGQADIVDAELRHGRRASPWQRNVVALGAAAGAVEPLLGFDLDLVLAGLETFLAYLPRQGEGGDVLRRAYAARLNRFHDDAAEAVAAHYVLGRRSEPFWAAARAVMIPDRLADRLDLYELAGHVALSEEAPFSEGDHYLLFSGADFLPRRPFAPVDVADGREIARLLASIRAQSAQIAGAMAPHVRLMDALHGQAPVAAPAVRIAAASAPAGPAALRRTPEGARLADLVAGLGQPFGYERSVKASPAGLQTDRFLMSLHRASLGLTPETTLDRLAAGLGLPERERAEAAGLIGGADILHLGYEDGPSGALYKLYVEWSSRTDAAWTGADEAGAEPMLVHRAYKWNPGGTHPPVVTLYHWPWVRGPEEIEARLTRMTGAWGPAGAPARDTAHAILLLAQERGRGAVHYLEAREEPGLRLSYDLNLYACGLTVADAEPLLGQAFVDLGVPRDAAAMVLRERLQETLGHVAGGVGRDGQPFVTVYSGVAGG

SEQ ID NO: 85765 - protein, 493 aa, unidentified
  source 1..493: note = Paraglaciecola polaris
  REGION 1..493: note = tr|K7A229|K7A229_9ALTE FADH2 O2-dependent halogenase I OS=Paraglaciecola polaris LMG 21857 OX=1129793 GN=prnA; PE = 4 SV=1
MNNEKVQNVVIAGGGTAGWMAAASLSKLLGKSLNITLVESDEIGTVGVGEATIPPIRTLHKLLNIDEQAFMRATNSTFKLGIEFNHWGQRDDSYIHSFGITGKECWAGEFHHFWLRGKEQGINAPFGDYCYELQASKQGKFAFSVNAPMNFAYHLDATLYAKFLRDFCADAVTRIEGKIQSVSKDPHNGFITALTLASGQQIEGDFFIDCTGFKGMLIEEALHTGYEDWSHWLPCDSAIAVQTQAIADPLPYTRSTAHDFGWQWRIPLQNRVGNGMVFCSRYVSDEQAEETLLANLDGAPINAPRVIKFKTGRRRKGWNKNCVALGLASGFVEPLESTSIHLIMTGIVRLMRLFPFDGVRQSAIDEYNEKLTSELHSIRDFIILHYKVTQRDDTPFWRHCHSMDVPESLSHKIRLFKDTGRVFLDDGDIFRVDSWTQVMLGQGLEPKQYHRIVNEMSDDELQRFLAGMRSAIEQRVNSLPSHQQFIRRYCLAS

SEQ ID NO: 85766 - protein, 544 aa, Fischerella sp.
  REGION 1..544: note = tr|A0A1Z4TV88|A0A1Z4TV88_9CYAN Tryptophan halogenase; OS = Fischerella sp. NIES-4106 OX=2005456 GN=NIES4106_56620; PE = 4 SV=1
MLQNVVKIVIVGGGTAGWMTASYLRKALDRNVDITLVESSNITRIGVGEATFSSIKSFFDFLGLQEHEWMPRCNATYKMAIKFVNWNAEGKTFFHPFERYDTIDGFSISEWWLKIKKSKEPFDYSCFRTPILCDHQKSPRYLNGKVYDDRVQYLFSHKYFNDNKLITLADSEGQYPYAYHFDTNLIATFLKNYAMQRGVKQIVDDVVDVKLREDGSINNIITQENGNVYGDLFIDCTGFRGLLINKTLGEPFISFSESLLCDSAIALRVPTNIKKNGINPYTTATALSAGWVWNIPLYGRIGTGYVYSSKFISQEDAEQELQKHLNLNFDDYDVSHIKMRIGRNRNSWVKNCVAIGLSSGFVEPLESTGIFFIQHGIEELVSNFEGKYLNEDLIKNYNKSIADCIDGVRDFLVLHYYASDRDDTDFWKATKYGIKVPDELCERMKIWKNRLPNKKNINPKFHGFETYSYSVMLLGLNYVPKNYLPILDSFETHNAIAQFNEIKEKANHLCATLPSHYEYLTHVIKSQENPDYLNEISLLDTHVF

SEQ ID NO: 85767 - protein, 503 aa, Asticcacaulis sp.
  REGION 1..503: note = tr|V4P317|V4P317_9CAUL Uncharacterized protein; OS = Asticcacaulis sp. AC466 OX=1282362 GN=AEAC466_16735; PE = 4 SV=1
MNTADNKTSAHRRQVVIVGGGTAGWMSAALLAKITQGKLGDITLVESEEIGTIGVGEATIPAIKRFNRLLELHELDFVRQTQASFKLGIEFVNWGQVGTRYFHPFGAIGDPIGRAAFHHFLTRRRLAGEAESFEDYSLNAMAARQNRFTTPPRDDSPLSQLSYAYHFDASLYAAYLRRHAEANGVKRVEGKIRHVGQNAETGFIERLSLENGQTVEGDFFIDCSGLSGLLIEKTLHSGFDDWSALLPCNSAAFVPSEKVADVTPYTRSTAHTAGWQWRIPLQHRTGNGHVFCSDFITDDEAAQTLVRNLDGKALADPKFVRFKTGRRRLSWNRNVVAIGLSGGFLEPLESTSIHLIQSGLVKLLDYWPGERFAPLLAEQYNRAMANQYESIRDFIILHYKATQRDDSAFWRYCRDMPVPDSLSYRLDHFRSSARIVLTPGELFQPNSWLAVMLGQNINPLGYDPLADVVDTERVAAQFSRMRGTISRAVQSMPSHKAFLDALS

SEQ ID NO: 85768 - protein, 505 aa, unidentified
  source 1..505: note = Sphingomonas turrisvirgatae
  REGION 1..505: note = tr|A0A1E3LS42|A0A1E3LS42_9SPHN Tryptophan halogenase; OS = Sphingomonas turrisvirgatae OX=1888892 GN=BFL28_04405; PE = 4 SV=1
MAPDIKNILILGGGTAGWACAAVLAQRSAEHGVSLTVVDAADIPTIGVGEATIPTIYDLLNHVGMTDTEVVKAAQATFKYGIQFEGWSRRGETYMHGFGTTGTPRGEDDFFTAWLGGGAYFSSRTLDAFTPAVAAARKGRFARVAERPAGAAQHLYYPLCELSYALHFDAALLARELRANALRNGVVHRSSKIVAVETGERGIAALRTGDGELIEADFFIDCSGLTGVLSRAALGGMFEDWRAYLPCDRAIAVQTARSTAPNPYTRSVAHRAGWRWEIQLQSRTGNGCVYSSDHMSDDEATDLLMSEVAGEAINQPRRIDFRTGRLAEPWEANCVALGLAAGFLEPLESTSIHLISKYALLLEQMLFDNAGKPDDRGRFNAMWRAETEEIRDFLSAHYVVNQRDEPFWTERRDAKRPPSLDRKLQAFAQTGWFDLPDHALFGHDSWFQVLIGQGFALDYPQFAIPRAEAPGLLQFLQNVARAVDVETSAIPRSHQQVIHSLVEGG

SEQ ID NO: 85769 - protein, 508 aa, Asticcacaulis sp.
  REGION 1..508: note = tr|V4PF28|V4PF28_9CAUL Uncharacterized protein; OS = Asticcacaulis sp. AC466 OX=1282362 GN=AEAC466_01005; PE = 4 SV=1
MSPTRSVVIVGGGTAGWLTAGLIAANHKGHLSVTLVESPNVKSIGVGEGTWPTIRNTLKKIGISEADFLKACDGTFKQASKFVNWTTGDDHYYHPFMLPKAYDQINLAPYWQAQPNGLSFADTVSYQPAACAQDLAPKTMTVPEYAAITNYAYHLDAGKFAPFLQKHCVENLGVRHVLADVTRIENDGDGYIARLQTDVGEAIAGDLFIDCTGFLSLLIGKHYGAAFTSCADQLFIDTALAIQVPYEREDAPIASVTKSTAQRAGWIWDIGLTHRRGLGHVFSSRFTTDDEALADLKAYIGPSGAHLTFDEVRKIPIRSGHRQTPWVKNCVAVGLSSGFVEPLEASSIVMAELSAQMIADQMPVNRAAMAVVAKRFNTTLNYRWARIIDFLKLHYVLSQREEPFWVANRDPSTMPESLKDLLSLWKYHFPWHDDLDHRDEIFPTASFQYVYYGMGGRTDPGAFPKTPDWPKAVGHFQEVARARQAVTGQLPTNRNLLSKISQYGLQKV

SEQ ID NO: 85770 - protein, 517 aa, unidentified
  source 1..517: note = Paraglaciecola polaris
  REGION 1..517: note = tr|K6ZSR3|K6ZSR3_9ALTE Tryptophan halogenase; OS = Paraglaciecola polaris LMG 21857 OX=1129793; GN = GPLA_0952 PE=4 SV=1
MTHAIQSIVIVGGGTAGWITAGTLAAKLKNEHATGFTITLVESPDVKPIGVGEGTWPTMRRTLKAMGIGETDFIQQCNVSFKQGAKFAKWVTGEEDDFYYHPLVLPQDFDRTNLARHWAYAPSGQSFSQAVSPQETVCELGLAPKAITTAEYASIINYAYHLDAGLFSAFLQQHCTDKLGVRHILDNVSHINSALNGDITSVSTAQNGDIKGDLFIDCTGFKSLLLGEHFKVGFKSCKDVLFVDQALAIHVPYDDENAPVASHTISTGQSAGWVWDIGLQNRRGVGHVYSSAHTSEERAGEELLHYIRQTGGSVNSADIRKIPLNPGHREKFWQRNCVAIGLSAGFLEPLEASSLLLVEISASMIAEQFPAMRDAMDVIAKRFNRTFLYRWERIIDFLKLHYMLTQRNDSDFWIDNRDPVTIPQSLQDHLTLWRYQPPWHNDFEDAVEVFPAASYQYVLYGMGFYTQHSALGLSDAYQQKAVSLRHKNSQQCEQMRRNLPTNRALLNKIHQYGLQKV

SEQ ID NO: 85771 - protein, 498 aa, Asticcacaulis sp.
  REGION 1..498: note = tr|V4P9S5|V4P9S5_9CAUL Uncharacterized protein; OS = Asticcacaulis sp. AC466 OX=1282362 GN=AEAC466_10920; PE = 4 SV=1
MFMNSVQQQEIVILGGGAAGWIAAALLARKTDRSQTRVTLVESEEIGIIGVGEATVPVLAHCNALLGIDEYDFIRNTQGTFKLGIEFCDWGVAGNRHFHAFSDYGHQVDGVSTHHYWLRLRQSGDAHPIDDYSFAYAVAKNNNFAPTDPQNPRYHHAYHFDAALYARYLRDVATGQGVQRIEGKMTHFDLESASGNITAIHLANGSRVPGDLFLDCTGFASELLGKALETPFVDWSRWLLCNSAMAVPSKRTGAPMPFTRSTAHAGGWRWTIPLQHRCGHGMVYNSDLWSDDAARDALTGNVDGELLAEPRVFRFTSGHRKQFWNRNCVGIGFASSFLEPLESTGLQLIVQGVLKLLQFFPQRIIDPVLRDEYNRISTREIERIRDFIIAHYYLSRRPEPLWAACRNIEVPDSLRHKLEVWNASGQIALGDLESYMEPSWLAILLGNGVVPARYAVAADLYPLEQIRKGMKLRREEIVRSAQAVTSHQDFIDQYCKAP

SEQ ID NO: 85772 - protein, 512 aa, unidentified
  source 1..512: note = Mycolicibacterium phlei
  REGION 1..512: note = tr|A0A3S4R730|A0A3S4R730_MYCPH Tryptophan halogenase; OS = Mycolicibacterium phlei OX=1771 GN=NCTC8151_03490 PE=4; SV = 1
MLQKVVIVGGGTAGWMTASYLKVAFGDRITVTVVESARIGAIGVGEATFSTIRHFFDYLGLEEHEWMPSCCATYKLGIRFQDWRKPGHHFYHPFERQRVVDGFGLTDWWLDNPRSDSFDRDCFLIGTLCDNDKSPRRLDGSLFMDTDGEHTAYRTTLSEQDTQFPYAYHFDASLLADFLRDFAVRRGVRHVVDDVVDVLQDDRGWISEVRTRAHGSIEGDLFIDCTGFSGLLLGRAMGEPFESYQGSLLNDRAVALRVPTDQNGGHLPPYTTATAQDAGWIWSIPLFDRIGTGYVYAEDYCSPEDAERALRDFVGPAAEGLEANHIRMRIGRSRRSWVGNCVAIGLASGFVEPLESTGIFFIQHGIEQLVKHFPDENWEERLRDSYNRVINRCMDGVREFLVLHYYLAARVDTQYWRDTKSVQLPTALAERIEHWRSKLPDAGSVYPHYHGFEPYSYVCMFVGLGGIPARPAAVVRYLDATRAQREFDLIAQQASRLRHSLPTHREYLAQMY

SEQ ID NO: 85773 - protein, 509 aa, Asticcacaulis sp.
  REGION 1..509: note = tr|V4NQU6|V4NQU6_9CAUL Tryptophan halogenase; OS = Asticcacaulis sp. AC466 OX=1282362 GN=AEAC466_10470; PE = 4 SV=1
MQTSLIKTITIVGGGTAGWMTAALLSKLLLGRFQITLIESEDIGTIGVGEATIPAIKVFNQLLDLDEVEFLKATQGTFKLGIEFVNWRDKGHSYIHGFGKIGVDLMWLHTHQFWLKMFPKGGVKDFDHYGLNTLAARRNRFKMRRPDDSPPMSDMDYAYHFDASLYARHLRGLSERREVRRIEGRITQVVLRPDNGYIDSVVLENGQAVGGDLFIDCSGMRGLLIGEALGVGYEDWNHWLLNDRAYAVPCAHRGTGAGVSESLTPYTRSIAHASGWQWRIPLQHRIGNGHVYSSAYLSDDEAATTLLKNLDGQALADPRQVRFRPGKRQRAFEKNCVAIGLSGGFLEPLESTSIHLIQTGILRLLALFPGQSFDARDIAEYNAQTDFEYRDVRDFIIAHYKVTDREDTPYWAYLKHMDIPDSLAQRIELFRSSARFFKHSAAELFHEESWVQVLLGQGLDMRYDPMVDMIPEDQITAYLRDIEEVISEYADGMPIHADFIARYCKAPPL

SEQ ID NO: 85774 - protein, 502 aa, Asticcacaulis sp.
  REGION 1..502: note = tr|V4QQP5|V4QQP5_9CAUL Uncharacterized protein; OS = Asticcacaulis sp. AC466 OX=1282362 GN=AEAC466_21175; PE = 4 SV=1
MAAEPIKTIVILGGGTAGWLSATFLNRILGDTVDITLIESDDIGTVGVGEATIPPLVNLLVFLGLDEREVMKAVQGTYKLGIEFIDWYEKGEAYSHAFGAPGNPLGVLPFHQYWLRQRMRGKGGSLWDYSLNHMAAKANRFTHMKTIPNTPNMEGMNYALHFDAGLLARYLRGHCEAQGVTRREGKVAGVNLRAKDGFIESLRLEGGETVGGDFFLDCSGFQGVLIEGALKAGYEDWTRWLPCDRALAVPCASAGPLKPYTQARAHTAGWQWRIPLQHRTGNGHVFSSAFMETDEAAKILLANLDGEPLAEPRLLKFTTGRRRKTWVKNCVALGLASGFMEPLESTSIHLVQTALQRLAHMFPDKGFNPIEIAEYNRKTQREYELIRDFLVLHYTATQRADSPFWNHCRTMDVPDSLNGKVDFFRQHGRVIVEEDDLFKEANWVQVLIGQGVMPESCSPLTLNVPEKKLDDYFQHIRQIYETTVMKTPSHAQYIAYHCQAET

SEQ ID NO: 85775 - protein, 533 aa, Shewanella sp.
  REGION 1..533: note = tr|A0A4Y6IAN6|A0A4Y6IAN6_9GAMM Tryptophan 7-halogenase OS=Shewanella sp. SNU WT4 OX=2590015; GN = FJQ87_06370 PE=4 SV=1
MTITKIAIVGGGTAGWLAANHLGKALAARRDIELTLIESPQVPTIGVGEGTVPAIRQSLQSFGISETEFIRSCDVTFKQSIKFINWLDKSSHGEHYAYHHLFDRPSSPLDLTPLYLSQLAQSELLPTSYASTNALPTGSEPNAGGFNASSVHYAHLVSAQHQLCESGKAPKSITTPEWQGIAGYAYHLNALKFAQLLASNAKQRFNVNHIRAHIDKVVLGDDGLISGLVTEEHGLVNFDFYIDCSGTEAVLMKALKVPFISVADSLFVDTALAIQVPTAALQTIPPYTLATAHQAGWIWDIALTERRGVGLVYSSRYMNEDEATLKLHRYLGPSSCDMSFRKIAMKVGYLAESWRGNCVALGLAQGFLEPLEATSIMLTDFSAKLLAERLPQDCAQLPLLAGRFNQVMLHAWQRVIDFVKLHYFLSDRSDSQFWLDNRNPAHLSEELQQRLQLWQTSVPLKSDFFSKFEAFDLENYLYVLYGMKYQTQLSGAPSASLRQQAEDVQQLARKWLEYLPEHRDLLERIHKYGLQKN

SEQ ID NO: 85776 - protein, 501 aa, Streptomyces noursei
  REGION 1..501: note = tr|A0A2N8PC14|A0A2N8PC14_STRNR Tryptophan halogenase; OS = Streptomyces noursei OX=1971 GN=AOB60_31755 PE=4 SV=1
MTASYLRAALGESINVTVIESKRIKTIGVGEATFSTVRHFFDYLGLSENDWMPKCNATYKLGIRFENWRAKGHYFYHPFERLRVVDGFPLTEWWLNKKPSDRFDQDVFLMSEICDNMRSPRYLDGTLFEQDFVERGGSLDLERSTLAEQATQFPYAYQFDASLLADFLTEYATARGARHIEDDVVEVVRDERGWISHLKTREHGELAGDLFIDCTGFAGLLLNKTLGEPFVSYQNTLPNDSAVALRVPHDAEHTRLRPCTTATAQEAGWIWTIPLFERIGTGYVYASDYTTPEEAERTLRAFVGPQAADVEANHIRMRIGRSRQSWVNNCVAIGLSSGFVEPLESTGIFFIQQGIEELVKHFPDAKWDPKLRDSYNRTVANAMDGVREFLVLHYRTAARNDNAYWRDAKTRELPDGLAARLEAWQSKLPTEETIFPHYHGFEPYSYHAMLLGLGGFEAKPAPVLAYMDDSRAAQEIQRLKDQARDIAKRLPSQYEYLAQMH

SEQ ID NO: 85777 - protein, 515 aa, unidentified
  source 1..515: note = Sphingomonas turrisvirgatae
  REGION 1..515: note = tr|A0A1E3LYW1|A0A1E3LYW1_9SPHN Tryptophan halogenase; OS = Sphingomonas turrisvirgatae OX=1888892 GN=BFL28_12855; PE = 4 SV=1
MEPVTRIVIVGGGTAGWLTAGTLAAATRESDERPLEITLVESPNVPIIGVGEGTWPTMRRTLKRMGIRETDFLNQCSASFKQGAQFVGWVDGSQGDAYYHPLVLPQGYFETNMARQWLAGVSDGSFAAAVCPQEALCEAGRAPKAITTAEYDAVANYAYHLDAGAFSRFLQEHCTRVLGVRHVAADVTGIRSAENGDIAAVLTMQAGEISGDLFIDCTGFRALLLGEHFGVGFIPWTQVLFADRALAVQVPYPAADSPILPHTLSTAQRAGWIWDIGLQSRRGVGHVYSSAHIDDDAARADLRAYVHSIGGDAEALPMRKIEFQAGHRTRFWERNCVAVGLSAGFLEPLEASAILLVEIAAQFIAEQMPATRAAMDPVARRYNTTFAYRWARIIDFLKLHYLLSRRTEPFWADNRRTESIPESLTELLTLWREQPPWHDDFDRAVEVFPAASYQYVLYGMGFETRVPPRGLSSQARAHGEQLFMHNKQEAAAMIQRLPSTRDLLDRIARYGLQPV

SEQ ID NO: 85778 - protein, 552 aa, unidentified
  source 1..552: note = Calothrix elsteri
  REGION 1..552: note = tr|A0A2A2TE42|A0A2A2TE42_9CYAN Tryptophan halogenase; OS = Calothrix elsteri CCALA 953 OX=987040 GN=CK510_21320; PE = 4 SV=1
MKNTGNKIENIVIVGGGTTGWMAAAYLVKALQGSVAITLIESDQIPTLGVGEATVPSIRTEFFDFLEIPESEWMPQCNGTFKIGIKYADWSYTPHTTKNNEFYHIFGESKKYDDIPLTHYWLKKRLDGYDLSMSDCCYSSTAVCEFNKSPKFLDGTTGVNYAYHFDANLLAKFLASWTVKKGVVRVVDKVVNVILDNTGAIDFLKTEKGNTHKADLYIDCSGFQGLLINQALKEPFISYSDSLLCDAAVAIPVKTDNIDGLRPYTIATALSSGWSWEIPLYGRLGRGYVYSQKFISPDEAEQELRKFHGSIADDIPAKHLKMRVGRNEHSWVKNCVSLGIASGFIEPLESTGIYFIYAALKHLIRYFPDKSMNPALKDKYNERIAFMVDDVRDFIVLHYCTTHREDTPFWKANKFDLKIPDTLKRLLEVYQAGAPINLPYTDEGGYNNVFDAGFDRFWTNSNYMAILGGMNHLPNSASPILNHKPESVNKAEKIFKAIKDNTKNLLDELPSHYEYIKNLYLNQKSSDEIYSYTSVKKNEIREIDSWLKVKVS

SEQ ID NO: 85779 - protein, 121 aa, Sphingomonas sp.
  REGION 1..121: note = tr|A0A031HQN6|A0A031HQN6_9SPHN Tryptophan halogenase; OS = Sphingomonas sp. RIT328 OX=1470591 GN=BW41_02668 PE=4; SV = 1
MQTRDVLILPYKVTERRDGCWRYGAAMPIPDSRAQKIELFRETRRAFRRNEELFAEQSWVQVMMGQGIMPRSHHPIAANSSDADLARLLDTLRRTVAAAVRGLPDHASYVAHHGGIARDAG

SEQ ID NO: 85780 - protein, 516 aa, Streptomyces yunnanensis
  REGION 1..516: note = tr|A0A1M7QPK3|A0A1M7QPK3_9ACTN Tryptophan halogenase; OS = Streptomyces yunnanensis OX=156453; GN = SAMN05216268_13817 PE=4 SV=1
MLSSVVIVGGGTSGWMTASYLRAALGESINVTVIESKRIKTIGVGEATFSTVRHFFDYLGLSENDWMPKCNATYKLGIRFENWRAKGHYFYHPFERLRVVDGFPLTEWWLNKKPSDRFDQDVFLMSEICDNMRSPRYLDGTLFEQDFIERGGSLDLERSTLAEQATQFPYAYQFDASLLADFLTEYATARGARHIEDDVVEVVRDERGWISHLKTREHGELAGDLFIDCTGFAGLLLNKTLGEPFVSYQNTLPNDSAVALRVPHDAEHTRLRPCTTATAQEAGWIWTIPLFERIGTGYVYASDYTTPEEAERTLRAFVGPQAADVEANHIRMRIGRSRQSWVNNCVAIGLSSGFVEPLESTGIFFIQQGIEELVKHFPDAKWDPKLRDSYNRTVANAMDGVREFLVLHYRTAARNDNAYWRDAKTRELPDGLAARLEAWQSKLPTEETIFPHYHGFEPYSYHAMLLGLGGFEAKPAPVLAYMDDSRAAQEIQRLKDQARDIAKRLPSQYEYLAQMH

SEQ ID NO: 85781 - protein, 501 aa, Cylindrospermum stagnale
  REGION 1..501: note = tr|K9X1I4|K9X1I4_9NOST 2-polyprenyl-6-methoxyphenol hydroxylase-like oxidoreductase OS=Cylindrospermum stagnale PCC 7417 OX=56107 GN=Cylst_4395 PE=4 SV=1
MEKTIHNVVVLGGGSAGFLSALALKVKMPSLNVVVVHSKTIPVIGVGEATTAWIPWFLHTYLGLNRQQFYEETQPIWKLGIKFIWGNSHQSHFNYPFVTHLADKLSVLDKSTAYYCLDSTRESSIYSLLMEQYKSPCFRKENGDFVFDERFGYHIENASFVSYLERRAAELDIKIIDQPVVNIQVAENGYIHQLKLDDGTTLAGDLFVDCSGFRSTLLGEILQEPFCSFSSSLFNDSAVTGTWMRDDVIYPFTTAETMQAGWCWRIDLPEQVNRGYVYSSAFISDDDALAEMKRQNPLMGDDHHSVVRFKSGRHQRFWVNNVVGVGNASGFVEPLESTGLHMIGETIKCVCDVLIDSDQQPTPGLINLANQAIAEKWDDIRDFLSIHFKFNRRVTSDFWQHCWQQTDIGEAEAVVDFFQNNGPSPIGQLLLRKNSVFKYNGYLNLLMGQQVATKYQGNNEILDLDNWRQVKNYFLKNCDNALPIHEAIQVVKERKCQWLSS

SEQ ID NO: 85782 - protein, 501 aa, Alteromonas stellipolaris
  REGION 1..501: note = tr|A0A0S1YMJ9|A0A0S1YMJ9_9ALTE Tryptophan halogenase; OS = Alteromonas stellipolaris LMG 21856 OX=1160720; GN = AOR13_2668 PE=4 SV=1
MSQSMSIKSIVIVGGGSAGWMTAATLSKVLDLSKYSVTLIESEDIKGVSVGEATIPQITLFNRILGIDEADFIRATNATYKLGIEFKDWKRKGHAYFHPFGTFGINMEALPFHHFWLKRFNEGAGGDLCSYSIEAMAAKSGRFGKVNAQNNSPLANMSYAYHFDSTLYANFLRDFAVKRGVRHIKGKVEAVSKHPNGHINTLTLQNGHCIDGEFYIDCSGFRSLLLEKEMGATFNDWSDLLPCDSAIAIPCKSADSMLKPYTQSTAKNAGWTWRIPLQHRIGNGYVYASKFTEKEAALDDLMAQLEGEPLAEPNFLAWKTGMRPQSWIKNCLGIGLSAGFIEPLESTGLHLIQSAIARLMTLFPSNRFCQSDIDMYNRQTTKEFEQIRDFIVLHYALTERNDSEFWRYCRNISLSESLEQKVQLYKDSGRIFRIDNELFNETSWLAVMHGQGLRSEGYHPLVDRMSTSLIDERLSHIASVINKSASLLPEHAHFIAQLNVK

SEQ ID NO: 85783 - protein, 513 aa, Sphingomonas sp.
  REGION 1..513: note = tr|A0A031I6N1|A0A031I6N1_9SPHN Tryptophan halogenase; OS = Sphingomonas sp. RIT328 OX=1470591 GN=BW41_00535 PE=4; SV = 1
MSRGRRILIVGGGTAGWLTAAYLAKALGQSVRITLLESADIGIIGVGEGTFPTIRDTLRFLGIEEPAFVREASATFKQGVRFKGWQAADADGGHSYFHPFEPPFQSHETSLVPYWLLQDEAERPPFAEAVTIQNRVAEAKRAPKQPGEGDFAGPLNYAFHFDAVQLSRILANRARELGVEHVEGRLRTVALNESGQIAGIGTETGAFSADLYIDCTGFRAELIGKALGSPFHSVRNQLFTDRALTCKLPYDRPDAAIESYTIASAHEAGWIWDIGLSTGRGIGCVYSSRYMDDDRAAAVLREHLGPAAHGVVPRNLSFEAGWRTQPWIGNCVAVGLSGGFLEPLESTGVVLIEAAIGMIAELFPHQGPVDLPARRFNELMGARYANIVNFLKLHYCLSRRPEPFWRDNADPVSIPDRLRELLNQWRYRPPSRYDLQLDVESFAFFNYQYILYGMGFRTDLSEGREDFPDVAEARRLFARIKAFGERATRDLPSHRELVQRFAAPALTPARTGS

SEQ ID NO: 85784 - protein, 491 aa, Salinimonas sp.
  REGION 1..491: note = tr|A0A5B7Y8A5|A0A5B7Y8A5_9ALTE Tryptophan 7-halogenase OS=Salinimonas sp. KX18D6 OX=2572577; GN = FBQ74_00400 PE=4 SV=1
MTTTPKKIVIAGGGTAGWIAAAALARKMGPLVDVRLIESETIGTIGVGEATIPPLRTFHKLLQIDEQAFMRATSATFKLGIQFENWGHIGERYIHSFGVTGQQSWLAEFVHFFLSAKEKGLEGTYGDYCFELEAARQHKFATSQQSNIQYAYHLDAGDYVSFLKRFCSALNVTRTEGVISRVAQHDNGDISALHLESGEIIEGDFFIDCTGFKGLLIEETLETGFEDWSHWLLCDSACAVQTESTQPAPPYTRAAAHHAGWQWEIPLQHRVGNGLVYSSKFMDDEEARQTLLKNVKGEPLTSPRTLRFKTGRRKKAWHRNCLALGLASGFVEPLESTSIHLVMMGITRFMQLFPHSGHDPALIDEYNSQTQAELERIRDFIILHYHVTARDDSPFWQHCKDMQVPDSLISRITLFKEQAHAFQKLNELFRVDSWTQVMLGQGITPTHYHPAATMLSEDQLKNSLRQQRERVLAAVKQLPEHADFVKGYCGR

SEQ ID NO: 85785 - protein, 504 aa, unidentified
  source 1..504: note = Paraburkholderia sp.
  REGION 1..504: note = tr|A0A3N6Q990|A0A3N6Q990_9BURK Tryptophan 7-halogenase OS=Paraburkholderia sp. DHOA04 OX=2305225; GN = D1Y85_04605 PE=4 SV=1
MLDFRKMKNFVVLGGGTAGWFAALELRRMFGPAVSVTVIESPRVGVIGVGEGGILNFPEALIGRYGIDLDAFLEGTGAVFKLGFEYVGWNNGRDDDVFYHLFHRLPAEGEGRMIDGVAPYWSMLAAHGIGIHHAVYSLPFVLANASQSEVRKALEAAGGLMPWSLHFDAHRVAAWLKLAAMARGIETRVGNVVELLRDAESGHVRALRFEGEELPMPCDFLIDASGFARIALQKTMGSPLRSFTDYMSHDRAIPFYIPHPRPNPHLVTRSLAMSAGWIWQIPVRERVGCGYVYSSAYLSEDEALAEIESRLGQKIEPMPTLRFHAAHFPEVWVGNVMAVGLASGFIEPLEATSIGQMLGQLTMFGETVKQSCGVVPQSTISTFNHRNRLDWDGIRDFLCLHYDVPRRDTPFWRDVTSRAVPSTYSDLKKAWQLRTPRPVDFNAYRAGHVLHFDATSWFAVGQGVGVVPPAAAQADLDMLPREAVRSAEAFLHSVRIRNASARQS

SEQ ID NO: 85786 - protein, 489 aa, Sphingomonas sp.
  REGION 1..489: note = tr|A0A0Q6AHN6|A0A0Q6AHN6_9SPHN Tryptophan halogenase; OS = Sphingomonas sp. Leaf407 OX=1736369 GN=ASG37_16110 PE=4; SV = 1
MIVGGGTAGWMVAAALARHLGGAVRVRLIESAEIGIVGVGEATLPHIRQFVTRLGIDEGAFMAATDATYKLGIAFEDFGALGDRYVHPFGTFGRDLAGVGFHHFWLRAAADGRNTPIGAYSLGVAAAESCRFAVPRDDDLSLAASYGYAYQFDATKFGPFLRAFAEPLGVERTEAKVVSVDRDSASGNVTTLHLDSGEAIHGDLFIDCSGFRSLLLGQTMGEAWEDWSHWLPCDRAVAVPCASPPGEIEPYTRATAMAAGWRWRIPLTSRVGNGYVFSSAHLDEDAATAALLGAIEGPPLADPRVLRFKAGRRARSWVGNVVAVGLASGFLEPLESTSIYLVQMAIARLIELFPVDGGDDADRAEFNRLVDMEYDRIRDFLILHYHATRRSDSSFWNHVRTMEVPDTLAAKLDLWRATGRVERYGEGLFFEPSWIAVYLGQGVIPAGYDPRADIPPDAALARALQGLQGEIAASVAAMPGHAHALGRRP

SEQ ID NO: 85787 - protein, 561 aa, unidentified
  source 1..561: note = Ruegeria intermedia
  REGION 1..561: note = tr|A0A1M4UV20|A0A1M4UV20_9RHOB Tryptophan halogenase; OS = Ruegeria intermedia OX=996115 GN=SAMN05444279_1056 PE=4; SV = 1
MNNRLSKITIVGGGTAGWMTALILEMVFSRTSAPKDRPRICLIESPNIATVGVGEATVPRMPVTLRQAGISERDFFRETNASFKLGVKFCNWNKDAKGNRIDYVNPFAHGQMIEGLDAAEYFLRFGNGDRDFTQSIAPHDDLGRLCKGARPLGQPEFEQRFGYAYHLDAVKFAGMLTRVCTKRGVEHIQDEVQSVELDEQGNVSHLMLERKGRHDIEMVIDCTGFRGLIINQALGEPFMDYSDYLPNDRAMALQVEHPDPDKIESLTRATALGAGWTWRVPLFNRVGTGYVFSSAHRTDDQAADEYLEWLGDSGKGATPRVIPMRIGRVRNAWVKNCVAIGLAGGFIEPLESTAIHMIDHAVRWFAEHLPTKAIEPSLRTRYNRQMNKLYDEVLEFICLHYRLGNRTDDQYWIDARTQLKVPDRLAENLDLWQNRLPLERDIEFATLFDYRVYQTVLLGKQVYDTGYGPGIRDRLRPLKKPIWFQWWKGAKMDLAKILKTMPDHKTLLLDIRGELERPAFGKAVAAKPTVAMPGTVPAPVVVQNMPNLAEIRSGAKDLQLF

SEQ ID NO: 85788 - protein, 499 aa, Alteromonas sp.
  REGION 1..499: note = tr|A0A4P6AJU0|A0A4P6AJU0_9ALTE Tryptophan 7-halogenase OS=Alteromonas sp. KUL49 OX=2480798; GN = EYS00_01320 PE=4 SV=1
MTKNTIKTFVIVGGGTAGWMTAAALSRMLQPEHVSVTLVESDAIGTVGVGEATIPDIANFNKMLGIQEADFLKATSGTFKLGIEFSNWGKLGDKYFHPFGTHGVDMNGIDFHQYWLHSLSDSNHPPLESYSMCAVAAKQAKFSFPSSNPRAVTSSIRYAYHFDAIKYATFLREYAQQRGVNRVEGTIRQVSTNPKTGNIDALELESGQRITADFFFDCSGLRALLIDKTLGVQYKDWSHWLPCNSAQAIPTERTEPLLPFTKAIAQKAGWQWRIPTQHRTGNGHIYSRDFLDDEEATQILLDNVDAKPIGEPRTIRFTTGCRDQFWYKNCVAIGLSGGFLEPLESTSIYLIQQGISRFMSLFPSLNASEVIIDEYNRLMCREFEQVRDFIILHYKATERDDSEFWRYCSAMTIPDTLQHKIDLFKAGGRVFRDDNELFTRPSWIAVMLGQNIYPDNYDPMLANIPRSDIQRSLNSMSVSMTAAVEKMKTHAEFIKQYAK

SEQ ID NO: 85789 - protein, 511 aa, Alteromonas sp.
  REGION 1..511: note = tr|A0A4P6ALU2|A0A4P6ALU2_9ALTE Tryptophan 7-halogenase OS=Alteromonas sp. KUL49 OX=2480798; GN = EYS00_01540 PE=4 SV=1
MTESIKHIVVVGGGTAGWLTAGRIAAEHKENQAIQVTLVESPNVPIVGVGEGTWPTMRSTLIKLGIREDDFINQCDVSFKQGAKFAKWSKNIEEDFYYHPLVLPQGFSKVNLVPHWQQQGVSQSFSDAVCFQEALCEKGLAPKTIRNPQYGAVANYAYHLNAGKFSQFLQKHCTSNLRVKHVLADVRSVTENELGDIAHVTTEQAGDIAGDLFIDCSGFSALLIGKHYQIPFNSCNDVLFVDNALAVQVPYEQEDDPIASHTISTAQQAGWIWDIGLQHRRGIGHVYSSAFTSEDQAYADLSRYIGRNIDDLSVKKISFDSGYRDKFWHRNCVAVGLAAGFVEPLEASSLVLVELSAQMIAEQLPACRSVMDIIAKRFNDTFTYRWLRIVDFLKLHYVPSQREEAFWQENRAAHSIPESLKELMHLWRYHPPYDHDFTSNNEVFPAASYQYVLYGMGFKTDLSLYRTNDAEMALAKEQFHLNKMNIAKAVDMLPTNRELINKIKAFGLQAI

SEQ ID NO: 85790 - protein, 512 aa, Sphingomonas fennica
  REGION 1..512: note = tr|A0A2T4HYD4|A0A2T4HYD4_9SPHN Tryptophan halogenase; OS = Sphingomonas fennica OX=114404 GN=CV103_10470 PE=4 SV=1
MAKRIIIVGGGTAGWLTAAYLIRSLGRSGWSITLVESPDIGIIGVGEGTFPTIRETLSAIGVDEREFLREADGSFKQGVRFSGWTGGPTPGNDTDDYFHPFNLPYGGDEGLLPYWIKAAGEARRPSYADAVTVQGHVIRAGCAPKRASDPGFDGPMNYAYHFDAARFADYLRKVATANGVERIEATINEVRQAEDGRIAAVVPGDGREAIEGDFFIDCSGFRALLIGKALGSPFRHVGDVLFNDRALAMQVPHGDADTPIRPYTLATAHEAGWTWDIGLGARRGIGYVYSSRHSDDEAAERVLRAYIGKAADGLSPRQLRFESGYRSVQWIGNCAAVGLSAGFFEPLESTGIMLIEVAARMISDFLGSPAIDEAAMAAAARQYNRLMLARFDAIVEFLKLHYCISGRRDTAYWRDNSDAASIPEGLRDKLAQWRHRPPSRFDFVVDHETFLPASWQFILYGMGFCTDPAAVSSSHRDDEQAGAAFVRVFQAARQAVAELPPHRALLEQLRAA

SEQ ID NO: 85791 - protein, 503 aa, Lysobacter sp.
  REGION 1..503: note = tr|A0A5C7XQD2|A0A5C7XQD2_LYSSP Tryptophan 7-halogenase OS=Lysobacter sp. OX=72226 GN=E6Q50_00480; PE = 4 SV=1
MNSGRVTEIVILGGGTAGWMTAAALSKVLSPEYSIRLVESEEIGIVGVGEATIPMIKLYNQALELDEYEFIRQTMGTFKLGIEFVNWGRVGDSYIHGFGKIGQDLGLVPFYQYWLKMHQAGKAAPLDDYSINTYAARQNRFLPPVTDRPNSPLADIAYAYHFDASLYARFLRQYAEARGVKRFEGKVVGVEQNPETGYINALTLDKGDRIAGQLFVDCSGLRGILIEQTLKTGYTDWRHWLPCDRAVAVPCARTQALTPYTRSTARDAGWQWRIPLQHRVGNGHVFSSKFISEDEATAVLMNNLEGEALAEPRVIRYVTGKRNKFWNKNVVAIGLASGFLEPLESTSIHLIQSSIARLTAFFPHGGFDQADIDEYNLHSDFEFDKIRDFIILHYHATERDDTPFWNYVRTMEVPESLARKMALFNSNGRIFREGNELFAEPSWVQVMHGQRMSPKAYHALVDVYSEEKIADYMQNIRGVIANCMRVMPTHEEFIERQCKAKTM

SEQ ID NO: 85792 - protein, 506 aa, Alteromonas sp.
  REGION 1..506: note = tr|A0A4P6AU64|A0A4P6AU64_9ALTE Tryptophan 7-halogenase OS=Alteromonas sp. KUL49 OX=2480798; GN = EYS00_18670 PE=4 SV=1
MTTEKRAIQHIAIVGGGTAGWMTAAALSHHFKQSSVSISLVESSQLGTVGVGEATIPTLRRFYAKLGLTDLDVVAAADATCKLGIEFQDWRGKGSSFIHPFGLFGDKQQDIGFQHFWSKGQELGENADISQYSLGVSLAKNNKFTPPNPKPKSRLEIFDWALHFDAVKFAALMKKVATQNGVTHIDGKISEVTLCADGSIDSLKFEDNITSVNADLYIDCSGFHGLLIDKALNTPYIDWTQWLLCDRAVSVQTHVDESPITRTIAKAKQAGWQWRIPLQTRQGNGYVYSSQFIDKADATESLLNDVKGSPLHDPRHFSFTPGRREVAWNKNCVAVGLSAGFIEPLESTSIALIETAIDHLVQTFRQPAYSAADVQRFNEVTRDEYERVRDFIILHYKLNGRDDSELWCYCRDMPVPDTLQAKMDEYQREGKLTRYPWEIFGEDSWIAVYHGLEFYPKGYDKRLARVDEAMFVDQLKAMRTWIANVTEQVPPHEAFLRYAKQAQAAK

SEQ ID NO: 85793 - protein, 499 aa, Alteromonas sp.
  REGION 1..499: note = tr|A0A4P6AVR4|A0A4P6AVR4_9ALTE Tryptophan 7-halogenase OS=Alteromonas sp. KUL49 OX=2480798; GN = EYS00_19650 PE=4 SV=1
MSKAVKHLVIVGGGTAGWMAAASMQRFTSLGAFEITLIESPDIPTVGVGEATIPNIVNFNRNLGIDEIDFIRQTQATFKLGIQFEDWANQGSHFFHPFSDYGIAIDGIGFHHYVNRLNHAGHKLRLADYSVVCALAERNKFAQPLNPPPNPLADYAYAYHLDAGLYAEYLKKLSVSRGVNHISDNLAHVDIDENNGYIKAIQLASGQQIQGDFFIDCTGFKGLLIEQAMHTGYEDWSQHLLTDTALAVQTKSSGEPLPYTRCMAKKAGWQWRIPLQHRTGNGYVFASDFESHADAETSLLSNIDNTTITDLKTIHFTPGRRKKIWNKNCFALGLASGFLEPLESTSISLIQTAIAKLQTFFPHAGFSQASEDEVNRLHNQELERIRDFLILHYKLNNRDDSEFWKTCRDMTIPDSLAHKIAMFQDTGHIVEYDHESFEPASWLTMFNGFGIQPKQLDIRAEQIKEEKLVPYLAQMREAIRQAADNADTHQGFINKHCGV

SEQ ID NO: 85794 - protein, 496 aa, Hyphomonas johnsonii
  REGION 1..496: note = tr|A0A059FP76|A0A059FP76_9RHOB Tryptophan halogenase; OS = Hyphomonas johnsonii MHS-2 OX=1280950 GN=HJO_09859 PE=4; SV = 1
MVKSIVVVGGGSAGWITANLLNAHCRRAGRQTQITLVESPDIPTIGVGEATVPSIRRTLSDIGLPEQELLISAEATFKTLIRYKNWNLGDSYDHPFDRRRRPLTDGAVRRWTAQNNLPFDRSFSALSQLADNHISPKSPRQPQYQGAFPYAYHLDAIKLANRLASFGRERGIQHKLCKVTDVKVSPEGLISAVHTDQGEALTADLYVDCTGFRAALLGGGLGVKMKSFAKHLLCNRAVTMRIPYEVYKPERIVTYTQAIARDHGWQWDINLQTRRGIGYVYSSDFLSEDAAETALRQNEGPHSDGLEARHIRFTSGKRLVSWKGNCVAVGLADGFLEPLESSGLYLVEFAGRAIATMLDDFATAPQATARYYNRIVDELYDEILGFLNLHYVTSKRRDTPFWQAVTADDAILDDLRDRLELWKRRSPTEFDFPGADRLFAQDSYEFILHGMKYVDGPVSGAPAVPDMSALISKSRSELPDHEAILALVQRAAAARA

SEQ ID NO: 85795 - protein, 504 aa, Glaciecola sp.
  REGION 1..504: note = tr|A0A2N1HZP2|A0A2N1HZP2_9ALTE Tryptophan halogenase; OS = Glaciecola sp. 33A OX=2057807 GN=CXF81_02515 PE=4 SV=1
MNQNKLKIVILGGGTAGWMTANLMAARWKDKDIQLTLIESPDVGIVGVGEGSTPSLQNFFQEIGVQDSEWMPECNATYKNGITFEGWTSIPGFETYCHPFPSKMDNHTFPKFDRNCQLRRHNFDVEAHPDRFFLGSYLSQNQKSPKANHNFPFDHPNGYHFDSGLLGKFLRKKAQQCGVEHLSRHVTRVNQKENGEVRSLDFKEGESLEADFFVDCTGFAGVLLEKTLKVPYIKLDKMLFNDTAVVVATPSDKHSLNSQTKSTALKHGWAWDIPLTSRTGNGYVFSSKYCSIADAETEFREHLGLLEADVEVRTVKWKQGRLEKNWSQNCLAVGLSQGFLEPIEAMALHLVYNSIGHFITEFENGNFTNQNQQKYNQIIDRGFDGVVDYIVAHYRMNSRRDTEYWRDNAENQNMTPSFMAIVQSWLGSSPNNLAEEIRKYDSGSFFPLVSWQILFAGYGVFPSKENVKPQNQGNQSVNMYELDDFIKRCGSNYSAHLEALDALK

SEQ ID NO: 85796 - protein, 506 aa, Sphingomonas sp.; identical to SEQ ID NO: 82743
  REGION 1..506: note = tr|A0A0Q6A541|A0A0Q6A541_9SPHN Tryptophan halogenase; OS = Sphingomonas sp. Leaf407 OX=1736369 GN=ASG37_16130 PE=4; SV = 1

SEQ ID NO: 85797 - protein, 502 aa, Alteromonas sp.
  REGION 1..502: note = tr|A0A4Q8U6S5|A0A4Q8U6S5_9ALTE Tryptophan 7-halogenase OS=Alteromonas sp. KUL49 OX=2480798; GN = EYS00_17460 PE=4 SV=1
MHDPSKAPVKRVVVAGGGTAGWLSAALLKKVIGDAIQVTLVESEQIGTVGVGEATIPPIRLVNQVLGLDEAEFIRETKATVKLAIRFENWKTQGEHYYHTFGAPGKSLAFCHFHHFWLKARQQGHEHDLWEYDLNYLAAEAGKFARINAKDSVLDLPFAYHFDASLYARFLRKRCEMMGVTRVEGKINHVVRHGESGFITGLSLDNGNTIEGDLFIDCTGFQGLLINKTLGAGYDDWSHLLPCDSALAVPSERHEKTAPYTRSIAHSAGWQWRIPLQHRNGNGHVFCSRYISEDEAQHVLMSNLDTKPLGDPKLIRFTTGRRRKQWLKNVVAVGLSSGFLEPLESTSIHLIQSAIVRLLNLFPHNGVSDSLIDEYNKQSELEYEQIRDFLVLHYIQNERYESRFWNDIRNIDVPDSLKHKMELFRQNGTLVREQNDLFSEGSWLQVMYGQGITPQDYHGIVNSMSDEKIQSMLSSIYDIKREPLAQIPDHDTYIEMLCKSAR

SEQ ID NO: 85798 - protein, 546 aa, Mycobacterium marinum
  REGION 1..546: note = tr|A0A2Z5YHX6|A0A2Z5YHX6_MYCMR Tryptophan halogenase; OS = Mycobacterium marinum OX=1781 GN=MMRN_38050 PE=4 SV=1
MDDNLIKKVVVLGGGTAGWMTAAYLGKALQGNVEITVLEAPSVPRIGVGEATVPNLQRVVFDFLGIPEDEWMRECNASFKTAVKFINWRTPGEGSPVARQWQGRPDHFYHPFGLLPSPQHIPLSHYWARNQLKGGTYEPFDYACFREPAIMDAMKAPRYLDGTQATYYAWHFDAALVADFLRRFATKNLGVVHVQEKMTSAEKDSNGYITALRTEEGHRLDGDLFVDCSGFRGLLINEAMNEPFIDMNDHLLCDSAVATPIRHDDAANGIEPYTSAIAMKSGWTWRTPLLGRFGSGYVYSSQFASQDEAIRDFCTLWQLDPEDTPLNKIRFRVGRNRRSWVKNVVSVGLSSCFLEPLESTGIFLIYAALYQLAKHFPDRRFDPVLIDRFNRKIDTLFDETRDFLQAHFYFSPRTDTEFWRANKELTLTDSIKEKVAMYKAGVPVNPPIATESSYYSNFDAEFENFWTNGSYYCIFAGLGVLPDHTLPAINYQSEAIHEADALFLDVKQKQRHLVETLPSNYEYLLKLHGKDMEPNDPMEPEVTFVA

SEQ ID NO: 85799 - protein, 439 aa, unidentified
  source 1..439: note = Caballeronia cordobensis
  REGION 1..439: note = tr|A0A158G402|A0A158G402_9BURK Tryptophan halogenase; OS = Caballeronia cordobensis OX=1353886 GN=AWB70_01546 PE=4; SV = 1
MSEATQAWDVVVIGGGPAGSTAATLLADRGYRVRVLEKARHPRFHIGESLLPANLRLFEKLGVGDEVRAIGMVKRAAEFVSPQHGNRTQRFLFADAWDKSMPSAYQVRRSELDEILLRNAAKHGAHVSEGCRAREVAFAPDHSSATIGVEHDDGRIEQVRARFVVDASGRDTLLANQFKTKRRNERHNSSALYGHFRNARRNEGEHEGNITVFWFEHGWFWFIPLADGATSIGAVVWPAYLKRRPKGTSVEAYFRETIALCGPLAERLKDAELISEVHATGNYAYTGDMTHGRNFLLLGDAFAFIDPVFSSGVMLAMQSAFAGAEAIDEALSNPARAQAALAKFDRDVRHGPREFSWFIYRMTSPTMRNLFMGPRNPLRMKEALLSLLAGDIFGTTPIWHSLRAFKGIYYATALLDWRNSLRAYRMRRRNLSEAESPAN

SEQ ID NO: 85800 - protein, 503 aa, Hyphomonas johnsonii
  REGION 1..503: note = tr|A0A059FS99|A0A059FS99_9RHOB Tryptophan halogenase; OS = Hyphomonas johnsonii MHS-2 OX=1280950 GN=HJO_05840 PE=4; SV = 1
MEKEPAVNDQVVKKVVIAGGGTAGWIVAAALSRQLGPLIDITLVESDDIGTVGVGESTIPTHRTFHHLLGIDEREFMRATQATFKLGISFEGWGEIGDHYFHSFGMVGKSTWMADFHHIWLQAREMGLAGELGDYCLELKAAQAGKFATSEKSQINFAYHLDAGVYAGFLRKLAEAYGTKRIEGLIETVEQDGETGNITTLVLRSGERIDGDLFIDCTGFRAMLIGKTLNTGFEDWTQWLPTDRALAVQTESTGPALPYTRAIAHDAGWRWRIPLQHRVGNGLVYCGENLSDDEARARLLAELDSEPLTEPRLIRYRTGRRDNIWVKNCVSIGLSSGFVEPLESTSIHLIQIHAMRLVQMFPFHGISEALSRRYNHLARIELEQIRDFIVLHYKLTERTDSVFWRDRAAMPIPDSLRNRIELFRDTGLIHQEKSELFQVDSWLQVMMGQRLQPQGRHHLGRLMSTEQMQIALNGLRANVARGVDRMPLHQDFLNSYLGEPVGA

SEQ ID NO: 85801 - protein, 529 aa, unidentified
  source 1..529: note = Phycisphaerae bacterium
  REGION 1..529: note = tr|A0A2E1M7R7|A0A2E1M7R7_9BACT Uncharacterized protein OS=Phycisphaerae bacterium OX=2026778; GN = CMJ28_07340 PE=4 SV=1
MDLRVRHHYHSCMQSINVEEGNEPAIGPDDRIERVVILGGGTAALLAAAAFARHLPDIEVVMVRSTKMGIIGVGEGTIVTIGRFLHEYLGIDPLRFHREVHPSIKLGIQFDWGAEKPYHYSFTPQYSAGNPAQSRLAHRVGDYCHSEATFADLSSSLMYHGKVAITDPAGNPSQSPSFAYHLENRRFVGFLEQWVKEQGIEAVDAIVEQVDVGEKGVTSLRLDNGQTMTADLFVDCSGFRSELLGTALEEPFVSFKEALPCDRAVVGGWQRSDETYNAFTTAQAMDSGWSWQIEHDEIINRGYVFASDFISDDAAESEFRRKNPKVVDTRVIRFRSGYHRRSWIGNVVAIGNSAGFVEPLEATAIGFMCTAINHLVSFLKTGGHAVADVQRDLFNRHQEENWLQTRDFLAMHYKPNRLSRSAFWDFCREEQPLGDAQEILDFYQAVGPDFRALQPRLRTDSFGAEGYLAILVGQQVPHRGRKTMTTAEVDSWTEWRQNCSRQAERGVGMAEYLDRIRQGRLRLRFSPAN

SEQ ID NO: 85802 - protein, 521 aa, unidentified
  source 1..521: note = Xanthomonas manihotis
  REGION 1..521: note = tr|A0A0W7YLL6|A0A0W7YLL6_XANMN Tryptophan halogenase; OS = Xanthomonas manihotis OX=43353 GN=AO826_04525 PE=4 SV=1
MPDTTPSDPQQRPVRRVVIAGGGTAGWMAAAALSKLLGRHLQITLVESDEIGTVGVGEATIPSLVTFHRLLEIDEAMFMAATQATIKLGIAFEHWRDVDQHYIHSFGHAGTDHWSAGFQHFWLKGRQRGVARDFGDYCLELRAAQEGRFAHLPNGGMNYAYHLDAGLYARFLHRFSEGFGVQRIEGRIGQVETDPESGFLTALTLHNGARVEGDLFIDCTGFAGLLIGKTLGVGSDDWSRWLFADSALAVQTESVGPPVTYTRSRADQAGWMWRIPLQHRVGNGIVYSSRYMDQDGARAVLERNLTGRALTEPRPLRFTPNQRHRVWEKNCVALGLASGFLEPLESTNIHLIQRGIIRLLQTFPQVINAVDIAEYNRQAAQEITHIRDFVILHYHATDRRDTPFWRDCAAMDIPDSLRHRVELFRQSGRVFHQANELFAENSWVQVMLGQGIVPQQHHPVADLMGDAELGRFLETIRTRVEAALVRLPAHADFLQRYCPAPPLPEPAARVPAPQVMATPAG

SEQ ID NO: 85803 - protein, 509 aa, Xanthomonas axonopodis; identical to SEQ ID NO: 82725
  REGION 1..509: note = tr|Q8PFD2|Q8PFD2_XANAC Tryptophan halogenase; OS = Xanthomonas axonopodis pv. citri (strain 306) OX=190486; GN = prnA PE=4 SV=1

SEQ ID NO: 85804 - protein, 514 aa, Sphingopyxis sp.
  REGION 1..514: note = tr|A0A0W1EQD2|A0A0W1EQD2_9SPHN Tryptophan halogenase; OS = Sphingopyxis sp. H038 OX=1759066 GN=ATE68_18650 PE=4; SV = 1
MAKRSILIVGGGTAGWLTAAYLARFFDLPRNPRLSITLLASDEIGSIGVGEGAFPTIRNTLQFIGIDESAFVRATSATFKQGIRFDDWVRAPAEGQSSHFLHPFEAPYHGDGYSLVSYWLLQDEATRRPFAEAMTIQNRVAEAQRAPKRPGEGEFTGPLNYAYHFDAARLAEVLSAQARAMGVQHLRGTLTGVGLDPETGAIDHVVTAEHGTLAADLYIDCSGFRAELIGGALQSPFRGVRDQLFTDRALACKLPYDRPDVPIESYTIAAAHEAGWTWDIGLAGARGIGCVYSSDHMSDERAAEILAAYTGGRSHDVNVRSIPFEAGYRPASWIKNCVAVGLSGGFLEPLESTGLVMIETAAAMIAEMFPLNGPVGAPARRFNELMAARYENTINFLKLHYCLSQRGEAFWRDNSDPASIPDRLKELLEEWRYRPPGRFDFILDLESFAFFNYQYILYGMEYRTDLSPVREEFPDTAEAERIFARIRSFGDRAASELPAHRAMIDQINAGAAYT

SEQ ID NO: 85805 - protein, 536 aa, Sphingomonas sp.
  REGION 1..536: note = tr|A0A430CR90|A0A430CR90_9SPHN Tryptophan 7-halogenase OS=Sphingomonas sp. S-NIH.Pt1_0416 OX=1920123; GN = BRX36_05180 PE=4 SV=1
MSQPSIPDHAIRQVVIVGGGTAGWMAAAAFARLLNNGYTQVTLVESEEIGTVGVGEATIPPIQTFNQMLGLDENDFLAATAGTFKLGIEFVDWGQRGERYFHPFGRHGQDLQGVHFHQLWLRERSRHGLPDIAEWSMSAMAARAGRFGRARPDAQSPVRELFYAFHFDAGLYARYLRGYAERGGVTRIEGRIEGVALRPEDGYVEAVTLADGRRIEGDLFIDCSGFRGLLIEGALETGYESYAHWLPCDRAVAAPCALPDPREPDPFTRATAREAGWQWRIPLQHRMGNGLVYCSDHLADDDAEAQLLSALEGELLGDPRRLRFTAGRRRESWNRNVVALGLSSGFLEPLESTSIHLVQAAIQRLIALFPDKRFDPAERSEFNRQMRDLYEDVRDFIILHYKATRRDDTPFWNRVRTMEVPDSLARKMTLWAGKGRLFREGYDLFSNPSWVAVGLGQGIVPQHWEPAVDALDEDLVAQALEQMRAGYADTAARLPSHGDFLRATAPSPLAPGLTGNTGSGFDFARQSGTPRRGPLL

SEQ ID NO: 85806 - protein, 507 aa, Caulobacter sp.
  REGION 1..507: note = tr|A0A2G4KHW8|A0A2G4KHW8_9CAUL Tryptophan halogenase; OS = Caulobacter sp. BP25 OX=2048900 GN=CSW59_01045 PE=4 SV=1
MTSVRKIVIIGGGTAGWMSAAGLAAVLKGLPVTIELVESAEIGTVGVGEATVPHIRDYNARLGLDEADFMRRTQATYKLGIEFRDWGRRGESYIHPFGAYGHTIGGVPFHQHWLRARAHAEAAGQSFDPIERYSLPIMASRAGKFAPPASDPRSLGSTYNYAYQFDAALYALYLRDYSEARGVTRTEGKIVAVDQRPEDGFVTAVTLEDGRRIEGELFVDCSGFRGLLIEQTLKAGYDDWTHWLPCDRAVAVPCASVEPPVPYTRATSDQCGWRWRIPLQHRVGNGYVYCSGYIEDDEAAHVLLSKLDGQAQAEPRVLRFVTGRRRKAWLKNVVAIGLSSGFLEPLESTSIHLIQVGISTLLELFPNSGCEAADQDEYNRVMVLEFERVRDFLILHYHANQRTDSAFWNDRRTAPIPESLAYKLALFRERGAVVAYKDGFFKEPSWLSVYLGQNVIPSGLDPLVEAVPTVDSARVMAELKAAVARAVQAMPSHEAFLRSLVGPRVPA

SEQ ID NO: 85807 - protein, 589 aa, Microcystis aeruginosa
  REGION 1..589: note = tr|A0A3N0X4G5|A0A3N0X4G5_MICAE Tryptophan halogenase; OS = Microcystis aeruginosa FACHB-524 OX=2486203; GN = ED562_02465 PE=4 SV=1
MQMTQDKEYDVVIMGAGFAGLCQARHLMLKIPNIKVALVDPRPEQRTDKDLKIGESTIEIAALFLAKELGLHDYLIENHAPKQGLNFHWPKNPAKTETIDDYYHAGSNRQVPIPSFQINRSKFEQDLLKMDKAMGINFYNGQVVDVDLTPGDAIKTVKIKVGDERMELQAKHVIDAAGRKFIIGRKTDNLLFGPENLMGLNTGSAWVRVKNVDRTIFHSGYDPLNASTSHYYSTNHYFGEGHWLWMIPIDTQTMELSIGVIHHHDVINSTQVNSQEKFHDFLRNNHQILANIIDSGEAVDFHYWPRISHTSKTLFSPDNWYVLGDAAYIFDAFYSYGTTTIALAIEGITEIVRAKLAGEADAEQKRAAYNEFNLAYSRSVNCLYRGHAKQLGQASVMSWRIYFEYMWWFGVQVPMYVGKWHLDLTYIPIFLKTLNSNIDGLFADLNEQFTELADKDVNIGLMDCYRGDQLFKGYHTLKHFDDFLENTKFEPRRCNVFAGLKATCFYAALWYALFQWKGFGIQGCLNPRHIYHFLRLLGLSGQATIGELIYKFKTKGLPANSEIEAMRQEFKTYQYQPKLQPWLAEATNS

SEQ ID NO: 85808 - protein, 502 aa, unidentified
  source 1..502: note = Erythrobacter lutimaris
  REGION 1..502: note = tr|A0A395LNU5|A0A395LNU5_9SPHN Tryptophan 7-halogenase OS=Erythrobacter lutimaris OX=1538146; GN = DL238_05860 PE=4 SV=1
MAIEKIVIVGGGTAGWMAAAALSRLSESRRVCVTLIESEQIGTVGVGEATIPPMREFNQLLGIDEREMMAATQATFKLGIQFANWGNVGETYLHPFGNYGYQLDGLSFHQVWHRAKSEGDKRPLQVFNLETMAAYFGKFARTQDYERDDLPPMNYAYHLDATRYAAFLRGYAEKRGVVRREGRVSDTTLDGASGFVRSVTMDDGTEMAGDLFVDCSGFRGLLIEQALETGYEDWRHYLPCDRAVALPCAREDGSPPAPFTKATAHSAGWQWQVPLQTRNGNGHVYCSEYMQDDEALDILTANIAGKPQADPNFLRFVTGRRKKFWNRNVVALGLAAGFMEPLESTSIHLVNTGINKLIAILSLDGITQTQEDAFNRLTAKEYARIRDFLVLHYNATRRDDSPFWNHVRTMDVPDTLLEKIDLFRSNGQIFREEDELFTETSWAAVMLGQGIEMGGHSPIAQTMSVTDYRQEFDEMENSIRYLVGHMPAHAEYLARYCPAQAV

SEQ ID NO: 85809 - protein, 587 aa, Microcystis aeruginosa
  REGION 1..587: note = tr|A0A3N0X4H9|A0A3N0X4H9_MICAE Tryptophan halogenase; OS = Microcystis aeruginosa FACHB-524 OX=2486203; GN = ED562_02470 PE=4 SV=1
MNTTQALHYDVVIMGAGFAGLCQARHLMLNIPNIRVALIDPRPENRPDTDLKIGESTVEIAALLICKELGLHDYMIENHPPKAGLNFHWPKNLAETDSIDDYYHVWINRQPPIPTFQINRAKFERDLLKMNKEMGAIFYNGRVVDVDLTEGDQLKTVTVKLEDTTIEITAKHIVDAAGRRFIIGKKTDNLIFGSDQLLGVNNGSAWVRIKDVDRTIFHSGYHPAGTTVSHYYATNHYFGPGHWLWMIPIDRDSKELSLGVIHHHDVIPAATINTQEKFTAFLKANHTVLYKLLQNSELVDFHYLPRVAHKSKVMFSHDNWYVVGDSACIFDAFYSLGTTMIAIAVESITEIIRAKLANEANAEEKRAVYNDFNLAFSDSVNTFMQEHQKQLGHASIMSWRIYFEYMWWFGVLVPMYIGKWHLDPAFLKQFTGPFRTFLNGLFVDVYQDCNKLVERGVNMGLMDAIRADQLIGSYYTFKHFEDFLENSKLEPQRCNIFTSMKNTFFYVAIWYAMFQWKGFGWRGLLKPRNLAHFSYLLAQSGLSALGEMRHNFLTRSLPDNSEIEEMRQEFKEYRYQGKLQPWSAELS

SEQ ID NO: 85810 - protein, 508 aa, Sphingopyxis sp.
  REGION 1..508: note = tr|A0A0W1F0N8|A0A0W1F0N8_9SPHN Tryptophan halogenase; OS = Sphingopyxis sp. H038 OX=1759066 GN=ATE68_04955 PE=4; SV = 1
MNSAIERVVIVGGGTAGWLAACLLASAPRAAKLDVTLIEAPDIPTIGVGEGTWPTMRATLASIGIGEAEFLAACDGSFKQGSRFDGWVTGAEGDRYLHPFTLPPAAPTAELLAAWQTGAPELPFAAAMTAQAHVCDLDLAPRQRAMPDYQGAANYAYHLDAGKFADLLAMHAVQRLGVRHISDHVVDVARDGAGGIASVATRQNGDIAGDLFIDCSGHASLLIGNHLGVGWIDRGDILFNDRALAAQVPVAPGSAIASQTVSTAHAAGWIWDIGLPGRRGIGCVYASRFMDDDAAEATLRAYIARVLPDAPEVPARRLTFPTGHRARFWEGNCVAVGLSAGFIEPLEASAIVMIELSLKALIDNFPARRAAMPIHADRFNDLFRYRWDRIVEFLKLHYALSRREEPYWLAQRDPAQMPPRLTEMLALWRDQPPSAWDFPRVDEIFSAESHQYILYGMGYPVPADLPASERAAALLAENRQRARALAAALPANRDYLDALGPGAQAAAR

SEQ ID NO: 85811 - protein, 508 aa, Shewanella sp.
  REGION 1..508: note = tr|A0A2I0DU61|A0A2I0DU61_9GAMM Tryptophan 7-halogenase OS=Shewanella sp. GutDb-MelDb OX=2058316; GN = CXF82_10685 PE=4 SV=1
MDIKTIAIVGGGTAGWLAANHLGKAALSNEHLSVTLIESPDIPTIGVGEGTVPAIRQSLQSFGISETEFIRCCDVTFKQSIKFANWQDKVKHPENNFYHHLFDMPGPVTEGLTRLWLSRKTGTYAEAVSPQHAVCEAYKSPKTISDAEYKGHLGYAYHLNAAKFAKLLGVNAKANFNVKHISANVNDVIMGTEGEIKSLVTDTAGTLEFDFYIDCSGFASLLIDKALHVPFISKADQLFVDKAIAVQVPTDADSVIPPFTVATAHQAGWIWDIALSHRRGVGFVYSTKYMDDATALVKLDKYLGGKLAEYQHRTLPMTVGYRERSWEKNCVALGLAQGFLEPLEATSILLTDFAAGFLANRFPASATQLTAVRDRFNHVMGYAWERVVDFIKLHYCLSDRSDSQFWIDNRDPKTMSVELIKRLSLWQDFAPNREDFFSKFEVFDLENYLYVLFGMNKTPDCKISLPDELAHIEKQGQRLEEVTRQLVKELPNHRELLEKIKQYGLQKL

SEQ ID NO: 85812 - protein, 371 aa, Caulobacter sp.
  REGION 1..371: note = tr|A0A2G4KHZ5|A0A2G4KHZ5_9CAUL Tryptophan halogenase; OS = Caulobacter sp. BP25 OX=2048900 GN=CSW59_01050 PE=4 SV=1
MKRVLISGGGVEAWMTGAALATAGRGVLEVQVADQGRRPEGRIAALPALRGLHARLGISDESLASEAGARPRLGARYNDMLEPFGQTGAALDGVAFHHHWRAAGKPAALEAWSLAAQAASRGRFTPGSADPRSPLSTLDHGLTLDAAAYADLLKAVALKAGAEIAPTNAHVEVIIDTAATSPGDDWIDWSAWLSTGRRLADDTGLVSTFEPAPLSAGRRTHAVSGNRVAIGAAYAAFGAGDGGDLHLLQGAIARLISLFPDTPAAAAEFERLSAASAERARDMAILRWGDLSAPPEELAWKIAQFESRGRVVMYDEEVWPESAFVHAFLARGITPRRTDPLALRQPPERVRDLLERMRRVLEQTAEAMPRA

SEQ ID NO: 85813 - protein, 513 aa, Sphingomonas sp.
  REGION 1..513: note = tr|A0A430CNA7|A0A430CNA7_9SPHN Tryptophan 7-halogenase OS=Sphingomonas sp. S-NIH.Pt1_0416 OX=1920123; GN = BRX36_07250 PE=4 SV=1
MDAHPTADRIARRPAQQRVVIVGGGTAGWMTAAALARFVPVGTRITLIESDAIGTVGVGEATIPGIRLFNQMLGLDEAAFLRETNGSFKLGIRFEGWLGEGSGYLHAFGSIGRALGLVPFHHYWLRGGGAANPASLWTHMASAQAAMAGRFAPDPGRPDLPSGLAWAYHFDASLYAALLRRHAEAAGVVRIEGRIASVTRDASGRIDHVVLEGGEAHSGDLFIDCTGFRALLIGETLAEPFDDWSELLPCDRALAVAGERAAPLPPYTRAIAHGAGWRWRIPLQHRTGNGLVYDSRHLSDDEAAARLLSALGNEAMGEPRLLRFTTGRRRRAWVGNCVALGLAAGFLEPLESTSIHLIQSGIARLLDYWPGTTLQSVEVDAYNREAEAEWLAIRDFLILHYHANARPEPFWAERRAVPLPASLAARIALFRANSRFRREGDELFAEPAWVQVMVGQGILPAGHHALADALSADELDDFLSLTRRHAAQVASRLPTHDAFLAAHCAAPAQRVTP

SEQ ID NO: 85814 - protein, 533 aa, Streptomyces sp.
  REGION 1..533: note = tr|A0A249M193|A0A249M193_9ACTN Tryptophan halogenase; OS = Streptomyces sp. CLI2509 OX=1984801 GN=CAC01_22670 PE=4; SV = 1
MPETDNRIRKVVILGGGTAGWMTASYLGKALQGTVDIQVLEAPAIPRIGVGEATVPNLHRVLFDYLGIPEEEWMRECNASFKMAVKFVNWRTPGRGEPDSRTRPDGKPDHFYHPFGILPDHDNTPLSHYWFKNKYEGVTDKAFDYSCFREPPVMDAKKSPKWMDGESSTRYAWHFDAALVADFLRRFATDKQGVEHIQDEMVRAEQDERGYVTALHTKSGRVLDADLFVDCSGFRGLLINKALGEPFIDMSDHLMCDRAVATAVPHDDDANGIEPYTSAIAMSSGWAWKIPMLGRFGSGYVYSSRFTTQEEATREFCELWNLDPETTKFNHVRFRVGRNRRAWVNNVVSIGLSSCFLEPLESTGIYFITAAIHQLAKHFPDRTFPQALVDSFNEEIEVMFDDTRDFIQAHFYYAPRDDSEFWRAQKTLKLPENIQRKIAAYKAGLPINSPITDESTYYGNFEAEFRNFWTNGSYYCVFAGLGLEPDAPLPALAHKPESVAGAQPLFTKVAQEQRHLLETLPSAHDYLRRLHAK

SEQ ID NO: 85815 - protein, 507 aa, Brevundimonas sp.
  REGION 1..507: note = tr|A0A0Q5LJZ3|A0A0Q5LJZ3_9CAUL Tryptophan halogenase; OS = Brevundimonas sp. Leaf168 OX=1736283 GN=ASF81_14230; PE = 4 SV=1
MTQDNAGPIRKIAILGGGTAGWMTAAALSHRLAGGAVSIELVESDEIGIVGVGEATLPHIRAFNTAMGIDEQTLIDQTQATFKLGIQFVDWGRRGDSYIHPFGAYGEPIEGIDFHHVWAALRAMGDAADISDYSYPVRAAQANRFQRPVSDPGSMLSTFSYAFQFDASLYAAFLRQVSCGRGVVRTEGKVVDHVLNRATGEVDAIVLSDGRRISGDLFVDCSGFRGRLINQALETTFEDWSHWLPCDSAFAVPCRTTAPVGPYTRATARAAGWQWRIPLQHRTGNGHVFSSAHISDEDAVATLMSNLEGPALAEPRRLGFKTGRRQRLWSRNVVAIGLSGGFLEPLESTSIYLIQLGITTLLDLFPDRVGMAADAQEYNRIMALEFDRIRDFLVLHYVANQRDEPFWREMRTMPWPDSLSAKVEAFKSRGLLPDYDIGVFLPPSWLAVLVGQNIVPNGWDPRVDRLEPHVLSDKLGALRDAVRSTVDRTPDHMTFIRDAAARARGLQ

SEQ ID NO: 85816 - protein, 510 aa, Kinneretia asaccharophila
  REGION 1..510: note = tr|A0A4R6N049|A0A4R6N049_9BURK Tryptophan halogenase; OS = Kinneretia asaccharophila OX=582607 GN=DFR39_109152; PE = 4 SV=1
MKIKRIAIVGGGTAGWLAANHLGRELHGDREVEITVIESDEVPIIGVGEGTVPSIKTSLRKFGISELDLLLSCETTLKTGIKFSGWLDAQRHGAGHHYYHPFSTPFPEGLDLTPSWLLQGRRPDYQDVSIAARLSEAGLCPKRIESPPYEGEVDYAYHVNAYQFARLLARNAQARFGIRHVVGTIIGADRDETGKVSALRMKTGERLGFDFYVDCSGFASILTQQTLRVPFVDKSHQVLTDTALVQQVPFEATAAIPPYTLAQAHRAGWIWDIPVLQRRGTGFVYSSRHMSEDEAVRTFAAYLGRSEADFQPRKIRMQIGFRQQFWVSNCVALGLAQGFVEPLEATSILLTDFTADLLAKNFPREHGDEARLQPHFNRLAQNAWERVIDFVQMHYHLSDRDDSAFWRDCRYGTHLSDLLQERLDTWRLRPPIASDFASRFEMFNVENFLYVLYGMKFPTRGFPVSPKELDSSAAQFVGLQACTDQLASELLPHGHWLRELHAALAAQGTP

SEQ ID NO: 85817 - protein, 495 aa, Salinimonas sp.
  REGION 1..495: note = tr|A0A5B7YA64|A0A5B7YA64_9ALTE Tryptophan 7-halogenase OS=Salinimonas sp. KX18D6 OX=2572577; GN = FBQ74_03900 PE=4 SV=1
MSQPHRIVIVGGGTAGWMAANLFAHHFKHHPVTITLAESDNVPTVGVGEGSTPSLKQFFRDLGIEDAQWMPRCQATYKVAIQFHGWSPASGNSSYRHPFISQLDTFSERAFYVNSQTRRLGLDVTTSPDAFLFNSYLAEQKRSPLTPDNFPFRIEYGYHFDAGLLGEFLKEHALSQGVRHTVCDVQDVALHPNGDIRALIDSNDNEIHAELFVDCTGFNSLLLQKALKVPFSSFSDNLFNDRAVVLPTPADPSAPVETQATALSAGWTWAIPLQHRTGNGYVYSSQYISDDQAETELRTHLGMLEDDAPARFLSMKVGQADKHWYRNCLALGLSQGFIEPLEATALHLVQLSIRFFCEAYVKGNFTAQHQVSCNQKITGHFNNVRDYIVAHYKLNTRNDSAYWRDNRNNMHLSENLLQILDTWYRREDLARFLSEKSHATHFGATSWHCLLAGYGAFPGLAPEQPGTGDLFKEHQLASFFNGCLLNFSPQSQRLP

SEQ ID NO: 85818 - protein, 424 aa, Streptomyces sp.
  REGION 1..424: note = tr|A0A0N0SWQ3|A0A0N0SWQ3_9ACTN Tryptophan halogenase; OS = Streptomyces sp. MMG1121 OX=1415544 GN=ADK64_37990 PE=4; SV = 1
MSPTLPGVTDDFDVIVIGGGPAGATTAGLLAKRGHRVLLLDRERFPRYHVGESLIPGVMVPMEELGLVERMEAKGFERKYGGTLVWGNNEVPWNFSFTTGGRIPYAFHTRRADLDALILDRARELGVLVVEDATVKDSIEEDGRVVGVRYNLRGLNASHEARGRLVIDASGQARVIGRKYTEVNWNEQLRNVAVWTYFDNCHRLPGDEWSNILIEGTADGWFWGIPIDKGVFSVGYVTRSEVASGSDKSLEDLFQSEIASTTKLKDILKDATQAAGYRSARDWSYTQDRFHGNGWVLVGDAAAFVDPLFSTGVALATLAGSTLSKVVDQILNHPEIEEKALDRYSTAYQDFFHDIRQFVEGFYDRSKTKGFYFNLAQDINDPDRKNDAEVDFVKLISGLSGRAGGLFELDVDDLIADATAVSAD

SEQ ID NO: 85819 - protein, 509 aa, Caulobacter henricii
  REGION 1..509: note = tr|A0A0P0NWY5|A0A0P0NWY5_9CAUL Tryptophan halogenase; OS = Caulobacter henricii OX=69395 GN=AQ619_03815 PE=4 SV=1
MDENGRTGEAIRRIVIVGGGTAGWMTAAGLSAVLGGTRIAIDLVESAEIGTVGVGEATVPHIRNFNAKLGLDEADFMRKTQATYKLGIEFRDWGRKGESYIHPFGAFGQPLGGVAFHQHWLRARQRGEADSIEAYSLPIIAARLKKFAPPATDPRSLGSTFSYAYQFDAALYAQYLRAYAEARGVRRTEGKIQDVSLDGETGFVQAVILESGQRIEGDLFIDCSGFRGLLIEQALKTGYEDWTHWLPCDRAAAVPCDSVEPPTPYTRATSDDAGWRWRIPLQHRVGNGYVYCSHYISDDEAARVLLAKLDGKAQADPRFLRFTTGRRKKQWNRNVVAIGLASGFLEPLESTSIHLIQLAVSTLLELFPERGCATADQDEYNRVMDLEFERIRDFLVLHYHATQRDDSAFWRDKAAAPIPDSLAYKMALFRDRGVVVKYRDGFFLEPSWLAVYLGQNILPRGYDPMADAIDPAEAARKLAELKAAVQSTAEAMPDHQAFLERFCDARGAA

SEQ ID NO: 85820 - protein, 502 aa, Caulobacter sp.
  REGION 1..502: note = tr|A0A2G4KJ46|A0A2G4KJ46_9CAUL Tryptophan halogenase; OS = Caulobacter sp. BP25 OX=2048900 GN=CSW59_01055 PE=4 SV=1
MTASIREVLIIGGGTAGWMTAAALAKALPPGVRVRLVESEQIGTVGVGEATIPPINTFNQVLGLDEADFMRATKASFKLAIEFVGWMGEGHRYLHPFGNFGLDIEALKFHQAWLRALHEGWAPPIDAFNLSAQASHLKRYAPPARDPGQVLSSLKYAFHFDAGLYARYLRAYAEQRGVIRIEGKVAEVRQHGETGFVTGVALESGQALEAELFIDCSGFRGLLIEQALQAGYDDWSHWLPNDRAVALPCVTGGDGLTPYTRATADAAGWRWRIPLQHRTGNGYVYSSKHISDDEALSRLRATVDGEPLGEPNFLRFQAGRRKQAWVKNVVAIGLSSGFLEPLESTSIHLIQAGITKLLALFPHTGFDPVEIAEYNRLTALQVELIRDFIILHFKANGRDEPYWRDARAMAIPQSLQHKIELFAASGRLFVSDYDLFAEASWIAVLLGQGVVPRRHDPLVDALETDALKAQLSRLAGLIRQTAEALPPHEAFIARYCAARDPA

SEQ ID NO: 85821 - protein, 505 aa, Caulobacter henricii
  REGION 1..505: note = tr|A0A0N7JHN0|A0A0N7JHN0_9CAUL Tryptophan halogenase; OS = Caulobacter henricii OX=69395 GN=AQ619_11175 PE=4 SV=1
MQNERAIRSIVIVGGGTAGWMAAAALRSALGRGSSIQLIESAEIGIVGVGEATIPAIRQFNALIGLKEAAFMRQTKASLKLGIEFVGWGDAQSRYLHPFGVYGPHNDLGDFHQLYLMLRDKGLADDIGAYSLCGQAARRGRVAAPTVDPASPLSRFTSAYHFDAILYGRHLRRFSEQLGVKRLEGEVIDVTLRSEDGFLESLTLKDGQTVSADLFIDCTGFRGLLIEGALKTGYDDWSHWLPVDRAVAVPCERVGPITPYTTSTVREAGWQWRIPLQHRTGNGYVYSSRFTTEEIATRTLMDNLDGAPLAEPRHLRFVTGRRRKAWNRNVVALGLASGFLEPLESTSIHMVHSGLVKLLQHFPDREFSPVNIDTYNRRVSEEAQEVRDFIILHYHATTRRDSEFWAYVASMPIPDSLRDRIAIFRDRGMLVSRPDELFSQSSWLAVMLGQGVIPQSYNPLADRSDPQDTAASFAALQRQIAQLVETMPDHEAFLAQNNMLDTVEA

SEQ ID NO: 85822 - protein, 71 aa, Xanthomonas fragariae
  REGION 1..71: note = tr|A0A1Y6HD69|A0A1Y6HD69_9XANT Tryptophan halogenase; OS = Xanthomonas fragariae OX=48664 GN=PD5205_00131 PE=4 SV=1
MSHTVSSTPQQRPVRRVVIARGGIAGWMAAAALSKVLGRQLQITLVESDQIGTVGVGEATIPSLITFHRLL

SEQ ID NO: 85823 - protein, 505 aa, Sphingomonas sp.
  REGION 1..505: note = tr|A0A1I3WIC9|A0A1I3WIC9_9SPHN Tryptophan halogenase; OS = Sphingomonas sp. NFR04 OX=1566283 GN=SAMN03159338_3210; PE = 4 SV=1
MTPPRRIVIAGGGTAGWMTANLLAHRWPLMSIELLEAPEIPTIGVGEGSTPSLKRFFEVLGIAEAEWMPRCHATYKANIRFVGWSPDAPADAYSHPFTTQLDLHTIDAFFANCRNRRGGYDVPTDPGTFLLNGALADAGKAPLAPPSFPFKIDYGYHFDAALLGMFLRERAVARGVVHRPAKIVSAVRHENGDIAAVCTERGDVVPGDLFVDCTGFAGLLLQGALGVGFRSFADNLFNDAAVVIPTMPTEPAAPPVETRATALSSGWAWSIPLQSRVGNGYVYARGYLSDDAAEVELRGHLGLLDSDVAARHLRFRTGQVAQHWHRNVLAVGLAQGFIEPLEATALHLVLNTVEKFMRQYEEGGFTPAKAGAFNDTIRAMFERVRDYIVAHYKLNTRTDTAYWIDNRAHDCLSLPLRRILDLWYRHGDLAAEFAADPDLTYFSAESWHCLLAGYGTFPPPRADQRDDVDFHRANGVEAFLHGCSMNFPSHADALARHTATASAGA

SEQ ID NO: 85824 - protein, 500 aa, unidentified
  source 1..500: note = Phenylobacterium deserti
  REGION 1..500: note = tr|A0A328ABJ0|A0A328ABJ0_9CAUL Tryptophan halogenase; OS = Phenylobacterium deserti OX=1914756 GN=DJ018_13495 PE=4; SV = 1
MPDSTVRTVVIVGGGTAGWMTAAAIAQALGPHVAIRLVESSEIGTVGVGEATIPHIRAFNAKLGLDEAEFMRSTQATFKLGIEFRDWGRPGDSYIHPFGAFGPDLGEIGFHQHWLRLRAEGLETSIEAFSAPIVISRLGRFAHPSADPRALLSTFSYAYHFDAGLYAAFLRRYAEERGVQRTDARVADVRLRGADGFIDAIVLDTGEQVSGDLFVDCSGFRGLLIEQALKAGYESWAHWLPCDRAVAAPCHAQEPATPLTRSTALDAGWAWRIPLQHRVGNGYVYCSDFISDEEAEATLLSRLESEPLADPRRLRFQAGRRRKQWSRNCVAIGLSSGFLEPLESTSIYLIQAAIGHLISLFPDGSWDPVDETEFNRLMELELERVRDFLILHYRATQRPGAFWDARRQMAIPDSLAYKLALFEERGAVVRYKDGLFQEPSWLAVYFGQHVSPTGFNPLSAGLPAEALRREFAGIEQAIRRQAEALQPHESYVAQLCAVGA

SEQ ID NO: 85825 - protein, 501 aa, Pseudoxanthomonas sp.
  REGION 1..501: note = tr|A0A4Q8LMU7|A0A4Q8LMU7_9GAMM Tryptophan 7-halogenase OS=Pseudoxanthomonas sp. NML140781 OX=2480812; GN = EA656_16290 PE=4 SV=1
MTDSSQPRPVKRVVIAGGGTAGWMAAAALSRTLGKVLDITLVESEEIGTVGVGEATIPTLVTFHRLLDIDEQAFMAATGATIKLGIQFEGWREPGQDYIHSFGTTGKDHWTAGFQHFWMKGRQRGLARDYGDYCLELRAAQEQRFAHLARNGMNYAFHLDAGLYARFLRRFSEGFGARRIEGRIATVQTSAQGDIAALVMEDGTRVEGDLFIDCTGFRALLLGQTLGVAFQDWSHWLFADSALAVQTESVAPPVPYTRSMAGPAGWQWRIPLQHRVGNGIVYSSRFMDQEAARAALLDNLEGPPLFEPRPLRFTPGQRQVTWKRNCVALGLASGFLEPLESTNIHLVSRNLTRLLQSFPHVIRQVDIDEYNAQTEAEMVHIRDFVILHYHVTRRRDTPFWQACAQMDIPATLRHRIDLFAQTGRVFHVPNELFAENSWIQVMLGQGIAPAQYHPVADLMDDAELARFLDGIHQQVEQTVARLPTHADYLRSYCAQPRPALA

SEQ ID NO: 85826 - protein, 493 aa, Sphingomonas sp.
  REGION 1..493: note = tr|A0A0Q6AU75|A0A0Q6AU75_9SPHN Tryptophan halogenase; OS = Sphingomonas sp. Leaf407 OX=1736369 GN=ASG37_03615 PE=4; SV = 1
MSVTRVVIAGGGTAGWMAAAAIARTMGRMVEVTLVESETIGTVGVGESTIPPLVTYNRLLGINEAEFMAATAATFKLGILFDGWKTADSRYFHSFGTTGRDHWAAGFQHYWLNGLTRGHAQPYDDYCTELVAALQGRFAHLPGDATNYAYQLDSGRYAQFLRAMAERDGTRRIEGRIAQVELDGETGDIAALQLDGDRRFPGDLFLDCTGFRALLIEGALHAGYDDWTHWLPCDAAIALQTDSVGPPVPYTRAMAHDAGWQWRIPLQHRVGNGIVYCSRYLDRDAALDRLVNNVEGKVRTDPNFLRFTTGARRRQWHRNCVAIGLSGGFMEPLESTSIHLIQRAVLRLLRLFPQARVSPADVAEFNDQQLQDMEQIRDFLILHYKATDRRDSPFWRQCSAMDVPNSLAQKIDLFRQTGRVFRRNEELFGENSWVQVMMGQGIVPERHHPIAARLTDDELDRLLSMVRRQVADTVATMPPHGDYLARYCPADRP

SEQ ID NO: 85827 - protein, 501 aa, unidentified
  source 1..501: note = Sphingorhabdus wooponensis
  REGION 1..501: note = tr|A0A3R8Q320|A0A3R8Q320_9SPHN Tryptophan 7-halogenase OS=Sphingorhabdus wooponensis OX=940136; GN = D7D48_09660 PE=4 SV=1
MAIDHIIIVGGGTAGWMAAAALSRLRAGRPVAITLIESEEIGTVGVGEATIPPFLDFNRLLEIDERDLLSMVQGSFKLGIQFVNWGKIGDSYIHPFGNYGYQVDGISFHHVWHKYQQAGDKRPIQVFNVETMAAHFGRFARTEDYQRDDLPPVNYAYHIDAGRYARYLRNYAETRGVVRREGKISDVTLDNESGFVSSVTMENGDVLKGDLFIDCSGFRGLLIEQALKTGYDDWSNYLPCNRAVALPCFREDGSGPLPYTRATAHSAGWQWQVPLQHRNGNGHVYCNEYMSDDEAHSILVNNIAGKPGAEPNFLRFVTGRRKKFWNKNVVALGLASGFMEPLESTSLHLVNTGINKLIALLSLDGVTQAQEDAFNRLTGKEYARIRDFLILHYNSTTRDDSPFWNYCRNMPVPDSLTEKVELFRQNGQIFREDDELFTETSWAAVMMGQGIKMGGHNAMADAVREPNTRREIDEMEKSIQFVVQHMPSHGEYLNRYCPAPA

SEQ ID NO: 85828 - protein, 504 aa, Sphingomonas sp.
  REGION 1..504: note = tr|A0A0Q6AHI8|A0A0Q6AHI8_9SPHN Tryptophan halogenase; OS = Sphingomonas sp. Leaf407 OX=1736369 GN=ASG37_16100 PE=4; SV = 1
MSEAAAPIESVVIVGGGTAGWMAAAAASRYLNNGRRSITLVESDAIGTVGVGEATIPPILQFNGLLGIDEKEFVAKTGATFKLGIEFVNWGGVGERYLHPFGTIGRDFEGVAFHQHWLKHRRAGGMADFERFSMSAQAAAAHRFAAPVSDPRSPASQLAYAYHFDAGLYAKFLRERAEGQGVRRVEGRIASVERDGESGHVTALVLDDGRRVAGQFFIDCSGFRSLLLGETLGVGYRDWSHWLPCDRAIAVPSQRTDPLLPYTRATAREAGWQWRIPLQHRTGNGHVYSSGFTTDDRAQEILLANLDGAPTADPRRLSFKAGVREKLWEKNVVALGLSGGFLEPLESTSIHLIQTGISKLFWLFPDTAHAEVERREYNRLMSEQFDYIRDFIILHYKATTRADTPFWQYVRDMPIPDTLAHKIELFREKGRILRYDHDLFEVPSWVSVMFGQGIWPTGHDAVADSLDEALVAGTMERMVAAYADLAQRMPPHADHVARTAPMRG

SEQ ID NO: 85829 - protein, 510 aa, unidentified
  source 1..510: note = Erythrobacter lutimaris
  REGION 1..510: note = tr|A0A395LK73|A0A395LK73_9SPHN Tryptophan 7-halogenase OS=Erythrobacter lutimaris OX=1538146; GN = DL238_06675 PE=4 SV=1
MTAQPIRKIVIVGGGTAGWMAAAGISRVMGQFPGLSIELVESEAIGTVGVGEATVPQIRSFNTLLGIDEAEFVRETHATYKLGIEFVDWLRPGHSYVHPFGSYGLDMLGIEFHHFWLHGRAADDPAPLDEYSIGAMAGKAGRYFPPQLDNPKSPLSKLAYAFQFDATRYARYLRARAERQGVVRHEGRIVDVLQDADSGFVTAVRMEDGREIGGELFIDCSGFRSLLLGQTLGVPFIDWTGWLPCDRAVAIPCELGGDSQPLTRATAREAGWQWRIPLQHRIGNGLVYSSAHMDDEAALDLLLANLDGKPLAEPNRLRFAAGLRERPWEKNVVALGLAAGFLEPLESTSIQIVQASIARLMALFPDSSFGQAEIRRFNADSVRDMVDIRDMLVLHYLKTEREGELWRACRAVDPPDGLAHKLEMFESSGRIFRENNEFFTEPSWLAVMVGQGVEPARFHPLAMTIGAEETRKRLAHIREVIASTVAQMPTQDRFLAEQGSAIPASERLTA

SEQ ID NO: 85830 - protein, 492 aa, unidentified
  source 1..492: note = Erythrobacter lutimaris
  REGION 1..492: note = tr|A0A395LTY3|A0A395LTY3_9SPHN Tryptophan 7-halogenase OS=Erythrobacter lutimaris OX=1538146; GN = DL238_10350 PE=4 SV=1
MTDRQRIRNVVIAGGGTAGWTVAAALAKNLGQALNVTLVESDEIGTVGVGESTIPTARRFHELVGVDERDFVKATGASFKLGILFEGWGAEEESYFHSFGTTGRSTWLADFHHIWLRARELGLAEPFGHYCTEHQAALAGKFAGGPDTPLNYAYHLDATAYGKFMRRHAEALGVSRREGRIARVERRPENGHIAALELEDGQRVEGDLFIDCTGFRALLIEQALGTGFEDWSEWLPTDRALAVQTERVGPAQPYTRASAHAAGWQWRIPLQERVGNGLVYCSEYLSDDAASALLEERTEGAFTTEPRLIRFRTGMRRKVWNGNCIAIGLTAGFVEPLESTSIHLIMIAAIRLLQFFPVEDISPAMVERFNDVSRRELEHVRDFIILHYCLNRRDEPFWRRQAEMDLPHSLQERIDAFRERGHAYQDQDELFRVDSWAQVMLGQGIVPEAYHPFASLIGTEDLERSLATLAQGSKQLSAGLPGHDDYLKSLLG

SEQ ID NO: 85831 - protein, 546 aa, Mycobacterium marinum
  REGION 1..546: note = tr|A0A3E2N3E5|A0A3E2N3E5_MYCMR Flavin-dependent tryptophan halogenase RebH OS=Mycobacterium marinum; OX = 1781 GN=rebH PE=4 SV=1
MDDNLIKKVVVLGGGTAGWMTAAYLGKALQGNVEITVLEAPSVPRIGVGEATVPNLQRVVFDFLGIPEDEWMRECNASFKTAVKFINWRTPGEGSPVARHWQGRSDHFYHPFGLLPSPQHIPLSHFWARNQLKGGTSEPFDYACFREPAIMDAMKAPRYLDGTQATYYAWHFDAALVADFLRRFATKNLGVVHVQEKMTLAEKDSNGYITALRTEEGRRLDGDLFVDCSGFRGLLINEAMNEPFIDMNDHLLCDSAVATPIRHDDAANGIEPYTSAIAMKSGWTWRTPLLGRFGSGYVYSGQFASQDEAIRDFCNLWQLDPEDTPLNKIRFRVGRNRRSWVKNVVSVGLSSCFLEPLESTGIFLIYAALYQLAKHFPDRRFDPVLIDRFNRKIDTLFDETRDFLQAHFYFSPRTDTEFWRANKELTLTDSIKEKVAMYKAGVPVNPPIATESSYYSNFDAEFENFWTNGSYYCIFAGLGVLPDHTLPAINYQSEAIHEADALFLDVKQKQRHLVETLPSNYEYLLKLHGKDMEPNDPMEPEVTFVA

SEQ ID NO: 85832 - protein, 505 aa, Bowmanella sp.
  REGION 1..505: note = tr|A0A4Q9XKQ8|A0A4Q9XKQ8_9ALTE Uncharacterized protein OS=Bowmanella sp. JS7-9 OX=1605368 GN=TK45_12685; PE = 4 SV=1
MKKSRVVIVGGGSAGWMTACYLNHVFGNNSQFEVTLIESADVPTIGVGEATVHTLRGFLEACDLSEGEFMVATDATLKHGILFKHWQIGDDPKDQYFHPFEDIAPIAPEGVINHWLNLKFKSATPPRFDRFMGVQGILAAAEKSPKLMHDSQYRAPVPYGYHLDAIKFAHFLRDVSVKRGVKHICDHVTDVNHQDGIIGSVRLASGQQVEGDLFIDCSGFRSILASALGATFISYSDKLFCDKAVTARVPQSDKFVPKPYTTATARRSGWTFDIDLQSRKGLGYVYSSQHLSEMEAEAEFRQVFGLGDEQGVNHFTTRVGRQDRAWVGNCVSIGLAQGFIEPLESTGLYFIEMSLRFLTDYLVLEDSDAARDKYNAVLNNLFDQTVDFIVLHYVLTKRHDTPFWQDIQTNMARSGDLNELLQLWKHKAPTDSDFLNAGLIFRATNYAAILYGMESLPQDLPTIVRHMGIEQSHEVLSKIQSVQKMAITSSPSHQEFLQKFLGAFS

SEQ ID NO: 85833 - protein, 589 aa, unidentified
  source 1..589: note = Microcystis panniformis
  REGION 1..589: note = tr|A0A552QBF4|A0A552QBF4_9CHRO Tryptophan halogenase; OS = Microcystis panniformis Mp_MB_F_20051200_S9 OX=2486223; GN = EWV53_00615 PE=4 SV=1
MQTTQNKEYDVVIMGAGFAGLCQARHLMLKIPNIKVALVDPRPEQRTDKDLKIGESTIEIAALFLAKELGLHDYLIENHAPKQGLNFHWPKNPAKTETIDDYYHAGSNRQVPIPSFQINRSKFEQDLLKMDKAMGINFYNGQVVDVDLTPGDAIKTVKIKVGDERMELQAKHVIDAAGRKFIIGRKTDNLLFGPENLMGLNTGSAWVRVKNVDRTIFHSGYDPLNASTSHYYSTNHYFGEGHWLWMIPIDTQTMELSIGVIHHHDVINSTQVNSREKFHDFLRNNHQILANIIDSGEAVDFHYWPRISHTSKTLFSPDNWYVLGDAAYIFDAFYSYGTTTIALAIEGITEIVRAKLAGEESAEQKRAAYNEFNLAYSRSVNCLYRGHAKQLGQASVMSWRIYFEYMWWFGVQVPMYVGKWHLDLTYIPIFLKTLNSNIDGLFADLNEQFTELADKDVNIGLMDCYRGDQLFNGYHTLKHFDDFLENTMFEPRRCNVFAGLKATCFYAALWYALFQWKGFGIQGCLHPHHIYHFLRLLGLSGQATIGELIYKFKTKGLPANSEIEAMRQEFKTYQYQPKLQPWLAEATNS

SEQ ID NO: 85834 - protein, 504 aa, unidentified
  source 1..504: note = Sphingomonas guangdongensis
  REGION 1..504: note = tr|A0A285QZT1|A0A285QZT1_9SPHN Tryptophan halogenase; OS = Sphingomonas guangdongensis OX=1141890; GN = SAMN06297144_2535 PE=4 SV=1
MSEPIRDVVIVGGGTAGWMMAAAAARFLADGQRRITLVESEAIGTVGVGEATIPPIREFLGLLGIPEAEFVAATGATMKLGIEFHGWGAPGERYIHPFGQQGRDFDGIDFHMAWLKHRAADGIGPLEDYWLSAVAARASRFAPPSADGRSPLSQLAYAYHFDASRFAAYLRRRAEDHGVVRVEGRITRVAHDGASGHVAQLHLDGGRIVTGDLFIDCSGFRSLLLGDAMKVPFRDWTHWLPCDRAVAVPSARTEPLLPLTRAIAHDAGWRWRIPLQHRTGNGLVYASGLLSDDAATARLLAALDGAAEGEPRTLSFRTGRRDRLWEGNVVALGLAGAFLEPLESTSIHLIQSGIQKLFALFPDRGFAPILTQEYNRLMAAQIDAVRDFVILHYSANGRVGEPFWDALRTMTLPDTLATRLALFREKGRVLRYDDDLFSVASWVAVLIGQGVMPTGYDPLVDALDDARVIAAMRELRGGYARVAAQLPAHGAVVQELAARGAATG

SEQ ID NO: 85835 - protein, 276 aa, Dyadobacter soli
  REGION 1..276: note = tr|A0A1G7WU83|A0A1G7WU83_9BACT Tryptophan halogenase; OS = Dyadobacter soli OX=659014 GN=SAMN04487996_122168 PE=4; SV = 1
MEEIRKYPFIRHKGIVRQSAEGLTLDPYNHDHNWEGYQFFREAFDKILLERAIAYGAEFQSGVVLKSIEFDRNSIASLSTNLGSFKADFFVDATGRSASLAKKLGIGYLVKSKPLFVHYGYVQTGGSDLFDSPQMIWDEAGWTWISQITENLISWNRLSPCNPKISKGWLPAQIANLNSAGPPKAADVTWRIANKISAENYFLLGDAAFVLDPVSSKGVLKAIMSGMMCGHLLAQLNPRTSNIDDIHRYYNNWVNEWFLRDLQVLRSVYDGRGVGI

SEQ ID NO: 85836 - protein, 517 aa, Streptomyces sp.
  REGION 1..517: note = tr|A0A286CNI1|A0A286CNI1_9ACTN Tryptophan halogenase; OS = Streptomyces sp. Ag82_G6-1 OX=1938853; GN = SAMN06272727_5379 PE=4 SV=1
MLNRVVIVGGGTAGWMTASYLKAAFGDRIDITLVESGKVGAIGVGEATFSDIRHFFEFLGLKESDWMPACNATYKLAVRFENWRKPGHHFYHPFEHMQSVDGFPLAEWWLKNGRSDRFDSDCFVMANICDAERSPRHLDGRMLAQPFDENAEEPRGLTMSEHQGKTQFPYAYHFEAALLAKYLTTYTVERGAKHIIDEVKDVKLDERGWISSVVTAEHGELTGDLFIDCTGFRGVLLNKALEEPFISFQNTLPNDSAVALQVPQDMEARGIRPCTTATAQEAGWTWTIPLYGRIGTGYVYASDYLSADEAERTLREFVGPSAADAEANHIKMRIGRTSRSWVNNCVGIGLTSGFVEPLESTGIFFIHHAAEQLVKHFPGPDWSPVQRDNYNSAVAHVMDGVREFLALHYAAAGRNDTRYWKDTKTRELPEGLAERIERWKHQLPDSETIYPYYHGLPAYSYMCVLLGMGGIDVKPSPALSLADDSAAQKAFQSVHDRAAGLIGQLPTQYEYFTHMRR

SEQ ID NO: 85837 - protein, 499 aa, unidentified
  source 1..499: note = Verrucomicrobiales bacterium
  REGION 1..499: note = tr|A0A257M5V5|A0A257M5V5_9BACT Uncharacterized protein OS=Verrucomicrobiales bacterium VVV1 OX=2015575; GN = CFE26_03480 PE=4 SV=1
MHSSDQISKLLVLGGGSAGLMAAVTIKRLLPHLDVQLVRSAEIGVIGVGEGTTAVFPSHFFDTLKVSKAEFYRETQPTWKQGIRFEWGPREYFNYTFEFQYDAQRQGMAFANGFYADEDCRDLDSPSALMDRGKAFISGPLGRPLVRGNYAFHIENHRLVTYLEKLAKSSGIGLFEGQLLNVERSSSGDVSAITVEDGRRFEADLFIDASGFRAELIGRVLNEPFLSFSSGLFCDRAVIGGWDRGEEPLVAYTTAETMDSGWCWKIEHEHWINRGYVYASQFISDDQALEEFLRKNPKVSNTPRVVKFRSGRYDRSWVNNVVAIGNSSGFVEPLEATALAQIIYGTRWLIELLRTTGLQPSDSSRHLYNTQMGRAWDEIRDFLAFHYKFNHRIDSPFWSHCHQDTSLGSYQGLYDYYLDEGPGPLIIHEVPHKPNIYGVEGFLAMLVGMRVPYKRRHQASPAEREAWARHSAAVAAKAASGVDSVKALAAIRSPGWVWE

SEQ ID NO: 85838 - protein, 459 aa, unidentified
  source 1..459: note = Sphingomonas guangdongensis
  REGION 1..459: note = tr|A0A285R4Y1|A0A285R4Y1_9SPHN Tryptophan halogenase; OS = Sphingomonas guangdongensis OX=1141890; GN = SAMN06297144_2539 PE=4 SV=1
MRVAVVGDGVAAALAGAVLARAGAAVIRVPTEEGGTGLGPFGPALTAMPDWQASDIAAALPPVPGASFALGIAFAGWAANGGGWFLPFGDVGAALGPISFAQVIARMRAQGHALRFADFALATQAAQAGRFAPPSPDPRSPLSTLAMGVHYPAEALADALTALAPVQAVAPLVRVEHSEGRIAALVLADGAMLVADLYVDATGGDGRLIGHLSPGWESWAECLPCARATVTATAETQPPPPYAFHSADRDGWAATIPLDGRRVETRFSVAGAGTPYVNGRRTAAWRGNCVALGAAAGVIEPVLGAPLLLALRQAERIAALLPHAADQSAEAAEYNRLTAAELDRARDAAVALWATNGRVGEPLWDAARDRGSDQLRWTLDLYRSRGRVPLYDEELLSRADWIAILDGQGLRPRRLDPLGAAVSDAAVTAHAGRLRDRLLAAVRQMPSHADQLARYRAAS

SEQ ID NO: 85839 - protein, 415 aa, Dyadobacter fermentans
  REGION 1..415: note = tr|C6VW94|C6VW94_DYAFD Tryptophan halogenase; OS = Dyadobacter fermentans (strain ATCC 700827 / DSM 18053 / NS114) OX=471854 GN=Dfer_2003 PE=4 SV=1
MQTVDVLVIGAGPAGTVAASYLKKQGYDVTILEKEKFPRFQIGESLLPCCMEHLTEAGLREAIEPLNFQKKTGAAFMRGEKRCEFFFEDQFTKGWTWTWQVKRADFDSKLAEATREKGVDVNFECEVTAVECGPEKQIVDYKDAEGNAHRIEAKFIIDSSGYGRVLPRLFNLSKASAFTPRGAVFSHLEDKNRSEEASNNIFVHSFDNNKSWIWAIPFSDGSTSVGIVGDREKIEALAENNGEQYKEFIRNFADLNGRFKESDFKFEPRAILGYSIGVTQMSGEGFVLSGNSTEFLDPIFSSGVTFATASGLLSAKMTHKHLQGEAVNWKKDYEEVIQQGINVFRSYVTGWYSGDFQTIVFAKHIDEDIKRQICSVLAGYVWDQSNPFVKKHDTILPTLAKVIKMKEKAEETDLS

SEQ ID NO: 85840 - protein, 504 aa, Rhodanobacter sp.
  REGION 1..504: note = tr|A0A1E4HGG7|A0A1E4HGG7_9GAMM Tryptophan halogenase; OS = Rhodanobacter sp. SCN 67-45 OX=1660133 GN=ABS82_06820; PE = 4 SV=1
MTDPRIRNIVIVGGGTAGWMAAAAFAKVLGPDYAIRLIESEEIGTVGVGEATVPHLKLFNNLLEIDEIEFIRQVQGTFKLGIQFNDWGRIGDTYIHGFGTIGHDVSLLPFHQFWIKANQLGIAEDIGAYSLNTVAAPLGKFMPSATDVPAGSPLADIAYAYHFDAGRYARYLRGYAERRGVRRTEGKISQTLLRAHDGFVEAVVLESGERIDGELFIDCSGFRGLLIEQALHTGYLDFTHWLPCDRAVAVACEKVGPPTSYTRSTARDAGWQWRIPLQHRTGNGYVYSSSHVSDDEAAATLLAHLDAPAVGEPRPLRFTTGVRKKFWNRNVVALGLSSGFLEPLESTSIYMIQSGIARLLNLFPQRDFSEVVINRYNAQAVFEYERIRDFLILHYHATRRDDTPFWRQCRTMSIPDQLRENIALFRDSGRFFRNAEEMFALVSWVQVMIGQGIIPRGYHPLVDQMPERDLRKFIAGVGQVVASCVDSMPMQQAFIDRYCTAGAA

SEQ ID NO: 85841 - protein, 530 aa, Rhodanobacter sp.
  REGION 1..530: note = tr|A0A1E4H9J4|A0A1E4H9J4_9GAMM Tryptophan halogenase; OS = Rhodanobacter sp. SCN 67-45 OX=1660133 GN=ABS82_12745; PE = 4 SV=1
MPRLKKVLVVGGGTAGWLAACYLAKAMNSTAPESVQVELVESPNIRLLGVGEATFPSIRGTLAAIGLDERRFLVGATATFKQGIQYVNWVRPPGMPGADRFFHPFNTPSRRPGSPELLPYWLLGAAPEGTPFAEAVTMQSRLVDHGRAPKHASDADYQAPMNHAYHFDAAAFAATLAEHGQGLGVKRHLATVERTELDERGNIAQVVTTELGALSADLYVDCTGLRGSLIGGAMRSAFRSRRDVLFVDRAVALQVPYPAPDTPILPYTRATAQPAGWVWDIGLQKRRGIGHVYSSRHMDATQAEEIARRYVGAAADALEAQHLQFETGYRPEHWRGNCVAVGLAGGFVEPLESTGIALVELAVCMLTHLFPADHDDMERTARRFNEMMVARYERIIDFIKMHYCLSQRRDSAFWIDNANPASIPQTLRDRLQLWRRRPPHRLDFVTDLEMFMPASWQYVLYGMEFRTDLEHARSAYPQMDEARREFAMIQQVAGRALQDLPDHRALVEQLCRQHAQRNPVRTNEPVAVGG

SEQ ID NO: 85842 - protein, 513 aa, Pseudoalteromonas sp.
  REGION 1..513: note = tr|A0A4Q6YK47|A0A4Q6YK47_9GAMM Tryptophan 7-halogenase OS=Pseudoalteromonas sp. CO133X OX=1777237; GN = EXT40_10520 PE=4 SV=1
MQHKEVKKVVILGGGTAGWLSAGLIAAQPHLTHNAQITLIESPDIATIGVGEGTWPTMRQTLKTIGISESEFIQRCDASFKQGSRFDGWCDDKGDAHYYHPFSLPVAYQQLNIAPYWFANKDAVSFSHAVASQTYLCDHHKAPKNHLHSAYQGEANYGYHLDAGKFATLLQQHCTTKLNVEHIISHVECINSNEDGYISSLQTRDHGTIAGDLFIDCSGTHAKLLHQHYGIELIEQQDVLFNDRAVAVQVPYLNPQQELLSYTKATAQDAGWIWDIGLQSRRGLGMVYSSRFASSEDAKQALSQYIAKTQPDTNQNELTFREISFTPGFRRRFWYKNCLAIGMSAGFIEPLEASALVMVELGLNNLLANFPTHRAAMPTLAKRFDEQCHYRWQRIIEFLKLHYVLSKRTSPYWQAHKEVNSVPQQLQENLALWQYQSPWLNDFDRAQEVFSAASYQYVLYGMKQLPQFPALTMPSAIVEHFSANQQQAKRGLQQLPTNRELLNHIQQFGIQPI

SEQ ID NO: 85843 - protein, 512 aa, Bowmanella sp.
  REGION 1..512: note = tr|A0A4Q9XQL2|A0A4Q9XQL2_9ALTE Tryptophan halogenase; OS = Bowmanella sp. JS7-9 OX=1605368 GN=TK45_03585 PE=4 SV=1
MRSMQSQIVIVGGGSAGWLTAGVLASEFKHTPDINITLIESSDVPTIGVGEGTWPSMRATLERIGLSENALIQHCNATFKQGSLFRQWRNNSPQDRYHHPFTAPQASNQFDLAPHWLPFAEQVPFAFAMSTQPAMIEAGRGPKNISTPQYAFVQNYGYHLDAGKFVSLLKQHCVTQLGVRHIVDNVTDVVGDKDDVIQQVMTEKNGAVCGELFIDCSGFAALLIEKHYGIKLHKQDHVLFNDNALAVQVPYAADDTPIASATLSTAQTAGWIWDIGLQTRRGVGYVYSSAHSSSDEAMQTLDRYLGGLPADSRVREIPIVPGYREVFWHHNCVAVGLSAGFIEPLEASALVLIELAASFIAEQLPFDSHSMKTVSQRYNQTFTYRWQRIIEFLKLHYVLSSRDDSDYWRDNRAASSQPESLQALLALWQTQCPSRYDFPMAEEMFPAASYQYIYYGMGGQSHLPPKASIARYAERAMQEFSQVRQQSANLARQLPSHRELIEKIAAYGLQKI

SEQ ID NO: 85844 - protein, 538 aa, Burkholderia anthina
  REGION 1..538: note = tr|A0A3P0BY27|A0A3P0BY27_9BURK Tryptophan 7-halogenase OS=Burkholderia anthina OX=179879; GN = DF034_30780 PE=4 SV=1
MSNPIRNIVIVGGGTAGWMSASYLVRALQQQANITLVESAAIPRIGVGEATIPSLQKVFFDFLGIPEREWMPQVNGAFKAAIRFVNWRKSPDGSRSDHFYHLFGNVPNCDGVPLTHYWLRKREQGFQQPMEYACYPQTEALDGKLAPCLADGTRQMSHAWHFDAHLVADFLKRWATERGVKRVVDEVEQVHLDDRGYISRLSTKEGRTLEADLFIDCSGMRGLLINQALKEPFIDMSDYLLCDSAVASAVPADDARDGIEPYTSAIAMNSGWTWKIPMLGRFGSGYVFSSKFTSRDQATADFLDLWGLSDKQPLNQIKFRVGRNRRAWVNNCVSVGLSSCFLEPLESTGIYFIYAALYQLVKHFPDTSFDPRLIDAFNAEIVYMFDDCRDFVQAHYFTTSRDDTPFWRANRHDLRLSDAIREKVERYKAGLPLTTTSFDDSTYYDTFDYEFKNFWLNGNYYCIFAGLGLLPDRSLPLLRHRPESIDKAEAMFARIRREAERLRTTLPTNHDYLRSLREGDAGLSRSQPGPTLATPEIL

SEQ ID NO: 85845 - protein, 509 aa, Pelomonas sp.
  REGION 1..509: note = tr|A0A0Q6W5J7|A0A0Q6W5J7_9BURK Tryptophan halogenase; OS = Pelomonas sp. Root1237 OX=1736434 GN=ASC91_21010 PE=4; SV = 1
MRNRPLQRIVIVGGGSAGWITAAPLARMLCRPDQPDQHCEVTLVESADIGTVGVGEATLPTIQFYNQLLGIDEADFVRSTRATFKLGIEFQDWGRIGNRFFHGFGGFGPAIHNRPLWAYWLRLQALGDQLPSYEEWSTATVMARQMRFVPPTPGEPSPSNAFDYAFHFDASLYGAYLREYALKHGAKRVEGTITRVETRPEDGFVAALHLSDGRRVEGDLFIDCSGFRALLIDGAMKSPYEDWSRWLPCDRALAVPCERAGPMTPYTRSTARTAGWQWRIPLQHRTGNGLVYCSGYLSDDEAQRTLLDNLDGKALDEPRQQRFVTGRRKQGWVKNVVAIGLSSGFLEPLESTSLHLIMDAVSRLTAMLPDQSFQPALADEFNRQMAYRYESVRDFIILHYKLGERRDSEFWRYCADMPIPDDLAHQIDLFRKTGRVAVIEPEGFAEPSWASILLGLGVYPERYDPYIDLVDPQLIRRHLHSVHSSISRTVASMPSHADFLGRISAPPKA

SEQ ID NO: 85846 - protein, 435 aa, Shewanella halifaxensis
  REGION 1..435: note = tr|B0TPS5|B0TPS5_SHEHH Tryptophan halogenase; OS = Shewanella halifaxensis (strain HAW-EB4) OX=458817; GN = Shal_0371 PE=4 SV=1
MMSTDQAVQDELERYPTEAVDIAIIGAGPSGSIAASLLHAQGKKVLVLEKQHFPRFSIGESLLPCCMQVIDEANMLEAVNQAGFQFKNGAAFRHQDKYTSFDFTDKFTQGPGTTFQVERANFDKLLADEAVSQGVEIRYGHTVESIDLSAEPSLSVSNGKGQTQTINAKFVLDASGFGRVLPRLLDLEKPSTLPTRSAVFNHIHDNISDPNFDRNKILISVHPDNQDIWYWLIPFSDGRCSVGVVGEPEQLSSLSGYASNGFSDEIGNSDLDKILKTMINQEPGLRALLADAELINESGLLKGYSANVKTLATDKFALLGNAGEFLDPVFSSGVTIAMQSASMAAKTVIRQLDGERVDWQQDYAEPLMKGVDTFRTYVEAWYDYSFQEAIFFDKPDPKIKQMICSILAGYAWDDNNPFVSESKRRLNMVVELCRS

SEQ ID NO: 85847 - protein, 513 aa, Streptomyces sp.
  REGION 1..513: note = tr|A0A1C6LJ67|A0A1C6LJ67_9ACTN Tryptophan halogenase; OS = Streptomyces sp. AmelKG-E11A OX=1100822; GN = YW7DRAFT_00187 PE=4 SV=1
MLESIVVVGGGTSGWMTASYLSAAFGERISVTVVESARVGTIGVGEATFSTVRHFFEYLGLSEETWMPACNATYKLGIRFENWRAPGHHFYHPFERQRVVDGFTLPDWWLADGGATERFDKECFLVGTLCDTMRSPRHMDGALFEGDLTDRPAGRSTLAEQGTQFPYAYHFDAALLADFLRDYAVARGVRHVVDDVVHVARDERGWISHVATRGSGDLAGDLFVDCTGFRGLLINDALDEPFESYQDTLPNDSAVALRVPVDMEREGLRPCTTATAQAAGWIWTIPLFGRVGTGYVYARDYCTPEEAERTLRRFVGPAADDLEANHIRMRIGRSRRSWVNNCVAVGLSSGFVEPLESTGIFFIQHAIEQLVKHFPDADWDPALRNAYNTLVNRCMDGVREFLVLHYYGAARADNEYWRDTKTRKIPDSLAERVEQWRTKLPHPESVYPHYHGFEAYSYVCMVLGLGGIPLKPSPALRMLDPSAAQREFRLLATQAEDLRRTLPSQYAYFAQFR

SEQ ID NO: 85848 - protein, 496 aa, Pelomonas sp.
  REGION 1..496: note = tr|A0A0Q6WQF5|A0A0Q6WQF5_9BURK Tryptophan halogenase; OS = Pelomonas sp. Root1237 OX=1736434 GN=ASC91_28310 PE=4; SV = 1
MTALMLATTAYGPRLKITVLESPQVGIIGVGEGSTPWLRRFFEILGIEESEWMPACNATYKSGITFDGWSTKPGFERYFHPFVSMLDNMTMHPFVDNVHARLDGADVYAHPDRFFTSAALARQARGPRALPNFPFDVWYGYHFDATLLGQFLGRKAVERGVTHLRRHVTQVLLNERGDIDRLQLDDGEALAADFFVDCSGFASLMIGKALQTPFIGFGENLFNDAAVAMPTPLEGPIESQTVSTALRHGWAWKIPLTQRQGNGYVYSSAHCSADEAETELRQHLGLLDADIPARHLKMRVGRMSKVWNRNCVAIGLSQGFIEPLEATALLFVQVTASMLVEVLEKGDLGAASQDAFNAAMHKRFENTRDYIVAHYKTNSRTDTDYWRENAENMHLSDSLQGVLMTWMSRKPLVAALKTGRFGGGYPAVSWYALLAGMGIFPDVQDLQPPTEHQARHRLEAVDDFIQRSATNFPDHRELLANIPPGVGDKALQIYTW

SEQ ID NO: 85849 - protein, 536 aa, Serratia plymuthica
  REGION 1..536: note = tr|S4YS53|S4YS53_SERPL Tryptophan halogenase; OS = Serratia plymuthica S13 OX=1348660 GN=M621_21745 PE=4; SV = 1
MSKPIKNIVIVGGGTAGWMSASYLVRALQQQANITLIESAAIPRIGVGEATIPSLQKVFFDFLGIPEQEWMPQVNGAFKAGIKFVNWRKSPDHSRNDYFYHLFGNVPSCDGVPLTHYWLRKREQGFQQSMAYACYPQPGALDGNLAPCLHDGTRQMSHAWHFDAHLVADFLQRWAVERGVNRVVDEVVEVNLNDHGFISSLLTKEGRKLEADLFIDCSGMRGLLINQALKEPFIDMSDYLLCDSAVASAVPNDDAQVGVEPYTSAIAMNSGWTWKIPMLGRFGSGYVFSSKFTSRDQATTDFLNLWGLSDNQPLNQIKFRVGRNKRAWVNNCVSIGLSSCFLEPLESTGIYFIYAALYQLVKHFPDTSFDPRLADAFNAEITYMFDDCRDFVQAHYFTSSREDTPFWLANRHDLRLSDSIKEKVERYKAGLPLTTTSFDDSTYYETFDFEFKNFWLNGNYYCIFAGLGMLPDRSLPLLQLRPESIEKAEAMFARIQREAERLRASLPTNYDYLRSLRGGDAGLFRPGPTPASPESL

SEQ ID NO: 85850 - protein, 490 aa, unidentified
  source 1..490: note = Alteromonas confluentis
  REGION 1..490: note = tr|A0A1E7ZG90|A0A1E7ZG90_9ALTE Tryptophan halogenase; OS = Alteromonas confluentis OX=1656094 GN=BFC18_02955 PE=4; SV = 1
MNNNKKQRVVIAGGGTAGWMAAAALSRLLHNRVDVTLIESSDIGTVGVGEATIPTLTFFHRLLKIDEKAFMAATNATFKLGINFENWKTTSDAYLHAFGATGKDCWAAGFQHFWTRGRQLGLSDDFGAYCLERVAAEQGKFAHLPQNGLNYAYHLDASKYAMFLRNLAEQAGIRRIDARIEQVATRKDNGYIRHLQLDNGEKIEGDLFIDCTGFRGLLIEETLHTGYEDWSHWLLCDSAVAVQTESVSLPLPYTRSIAHEDGWQWRIPLQTRVGNGLVFCSKYLSERDAITRLTDNIEGAPLNSPRVIKFRPGRRTKQWNRNCVSLGLASGFIEPLESTSIHLIQQGIVRLLRMFPHDEIRPAIVDEFNRQSVDEIEHIRDFIILHYHVTARTDSAFWRHCRHMDIPETLAQRLQIFRESGQIHRKANELFDDSWQQVMIGQGLLPEGYHPIADMMSEQELKEFLSHIKGNVDRTVSQLPPHHVYLKTRA

SEQ ID NO: 85851 - protein, 507 aa, Duganella sp.
  REGION 1..507: note = tr|A0A1I2UK49|A0A1I2UK49_9BURK Tryptophan halogenase; OS = Duganella sp. CF458 OX=1884368 GN=SAMN05518865_11815; PE = 4 SV=1
MRDEQFQRRPVRRVVIAGGGTAGWMVAAAVSRSLGKVLDIKLVESDEIGTVGVGEATIPSLLNFHRLLEINEQEFMAATKATFKLGISFENWRNVNEDYIHSFGMTGIDHWTAGFNHFWRKGRERKLAGDYGDYCLELKAAQLERFGHLPREGINYAYHLDASAYARYLRRYSEGYGVQRIEGKIAKVHTDAANGHITALQLDGGAMLEGDLFIDCTGFRALLVGETLGEGFEDWSQWLHNDSAIAIQTSSTGPAVPYTRAIAHEWGWQWRIPLQHRVGNGMVFSSKFVDDDTARAGLISNITGEQLVQPRVIRFKPGQRRKVWNKNCVAIGLASGFLEPIESTSIHLIQRGIIRLMQMFPSAGIFQSEIDEYNRQAWTEIEHIRDFIILHYKVTNRRDSPFWRHCAEMEVPKSLRRRIDMFRETGRVFRLSNELFAENSWVQVMLGQGIMPLQHHPSADLMGDAELSCLLDGIRNNVARTVAQLPPHQQYVENYCAAYMEEYLAPK

SEQ ID NO: 85852 - protein, 518 aa, Bowmanella sp.
  REGION 1..518: note = tr|A0A4Q9XNS3|A0A4Q9XNS3_9ALTE Tryptophan halogenase; OS = Bowmanella sp. JS7-9 OX=1605368 GN=TK45_05995 PE=4 SV=1
METPKKISSVIVLGGGTAGWLTANHLAKKLQPGTANGVCVTLIESPDIPTIGVGEGTVPAIRDTLKYLGISETELLRECDATFKQSIEFINWMAPSDRQTHRYHHVFDYPPAEYAPHLLDWVMQKEQKPDFANAFSYQQAVIEAGKAPKGITHPEYEGVCNYAYHFDAAKFGQLLARHARTNLGVKHIQANISRVDTDEAGNICCLHSDQGQQFVADLFVDCSGANSTLLGQTLNVPFISKKAHIFTDTALAVQVPYTDPQQPIACSTLATAQQAGWIWDIGLTTRRGVGLVYASDFQTEQSALDDLQRYLGTDADALTVRKIPMRTGYYERFWQGNCVAVGMSQGFVEPLEATGLLLFDVSARMLAEQFPVTHQDICRCAARYNKKLRYAWDRVLDFVKLHYCISNRRDSEFWLAHQDSNTWSATLEEDIQHWQRHLPSQYDFTDRASVFNLENHLYVLYGMQFNTMPAAFLQQQADHTQAQQFYRRIADYAQQAAKQLPEHRDLLQRIARFGLQPL

SEQ ID NO: 85853 - protein, 505 aa, Pseudoalteromonas sp.
  REGION 1..505: note = tr|A0A4Q6YKI0|A0A4Q6YKI0_9GAMM Tryptophan 7-halogenase OS=Pseudoalteromonas sp. CO133X OX=1777237; GN = EXT40_09560 PE=4 SV=1
MMIKKIAIVGGGTAGWLAANHLGQSLQGSNIEITLIESPTIPTIGVGEGTVPSMRNSLQKFGISESDFINECDVTFKQSIKFVNWLDKTKHGSNFYHHLFDHPHIFGEQLTDAWLASNESSDYASFVSKQHLCCEKNLAPKTITTPEFMGVNGYAYHFDAKKFAAFLSRHAEQSFSVKHHFADIKDVVVDDAGYITHLVDEHDVAMAFDFVIDCTGFSAAILGNKLGVEFLDKSACLLTDTAITLQVPTSPDDEIPPYTIATAHQAGWIWDIALTQRRGVGFVYSSKYMTEQQALDKLHTYLGEKFNHLTPRKIPMKVGRREKMWHKNCVAIGLSQGFVEPLEATAILIADFSANLLAKRFPRCKADIALVIDDYNRHVNYVWEQTFDFIKMHYCISDRTDSEFWIDNRKDEQLSQQLKNNLARWHRFAPNREDFASKFDLFDLENYLYVLFGMRYLPASDTLNTVRGFEQLTSLKQQRVNQLLDELPTHRALLEKIKKFGMQKQ

SEQ ID NO: 85854 - protein, 602 aa, unidentified
  source 1..602: note = Microcystis panniformis
  REGION 1..602: note = tr|A0A552QBE9|A0A552QBE9_9CHRO Tryptophan halogenase; OS = Microcystis panniformis Mp_MB_F_20051200_S9 OX=2486223; GN = EWV53_00610 PE=4 SV=1
MNSTITQSREYDVVIMGAGFAGLCQARHLMLNIPNIRVALIDPRPVERTDKDLKIGESLIEVAALFLCKELGLHDYLIENHPPKSGLNFHWPKDTSKTASLDDYYHVWANRQTPVGSFHLQRAKFEQDLLAMNCQMGADFYNGRVKDVDLTQGDDLKTVYAKVGEENITLQAKHVIDAAGRNFIIGRKTDNVLSGPENLLGVNNGSAWLRVKNIDRTIFHSGYHPEGASTSHYYATNHYFGQGHWLWMIPIDKKSMELSIGIIHHHDVIPAKSINNLEKFSSFLDANHTILSRLIDSGEVVDFHYWPKIAHKSKVLFSPDNWYIIGDAAHIFDAFYSYGTTMIAFEVESVTEIIRAKLAEEAAAEQKRSAYNDFNLAYARTVNCLYRDHAYQLGHASVMSWRIYFEYMWWFGVHIPTYIGKWHLDLNFIPRYVKIANGNVDGIFADLCKEFHQLVEEGANIGLMDAYRADQLWGNYGTLKHFDDFLENTKFEPRRCNVFASMKAVYFYIAIWYALFQWKAFGLAGWLTPRHWYYFGRMLSLSVQATIAEVIYKWKTRGIPDNTQMEKMREEFKSYHYQPQDKYSFPVEEVANKAVKIESFAS

SEQ ID NO: 85855 - protein, 497 aa, unidentified
  source 1..497: note = Streptomyces antioxidans
  REGION 1..497: note = tr|A0A1V4DA44|A0A1V4DA44_9ACTN Tryptophan halogenase; OS = Streptomyces antioxidans OX=1507734 GN=VT50_0207675; PE = 4 SV=1
MSSEDREQYDVVVVGGGPGGSTLAALVAMRGHRVLILEKETFPRYQIGESLLPSTIHGVCRMTGVAEKLAAAGFTPKKGGTFRWGANPEPWTFSFSVSPKIAGATSHAYQVERSKFDTILLEHAVEKGAEVRFLASVSDVLEDGERVTGVRYTDAAGTEHEVRATYVVDASGNGSRLHKRVGGTREYSQFFRSLALFGYFEGGKRLPAPNAGNILSVAFESGWFWYIPLTPDLTSVGAVVRRENADRIQGDPERALMALIDECPLIKEHLSDATRVTEGQYGQLRVRKDYSYHQTTFWRPGLVLIGDAACFVDPVFSSGVHLATYSALLAARSISSSLAGIVSEEAAFTEFEARYRREYGVFYEFLMSFYDMHVDEDSYFWSAKKVTHNQHTELESFVELVAGVSSSEFDLDGAESAALRMKSKSAEFVSAIDEMSTDAEGNMTPLFRSSAVRQAMQEGAQVQSRAFLGEDLGPDVPMFPGGLITSDDGMLWQPGPA

SEQ ID NO: 85856 - protein, 436 aa, Rhodopirellula baltica
  REGION 1..436: note = tr|F2AMS1|F2AMS1_RHOBT Tryptophan halogenase; OS = Rhodopirellula baltica WH47 OX=991778 GN=RBWH47_02553; PE = 4 SV=1
MSTPKMKDFYDCVVIGGGPAGGAAASIVADSGVSTLLIERDPVPRFHVGESLMPECYWPLERLGLIDQVKRSGWQTKKSVQFVTHTGKESAPFFFREHDERECSTTWQVERSEFDKMLFDRASELGADCFDQTRLIDVQTEPGETEDQPVARAVVVRTADGTEKTIGCKVVVDATGQQAFLAGKMGLKEINPDLKKAAIWTYYRDAVRGEGDNDGATIILNTKSRDSWFWFIPQSRGITSVGCVGDNDYLLKGRGTPEEIFEEELANCPGLQPRLANATRVGKITTAKEFSYMTRRHSGPGWVLIGDALGFIDPVYSSGVYFALEMGVRAGDAIVEGLKKDDLSAEQLGKWTDDFKEGASKVRQLVHAFYNKDFSIGRFMKEHPEYRGNVTDLLIGRVFHEDAGKMFPALDRSIEMARANAMSKADSMAETKPMST

SEQ ID NO: 85857 - protein, 498 aa, unidentified
  source 1..498: note = Alteromonas confluentis
  REGION 1..498: note = tr|A0A1E7Z6K9|A0A1E7Z6K9_9ALTE Tryptophan halogenase; OS = Alteromonas confluentis OX=1656094 GN=BFC18_20795 PE=4; SV = 1
MTSATKTRVVVAGGGTAGWLSAFSLVTRLGNLLDITLVESEQIGTVGVGEATIPTMRNFHQLMGIDEREFMSATQATFKLGIEFENWGQKNESYIHSFGEIGQRAWMAEFHAFWMAARDSGLNDSLDDYCLELKAAKAGKFALAAGKKPVNYAFHLDATAYAAWLRKKAEAAGVKRVEGKINNIVVDEQSGNIRSLELDNGECVQGDVFIDCTGFRGLLIGDALGVEYEDWSHYLAADSAIAVQTESPEPPRPYTRAIAHDAGWQWRIPLQTRTGNGIVYSSRFLSDEDAEKTLLANLTGKPLTEPRRIKFKTGRRVKTWHKNCVAIGLSSGFLEPLESTSIHLVTTALIRLMKLFPFSDNFGILAERFNQESAVELETIRDFIILHYHQTARDDSPFWDHYRTMDIPDSLRHRMTIFAENGYVWPDDVSLFRVDSWIQVMMGQGLQPKQYHHAGKMLPPEGLKQQLAALKQQIENQVAQLPPHEQFIQKYCPAGKVG

SEQ ID NO: 85858 - protein, 499 aa, unidentified
  source 1..499: note = Alteromonas confluentis
  REGION 1..499: note = tr|A0A1E7ZDY3|A0A1E7ZDY3_9ALTE Tryptophan halogenase; OS = Alteromonas confluentis OX=1656094 GN=BFC18_06130 PE=4; SV = 1
MDSRMSAHIRKLVVAGGGTAGWMAAALLKKVLGHLEIELVESQDIGIVGVGEATIPPIQTYNQFLGLDEKAFLSETNASIKLAIRFENWKQKGSSYYHTFGAPGATVGFVGFQHYWLRAMKAGLNKSFWDYDLNYLACKAGTFNKIQTDNPVYQLPYAYHFDATLYGQFLRRLAEKSGVVRTEGKIEHVKTNPETGFVEALQLTSGKQIHGDLFLDCTGMRGLLLQKTLGVEYEDWSKWLCADSALAVPSQRHEKTAPFTRSIAHESGWQWRIPLTHRNGNGLVYSSRYMDDDTAEQTLMSNLDTAPLDTPRKITFRTGRTVKQWHKNVIGIGLSSGFLEPLESTSIHLIQSGIVRLLKMFPNHAITPSMEALYNAESKEEFETIRDFIILHYNVTERDDSEFWRDMQKLALPERLATKIDAFRDTATLHNEQNDIFRDASWVEVMLGQGIMPQSYHPSANNFSDQEILAIMQKIEAAKLQPLGSLVAHDDFLRKITAN

SEQ ID NO: 85859 - protein, 520 aa, unidentified
  source 1..520: note = Alteromonadaceae bacterium
  REGION 1..520: note = tr|A0A4R5GYU3|A0A4R5GYU3_9ALTE Tryptophan 7-halogenase OS=Alteromonadaceae bacterium M269 OX=2546219; GN = EYS14_19900 PE=4 SV=1
MADARCVFENLLRFLPRVDLVSVAEPHKIVILGGGTAGWMAANLMAKRWANKPIEITLVESPSVGIIGVGEGSTPTLKRFFESIEITEQEWMPRCDATYKVNIRFSGWSPESGIADYSHPFTCQTDTFSHRAFEVNCRTRRLGLNTHTRPDDFLLNGVLANQNKGPVTPENFPFVMEYGYHFNSQLLGEFLAEIALQRGVQHQQADVVSVSKHNNGDIAALVTKEGMEIKGDFFIDCSGFRSVLLKGALGVPFESFKSNLFNDSAVVLPTPIQQDIPSETLSTAMSAGWCWRIPLTSRFGNGYVYSSDFISSEQAEVELRQHLGMQDSDQECRHLKMKVGQAKYHWMNNCLGIGLAQGFIEPLEATALHLVQISIEMFMAKYDESQLTGKHRDSFNQDIHDRFERVRDYIVAHYKMNTRHDSEYWRVNRENNHLSDSLCHILDVWFKCEDLGVEIERQNLNSHFDSISWHCLLAGYGKFPPLAPNQPGTGDLYQDQGVDEFLRRCSLNFQQHSENLNNLR

SEQ ID NO: 85860 - protein, 501 aa, unidentified
  source 1..501: note = Alteromonadaceae bacterium
  REGION 1..501: note = tr|A0A4R5H184|A0A4R5H184_9ALTE Tryptophan 7-halogenase OS=Alteromonadaceae bacterium M269 OX=2546219; GN = EYS14_20905 PE=4 SV=1
MAIPHIIIAGGGTAGWMAANLIQQSWPQTRVTLIESKTIGTIGVGEGSTPYLKHFFKQLGITDEQWMPACNATYKTGIQFSSWTNKPGYSSYFHPFFSQLDIKPGDPFFYNANMQRMGYQANAHPDKYFVNTQLAAQCLAPIPNREIGFELDYGYHFDAGLLGTFLKQRAIQLGVEHIEGDIENVEVSESGNISHLVTKAGAKLSADFFIDCTGFQSLLLQKTLNVPFTSFKDNLINDAAVAIQTPNASDFAISPKTVSTAFKHGWAWNIPLTNRTGNGYVYSTEHCSPDEAEHELRQALGIGANKDIKARHLKMRVGRVSQHWHRNCLAIGLSQGFIEPLEATALMLVQYSIQQFIDRYQDLKTPEAQKRTLYNQEINRMFDGIRDYIVTHYCMNSRTDTAYWQHCREESILSDNLTELLEAWTSKDKDFDSVLEKQQSSLVYLRPSWYIILAGMGCFPETLSEPPTSIRIPDANLSLRLCQKYASELFNDHRSVLASRL

SEQ ID NO: 85861 - protein, 525 aa, Duganella sp.
  REGION 1..525: note = tr|A0A1G7THE2|A0A1G7THE2_9BURK Tryptophan halogenase; OS = Duganella sp. OV458 OX=1855290 GN=SAMN05216320_10410; PE = 4 SV=1
MNSNEMHGGAIRRIVIVGGGTAGWMTAAPLAQRLLRHPTEPCEVTLVESPEIGTIGVGEATLPTIRAYNAALGLDADDFVAKTKASYKLGIEFKDWGHVGNRFFHAFGDFGPPLAGLSAHQHWLRLASAFNNMPDLENWSMPSVMARHGKFVPPNEEKPGVTDAYSYGFHFDASLYARYLRDYAVARGVQRIEGMIVDVEQHAESGFVTAIKLRDGRRIEGDLFIDCSGFRGLLIEGALKAGYEDWSNYLPCNSALAVPCASAPQLTPYTRSTAKEAGWLWRIPLQHRIGNGHVYSNGFTTDEQARRVLLDGLDGEALDEPRQIRFVTGRRRKSWDKNVVAIGLSAGFVEPLESTSINLIETAVGKLLELFPERDCNPALADEFNRVMSLRYESVRDFIVLHYKLTRRDDSDFWRYCAAMPIPDSLRHQIALFRETGRVAIVDRGGFAEPSFVAMMMGLGALPKRYDPLAGRVDIRTVHGHFAGLRDMITQAVALMPDHGAYVASQAAAAVSSHTENKKLMEAHA

SEQ ID NO: 85862 - protein, 504 aa, Duganella sp.
  REGION 1..504: note = tr|A0A1G8A410|A0A1G8A410_9BURK Tryptophan halogenase; OS = Duganella sp. OV458 OX=1855290 GN=SAMN05216320_11099; PE = 4 SV=1
MRDPNNRQPVRRVVIVGGGTAGWMAAAGIAKVLGKRLDIKLIESEEIGTVGVGEATIPTLINFHNVLEINEQEFMAETQATFKLGISFESWRNVKEDYIHSFGTTGVDHWTAGFQHFWHKGVERGLAGDYGDYCLELKASLEHRFAHLPNNGMNYAYHLDAGRYAKYLRKLSEPRGVQRIEGKIVSYNKHDNGDVRSVVLASGQEIEGDLFIDCSGFRGLLIGEAMDEPLTDWSQWLFCDRAIAVQTEAVADAVPLTRSMAHQAGWQWRIPLQHRVGNGIVYSSRYLDDDAARKQLLANVQGRTLIEPRVIKFKPCQRHLTWKGNVVAIGLSSGFLEPIESTSIHLIQRSVIRLMQMFPSDGIQQADIDEYNAQCNSEIEHIRDFIILHYHANNRTDSQFWIDAREMSIPASLQHRIDLFRETGRVFRVPNELFAENSWIQVMLGQGIMPKSHHQTADLMGDEELKAFLGNIKGRIDRTVVQLPTHQAYVQRYCGRPDEGIKAA

SEQ ID NO: 85863 - protein, 505 aa, unidentified
  source 1..505: note = Planctomycetaceae bacterium
  REGION 1..505: note = tr|A0A1Z9QPB8|A0A1Z9QPB8_9PLAN Uncharacterized protein OS=Planctomycetaceae bacterium TMED240 OX=1986835; GN = CBE00_08375 PE=4 SV=1
MKIVIVGGGSAGWITASYLASTVEADVTIIHTDLVETIGVGESTTPTIQHIAKKVGIDEPEWMKQCEATFKYGVEFNDWNRIGSRWLHTFDDIYPFEIMHSPLQDLGKYNAKIGRTSCDYFLSLNKGSGKSREYNDLHGPGETLLERGLSPYDHAGRNTITNFPGYSFHVNAHKFGQAMKNACKFPITEIQKKVMHVNYNEDGVESIVLEDGDIIQGDVYFDCTGFQRLLIGELTDWNSYYPTIPNNRAIAGTAVTDIPFKPCTQAFAQQDGWIWKIPTTERWGSGFVYSSDFTTDDEAEERIVKFYADQGIKYMPVRRIKFDAGRCNEVAVKNVIANGLSQSFIEPLEATSLMITCSTARSFEELYNKNHTWNASKSKALSRFMHRIIDHNKRFVYYHYILSERQDSEYWRNISQGHDAVQEVCDYADSFKSDRWCEQGETKFNRFNLISMILGFEKTYCNELEDISAEDIEDYEFFKGMSKKHYEHLIRNNLTVDEYIDKING

SEQ ID NO: 85864 - protein, 498 aa, unidentified
  source 1..498: note = Pararheinheimera mesophila
  REGION 1..498: note = tr|A0A3P3QLS9|A0A3P3QLS9_9GAMM Tryptophan 7-halogenase OS=Pararheinheimera mesophila OX=1547515; GN = EIK76_11185 PE=4 SV=1
MTPIKKVVILGGGTAGWLSAALLKKVLGAVVEIELVESDAIGTVGVGEATIPPIRVLNQVLGINEAQFLRETKATIKLAIKFENWRTQGDSYYHSFGAPGRSLTFCHFHHLWLKARQQLGDMTSIWQYDLNYLCAEAGKFASITAKDPILELPYAYHFDAGLYAAFLRKFSEPMGVVRTEGIVDQVTQHHNGHIKSLLLNDGREVKGDFFIDCSGFVSLLLQRKLGVGYDDWSHFLPCDRAWAVPTERFEQTLPYTRAIAHQAGWQWRIPLQHRNGNGLVFCSAHYTEQQALDVLMGNLQSTALAEPKLIKFKTGRARKQWHHNVLAVGLASGFLEPLESTSIHLVQSGIVRLLKMFPHNGIEPATVAEYNKQSEAEFVYIRDFLLLHYHVTERTDSQFWRDMRQLQIPDSLKHKIELFQADGSIFREQHDLFHDASWLQVMLGQGVLPRDYHPLADNFSEAQLKDMLSGIRAIKQEPLAKLPSHDEFLRRACGISAG

SEQ ID NO: 85865 - protein, 506 aa, Duganella sp.
  REGION 1..506: note = tr|A0A1G8A3T4|A0A1G8A3T4_9BURK 2-polyprenyl-6-methoxyphenol hydroxylase OS=Duganella sp. OV458 OX=1855290 GN=SAMN05216320_11096 PE=4 SV=1
MLRRIVIVGGGSAGWLTAGLMAADHRDLQITLIESPDVAPIGVGEGTWPSMRDTLRRIGVSEADFFRECDASFKQGSRFNRWVDGGDSDCYFHPFMLPQGYGEVDVPQHWQAQHPDVPFADLASVQPHLCVHGRAPKQAATPEYASVANYGYHLDAGKFGVFLRKHCLEKLGVHYVPDHVSAINSHPDGDIASLQTNKHGALEGDLFIDCTGMQSLLLGQHFGVPLISQRHVLYNDSALAVQIPYASDDAPIASQTSSTAQSAGWIWDIGLPTRRGVGHVYASSYISDDQAEAELRAYIAQTGGPGEIPQPRKLSFNPGYRERFWQRNCVAIGLSAGFIEPLEASALAIVEMSAAMLSDDLPATREAMDIVARRFNDAFRYRWERVIDFLKLHYVLSKRRDTAYWRDNTSAVPERLAELLTLWQHRAPSRSDFYRLEEVFPPASYQYILYGMGFRSDFSRAARPQESARADAYFQQAAALARKMLGALPDNRALIHHIKLHGLQKI

SEQ ID NO: 85866 - protein, 533 aa, Serratia plymuthica
  REGION 1..533: note = tr|A0A3M3K800|A0A3M3K800_SERPL Uncharacterized protein OS=Serratia plymuthica OX=82996 GN=ALQ63_01428; PE = 4 SV=1
MSKPIKNIVIVGGGTAGWMSASYLVRALQQQANITLIESAAIPRIGVGEATIPSLQKVFFDFLGIPEQEWMPQVNGAFKAGIKFVNWRKSPDHSRNDYFYHLFGNVPSCDGVPLTHYWLRKREQGFQQSMAYACYPQPGALDGNLAPCLHDGTRQMSHAWHFDAHLVADFLQRWAVERGVNRVVDEVVEVNLNDHGFISSLLTKEGQKLEADLFIDCSGMRGLLINQALKEPFIDMSDYLLCDSAVASAVPNDDAQAGVEPYTSAIAMNSGWTWKIPMLGRFGSGYVFSSKFTSRDQATTDFLNLWGLSDNQPLNQIKFRVGRNKRAWVNNCVSIGLSSCFLEPLESTGIYFIYAALYQLVKHFPDTSFDPRLADAFNAEITYMFDDCRDFVQAHYFTSSREDTPFWLANRHDLRLSDSIKEKVERYKAGLPLTTTSFDDSTYYETFDFEFKNFWLNGNYYCIFAGLGMLPDRSLPLLQLRPESIEKAEAMFARIQREAERLRASLPTNYDYLRSLREGNAGLSRPGPSPEFR

SEQ ID NO: 85867 - protein, 518 aa, Erythrobacter sp.
  REGION 1..518: note = tr|A0A1G0A759|A0A1G0A759_9SPHN Tryptophan halogenase; OS = Erythrobacter sp. RIFCSPHIGHO2_12_FULL_63_10 OX=1797975; GN = A3J40_03505 PE=4 SV=1
MTKRIKSVCIVGGGAAGWLTAGLLAARRSVPDGSGLSVTLVESESIGIIGVGEGTWPTMRNTLKKIGISETDFMRRCNASFKQGAKFARWRTGAKDDFYYHPLVLPEGFPMVDLAPYWNAAALKQSGVPSFSDAVCFQEFLCENGLAPKMISSPEFGGIANYAYHLDAHLFAELVQEHCIEKLGVTHIIDDVVEVERGEDGDIAAIINQRTGRLEADLYVDCTGFASKLLGEALEVPFIDCSDVLFIDRALAVQVPYEDENSPVVSHTVSTGQRHGWIWDIGLKNRRGVGYVYSSSHAQGDDVEAELAAYVGPQFKHLSTREIKIRAGHRAQFWKGNCVAVGMSAGFLEPLEASALVMTELSADYLAAMLPATRSGMDVVAARYNEITQYRWDRVIEFLKLHYMLSERDDTQFWRDNRDPASIPGRLLDQLELWRYNSPSELDFSSSHEMFPAASYQYVLFGMGFKMDASMQAHALRDPVAAEQAFERNALLKRKWGSKLPTNRDLLTKLGQYEFQKI

SEQ ID NO: 85868 - protein, 502 aa, Alteromonas sp.
  REGION 1..502: note = tr|A0A4Q8UJT4|A0A4Q8UJT4_9ALTE Tryptophan 7-halogenase OS=Alteromonas sp. KUL49 OX=2480798; GN = EYS00_00345 PE=4 SV=1
MINESAQYNVSANAVKKVVIAGGGTAGWMAATALSRLIGKSVSVTLVESKDIGIVGVGEATIPPIRTLHKLLGIDESQFMQATQATYKLGIEFENWRDKGHSYIHSFGITGRECWAGEFHHFWLRAQSLGFGGEFGDYCVELKAALENKFATSDKAPLNFAYHFDAVAYGKFLRSIAEQSGVKRIEGNIAKVNKCVERGYLTSLLLESGEVIEGDLFIDCTGFKGLLIEQALHTGYENWQHWLPCDTAMAMQTEAVEPPPPYTKSVAHTAGWRWKIPLQSRVGNGLVYCSKYMTDDEARETLTAQVTGAPINDPRIIRFTPGKRRLGWNKNCVALGLASGFIEPLESTSIHLIMTGIIRLLRNFPFDGITQSAIDEYNNKFNSEMDAILDFIVMHYKVTNRMDSPFWQHCQTMDIPKSLQHKIALFADTGRVFLDDGDIFRVDSWTQVMLGQGLTPRQYHRVADEMSTEELQRFMAGLKQHVDHHVSQLPQHSDFLKHRMGA

SEQ ID NO: 85869 - protein, 502 aa, Alteromonas sp.
  REGION 1..502: note = tr|A0A4Q8UK77|A0A4Q8UK77_9ALTE Tryptophan 7-halogenase OS=Alteromonas sp. KUL49 OX=2480798; GN = EYS00_01315 PE=4 SV=1
MQSNDIKNIVIVGGGTAGWMAAAALSKLLYADDINIRLIESEAIGTVGVGEATIPHILYFNRLLGLDENDFIRQTNATFKLGIEFVDWGKLGDSYIHPFGPYGFDMEGMHFHHLWLRQHKQGKAKPIDEFNLQILAAKAGKFMRDKPDMKGSPLSTIAYAFQFDAALYVKFLRNVAEKRGVIRKEGKITHASVNSDNGHVSSVHLENGEVISGDLFIDCSGFDGLLIEKTLKTGYDDWSHYLPCNSAVTRLSERLDDLPPYTRATAKTAGWQWRIPLQSRTGNGYVFSNQFISDEEALTTLNAGLDKAPTSDPRYLRFTTGIRKQVWNKNVVSLGLSAGFLEPLESTSIHLIQTAIARLMTNFPDKSFNQPDIDYYNARTRLEYEQIRDFLILHYKATTRDDSEFWRYCKDMAIPASLEQRIAIYKENARLYRHDNELFNHVSWFAVFHGQGIIPKAYNPIANQLPVYELDKRLEEIHKVTSKCLDHMPDHQSYLSRIIAES

SEQ ID NO: 85870 - protein, 507 aa, Caulobacter henricii
  REGION 1..507: note = tr|A0A0P0NXY9|A0A0P0NXY9_9CAUL Tryptophan halogenase; OS = Caulobacter henricii OX=69395 GN=AQ619_06000 PE=4 SV=1
MTDGGLKSLTIVGGGTAGWMSAAMLSRALGSTVAITVVESDEIGTVGVGEATIPAIKLLNGFLGLDENDFLAATHGTIKLGIEFVDWHTVGQSYLHAFGPVGRPLGMAAFHHYWNRRRLQGHDESLWDYSLNARAARAGKFDRLQQAGGGYLEGLVHAFHFDAALYAKYLRRYSEAQGVRRVEGRIVGVNQHSETGFVTDLTLQDGRRVEGEFFIDCSGFRGLLIEETLKTGYDDWRGWLPMDSAIAVPCASATPLLPYTRATAREAGWQWRIPLQHRTGNGHVFCSEHISAAEATDVLMRNLDGAPLAEPRQLNFTTGRRRQFWNKNVVAMGLASGFMEPLESTSIHLVQSALSRLVALFPNRDFNAVEIAEYNRQTALEYEYIRDFLILHYKATSREDTPFWRACKAMDIPDTLKARMELFAQSGRVFSQEDDLFKEASWIQVLIGQGVLPGAVHPLTRQVTDPQLDDYMTNLRQIMARAVDGLPDQADFIARHCASGAQSADRP

SEQ ID NO: 85871 - protein, 347 aa, Xanthomonas fragariae
  REGION 1..347: note = tr|A0A1Y6HCN7|A0A1Y6HCN7_9XANT Tryptophan halogenase; OS = Xanthomonas fragariae OX=48664 GN=prnA_3 PE=4 SV=1
MAATQATIKLGIGFEHWRDLDQRYIHSFGHAGTDHWSAGFQHFWLKGRQRGVARDFGDYCLELRAAQEGRFAHLSNGGMNYAYHLDAGLYARFLRRFSEGFGVQRIEGRIGTVETDPHSGHLTALTLQNGTRVEGDLFLDCTGFRGLLIGQTLGVGADDWSHWLFADSALAVQTESVGAPVAYTRSRADQSGWMWRIPLQHRVGNGIVYSSRYMDHDSAAQVLQRNLAGRALTELRPLRFTPNQRHRVWEKNCVALGLASGFLEPLESTDIHLIQRGITRLLQTFPQIINDLDIAEYNRQAAEEITHIRDFVILHYHVTDRRDTPFWRDCAAIDIPDTLRHWVELFR

SEQ ID NO: 85872 - protein, 499 aa, Glaciecola sp.
  REGION 1..499: note = tr|A0A2N1HV27|A0A2N1HV27_9ALTE Tryptophan halogenase; OS = Glaciecola sp. 33A OX=2057807 GN=CXF81_08855 PE=4 SV=1
MKKQQRKIKKVIIAGGGTAGWMAAAALSKLIGNNLDVSLIESDEIPTVGVGEATIPTLHVFHQLLGISEQEFMAATNATFKLGISFENWRDVSKDYIHSFGFLGQGCWAAGFQHFWLKGRERGIASQLGDYVPEHLGAREGKFAVLAGQELNHAYHLDAGLYAKFLRKIAEKYRTKRIEGKIAKVTLDEESGYIDSLTLASGQVVEGDLFIDCTGFKGLLIEEALHTGYDDWSHVLPCDSAIAVQTNTVGKPVPYTRAIARDAGWQWRIPLQNRTGNGFVFCSKYMSDEEATKTLLDNIEGERLNEPRVIKFKTGQRRKHWNKNCIAMGLSSGFIEPLESTGIHLFQRAIVRLLLMFPSQGIKQSDIEEYNVQTKEEAENIRDFIILHYHLTERKDTAFWRYCSSMDVPDSLKHRMSLFRESGQVFKKSDELFGETSWIQVMMGQGLMPEQYHPIVDMMSDNELRDFLNNIKSRVKRQVENWPDSNDFIKHYCPSSVNT

SEQ ID NO: 85873 - protein, 504 aa, Caulobacter henricii
  REGION 1..504: note = tr|A0A0P0NY20|A0A0P0NY20_9CAUL Tryptophan halogenase; OS = Caulobacter henricii OX=69395 GN=AQ619_03800 PE=4 SV=1
MTRVNRLRKVVIVGGGTAGWMTAAALGRFLTRDGQTEVTLVESEAIGTVGVGESTIPQINIFNRMLGLDENDFVRKTKATFKLAIEFVDWKAIGHSYHHPFGPYGVDMEAVSFHAYWLKLHGMGLEPDLGAYSLNAVAAQQGRFMRPNGQANSPLGAIAYAFQFDAGLYARYLRDYAEARGIVRQEGKIATVQQDGLTGFVTSVTLESGAVVEGDLFIDCSGFRGLLIEQTLQTGYEDWSNWLLNDRAVAVPCTLGGSNAPVTRATARPAGWQWRIPLQHRLGNGYAYSSAHISEDEATAYLLAHLDGEPLAPPNQIRFTAGRRKKSWNRNVVAIGLSAGFMEPLESQSIHLIQVGIARLLAMFPDRNFHQPDIDRYNRVMAFEYEKIRDFIILHFKATQRNDTPYWDYLREMPIPDYLADKIALFQSHGRIFRENEELFNDTSWFAVMVGQGLLPGGYDPMVEVMGDEELVRRMADIKAVIARSAEVMPDHFDFIRANCDAMG

SEQ ID NO: 85874 - protein, 534 aa, Streptomyces misionensis
  REGION 1..534: note = tr|A0A1H5DKW0|A0A1H5DKW0_9ACTN Tryptophan halogenase; OS = Streptomyces misionensis OX=67331 GN=SAMN04490357_5857; PE = 4 SV=1
MTGEDRRIKKVVILGGGTAGWMTAAYLGKALQNTVEITVLEAPTIPRIGVGEATVPNLQRVLFDFLGINEDEWMRECNASFKTAVRFVNWRTEGAGQATARELPQGGPDHFYHPFGLLPDYDQTPLSHYWYKNKYEGLTDEPFDYACFREPPVMDAKLSPRWLDGRHATRYAWHFDAALVAKFLCRFATEKQGVRHVQDEMTRVEQDERGFVTALHTASGKVLDADLFVDCSGFRGLLINKAMAEPFIDMSDHLLCDSAVATAIPHDDEANGVEPYTSAIAMSSGWSWKIPMLGRFGTGYVYSSKFTGQDEATREFSEMWGLDPENHEFNHVRFRVGRNRRAWVKNVVGIGLSSCFVEPLESTGIYFITAAIYQLAKHFPDRSFNETLINRFNREVESMFDDTRDFIQAHFYFAPRNDSPFWRANKELTLPENIREKIDAYRAGLPINSPVTDESTYYGNFEAEFRNFWTNGSYYCIFAGLGLVPDAPLPALSYKPESVIGAQPLFERVKRQQQDLLDTLPTTYDYLRQLHGTS

SEQ ID NO: 85875 - protein, 509 aa, Erythrobacter sp.
  REGION 1..509: note = tr|A0A1F9ZEW9|A0A1F9ZEW9_9SPHN Tryptophan halogenase; OS = Erythrobacter sp. RIFCSPHIGHO2_12_FULL_63_10 OX=1797975; GN = A3J40_11825 PE=4 SV=1
MTSKQADTPDDRAIRSILIVGGGSAGWMTCAALANALPKGCRITLVESEAIGTIGVGEATIPPIRTFNAMLGIDEREFLRETQGSFKLGIEFVGWGSQGSRYFHPFGPHGRPFDIRDVHQLWLQARSEGDQSEFDDLAMAWHLARAGRFAIPAADRRNVLSTFDYAYHFDASRYARYLRSYSEKRGATRIEGKVADVAVDGETGFVTHVTMENGEQLAADLFIDCSGFRGLLIEGTMKAGYEDWTHWLPCDRAVAIPCTHGAEFVPHTRSTAREAGWQWRIPLQHRVGNGYVYCSKFIDDDAALETLLGNLEGEPLAEPNQLRFVTGMRRKFWDRNVVAIGLSSGFMEPLESTSLHLIQAGISKLLALFPDRTFDAMVIDEYNHIARTEFERIRDFIILHYKLTRRDDSELWRYCSAMDIPDTLAFKIEHFRRYGRHIAREMDLFGPPSWHAVHIGQGNLPEAFDPIAGYREQGPQEWLGKLRAAMAAEAAKQPLHREFIERHCRAPAP

SEQ ID NO: 85876 - protein, 500 aa, Alteromonas sp.
  REGION 1..500: note = tr|A0A4P6B475|A0A4P6B475_9ALTE Tryptophan 7-halogenase OS=Alteromonas sp. KUL49 OX=2480798; GN = EYS00_06665 PE=4 SV=1
MRAVNKVVILGGGSAGWMTAAALATVLKNQYAEIVLIESQSIGTVSVGEATIPQIALFNSILGIDENEFVRETQATFKLGIEFANWKQKGHAYMHPFGSFGTDMDAIQFHHYWLKMFQQGQAHDLDAYSLAAVAAKQGKFMRPENRGNSPLSKIAYAFHFDATLYAKYLRKLAEGRGVKRIEAKMEDVCLRDTDGFIDSLVLDNGQTISGDLFIDCSGFNGLLIDKTLNAGFEDWSQWLPCDSAVAMPCLAKNSVYPYTVSTAQDAGWTWRIPLQHRIGNGYVFPSQFVDTQKAVDVLTQQMENEPLNEPNILRWKTGMRKEFWVKNCVAIGLSAGFIEPLESTGLHLIQAGIAKLLGMFPHQGFEQIDIDTYNQQTAVEMERIRDFIILHYKATDREDTEFWRYCKHMTIPEYLQQKIDLYKANGRIYRQDVELFNETSWLAVMHGQGIMPKGYHPLVDTLPEAEIHSRLEHIKQVIDNSANVMPSQAAFIDKYCKASG

SEQ ID NO: 85877 - protein, 520 aa, Alteromonas sp.
  REGION 1..520: note = tr|A0A4P6ARN9|A0A4P6ARN9_9ALTE Tryptophan 7-halogenase OS=Alteromonas sp. KUL49 OX=2480798; GN = EYS00_00340 PE=4 SV=1
MSQQSIKNVVIVGGGTAGWLSAGVLAAKLGQQSLQKTSAINVTLVESPEVSTIGVGEGSWPSLRDTLLDIGIKESEFITQCHASYKQGSTFSRWKYDDKPHQYQHPFTTPSGYVEMDIHAQWQNLCAEESFEQSFCIQPEMCDLGKAPKQVKTPDYAYVLNYGYHFDATALAHLLTSHCVSNLGVNHIKAHISSVNSAADGNIASLTTNEGDVIEGDLFIDCSGGKALLIGEHFGVNWRSMSGVLMNNRAMAVQVPYEDSDNDISSTTIATGKPFGWTWDIGLQHRRGVGMVYNDQFASSDQVQSTLLAHVGERASQATIDQCTIRSLSFDPGYREQFWVKNCLSLGMSSGFIEPLEASAIAMIELGLRMLYEQFPKDMFHMERLSKRYNDRFTYRWERVIDFLKLHYILSERSDPYWLAQRDPMSIPDSLKEMMEMWKYQPPSRFDFIQNEEIFPSASYQYVLYGMGYHTQVNHLLSTTPEAKKAMAIRKQLEQQRPQFMAGLPTNRQLLEQLVAMHSK

SEQ ID NO: 85878 - protein, 496 aa, Sphingomonas sp.
  REGION 1..496: note = tr|A0A0Q6AK39|A0A0Q6AK39_9SPHN Tryptophan halogenase; OS = Sphingomonas sp. Leaf407 OX=1736369 GN=ASG37_05325 PE=4; SV = 1
MQAPLIRRIVIVGGGTAGWMTAAALSAKLGNGVATTLIESEAIGTVGVGEATVPHIRHFNAALGIDEADFLSRTNATFKLGIEFRDWGRIGDSYIHPFGAYGAPIGGVDFHQHWVRLHKAGRAAPFEAFSLPIRAARADRFAHPDPDPHSLLSTYSYAYQFDAGLYGRYLRAFAEARGVVRQEGRVVDVALRNDGFVESVRLDDGRTIAGDLFVDCSGFRGLLIEQALHAGYDEWSHWLPCDRAIAMPCATTGTISPYTRATALSAGWAWRIPLQHRVGNGHVYSSGFLDDEAALTALLAGLDGPPIAEPNRLRFTTGRRRRQWIGNTVAIGLSAGFLEPLESTSIHLIQLAIGRLLDLLPQGDWDPRDAAEFDRLMAREYDRVRDFLILHYHATERDDSPFWNHCRTMDVPDSLATQLALFRERGVVAPYADGMFLEPSWLAVYLGQRVVPHRVDPRVLTTGEGEAAALLAAMAARYGAAAEGLPGHAATLGLAA

SEQ ID NO: 85879 - protein, 505 aa, Xanthomonas axonopodis
  REGION 1..505: note = tr|Q8PIA3|Q8PIA3_XANAC Tryptophan halogenase; OS = Xanthomonas axonopodis pv. citri (strain 306) OX=190486; GN = prnA PE=4 SV=1
MTQAQIRRVVIAGGGTAGWIAACALSHQFRNLLDITLVESEQIGTVGVGESTVPPIRTFHRFLQIDEQEFLRAVAGTFKLSISFEHWRRHGERYIHPFGITGQSTLVCAFHHLWLESQRRGMPGSFGDYCLETVASRVDRFALHGEPAVNYAYHLDAALYAKFLRARSEACGVKRVEGRIQQVTVQPHSGDVASLVLEDGQTIEGDLFIDCSGFRGLLIEQTLHTGYEDWSHWLPCDRAVAVQTEALGPPVPYTRAIAHEAGWRWHIPLQHRVGNGLVFSSKHLSDDQAHAKLLRDVAAPAVREPWMVPFRTGRRLKAWNKNVVSLGLASGFIEPLESTSIHLTISAVVRLLALFPAEGIAPSQVQLFNDVSRAEMEHVRDFVTLHYHATQRDEPLWQQCRQMELPESLALRLRAWRERAHAWQGADELFRVDSWTHVLMGQGIAPEQHHPLTRAFSDHDLRRLLDGIAQPIQHAVQQMPSQQDFIERYCKAGEQVWGMRSPVPA

SEQ ID NO: 85880 - protein, 500 aa, Erythrobacter sp.
  REGION 1..500: note = tr|A0A1F9ZG11|A0A1F9ZG11_9SPHN Tryptophan halogenase; OS = Erythrobacter sp. RIFCSPHIGHO2_12_FULL_63_10 OX=1797975; GN = A3J40_07855 PE=4 SV=1
MNRDGIDRLVIVGGGTAGWIAAAAFVRLLGHQTRIELVESDAIGTVGVGEATIPQIIRLNTVLGLDENDFLRFCKGTFKLGIEFVDWSGPGSRYLHTFGDAGINLGSVHFHHYWRRHAMRGGKERLWDYSLHQMAVDEGRFGKLDRVGNTQMTGLAYAYHFDASLYARYLRNYCEQWGVTRTEGMVQNVVRDGESGDIRSIELDNGKSVAGDFFIDCTGFRALLLGQELGVDYLDWSRWLPCDRALAVPSERMEKIPPFTRATARQAGWQWRIPLQHRTGNGHVYSSGFMSDDEAARLLLGNLDTKALDDPRPIRFTTGRRSSFWSHNCVAIGLSSGFLEPLESTSIHLIQSNVSRLIEMFPRAQIGDAERDEYNRRTIHEFEQVRDFLILHYYLNAREDGEFWRYCRNMALPDPIRDKIALFAASGRIGRDVDDLFRDASWAQVMLGQGILPADYNPMADQMNDAQLAQFMGDLKKLIGKAVAGLPSHDDYIARNCAAG

SEQ ID NO: 85881 - protein, 505 aa, unidentified
  source 1..505: note = Xanthomonas manihotis
  REGION 1..505: note = tr|A0A0W7XDX6|A0A0W7XDX6_XANMN Tryptophan halogenase; OS = Xanthomonas manihotis OX=43353 GN=AO826_15480 PE=4 SV=1
MTQAQIRKVVIAGGGTAGWIAACALSHQFRNLLDITLVESEQIGTVGVGESTVPPIRTFHRFLQIDEQEFLRAVAGTFKLSISFEHWRRQGERYIHPFGITGQSTLVCAFHHLWLESQRRGMPGSFGDYCLETVASRVDRFALHGEPAVNYAYHLDAALYAKFLRARSEACGVTRIEGRIQQVTVQLHSGDVASLVLEDGQVIEGDLFIDCSGFRGLLIEQTLHTGYEDWSHWLPCDRAVAVQTQALGPPVPYTRAIAHEAGWRWHIPLQHRVGNGLVFSSKHLSDDEAHAKLLRDVAAPAVKDPWMVPFRTGRRLKAWNKNVVSLGLASGFIEPLESTSIHLTISAVVRLLALFPAEGIAPSQVQLFNDVSRAEMEHVRDFVTLHYHATQRDEPLWQQCRQMELPESLALRLRAWRERAHAWQGADELFRIDSWTHVLMGQGIAPEQHHPLTRAFSDHDLRRLLDGIAQPIQHAMRQMPSQQDFIERYCKAGEQVWGMRSPVPA

SEQ ID NO: 85882 - protein, 505 aa, unidentified
  source 1..505: note = Erythrobacter lutimaris
  REGION 1..505: note = tr|A0A395LKW6|A0A395LKW6_9SPHN Tryptophan 7-halogenase OS=Erythrobacter lutimaris OX=1538146; GN = DL238_06660 PE=4 SV=1
MEQRKPTRVVVLGGGTAGWMSAAGIARLLGDRVEVQLVESDDIGIIGVGEATLPHIRGFVERLGIDEAAFMRATHATYKLGIDFRDFGRIGESYIHPFGSFGEELAGVGFHHYWLELQRHGMAQPLGDYSLCVAAALANRFEPPAQDMSLRSTYGYAYQFDATLFGPFMRDFGLSIGVTRQEGLVTGVDRNAASGDVTALLLEDGRRIEGDLFVDCSGFRSLLLGQELGEEWEDWTHWLPCDRAAAMPCAHASEDLRPYTTATAMPAGWRWQIPLQHRLGNGYVFSSAFIEEEAACEAIRNAAEGDPLADPRVLRFRPGRRKRSWSHNVVAVGLASGFLEPLESTSIYLAQMAITYLIELFPQDGRIADADRAEFNRLVDMEYDRVRDFLILHYHATTRDDSEFWNHVRTMTVPDSLAEKMELWRKAGRIERYSDGLFYDASWIAVYVGQGWLPERHDPRPGMIDPHKLKVAADRLQQEIGDEVSRMPGHRDYLRGEAARLAEPA

SEQ ID NO: 85883 - protein, 503 aa, Alteromonas sp.
  REGION 1..503: note = tr|A0A4Q8UJ14|A0A4Q8UJ14_9ALTE Tryptophan 7-halogenase OS=Alteromonas sp. KUL49 OX=2480798; GN = EYS00_06655 PE=4 SV=1
MTAAALSKLLNPNLFTVTLVESDAIGTVGVGEATLPHLRFFNQRLGIDEGEFIRATNATIKAGIEFSNWGNIGDAYIHPFGDYGEPLNNVGFHHYFYQAQKRNTALSLDDYSLPVMACKQGKFAFPTSEPNLLTSTYSYAYHIDAGLYAKYLRGFSEKLGVVRVEGKVESVAMRKSDDSIASLKLDNGDIINGDFFVDCSGFRGRLIEQCLHAGYEDWSHWLPCDRAIAVQSEHNGKPLPYTKAIAQEAGWQWQIPLKHRMGNGYVYSSQYISDDTALQTLLDNLPGKPTSEPNRLRFTTGKRKSSWVKNCVAIGLSSGFLEPLESTSIYLIQAAIMKLVELLPQRENLDAKRSEYNRYFSNEMDKIRDFLILHYHATKREDTPFWSFCNHLNIPQSLAEKMQLYKEIGVIEDYKYGLFLTPSWLAVYHGQGVTPSQGDVRVNQATLAHAEKYMNLLKPNIQRCVNKMPTHEHIVAMLHETEHNNPTASQLNRPANFSLYGRS

SEQ ID NO: 85884 - protein, 510 aa, Alteromonas sp.
  REGION 1..510: note = tr|A0A4Q8UCP5|A0A4Q8UCP5_9ALTE Tryptophan 7-halogenase OS=Alteromonas sp. KUL49 OX=2480798; GN = EYS00_11915 PE=4 SV=1
MNQTSQNSSKQKIVIVGGGTAGWLSAAIIAAKHKVADGECGLDITLVESSDIPTVGVGEGTWPTMRNTLKDIGLSEKEVFKRCSAAFKQGGKFVNWVAGNNDYYYHPFTVPLGYGRVEMAPYVDNIAEFANATNFQQHVCEHNMAPRTLSEEEYSSAQSNYAYHLDAGAFADQLREFSKSTLGVKHTVATVLSVQSNGTNNIESITLDNGECLSADLFIDCSGFKSLLLGETLQEPLVSTDDVLFNNSALALHVPYEGDYEIKPYTQATAQEAGWIWDIGLASRRGVGHVYSTNFISDDKAETLLRNYVGDQAGELSARVIRFNSGYRKNIWKGNVVGIGLAAGFVEPLEATALMLIEISARFVAEQMPLPNAAMPIVSQRFNKQMQYRWQRIIDFLKLHYIFNQRSEDYWVANRNPATIPDSLKEDLEIWKYRGPQIADFSAAIELFPAASYQYVLYGMGFSPDFSLQSHFYNERDLATKVIQQNQLITQQKLSSLPNHRDYIAQWLAS

SEQ ID NO: 85885 - protein, 500 aa, Sphingomonas fennica
  REGION 1..500: note = tr|A0A2T4I482|A0A2T4I482_9SPHN Tryptophan halogenase; OS = Sphingomonas fennica OX=114404 GN=CV103_08020 PE=4 SV=1
MSAHPIETVVIVGSDTTLWLAAAVLRNALRPAGLAVEAVELPATLRPADVHATLPPLEALHAQLRIDEKALLRSTGGAFSLGQNFTDTSGAAPAFLHAYGSCGAPIEDREFFAYWLKARRHGLAVPLDDFSLTASAARHGRLMIPDDETDRYGRADYGYHLPALAYARSLKMLAIRDGVRAHETSALGIALDPDRGTIKAVELEGGRRIEGQLFIDATADARLIGRALGVRVESWRDHFPVDRVLAATGPRFASIPIYAEVRVSEGGWTALHPTQAATHVVHAYASASASDEEAAVAAARAAGMPIADIAIRSPEPGRRESAWAGNCVAIGAAACTFDPVHGVDLHAAQLGLVHLLSFFPAGTDHAAERAEYNRIMRSSLCRLRDFQSAHYALNRYGDAPFWTAAREAALPAELAQDIATFRARGLVAPREDESFSPDSWRALFVGHGTVPESYIPAVDTVAADAVKEHFRRMLGFVRDQVMRQPTHDQYLDGIGGASRG

SEQ ID NO: 85886 - protein, 510 aa, Alteromonas sp.
  REGION 1..510: note = tr|A0A4P6AS70|A0A4P6AS70_9ALTE Tryptophan 7-halogenase OS=Alteromonas sp. KUL49 OX=2480798; GN = EYS00_01330 PE=4 SV=1
MEVCIVGGGTAGWMAASAMAKKFENQSINVTLVESEDIGTVGVGEATLPHIRFFNQALGIDEREFMKETRATFKLGIEFVDWGKIGQSYIHPFGDFGQSINNIDFYQAWLSQPSSRSNSDLSDYAFGTVAATQGKFQFPHSGQTRAQRSFGYAYQFDSGLYAKFLRRFAENLRVTRIEGKVVDTTIEPNSGNVTSLTLSNNRVVKADLFIDCSGFRGLLIEQALQTGYQDWSSWLPCNRAVAVPCERQDSIPPYTRATAQEAGWIWRIPLQHRTGNGHVYWSEFTSDQDALDTLIMQLDGKPTAEPKQLYFKTGRRNAFWKNNVIAIGLSAGFLEPLESTSIHLIQEGITELLALFPHENYAHIDGARVLQINELDSDEYNQRMALQFERIRDFLLLHYVANDRNDSEMWRYFNSMSLPGSLVEKLHLWKKRAYVQRYEHGTFLPPSWVAVLLGQNISPENCDPRCASISSDEFHRHAATIKKDIKNAVDAALPHEAFLRKFGAYYGEPV

SEQ ID NO: 85887 - protein, 533 aa, unidentified
  source 1..533: note = Xanthomonas manihotis
  REGION 1..533: note = tr|A0A0W7Y2N5|A0A0W7Y2N5_XANMN Tryptophan halogenase; OS = Xanthomonas manihotis OX=43353 GN=AO826_00810 PE=4 SV=1
MGMWPVERGQLAPFAYPSAVLAQECIGMIPAPLRNIVIVGGGTAGWMAAAAFARVLGPTFKVQLIESEQLGTVGVGEATVPHIKAFNNLLGIDEAEFVRQTQGSFKLGIEFVDWQRPGSTYMHGFGTQIGHPLGLLPFHQYWIKQHARGKAQPLGAYTLNTVAAARGKFMTSAGDVPANSPLANIAYAYHFDATQYAHFLRRYSQQRGVTRIEGLVEQVQLHPESGHVQSLQLASGQTVHGDLFIDCSGFGGLLIEQALHTGYHDFTHWLPCDRALAVPCEKVGPPTPYTRSTARAAGWQWRIPLQHRTGNGYVYCSAHISDDEAAATLLANLDGKPLADPRPLRFTTGRRKQCWNRNVVALGLASGFLEPLESTSIHLIQSGISKLLELFPREGISPVLVQRYNDRLAFEFDRIRDFLLLHYHATERDDSAFWRHCRQMPITPELQATLDLFRDSGRFYRNAEEMFAEISWVQVLVGQGILPQGYHPLVDQVPDRDAEGFLASVAQTISHCVDVMPGHQHFIDRYCKAAAVP

SEQ ID NO: 85888 - protein, 510 aa, Sphingomonas fennica
  REGION 1..510: note = tr|A0A2T4I449|A0A2T4I449_9SPHN Tryptophan halogenase; OS = Sphingomonas fennica OX=114404 GN=CV103_08015 PE=4 SV=1
MRIVIVGGGSAGWMCAAGLARLLPATDYDITLIESDEIGTVGVGEATLPHIKTFNDMLGIDEAEFLRETQGTFKLGIEFVGWDRAGDRYIHPFGAFGEPWVGVDFQHHWVRAAQAGFDPGPIQDYSFAVAAARADAFEFPDGDRNSIRSTYAYAYHFDAGLYAAFLRRWATARGVRRIEGQVIDVGHNAISGHVETLRLKSGATLAGDIFVDCSGFRSLLLGGVMGVAWQDWSEWLPCDRALAVPCRRTTALTPYTRATAQRAGWTWRIPLQHRVGNGYVFSSRYCDEVQARETLLAAIEGEPLAEPRLLRFAAGRRALAWERNCIGIGLASGFLEPLESTSIFLIQAAVIDLASLMPTPGFGNRMDPRLIAEFNRLFEIQYDRVRDFLVLHYAANSREGEPLWDHVRAMRLPDSLTHKIELFEASAAAPDYAYGLFSRDSWLSVLFGQGLRPRAYNRLADHLPLEELERRMRDLRSRIAANAGLMTAQEDFIAGYCPASPPAPPMESAA

SEQ ID NO: 85889 - protein, 497 aa, Salinimonas sp.
  REGION 1..497: note = tr|A0A5B7YAZ9|A0A5B7YAZ9_9ALTE Tryptophan 7-halogenase OS=Salinimonas sp. KX18D6 OX=2572577; GN = FBQ74_03905 PE=4 SV=1
MQQSVRKLVIAGGGTAGWMAAALLKKVLQAQVDIELIESKDIGTIGVGEATIPPIQTFNQFLGLDEKAFLRETNGTIKLAIAFENWRKQGESYFHTFGAPGATLGFCGFQHYWLRAKKAGLEASLWDFDLNYLSCKAGKFNKIQTENPVYSMGYAYHFDSTLYGQFLRRLAEQAGVKRTEGTIEHVALDNESGFVKALQLTDGRQIDGDFFIDCTGMRALLLQKALGVEYEDWSHWLAADSALAVPSKPHTQTAPYTRSIAREVGWQWRIPLTHRNGNGLVYSSAYMDDEKATNMLMGNLDTDALDEPRKIRFKTGRAQKQWHKNVVGIGLSSGFLEPLESTSIHLIQSGIVRLLKMFPNGAVNPSMEALYNTESKDEFETIRDFIILHYYLNERDDSDFWQDMQRLSLPVRLEQKINAFRDTATIFNEQNDIFRDASWVQVMMGQGIMPNDYHPSADVHSDQAILDIMSKIYEAKQQPLAQMLSHDDFLARFTQIQ

SEQ ID NO: 85890 - protein, 505 aa, Sphingomonas sp.
  REGION 1..505: note = tr|A0A0Q6AXI3|A0A0Q6AXI3_9SPHN Tryptophan halogenase; OS = Sphingomonas sp. Leaf407 OX=1736369 GN=ASG37_05260 PE=4; SV = 1
MTIGQQAIATVAIVGGGSAGWMTAAALARFLPPGVAVTLIESDAIGTVGVGEATIPQLRLFNQNIGIDEDDFVARTGGSFKLGIEFAGWNGEGSRYLHAFGTIGRALGLVPFHHYWLAAGGAGDPASLWRHSACAAAARADRFGRDPGSAQAPSGLAWAYHFDAARYAAYLRALAERGGVTRVEGRVVDVALSGGDTIAAVMLADGRRIAADFFIDCSGFAALLIGRMPGSAWDDWSSLLPCDRALAVPCAATAPITPYTRATARAAGWQWRIPLQGRTGNGLVYASDYLSDDAALATLLGNLDGAASGDPRPLRFTTGRRRSPWIGNCVALGLAAGFLEPLESTSIHLVQSGIARLLALWPSAPARAADIAAFNRQSEREWLAVRDFLIAHYVLNGRDEPFWRDRRATPLPDSLAERIELFRGSGRILRDEHELFAEVAWLQLLIGQGVMPQGHHPLVRSLPTARLPEFLSLSATHVESIVARMATHDEFLRAHCPAPQAKVAA

SEQ ID NO: 85891 - protein, 506 aa, Xanthomonas axonopodis
  REGION 1..506: note = tr|Q8PER5|Q8PER5_XANAC Tryptophan halogenase; OS = Xanthomonas axonopodis pv. citri (strain 306) OX=190486; GN = prnA PE=4 SV=1
MIPAPLRNIVIVGGGTAGWMAAAAFARVLGPTFKVQLIESEQLGTVGVGEATVPHIKAFNNLLGIDEAEFVRQTQGSFKLGIEFVDWQRPGSTYMHGFGTQIGHPLGLLPFHQYWIKQHARGKAQPLGAYTLNTVAAARGKFMTSAGDVPANSLLANIAYAYHFDATQYAHFLRRYSQQRGVTRIEGLVEQVQLHPESGHVQSLQLASGQVVHGDLFIDCSGFGGLLIEQALHTGYHDFTHWLPCDRALAVPCEQVSPPAPYTRSTARAAGWQWRIPLQHRTGNGYVYCSAHISDDEAAATLLANLDGKPLADPRPLRFTTGRRKQCWNRNVVALGLASGFLEPLESTSIHLIQSGISKLLELFPREGISPVLVQRYNDRLAFEFDRIRDFLLLHYHATERDDSAFWRHCRHMPITPELQATLDLFRDSGRFYRNAEEMFAEISWVQVLVGQGILPQGYHPLVDQVPDRDAEGFLASVAQTISHCVDVMPSHQQFIDRYCKAATLP

SEQ ID NO: 85892 - protein, 509 aa, Alteromonas sp.
  REGION 1..509: note = tr|A0A4Q8UEY8|A0A4Q8UEY8_9ALTE Tryptophan 7-halogenase OS=Alteromonas sp. KUL49 OX=2480798; GN = EYS00_08205 PE=4 SV=1
MQSTLENIVIVGGGTAGWLTAGILAASFKRNNQTKLPTITLVESPNIPIAGVGEGTWPSMRRTLKHLGIRESDFITQCDATFKQGAKFSGWVTGSPEDSYYHPLVLPHRYDLENLATHFVNSAPEQDFASLLCAQGAICDLNLSPKNMSHKDYQGHLNYAYHLDATKFSQFLQSHCSKELGVQHVVANVQLVESAPDGDIAALLIDDGKRISGDLFIDCSGFKGLLINEHFNVPYKSCKDILFSDRAAAIHLPYPQNDTIAPYTISTATDAGWIWDIGLPSRRGTGHVYSSEFMSDDEAVNVLSHYANQTISADDVRLFNIEPGYRERFWHKNCVAIGLSAGFLEPLEASSLVLVEMSAHFIAEQFPNHKNIVPIVANRFNNTFSYRWSQIIDFLKLHYVLSERTSPFWQRHRDKSTWTDSLKEQLELWKYNVPWHGDFDHAREVFPSASYQYVLYGMRPRYTRPSANQPHGALEQIKRAEANVKQQISQFSQQLYDQRTLLHHLVNAH

SEQ ID NO: 85893 - protein, 488 aa, Alteromonas sp.
  REGION 1..488: note = tr|A0A4P6ATM6|A0A4P6ATM6_9ALTE Tryptophan 7-halogenase OS=Alteromonas sp. KUL49 OX=2480798; GN = EYS00_17605 PE=4 SV=1
MKKAVNNVVILGGGTAGWMAAAVLSKALSKINITLVESEQIGTIGVGEATIPSIHFFNDLLGINSSEFIKHTSGTFKLGIQFENWHKKDGAYFHAFGSTGLGMWAAGFHEYWQRGVELGISKPFETYNIEAVAAKRNKFAHQKGGLNFAYHLDASLYANMLKGVATKHGVTRVEGLVEQVTTDADSGYITGLTLKSGREISGDLFIDCSGFKGLLINETLKTEFVDWSHWLPMDRAIAVQTELTGNPVPYTRSIAHHAGWQWRIPLQHRMGNGIVYSSQYMSDDEAENMLLSTIKGKPITTPRPIKFVTGHRKKLWNKNCVAIGLAGGFIEPLESTAIHIIQQGIMQLLKYFPSYGINALETAQYNDYMISDYNEIKDFIILHYCQTQREDSPFWEFCKNMQIPESLKDRMTLFEQTGRFVQRKDEIFVDSWLQVMIGQGLIPKQHHPLADEMSEQELRQFLSQIENDHIQRVETIPTHTNYLSRITS

SEQ ID NO: 85894 - protein, 522 aa, Streptomyces glaucescens
  REGION 1..522: note = tr|A0A089WZR2|A0A089WZR2_STRGA Putative tryptophan halogenase OS=Streptomyces glaucescens OX=1907; GN = SGLAU_04505 PE=4 SV=1
MAKSVVIVGGGTAGWMTASYLKAAFGERLSVTLVESKNVPTIGVGEASFSTIRHFFSYLGLQETDWMPDCHATYKLAIRYDNWRAEGHHFYHPFERPRVVEGVSLADWWLHKRPSEDYDRDCSVIAALCDAKRSPRRLGGALLAPELGAQDPVSMSRSTMDEQKTQFPYAYQFDATLLAKLLTGYGTDRGVRHVLDDVVDIAVDERGHISHVRTKESGDLAGDLFIDCTGFRGMLLNKALGVPFISYQDTLPNDSAVALRVPMEMADQGMGPYTRASAQAAGWIWTIPLHGRVGTGYVYASDYCTPEEAERTLRAYWGPAADDLTANHIKMRIGRSENSWVNNCVAIGLSSGFVEPLESTGIFFIQNAIEQLVKHFPGGPNDEQLRKSYNRQVANVMDGVREFLVLHYVAAKRNDNDYWRDAKTRRMPDALGARIEQWQAKLPDPDTIFPYYHGFEPYSYTAMILGLGGLDVRPLPGLAMMDDVAAEKELRLVRDQAKSLVETLPSHWDYIAHLNDRAGARA

SEQ ID NO: 85895 - protein, 587 aa, Haliangium ochraceum
  REGION 1..587: note = tr|D0LZL4|D0LZL4_HALO1 Tryptophan halogenase; OS = Haliangium ochraceum (strain DSM 14365 / JCM 11303 / SMP-2) OX=502025 GN=Hoch_5510 PE=4 SV=1
MRIPSDCDVAVLGAGPAGSSFAALVKKYAPGLRVVVLERARFPRWRIGESTIPVANAVLRDLGVYERLAASDAVKKIGITFVWGKDRQPWNADYLQLAREGAGEDPGAVLDVVGQDFAGLRREQQSEPFTAFNIRRDRFDALLLEQARGFGAEAFEGVRATSVRREGDEMRVAWSDDDGASGTLNAGFVLDATGLGALMTRGRRERDPHMNNFAVYGYFAGAGWKVTYSGERSHTTVFIASIPHGWIWYFPIAEDVMSVGVVTHRDHFRDRLAGIELETFYREQLAACPEIAPLLADARLRDDVLPGGARVGASQDWSSWAEQPVGPGWAAAGDAAVFVDPILSSGVTLALQSGHRAAYTLLTARAHPEFDRDALWRAYADYLRGEAGAFLKLARFFYGNNRAAESWWWEAQRLVNASGQLDIDPARAFTMATAGFFPLPRALSLEIVGPLITGAAGSDADLRYVHENSGVPAPEQLAEQSYEVLTRFRLALRTEPARSAPPGQLRVFHDLVSDDPAFSHRLAAAPTEISPQLAPVVDALQEERSVRALMDRAPSLVPPHLAQPADARRLAAHIVRVAAIKGFVQLS

SEQ ID NO: 85896 - protein, 521 aa, Caulobacter sp.
  REGION 1..521: note = tr|J2HQ63|J2HQ63_9CAUL Tryptophan halogenase; OS = Caulobacter sp. AP07 OX=1144304 GN=PMI01_00373 PE=4 SV=1
MSKRILIVGGGTAGWLTAGYLARTFGAQSPGGVEITLVESAEIGILGVGEGTFPTIRKTLRRIGIDEATLVREASATFKQGARFAHWRFEPGRGQPDHYLHSFQASHDPSGLDLLPYWLLGAAGDQEWSQVNTPQKVTADAGRAPKLISHPDYVAPLNYAYHFDAAKLAVVLRKAATGLGVRHVVDTVDEVLLAEDGAIAAVRGRASGLMTADLYVDCTGFRAQLIGQTLKSPYKSCRPVLFCDSALAMQVPYDRPDAPIASYTISTAQEAGWTWDIGLDSRRGVGHVFSSDHTDLDAAERVLRGYVGKAGDGLDIRHIKFEAGYREINWVKNCVAIGLSSGFFEPLEATGIVFAEVAAVMLATLFPWGGEMETAARQYNELMRRRYERTLDFIKLHYCLSERRDTAFWRDNVAASTIPDSLHDLLDRWRFRPPDAIDIDPNVDIFTEASWQYVLYGMGYRSDLTPKAGVYRYFNEARAAFADIRKQADYACQNLPTHRDLVELAQRRGFGGDKAEGGDAR

SEQ ID NO: 85897 - protein, 508 aa, Caulobacter sp.
  REGION 1..508: note = tr|J3AGG5|J3AGG5_9CAUL 2-polyprenyl-6-methoxyphenol hydroxylase-like oxidoreductase OS=Caulobacter sp. AP07; OX = 1144304 GN=PMI01_02807 PE=4 SV=1
MQDNRIRDIVIVGGGTAGWMAAASLKRHFGSAPISITLVESSEIGTIGVGEATIPTIRRFYQALGLSDIDVLRATGGTCKLGIRFNDWLKPGSSFVHPFGLYGQDLNGVAFHHYWMRLRALGEQVPVGDYSLGASLAAAGKFTTPSRNPPSSLSIFDWALHFDASLFAKLMRQVAEQGGVRRIDARITKVNLRGEDGFIESIDLDTGATVTGDLFIDCSGFRGLLIEEALHTGYEDWSHWLLCDRALAVQSEGKGDPPPYTDVTARPAGWQWRIPLQHRYGNGYVYSSRHATDDEARAVLVGSLDERLLHEPRKITFNPGRRLKAWNKNCIALGLASGFLEPLESTSIALIETGIEKIKLLFPSRDFDPCVVDEFNEMSRLEFERVRDFIILHYKANRRTDDPTGFWTHCREMSIPDTLQKKIDLWKAQGHFIRYRWEMFSQPSWLAIYAGFDMLPETYDLSVDGLDAGQLSGALAEMRRAVAEVVAATPPHGDFIERYARPQPVAAE

SEQ ID NO: 85898 - protein, 503 aa, Erythrobacter sp.
  REGION 1..503: note = tr|A0A1F9ZC65|A0A1F9ZC65_9SPHN Tryptophan halogenase; OS = Erythrobacter sp. RIFCSPHIGHO2_12_FULL_63_10 OX=1797975; GN = A3J40_00120 PE=4 SV=1
MSDRIKSILVVGGGSSGWMAAALFAHLFQGLYRIRLVESEDIGTIGVGEATIPAIKKYNELLELDEAQFMRLTQSSFKLGIQFNNWDRIGSSYMHGFGVIGQDMGWLRCHQYWLKMHQQGEASDFANFSINTVAALKNRFMPARADMGDSPIAHIAHAYHFDAGLYARFLRNYAEERGVVRTEGKIVDVALRPDDGFIEAVTLESGERIEADFFIDCSGLRGLLIEQAMKTGYDDWTHWLPCDRALAVPCSRSDNFTPYTKATAHGAGWQWRIPLQHRTGNGHVYSSQYIDDEEAERILLANLDGEQLAAPFHVRFTTGKRRKVWNRNCVAVGLASGFLEPLESTSLYLIQSSLIRLIRLFPDGRLDQANIDEFNRQTDFEYERVRDFIILHYKATKRDDTPFWRYCRDMEVPATLQRKIDLFRANGRIFREDEELFSEESWIQVMLGQGIVPQGYDPLVDVKSEPQIVQYLGNIENVIGKCVAVMPSHADFVEKYCRAESAP

SEQ ID NO: 85899 - protein, 532 aa, Serratia plymuthica
  REGION 1..532: note = tr|A0A447QCH7|A0A447QCH7_SERPL Geranylgeranyl reductase family OS=Serratia plymuthica OX=82996; GN = NCTC8900_04454 PE=4 SV=1
MSKPIKNIVIVGGGTAGWMSASYLVRALQQQANITLIESAAIPRIGVGEATIPSLQKVFFDFLGIPEQEWMPQVNGAFKAGIKFVNWRKSPDHSRNDYFYHLFGNVPSCDGVPLTHYWLRKREQGFQQSMAYACYPQPGALDGNLAPCLHDGTRQMSHAWHFDAHLVADFLKRWAVDRGVNRVVDEVVEVNLNEHGFISSLFTKEGRKLEADLFIDCSGMRGLLINQALKEPFVDMSDYLLCDSAVATAVPNDDAQVGVEPYTSSIAMNSGWTWKIPMLGRFGSGYVFSSKFTSRDQATTDFLKLWGLSDNQPLNQIKFRVGRNKRSWVNNCVSIGLASCFLEPLESTGIYFIYAALYQLVKHFPDTSFDPRLADAFNAEITYMFDDCRDFVQAHYFTTSREDTPFWLANRHDLRLSDSIKEKVERYKAGLPLTTTSFDDSTYYETFDFEFKNFWLNGNYYCIFAGLGMLPDRSLPLLQLRPESIEKAEAMFARIQREAERLRASLPTNYDYLRSLREGGGGMSRPASPESL

SEQ ID NO: 85900 - protein, 505 aa, Sphingomonas sp.
  REGION 1..505: note = tr|A0A0Q6AWX9|A0A0Q6AWX9_9SPHN Tryptophan halogenase; OS = Sphingomonas sp. Leaf407 OX=1736369 GN=ASG37_03630 PE=4; SV = 1
MSGRIRRVVVVGGGTAGWLAACRIAAAADPSAQQPLSVTLIESPDIATIGVGEGTWPTMRGTLARIGIDEATFLRATDASFKQGSRFDGWRTGAADDRYYHPFTAPADLPAADLLRDWRRGTFADHVCAQPDVCADDLAPRQPAMPPYAGALNYAYHLDATKFAALLRETAVGRLNVTHIRDHVTGVEPAANGDIAAVVARDTGRITGDLFLDCTGQAALLIGGHCRIGTIDRTATLFNDRAIAVQVPVAPDSPVASQTNATAHDAGWIWDIGLPARRGIGCVYASDFLDDDAAAATLTAYLARTAPHVDPAGLSFRQLRFRSAHRERFWVGNCLAIGLSAGFLEPLEASAIVLIELSLDALLDGFPADRAAMDLHARRFDALFRYRWDRIVDFLKLHYVPSRRDTPYWRAHRDPASIPPSLCDLLALWRTQPPSPADFAQAGEIFPAASYQYVLYGMGVTPPPIGPLRPRPDTASVLHQMRQRARTLTASLPTNRAYLNGIAHV

SEQ ID NO: 85901 - protein, 530 aa, Caulobacter sp.
  REGION 1..530: note = tr|J3AJK1|J3AJK1_9CAUL Tryptophan halogenase; OS = Caulobacter sp. AP07 OX=1144304 GN=PMI01_02461 PE=4 SV=1
MTQPINDILIVGGGTAGWMTAAYLARRLGSMRPDGVRITLIESSEIGIIGVGEGTFPTIQNTMRTIGVDEARFMREAGAAFKQGIRFVDWKTAPRDGVHGHYYHPFAQPRLLNGGLDLAPYWLMGEAGNVPFSDAVTLQDKVCDAMRGPKRVDDPQYGGPMAYAYHFDAGKLAGLLRDVGKATGVKHLLGNVLSVNRTDDGSIASVTTREHGDLTADLYVDCTGFAGALIGDAMGSSWIDKSDVLFVDRALALQVPYDRPDAPVATTTISTAHEAGWTWDIGLPERRGTGYVYSSRHTTDDRAEQILRGYVGKAGEGLTPRLLKLKVGHRDRHWVKNCVAVGLSGGFLEPLESTGIVLIEAAAYMLARNLPRRGGMEAAARQFNTAMTDRYLRAIDFIKLHYCLSQRTDNSFWTDNADPVSIPETLRDHLAMWRHRPPNVFDFPNLHESFKYFNYQFILYGMGFETQVDPAAHVHGELARADFARVREAGVRAAAGLPDHRALLTQVYAHGFSTKVPDAAMAEAAESLRR

SEQ ID NO: 85902 - protein, 533 aa, Serratia plymuthica
  REGION 1..533: note = tr|A0A318NW21|A0A318NW21_SERPL Tryptophan 7-halogenase OS=Serratia plymuthica OX=82996; GN = CT690_14695 PE=4 SV=1
MSKPIKNIVIVGGGTAGWMSASYLVRALQQQANITLIESAAIPRIGVGEATIPSLQKVFFDFLGIPEQEWMPQVNGAFKAGIKFVNWRKSPDHSRNDYFYHLFGNVPSCDGVPLTHYWLRKREQGFQQSMAYACYPQPGALDGNLAPCLHDGTRQMSHAWHFDAHLVADFLQRWAVDRGVNRVVDEVMDVNLNDHGFISSLITKEGRKLEADLFIDCSGMRGLLINQALKEPFIDMSDYLLCDSAVASAVPNDDAQVGVEPYTSAIAMNSGWTWKIPMLGRFGSGYVFSSKFTSRDQATTDFLNLWGLSDNQPLNQIKFRVGRNKRAWVNNCVSIGLSSCFLEPLESTGIYFIYAALYQLVKHFPDTAFDPRLADAFNAEITYMFDDCRDFVQAHYFTSSREDTPFWLANRHDLRLSDSIKEKVERYKAGLPLTTTSFDDSTYYETFDFEFKNFWLNGNYYCIFAGLGMLPDRSLPLLQLRPESIEKAEAMFARIQREAERLRASLPTNYDYLRSLREGDVGLSRSGPSPEFR

SEQ ID NO: 85903 - protein, 494 aa, Alteromonas sp.
  REGION 1..494: note = tr|A0A4P6AM05|A0A4P6AM05_9ALTE Tryptophan 7-halogenase OS=Alteromonas sp. KUL49 OX=2480798; GN = EYS00_01920 PE=4 SV=1
MNTSSQNRKQRLVIAGGGTAGWMAAAAFSRILGKEVDVTLIESSDIGTVGVGEATIPTLVFFHKLLKISEQEFMAATNATFKLGINFENWKSLDHAYLHAFGVTGKDCWAAGFQHFWLRGLKEGIASDFGDYCLERQAAEANKFAHLPNNGLNYAFHIDASKYASFLREHAEKDGLKRIDATIGSVNLNEENGFIESLTLDNGETVHGDFFIDCTGFRGLLIEKALHTGYEDWSHWLPCDSAVAVQTKSVSEPIPYTRCIAHEAGWQWRIPLQHRVGNGMVYCSNYLSDDEVITKLLGNVEGEPLNDPRVIHFRTGRRRKQWNRNCLALGLASGFLEPLESTSIHLIQQGIVRFLRMFPTAGIVEEDVNEFNRQADFDIEHIRDFIILHYHVTQRTDTPFWRHCRQMDVPDSLKHRIDLFQKTGRVFREGSELFDDSWQQVMIGQGLMPTSYHPIVDTMSLQELKGLLNGVTQQIDRTVGKLPPHNDYITRYCS

SEQ ID NO: 85904 - protein, 510 aa, unidentified
  source 1..510: note = Phenylobacterium deserti
  REGION 1..510: note = tr|A0A328AC32|A0A328AC32_9CAUL Tryptophan halogenase; OS = Phenylobacterium deserti OX=1914756 GN=DJ018_13505 PE=4; SV = 1
MNPQTSLRRVVIVGGGTAGWMAAAALSRLRRNGQTEITLIESDEIGTVGVGEATIPPIQTFNALIGLDEADFLRRTQGTFKVGIEFRDFTRLGHSYIHPFGEFGADMEAIKFHQFWLKLQKLGRTPGIDAYNLCAMAAALGRFEKPRSDRPPGPLSSLTYAYHFDAGLYARYLRDLSEPRGVVRREGRVVDVSLRGEDGHIESVTLEGGLKVEGDLFIDCSGFRGLLMEQALGTGYEDWTHWLPCDRAVAVPCEGAAAPTPYTRATARIAGWQWRIPLQHRIGNGYVYSSAHISDDEAAATLLANLDGKPLADPRPLRFTTGVRKKAWNRNCVALGLASGFMEPLESTSIHLIQNGVARLLSLFPDGGGVDPVEIEEYNRVSYGQWCAIRDFIILHYHATQRDDSEFWRHCGTMPIPDSLQRKLDLWRGKGRVFRYDDELFGESSWIAVLLGQVGLPQGYDPLADTLPVEEVDYNLQRMRQYVRRVAEAMPTHEAFIRSYCPAQPIAARP

SEQ ID NO: 85905 - protein, 500 aa, Caulobacter sp.
  REGION 1..500: note = tr|J3A7Q9|J3A7Q9_9CAUL Tryptophan halogenase; OS = Caulobacter sp. AP07 OX=1144304 GN=PMI01_03647 PE=4 SV=1
MIDRAIKSIAIVGGGTAGWMAASLLAQTLRGTGCAITLIESPDIGIVGVGEATIPPILDFLKLIEADLDAFLQATQATFKLGIKFQDWSRVGESYWHPFGSFGVSIDRRPFHHVWHKARAEGLDMAVADFSLAAALGEAGRFAPPDPRASGPLAGLRHALHFDAALVAKFLRDHAERRGVRRLEREVARAVLRDDGFIDALTLTDGGQVKADFYIDCSGFRGLLIEQALETGYEDWTKWLPCDRAIAAPTAHAGPPAPYTLAAAQDAGWRWKIPLRHRVGNGYVYASQAIDDETALSELLAAIGEPLAEPRKLRFTTGRRKAFWNRNCVALGLASGFLEPLESTSIHLVCSGLYKLLDHFPDRDFAPSNIAAYNQALIAEYETFRDFIVLHYCATARDDTPFWRHRAQAPVPASLAERMELYRACGRINTRPGELFTDLSWFYVLEGMGLRPRAHDPLVDASDFRQVRAILPRLAQQVAAVVAQSPTHQAALDAGRSVAA

SEQ ID NO: 85906 - protein, 514 aa, Streptomyces sp.
  REGION 1..514: note = tr|A0A0P4R3X0|A0A0P4R3X0_9ACTN Tryptophan halogenase; OS = Streptomyces sp. NBRC 110027 OX=1546107; GN = TPA0598_02_01300 PE=4 SV=1
MINSVVIVGGGTAGWMSASYLKAAYGDRINVTLVESDRVATIGVGEATFSTVRHFFDYLGLDEREWMPECSGSYKLGIRFENWREPGQHFYHPFERLRTSDGYTLADWWLQEGDRSEPFDRSCFITPALCEAKRSPRLLDGSLFAGGLDGSLGRSTLEEQRAQFPYAYHFDAALLAKFLTKYGTDRGVRHVVDDVTQVGRDERGWISHVATREHGDLTGDLFIDCTGFKGMLINETLEEPFESFQDVLPNNRAVALRVPQPDQATTGMNPYTTATAMDAGWIWNIPLFGRNGNGYVYSDEFCTPEEAERTLRAHVAPGQDDLEANHIRMRIGRNRRSWVNNCVAIGLSSAFVEPLESTGIFFIQHGIEQLVKNFPDERWDPALADDYNNRVAEVLDGVKEFLVLHYKAAQREDTPYWKEAKTRALPDGLAERLAIGTSHLLDERTIYQPYHGFEQYSWITMMLGLGHEPERPRPSLAHIDPTNARAELARLRADADELVAALPSCYEYIASLNS

SEQ ID NO: 85907 - protein, 503 aa, Sphingomonas sp.
  REGION 1..503: note = tr|A0A1I3N6S1|A0A1I3N6S1_9SPHN Tryptophan halogenase; OS = Sphingomonas sp. NFR04 OX=1566283 GN=SAMN03159338_0658; PE = 4 SV=1
MAVAAPYRIVVAGGGTAGWMAAAALVRFLGPGFTITLVESDAIGTVGVGEATIPQIRMFNASLGIDEDAFVAATQASYKLAIEFVGWTKGGRYMHAFGDVGRDNGLLAFRHTWLRGMAEGVAEPLAAYALNNVAALANRMQRGPARTARVLPEMPYAFHFDAGLYARFLRTYSEARGVVRHEGRIEAVIRNGEDGDVAALHLDGDRRIEGDLFLDCTGFHARLIGEAMGVGYQDWSHWLPCDRALAVPSARARDFTPYTRATAHDAGWQWRIPLQHRTGNGIVYSSRHLSDDEAAARLLAALDEPALADPRPIRFRTGRRDAAWAGNVIALGLASGFLEPLESTSIHMIQSAVERVLKLLPGRRPIAPLRDSYNLQAAHEAERIRDFLILHYWANDRDAPFWRERREVPLPDGLAEKIALWRGTGEIVREEGDLFSDVAWLQVLVGQGVTARGYHPLADQPPRAQIAEYLDLLAKLNAREVAQMLPHSDFVRAHGAADAEIAA

SEQ ID NO: 85908 - protein, 491 aa, Caulobacter sp.
  REGION 1..491: note = tr|J2PNY1|J2PNY1_9CAUL Tryptophan halogenase; OS = Caulobacter sp. AP07 OX=1144304 GN=PMI01_03342 PE=4 SV=1
MGDNRISQVVIVGGGTAGWMAAAALAKALGPLVSIRLVESDEIGTVGVGEATIPQIKLFNGLLGLDEDDFIRQTQGTFKLGIEFVGWTRPGHAYLHAFGGVGRDLGMVNFHQYWLKHRQGGGTSDFWAYSLNGAAAKANRFDRQPGLAYAFQFDAALYARYLRAHAERLGVVRTEGKILGATLREPDGFVESVTLERGEAVGGDLFIDCSGFRGVLIEQALKTGYDDWSHLLPCDRAVAVPTASTGPLRPYTQAIARPAGWQWRIPLQHRTGNGHVFCSRYVSEDEATATLMANLEGEPLAEPRLLKFVTGRRKAFWNRNVVALGLASGFMEPLESTSIHLIQSGLSRLLNLFPDQGFAQADIDEYNRQAGLEFERIRDFLVLHYWANQRSEPFWTACRDMAIPSELARKVEIFRAHGRLFREPEDLFFETSWLQVLLGQGVEPRGCHPMTDLVSGAQLEGFLADLRKITADAAGALPDHADFIRQQCAVR

SEQ ID NO: 85909 - protein, 515 aa, unidentified
  source 1..515: note = Phenylobacterium deserti
  REGION 1..515: note = tr|A0A328AC26|A0A328AC26_9CAUL Tryptophan halogenase; OS = Phenylobacterium deserti OX=1914756 GN=DJ018_13530 PE=4; SV = 1
MVRPIRNIVIVGGGTAGWLTAGVIAAKHRSRIVRNTFSVTLVESPNTPIIGVGEGTWPTLRTTLAKMGVSETDFIRECDASFKQGAKFARWTTGAEDDAYYHPLMLPQGFSQVNLAPHWLAREDGQSFCDAVCPQGQICDEGLAPKTIATPEFEGAANYAYHLDAGKFAPFLQRHCCDTLGVRHVLADVQRVEMAEDGDIRAIVTEQAGAIEGDLFVDCTGFRSLLLGEALGVPFRDCSHILFCDTALAVQVPYESEASPIASHTISTAQSSGWIWDIGLPTRRGVGHVFSSAHISDEAAEQELRAYLGPAAKNLPVRKLSIRAGHRETFWKRNCVAVGLAAGFLEPLEASAIVLIELSAKLIAERMPACREVMDVVASRFNATTHYRWGRIIDFLKLHYVLTQRRDSAFWRDNLLEESVPERLQELLQLWRHQSPWAFDEFDRIDEVFPPASYQYVLYGMGFRTEVEPDALEGEATLARRAWRENQQQTERLRAALPRHRDLIRKIAERGLQPV

SEQ ID NO: 85910 - protein, 494 aa, Sphingomonas sp.
  REGION 1..494: note = tr|A0A4V1JWY7|A0A4V1JWY7_9SPHN Tryptophan 7-halogenase OS=Sphingomonas sp. UV9 OX=1851410; GN = EQZ23_00520 PE=4 SV=1
MDKRSVQRVVIAGGGTAGWIAAAALVKQLGPLLEITLVESEDIGTVGVGESTIPTSRTFHNFLGIDEQAFMRATQASFKLGISFENWGREGERYIHSFGTIGRASTWMGDFHHLWLHARERGLADPLGEYCFELKAADAERFATGKDARINYAYHLDAGRYARFLRELAEPAGVRRVEGKIERVEQNGETGFVEALVLDSGMRIEGDLFLDCTGFRGLLIEQALQTGYDDWTQWLPTDSAIAVQTASVGPAVPYTRAIAHEAGWRWRIPLQHRVGNGIVYARDCLSDDEARAKLLADVEGEVLTEPRVIRYQTGARRRVWNKNVVALGLSSGFVEPLESTSIHLMKIAITRLIQLFPFDGIDDALIARFNTMSRREAEGVRDFIILHYHLNQRDEPLWRRCRKMQVPDTLAERIALFRQDAQAYQASEDLFRVDSWVQVMLGQNLEPHGFHRMGRMISDANLTNALGDIRTDVASRVARLPAHQDFLNRYCATA

SEQ ID NO: 85911 - protein, 503 aa, Novosphingobium sp.
  REGION 1..503: note = tr|A0A117V107|A0A117V107_9SPHN Tryptophan halogenase; OS = Novosphingobium sp. FSW06-99 OX=1739113 GN=AQZ49_17980; PE = 4 SV=1
MSQPYRIVVVGGGTAGWITASVLARYLAPARFAVTLVESEEIGTVGVGEATIPQIQLLNAALGIDEYAMMRATQATYKLGIEFVGWGTPDSRYIHAFGPTGRQLGQVPFQHFWLRSRALGNNTPLDAYCLNAAAAYAGRFARSDQVKSPTLGGLVHAFHLDANLYARYLRGYAEGRGVTRIEGRIMGAERDGETGDVAGLVMADGSRIGGDLFIDCSGFRSLLLGETLSTGFESWAHWLPCDRALAVPCASAPQLEPYTRSTARAAGWQWRIPLQHRIGNGLVYSSAHLSDEAAADLLLAHLDGAALADPRPIRFVTGRRRAFWAHNVVGTGLAAGFMEPLESTSIHLVQSAAERLIRFLPSGAIDPADVAAFNAQTTFEWERVRDFLILHYHVNQRPEPFWRDCAAMAVPDTLREKIDLFSANGRITRFNEELFSEPGWLQVMAGQGLNPRGWHPLADDPSEAELGEVLGLMRRAVDKLVADMPDHAAWISRHCAAAPSETY

SEQ ID NO: 85912 - protein, 514 aa, Sphingomonas sp.
  REGION 1..514: note = tr|A0A5B8LMX5|A0A5B8LMX5_9SPHN Tryptophan 7-halogenase OS=Sphingomonas sp. HKS19 OX=1813879; GN = FPZ24_15810 PE=4 SV=1
MNRPVNRIVIVGGGTAGWLAACLIAARSDTAAAMPISVTLIESPDVPTIGVGEGTWPTMRRTLERIGIAEAEFLLACDASFKQGSRFDGWLTGAAGDHYFHPFTPPVSGDPRGVVAAWQADAERPFAEAVCAQPAMCMRDLAPRQRAMPDYAGALNYAYHLDAGKLAALLAKHGVERLGVQHVRDHVTAVEQAVDGDIAAVRTRDNGAVSGDLFIDCTGHAALLIGGTYGVDFIDRSGELFNDRALAVQMLVAPGSAIGSQTNATAHEAGWIWDIGLPTRRGVGCVYSSRHMSDDDAAATLQAYLRRAGFDDIPAFRRLSFTSGHRARFWERNCLAVGLSAGFLEPLEASAIVMIELSLNELLDNFPATRPLMDVHARRFNDLFRYRWDRVVEFLKLHYVLSRRDEPYWREHRDAASIPPRLADLLRVWAHQPPSIADFPAVEEIFPAASHQYVLYGMGFPPPAASPIELDAAVPSLSQVDQRARSLAASLPTNRAYLDDLRATNLPADLDLTA

SEQ ID NO: 85913 - protein, 521 aa, Caulobacter sp.
  REGION 1..521: note = tr|J2GCE3|J2GCE3_9CAUL Tryptophan halogenase; OS = Caulobacter sp. AP07 OX=1144304 GN=PMI01_03771 PE=4 SV=1
MQMNPPKPAALKVVIVGGGTAGWMCAAGLARLLDPAAYAITLIESDDIATVGVGEATLPHIKTFNDLLGIDEARFLGATQGAFKLGIEFRDWGQRGDRYIHPFGVFGEPWGGVDFQHHWVRAQLAGQAPASLQDYSYAVAACRANAFEFPNEDRKSIRSTYAYAYHFDASLYARFLRGWATERGVTRIEGMVQEVARDAESGHLEALTLKSGARIAGDLFVDCTGFRSLLLGGEMGVGWDDWAKWLPCDRALAVPSERVGALTPYTRSTAQTGGWIWRIPLQHRTGNGYVFASDFIDEDRARDTLLAQLDGKALAEPKLLRFKAGRRVKTWSGNVVGLGLASGFLEPLESTSIHLIQAAVIDLVNLMPTPGEGDRMDGRLAKEFNRLSEMQYERIRDFLILHYRANQRHGEPLWDHVRDMTIPDSLARRIALFEARAWAPEYKYGLFSRDSWLSVLVGQGITPRGYDRLADGLDLGELETRMRDLKARIDANVQAMASHGDFIARYAPGAVDEAALASAAV

SEQ ID NO: 85914 - protein, 495 aa, Shewanella sp.
  REGION 1..495: note = tr|A0A2N1EPN3|A0A2N1EPN3_9GAMM Tryptophan halogenase; OS = Shewanella sp. ALD9 OX=2058330 GN=CXF88_09745 PE=4 SV=1
MNKSIKKVVIAGGGTAGWMAAAAFSKLLGKNLEIVLVESDEIGTVGVGEATIPTLHIFHRLLGLKEQDVMAATNATFKLGIQFENWHDVNKDYLHSFGFLGKDCWACGFQHFWLKGKQQGLVSDIGDYCTEHLAARQGRFAVLPNQDYNHAYHMDASLYAKFLRKFAEHHGMTRIEGKIADVLQHDDTGNIRALKLENGELIEGDLFIDCTGFKALLIEQTLNTGFEDWSHWLPCDSAIAVQTEAVQKPIPYTRSIARESGWQWRIPLQTRTGNGLVFCSKYISDADATELLLNNIEGAPINQPRVIKFKTGTRRQHWNKNCIAIGLAAGFLEPLESTSIHMIQRSIVRLLQLFPSQGIIDTDIAEFNQQTKVEMDNIRDFIILHYKVTDREDSRFWRYCKNMPIPASLQHRIDMFSQSGKVYKYGNELFGESSWIQVMMGQGLMPKEYHPIVDMMDEAELTSFLNSIKATVKRKVDTLPAHHDFVQHYCKSASM

SEQ ID NO: 85915 - protein, 614 aa, unidentified; identical to SEQ ID NO: 83391
  source 1..614: note = Westiellopsis prolifica
  REGION 1..614: note = tr|A0A4Q9J2U2|A0A4Q9J2U2_9CYAN Tryptophan halogenase; OS = Westiellopsis prolifica IICB1 OX=1970206 GN=B4U84_27390; PE = 4 SV=1

SEQ ID NO: 85916 - protein, 493 aa, Sphingomonas sp.
  REGION 1..493: note = tr|A0A1I4A9Q0|A0A1I4A9Q0_9SPHN Tryptophan halogenase; OS = Sphingomonas sp. NFR04 OX=1566283 GN=SAMN03159338_4462; PE = 4 SV=1
MTDNRIRRIVILGGGTAGWMSAAALSRALAGQRVAITLVESDAIGTIGVGEATIPTIHWFNQIIGLDERQFMAETKATVKLGIEFVGWNGEGSRYFHPFGTFGPPGDGTMFLHRLIRGRMDGDTAPTEVYSLTAQAARSGRFARPVPDRRSLLSTLGYAYHFDAGLYARYLRGLAERAGVTRVEGMVGSVQQDGEGGFVRSLTLDDGRVVEGDLFLDCSGLRGLLIGETLGVGYDIWSHWLPCDRAWAAPSAAETHLTPFTRATAAEAGWRWRIPLQHRVGNGYVFASRFQDEAAARASLLAAMEGPPLADPRLIRFTPGMRREAWRANVVAIGLSSGFLEPLESTSIHLIQSGLAKLLSLFPAADCSPLLARQFNRVFGQEMLDIRDFLILHYHATAGREEPMWRERQSMAIPDTLTERLAHFRSSGRIVLSSDELFRDASWFAVLDGQGERPGDHNPLIEGIEAQENLRQLTALRANIARAAEALPALSPA

SEQ ID NO: 85917 - protein, 508 aa, Novosphingobium subterraneum
  REGION 1..508: note = tr|A0A0B8ZPN2|A0A0B8ZPN2_9SPHN Tryptophan halogenase; OS = Novosphingobium subterraneum OX=48936 GN=NJ75_01077; PE = 4 SV=1
MSATDQRRIVIAGGGTAGWMTAAALARLASPHWQVTLIESEEIGTVGVGEATIPMVRLFNQTLGIDEAQFLRETHGTWKLGIAFEGWGGFDDRYIHGFGLTGRSLGVLPFHHYWLRGRAHGLAGPLGEYVLNAVASDANKFAHIDRPQGSALPPMPYAYHFDASLYAAFLRRYAEGRGVRRIEGRIVGFDRDVLNGNLAALRLERGDVIDGDLFVDCSGFRSLLLGQEMGVGYLDWSQWLKCDRAVAVPCDRAEPLVPYTRSIAQPAGWCWRIPLQHRTGNGHVFCSDLMSEDEATARLIGRLDGEQLADPRTIRFKAGRREKFWERNVVAIGLSSGFIEPLESTSIHLIQTAISRLVDFMPNGPVHDADRDAYNRLAAFEIERIRDFVILHYVANGRHGEPFWDSLRQMEAAGQLPDALGERLAMFRASGRIVREHDELFDVPGWVQVMIGQGVVPARWHPLADQVAPESLKAFLDTVRGAYEKDVARMPSHAEYVSHVCGQVPAHA

SEQ ID NO: 85918 - protein, 509 aa, Sphingomonas sp.
  REGION 1..509: note = tr|A0A1I4A6J5|A0A1I4A6J5_9SPHN Tryptophan halogenase; OS = Sphingomonas sp. NFR04 OX=1566283 GN=SAMN03159338_4436; PE = 4 SV=1
MRCPGERSMHDKPVTSVVIAGGGTAGWMAAATLSRSFAPEALKITLVESAEIGTVGVGEATIPPILPLNAQLGIDEDELVRRTQGTYKLGIEFVDWGARGSRYFHPFGSYGADLGGVAFHHHWLRTREGALDDYSLNARAALSGRFDRPAEDPRSVLSKLSYALHFDATLYAALLRERSLAQGVEAIEGKIAEVVLDPASGHVDHLSLADGRVLRGDLYIDCTGFRGLLIEQALQTGYEDWSHWLPMNRALAVPTAPNGPPVPFTRSTADAAGWRWRIPLQHRVGNGHVYSSAFTDEAAATEALVAGLDGAMLADPRTLSFTTGRRRKAWHKNVVALGLAGGFVEPLESTSIHLIQRGVVTLMSLFPAAGFVQAEIDCYNRLMQTEMEEVRDFVILHYKQTLRDDTPFWRQVQAMPVPDSLAERMAIFAHSGRVLLGPGELFRETSWVAVLLGQGIMPRGHDPLADAIPEKDLRLTLQRMRAVIGRGVEALPTHADFLGRLSVGRHPTT

SEQ ID NO: 85919 - protein, 500 aa, Sphingomonas sp.
  REGION 1..500: note = tr|A0A5B8LLD1|A0A5B8LLD1_9SPHN Tryptophan 7-halogenase OS=Sphingomonas sp. HKS19 OX=1813879; GN = FPZ24_15795 PE=4 SV=1
MHRPRRIVIAGGGTAGWMAAAAIARTMGRTVEVTLVESDMIGTIGVGESTIPPLQVFNRLLGINEADFMRATSATFKLGILFDNWKEQGHRYFHSFGFTGKDHWSAGFQHFWLYGRAKGHSQSYDDYCLEVIAALGGKFAHLPDDGMNYAYQLDSTAYAAFLRAMAESDGTTRVEGKIARVELDSESGDIAALVLDAGTRIEGDLFLDCTGFRAVLIEGALHAGFDDWTHWLPCDSAIALQTESVGPAVPYTRAIAHDAGWQWRIPLQHRTGNGLVYCSRYLSQDEALARLLGNVEGEVLTKPNILKFGAGARRKQWHRNCIAIGLSSGFMEPLESTSIHLIQRAILRLIRMMPNHSISDRDIAEFNDQQFEDMRQILDFLVLHYKATDRRDSPFWRQCAAMDIPDSLAQKIELFRETGRVFRKNEELFAENSWVQVMMGQGIVPRTYHPVAEKLTDDELDRFLGMLRETVRKTVATLPDHPAYVARYCGVQQPQPAATA

SEQ ID NO: 85920 - protein, 513 aa, Caulobacter sp.
  REGION 1..513: note = tr|J2Q9W5|J2Q9W5_9CAUL Tryptophan halogenase; OS = Caulobacter sp. AP07 OX=1144304 GN=PMI01_00874 PE=4 SV=1
MAGNRIVIVGGGTAGWLTAAYLAKQLGADRPGGARITLIESPEIGIIGVGEGTFPTIRSTLATLGVSEARFMRESSATFKQGVRFVDWERRSADGKSSEYFHPFNLPLRPEGRDLSPYWLLDHQAGAPLAFADAVTTQGKIIEAGLAPKRLEDADFQGPMNYAYHFDAARFADFLRGVAKELGVIHLAAKVETVQLDAETGDIASVTAGELGVIEGNLFIDCSGFRALLIGEALGAPFRRCDDVLFNDRALAVQVPYPAPDAPIAPYTLATAHEAGWTWDIGLDGRRGVGYVFSSRHTDEARAEQVLRAYVGPEADHLPVRLLKFQTGYRERQWIGNCVAVGLSAGFFEPLESTGIMLIEVAATMIAEVFPLRDRAAMDSAARTFNGLMAGRFERIVSFLKLHYCLSKRDEPYWRDNADPASWPQGLRDLMAQWKHRPVSRFDFLVDLETFLPASYQYILYGMNAATDFAPVEGRYADGAMARQAFAKVAGAATEALKHLPPHRTLVEAYYRR

SEQ ID NO: 85921 - protein, 476 aa, Sphingomonas sp.
  REGION 1..476: note = tr|A0A1I3TK21|A0A1I3TK21_9SPHN Tryptophan halogenase; OS = Sphingomonas sp. NFR04 OX=1566283 GN=SAMN03159338_2262; PE = 4 SV=1
MSLRTILVVGGGMVGWSAAAALKRRLPQLDITIVPVAPPADALADRIASTLPSILGFHGDLGIGLGDAVLRTGSHYRLGTLFRDWVEGAPDYVHAYGRAGMPIGGAPFPSLWARAALAGAAPPFDALSAAAMMARTGRFVTPQADGLLSEHSFGLALDIPRYTAMLMAFARHVGVQGHLGEVAHVEQDARGDIAAVVLDNGTRLTADLYCDCTGPAARLHGTMAVPHESWQAWLPCDRIVLDDIAGDDEAAPMERVTATNHGWRWVSARQRGTVYCAASGARHEGAVAFRSGATLEPWRGNVVAIGDAAVGVEPLEWSNLHLAHSAIDRLIAMLPAGRPHPLEAAEYNRQALAEARRVRDFLVLHYATARRDTPFWQARAQASLPESLAHTLRLFRERGRLPYYEEETFDRDSWLAVLFGQQVLPRRIDPLTDAVPPDEAAAALASLRDSIAQAIERVPTAARFRALQMERLHERA

SEQ ID NO: 85922 - protein, 188 aa, Oceanospirillum sp.
  REGION 1..188: note = tr|A0A2D5GI67|A0A2D5GI67_9GAMM Tryptophan halogenase (Fragment) OS=Oceanospirillum sp. OX=2021254; GN = CMI12_16230 PE=4 SV=1
IKFTPGKRRLGWNKNCVALGLASGFIEPLESTSIHLIMTGIVRLMRLFPFDGVTQSAIDEYNTKYDSEMAAILDFIVMHYKVTNREDSPFWQHCKNMPIPPSLTHKLNLFKDTGRVFLDDGDIFRVDSWTQVMLGQGLTPNQYHKVADEMSEAELERFMMGLKQQVTQNINKLPSHAAFLDQYLKGKQ

SEQ ID NO: 85923 - protein, 504 aa, Novosphingobium sp.
  REGION 1..504: note = tr|A0A117V0X4|A0A117V0X4_9SPHN Tryptophan halogenase; OS = Novosphingobium sp. FSW06-99 OX=1739113 GN=AQZ49_17770; PE = 4 SV=1
MMPSPDTDRAIRSIVIVGGGSAGWMTAAALCRTLQRDCTITLVESEEIGTVGVGEATIPPIRLFNEMLGIAEADFVKATHGSFKLGIQFVGWQQPGQTYFHPFGTYGKPFDTVGVHQFWLAQHRAGAIDPLDNYCMAWVLAQAGKFAPPSRDPRNVLSTYDYAYHFDAVRYAAFLRSYAEARGVIRIEGKAVSVALKGETGFVESVTLADGRVIAGELFIDCSGFRGLLIEGALHTGYEDWSHWLPCDRALAVPCAPTADFIPYTRSTAQSAGWQWRIPIQGRTGNGYVYSSGFIDDDRAASDLLGRLDGTPLADPRPLRFVTGRRRKSWNRNVVAVGLSSGFMEPLESTSLHLIQANISKLLAFFPDRDFDPLVIDEFNRVASGETERIRDFLILHYHLNRRDEPLWQYCANMAIPDTVQARIDHFRRFGRLIVRDMDLFGAPSWTAVHIGQGNLPERLDPVAHYREADGAAWLAKFKAAMAAEAQRLPSHRDYVAQHCRGDV

SEQ ID NO: 85924 - protein, 513 aa, Novosphingobium sp.
  REGION 1..513: note = tr|A0A102D4A0|A0A102D4A0_9SPHN Tryptophan halogenase; OS = Novosphingobium sp. FSW06-99 OX=1739113 GN=AQZ49_17605; PE = 4 SV=1
MTQAVKSVCIVGGGSAGWLTAGLIAARHRGAPGGEHCLSITLVESVERGAIGVGEGTWPTMRQTLRKIGISETDFIRACHASFKQGAKFVGWRTGDPDDFYYHPLVLPEGFPDLDLAPHWHEAAASSFSDTVCFQEFLCENGLAPKLITSPEYGGIANYAYHLDAGQLGKLLRDHCVGKLGVRHLDDEIVRVEQADNGDVTAVVGLRHGPIKADLFIDCSGFSSLLLGQTLGVPFVDCSDVLFIDRALAVQVPYDGPDSPIVSHTVSTAQKHGWIWDIGLQSRRGVGYVWSSRHAGADRVADELAAYVGPAFADLNPREIAIRSGHRACFWKNNVVAVGLAAGFLEPLEASALVLVELSADYIATAMPATRHAMDIVARRFNAMTRYRWDRIIEFLKLHYMLSEREDTAFWRDNRDPDTIPQNLCDQLELWRHHPPGEHDFASANEMFPAASYQYVLYGMGFRTEPLRRPTADERHAAQDAFARTTATKRKLAAMPTNRALLDKLAQYRFQPI

SEQ ID NO: 85925 - protein, 500 aa, Sphingomonas sp.
  REGION 1..500: note = tr|A0A1I3WIJ1|A0A1I3WIJ1_9SPHN Tryptophan halogenase; OS = Sphingomonas sp. NFR04 OX=1566283 GN=SAMN03159338_3211; PE = 4 SV=1
MQADATSVIVVGGGTAGWMTAALLAKILGARAHVTLVESEAIGIVGVGEATIPPICAVNAMLGIDEGAFLRATGATIKLGIRFDGWGRPSDSYDHSFGGAGRDLPFCGFHHFCTRAAMEGLPANYWDHDFNALCIQAGRFAPDAETAPNPVWPLPHAYHFDAGLYGHFLRGIAEGLGVRRIEGRVVDISRAPETGDVTALHLEDGRSLEGALFIDCSGSRGLLIEQFLQTGYEDWSHWLPCDRALAVPSAREAVSPLYTRATARAAGWQWRIPLQHRNGNGLVYSSAYIDDDAAADTLMAGLTTAAQDAPRLLRFRTGRARRQWHHNVVAIGLSSGFLEPLESTSIYLIQSAIVRLLHLFPHDGRPDPQRAEYNRQSAIEYERIRDFVILHYHAQHRPEPFWTERRAAALPDRLDEKIALFASTGTIVQDPFDIFTEASWVKVLLGQGITPAAYHPLAGGFSRDALARQFEQMAMVKRQGVARLPLHDAWLSATMARTAA

SEQ ID NO: 85926 - protein, 500 aa, Streptomyces sp.
  REGION 1..500: note = tr|A0A428X205|A0A428X205_9ACTN Tryptophan halogenase; OS = Streptomyces sp. WAC 00631 OX=2203201 GN=DMH02_10880; PE = 4 SV=1
MALPDSEEFDVVVVGGGPAGSTLAALTAMQGHRVLVLEKEFFPRHQIGESLLPATVHGVCRLTGVADELAAAGFPRKRGGTFKWGANPEPWTFSFSVSPRMTGPTSYAYQVERAKFDEILLNNARRVGAEVREGCAAVDVVEDEERVRGIRYTDADGREHRASATFVVDASGNGSRLYRRVGGTREYSEFFRSLALYGYFEGGKRLPEPNSGNILSVAFESGWFWYIPLSPDLTSVGAVVRREMADKIRGDSDKALAALIAECPLISEYLADARRVTEGPYGKLRVRKDYSYHHTTFSRPGMILVGDAACFVDPVFSSGVHLATYSALLAARSINSVLAGLVGEDRALREFESRYRREYGVFYEFLLSFYEMHQDENSYFWQAKKVTRANRPELESFVELIGGVSSGERVLTDAEVLAKRFSSGSAEFAAAVDELAGSEDGSMVPLFKSSVVREVMQEGGQVQMRALLGEEAEPEAPLSADGLVPSPDGMFWLPAQGTGE

SEQ ID NO: 85927 - protein, 508 aa, Sphingomonas sp.
  REGION 1..508: note = tr|A0A1I4AL06|A0A1I4AL06_9SPHN Tryptophan halogenase; OS = Sphingomonas sp. NFR04 OX=1566283 GN=SAMN03159338_0052; PE = 4 SV=1
MNPIRRILILGGGTAGWLTAAYLARYLDIARQRRFAITLLESPALGIVGVGEGGFPTIRQTLEFLGIDERSFVRRASATFKQGIRFDDWLHAPQPDGARHRFLHPFEAPFHTEGAGLVPYWLLQPEGCRAPFAEAMTIQNHVAAQGRAPKRAEEAGFGGPLTYAYHFDAVRLAQLLRDRAIELGVTHLEGEVFSAHTDAEGAIDRIETREHGSLTADLYIDCSGFEAALIGKALGAPFTSVRHHLFTDRALACKLPYADPEAPIATTTVAAAHEAGWTWDIGLQHARGIGCVYSSAHLSDERAVEILDAHCGGAPHEARLITFEPGYRRTPWVKNCVAVGLSGGFLEPLEATGVVLIEAAAAMIAELFPHAGPVDAPAARFNALMAARYERIVDFLKLHYCLSRREEPFWRDNRDPASIPDTLQALLDQWRHRPPSRFDFLLDVESFAFFNYQYILYGMGFRTDLSAAREGFPHTDAAERQFARIRGFGEQAVADLPGHRELIRQLSG

SEQ ID NO: 85928 - protein, 507 aa, Shewanella sp.
  REGION 1..507: note = tr|A0A2N1EMS9|A0A2N1EMS9_9GAMM Tryptophan halogenase; OS = Shewanella sp. ALD9 OX=2058330 GN=CXF88_13400 PE=4 SV=1
MAKAVKKIIIVGGGTAGWLTAAIIASHHKSQTGNDLTIILVESSDIPTVGVGEGTWPTMKNTLQQIGLSESEVFKACHATFKQGGKFVNWVHGNGDFYYHPFTVPLGYGRIDLAPYIDNIKDYAKHTNFQHAICESGLAPRSMAEGEYQGSCNYAYHLDAGAFADLLKQHCKAKLAVEHVIGTVEQAHVDSQGNISHISLADQGSIDGDLFIDCSGFASLLLGKTLNVPFVKLDHVLFNDRAIAMQVPYTDQHSPIASHTIATAQDSGWIWDIGLTHRRGVGHVYSSRYMTDEQAEANLRRYIGPQAEGLSVKKISYQSGHRERYWQKNCVAVGMAAGFVEPLEATAIMLVEISARYIADNLPVNDTIMALTAKRFNQQMEYRWGRIVDFLKLHYMLTKRPEPYWQAHCHPDSIPQSLQEDLSIWAYRGPTSKDFNGPNELFPAASYQYVLYGMGFSPDYSQHAHLYQQQAQATQILNRNVQLTQQMLNTLPPHRDFIEQWLTHSQQ

SEQ ID NO: 85929 - protein, 517 aa, Caulobacter sp.
  REGION 1..517: note = tr|J2QBQ9|J2QBQ9_9CAUL Tryptophan halogenase; OS = Caulobacter sp. AP07 OX=1144304 GN=PMI01_00658 PE=4 SV=1
MSEAPSTSATSSDRDGAISRIVIVGGGAAGWMAAAALSRGLGPRGPAITLIESEEIGIVGVGEATIPPIRAFNSLIGLDESAFVRETQGTFKLGIEFVDWTRLGDRYFHPFGVYGHDFGVAPFEAVWRRLRRAGQAQPLDAYSVCARAAAQGRFAPIPQAAGGPPPMGYAFHFDATLYARMLRTHAEAAGVVRREGKVVDVSLRGADGFVEAVTLASGERIAGDLFIDCSGFRSLLLGQALGTPFEDWSRWLPNDRALAVPSANAGPPTPFTRSTAREAGWQWRIPLQHRTGNGYVFSSRHVSIDEATATLLSGLDGEPLAEPRLLTFQAGRREACWVKNVVALGLASGFLEPLESTSIHLIQAGIARLLEMLPTRAFEPADARRYNRLMAADFDNVRDFLVLHFHVTQRDDTPYWRELRAMTPPESLAERLSIYRATGRIFRESDELFTKTSWLAVMEGQGAQARDDDPLALAVPQELGAARLAKIAEMARQAVDRMPTHGDFIDAHCLARMSAPV

SEQ ID NO: 85930 - protein, 514 aa, Novosphingobium sp.
  REGION 1..514: note = tr|A0A102DD93|A0A102DD93_9SPHN Tryptophan halogenase; OS = Novosphingobium sp. FSW06-99 OX=1739113 GN=AQZ49_05555; PE = 4 SV=1
MSHRIRHVVILGGGTAGWLAAGIIAARHRNRMAEGFRITLVESPDTPIIGVGEGTWPTLRSTLQRMQVSETDFFRECDVAFKQGAKFARWATGRDDDFYYHPLMLPQAFSQVNLAPHWLADDAGASFCDAVCAQGVICEEGLAPKAITTPEYEGAANYAYHLDAGKFADFMQRHCTQKLGVAHILANVTRVNQADNGDVTSLDTDRAGRIEGDLFVDCSGFRSLLLGQTLGVAFRDCSDVLFCDTALAVQVPYADDTSQIASHTISTAQTAGWIWDIGLPTRRGVGHVYSSRYTSEEHAERELRAYIGPAARDLSVRKIPIRSGHRETFWSHNVVGVGLAAGFLEPLEASAIVLIEMSAKLIAEQMPQTREVMQIVARRFNDTTRYRWGRIIDFLKLHYAVSQREDTAFWRDNRRAETIPDRLQELLYLWRYQSPWLYEEFDRLEEVFPAASYQYVLYGMGYKTEVEPALLAGDAQVAERAFRENRAQTEKLRQRLPRHRDLIRKIVEYGMQPV

SEQ ID NO: 85931 - protein, 510 aa, Pelomonas sp.
  REGION 1..510: note = tr|A0A0Q6X6T8|A0A0Q6X6T8_9BURK Tryptophan halogenase; OS = Pelomonas sp. Root1237 OX=1736434 GN=ASC91_26410 PE=4; SV = 1
MNDRLREVVVLGGGSAGWLVAGLLAAEHPDLRITLIESTDVPTIGVGEGTWPSMRDTLRRIGLSEPEFIRRCQVSFKQGSRFDGWARGGAGSDGDRYYHPFMLPVGYGDVDLVQPWLATQGQRPFADVVSPSVQVCEAGRAPKQVQTPDFAAVANYAYHFDAGLFGQMLREHAVAKLGVHHVIDHVEAVLSFENGDIAALRTREHGEIKADLFIDCSGLTSRLIGQHFGVPLKSEREALFNDAALPVQVPYATPDAPLASVTVATAWAKGWIWDIGLPSRRGVGCVYSRDHASDDEAHAALTAYLDATGAPAERPTPRSIRFDPGYREQFWVRNCVAIGLASGFIEPLEASALALVELSAQRLCDELPMTRASMEAVARRFNDDFSYRWARVIDFLKLHYALSQRDDSDYWRAHRDPATWPERLRELLPQWQMRAPARHDFGRIDEVFPSASYQYVLYGMGFRPDAESLPAAKLQAAQACFDEAARQARRFVPGLPGHRSLLDHIHKTET

SEQ ID NO: 85932 - protein, 518 aa, Pelomonas sp.
  REGION 1..518: note = tr|A0A0Q6X502|A0A0Q6X502_9BURK Uncharacterized protein OS=Pelomonas sp. Root1237 OX=1736434; GN = ASC91_03230 PE=4 SV=1
MSDIQSIVIVGGGSAGWLAACFLQRALGAVRQTPLPITLIESPRIAGIGVGEATLPTLRGMMQALGLPEAALFGAADATLNNGVRFHGWRSGGSAADDSYDHPFDAPPPFGGFATTAHWLNLMQRGLTQQPMAQACTVQTTLFDGHQSPKLMDSPDYQAPVSYGYHLDAAKLAMLLQQTALRRGVRHVQGEVAQVQRGAAGIEAVELADGRRFAASFFVDCSGADSLLLQRALGVPWVSYADWLPCDRSIAVPVAYARDDTALRSHTAITAQDAGWSWEIDLQSRRGTGYVYASRFCSDDEALQRLQQLNAGHRALAAPHFTTLRAGHAARIWEQNCLALGAAGGFVEPLESTSLYLVEWALQMFVDHVAPSGNSAVCRDRLNRLAGDFHQELRDFIVAHYTLSQRRDTPFWRTCTDAAALPPRLVELLALWDAKVPTATDLDSRLSPFGPSNWSYVLAGLHRLPSQGIGLAAHISAEVSQQALAHVRDVRRAASEQSPTMRDYLRSQQGMAPQVTAH

SEQ ID NO: 85933 - protein, 520 aa, Duganella sp.
  REGION 1..520: note = tr|A0A1I2LSA1|A0A1I2LSA1_9BURK Tryptophan halogenase; OS = Duganella sp. CF458 OX=1884368 GN=SAMN05518865_10543; PE = 4 SV=1
MVAIPTRRILIVGGGSAGWLCAAYLAKMFGGSKEITLVEAPEIGAIGVGEGSFPSLRATLAALGIPETEFVRESSATFKQGITFQNWLYGGDHYFHPFSMPSQRPGAPELLPYWLQGMAGDTPFAEAVTMQQRVVDAQRAPKRAGDSDYNGPMNYAYHFDAARFAGLLAKHARKLGVRHLQDHVEGVQLALDGAIASVETREHGALTADLYIDCSGFRALLIGAALGAPFRSVSDILFCDIALAVQVPHPAPDAPIASATISTAHEAGWTWDIGLQERRGIGYVYSSRHTSDERAEQVLRAYAGPAADGLNVRKIPMRVGYREQHWIKNCVAIGLAGGFLEPLEASGIGLVETAVHMLGALFPHNGDMAPLARHFNQFMSERYARIVDFIKLHYCLSQRHEQFWIDNCDPATWTDSLRDKLAMWRCRPPQRMDFLTDVEMYPPTSWQYVLYGMGFPKVMPPLPSLEPMADAARQEFANIAAVAARAVADLPDHRAFVTQLCQHENAFRNDFHAIRATVSR

SEQ ID NO: 85934 - protein, 647 aa, Streptomyces sp.
  REGION 1..647: note = tr|A0A1C6R1W7|A0A1C6R1W7_9ACTN Tryptophan halogenase; OS = Streptomyces sp. AmelKG-E11A OX=1100822; GN = YW7DRAFT_06385 PE=4 SV=1
MASQDGGTPHETGTGGDFAGDLRGFLGSLPRGDADAVLGWFGGSPATAPGEGLTPELTALFEDGEGGPRDAGIDPASRPRQGDPRAVRRVGVIGGGTAGYLTALALRAKRPWLEVTLVEAKGIPIIGVGEATTPSMVPFLHHYLGIDPQELYEAVAPTWKLGIRFDWGGKPGGFMAPFDWGSNSVGVLGSLATQDDINAFTFQSLLMERDRAPVFRSGDDGRLSLMKHLPFAYHLDNARFVRYLTELAERRGVGHIDAKIDDVVLGADGWVDHLVTDGGERLDFDLYVDCSGFRSLLLGKALDSPYVSFADSLFTDRAVTAVVPHHGRIKPYTRATTMDAGWCWTIPTRDDDHVGYVHSSGFISVEEATAELQRLYPEAHTFRTVHFRSGRHEEAWIGNVMAIGNSYAFVEPLESSGLMMITLGILSLVGSLPGSWDEPCPRKVVNAALAKKWDEIRWFLAMHYRFNTRKDTDFWRACRADTDVSGLEALLEVFAGGAPLRFRDPVVRGFLESTAPTFYGLDGVDCLLLGQGHPTRLLPMTEPVDAWRARKAAADVLVDRALTAAQALTAFDQDPRLNAQLVGDPDSWVVRTGTNRLVSADPDAPAARGSAAGGSADGAAVDGASGEGASGGALAGTGSSRGDGTDG

SEQ ID NO: 85935 - protein, 233 aa, unidentified
  source 1..233: note = Sphingomonadales bacterium
  REGION 1..233: note = tr|A0A259HLS5|A0A259HLS5_9SPHN Tryptophan halogenase (Fragment) OS=Sphingomonadales bacterium 39-62-4; OX = 1970599 GN=B7X78_05390 PE=4 SV=1
IPLQHRQGNGVVYCSDFLGHDVALEKLLSSVEGEKLVKPNHIRFRTGARRKQWHRNCVAVGLSGGFMEPLESTSIHLIQRAILRIVRMLPAGAISQRDIDEFNDQQFTDMEQIRDFLVLHYKVTDRRDTPFWRHVSAMDVPESLTHKIELFRETGRVFRKNEELFAENSWVQVMMGQGIMPQSHHPVAAKLRDEEMAHLFGTLRDQVARTVAALPVHGDYVVRYCGADVPVAA

SEQ ID NO: 85936 - protein, 503 aa, unidentified
  source 1..503: note = Massilia glaciei
  REGION 1..503: note = tr|A0A2U2HDC7|A0A2U2HDC7_9BURK Tryptophan 7-halogenase OS=Massilia glaciei OX=1524097; GN = C7C56_025540 PE=4 SV=1
MTLTPVRKIVVVGGGTAGWMTASALSKTLGPACQIRLIESDEIGIIGVGEATIPHINEFNRALGIDEDTFLRATQGTFKLGIEFVNWGQTGERYIHGFGRVGQPGDALPFHHFWLRMAKLGRAGPLAAYSMNTAAPHHAKFMRAPPEMRGSPLQDLVHAFHFDASLYARFLRDYAEQRGVRRTEGKIARVSQREPDGFIDAVVMESGERIEGDFFVDCSGMRALLIEQTLHAGYEDWSHWLPCDRAIAVPCASAGELLPMTRSTAHAAGWQWRIPLQHRTGNGHVYSSGFMEADQAEAILMANLDGEPTAQPRHIRFQTGRRKKSWSHNCVSVGLASGFMEPLESTSIHLIQTAISRIINFFPQAGFDAADIAEYNLQTQVEYERIRDFLVLHYKVTRRTDSAFWDYCRTMPIPESLQRKIDLFLSNGRIYREQDELFTEMSWLQVMVGQGAMPRGYHPFADLRPEAEVAAYLGNVEQVIAKCVKAMPSQAEFIAAHCAAGAN

SEQ ID NO: 85937 - protein, 496 aa, unidentified
  source 1..496: note = Alteromonas confluentis
  REGION 1..496: note = tr|A0A1E7ZDY0|A0A1E7ZDY0_9ALTE Tryptophan halogenase; OS = Alteromonas confluentis OX=1656094 GN=BFC18_06135 PE=4; SV = 1
MMRLHNIVIAGGGTAGWMAANLIAHAWRDKPVSVTLVESADIPTVGVGEGSTPTLKRFFSDLGIAEQDWMPACNATYKVNIRFRNWSPGSGIKEYSHPFISQPDTFTERAFHVNCHTRRLGLDVNTQPDDFLLNGWLAKAHRAPKTPPNFPFRIEYGYHFDSALLGRFLTKHATTLGVMRKEGNIAQVLKHANGDIRGLQMADGSFVEGDFFIDCTGFRSLLLQQALEVGFTSFSDNLFNDSAVVLPTPAAGQLPVETVSTALSAGWAWSIPLSHRTGNGYVFSSAHISHDQAETELRQHLGLADNDGEARFLSMKVGQAHKHWHRNCLALGLAQGFIEPLEATALHLVQLSTEFFIEHYEKGHFGSAHQDTFNAHISERFNRVRDYIVAHYKLNTRDDTDYWRENRNNMALSESLLQLLDVWYRKGDLPAEIQRQNLHHHFGTTSWHCLLAGYGCFPPLAKNQPGLGDLFVEKDLDAFFRGCLLNFPTQQDYLQR

SEQ ID NO: 85938 - protein, 498 aa, Pelomonas sp.
  REGION 1..498: note = tr|A0A0Q6WVJ2|A0A0Q6WVJ2_9BURK Uncharacterized protein OS=Pelomonas sp. Root1237 OX=1736434; GN = ASC91_09620 PE=4 SV=1
MTQTFNRIVIVGGGTAGWMTAAAIATGLKGRCTVEVVESEEIGIIGVGEATFPSIRNYNRLVGIDEAEFLRATHGTYKLGIEFRDWRVQGERYFHTFGDFGEMQGPHALWGQYRRLADPALGGLGEQCLPTVMAMRGRFMQPDDEGRAPYKYAYHFDATLYAGFLRRLAFGRGARRTDGRIVGVTRRADGGVHSLRLADGREIEGDLFIDCSGFGSLLLGKTLEEPFVDFSRWLPVDSAWACPCERTGTALTPYTRATALEGGWAWRIPLQSRTGHGHVFSSRHIDADRARDQLLQQLDGKPLAEPRLLRFTTGHRERFWVHNVVALGLSSGFLEPLESTSIFLIQSGLGHLMTLLTSGQPISEGVVAGYNARAVREFNRIRDFIILHYCLTARRDSALWRDMATMELPETLAFKIDAWRRLGLLHLQGDEGFDEHSWLAIHAGMQHWPERTDPVLQEMPPDEARQALQQRRHAIAESVARLPSHEAFLGQVLARGGA

SEQ ID NO: 85939 - protein, 489 aa, Pelomonas sp.
  REGION 1..489: note = tr|A0A0Q6WA51|A0A0Q6WA51_9BURK Uncharacterized protein OS=Pelomonas sp. Root1237 OX=1736434; GN = ASC91_21260 PE=4 SV=1
MAPPKHIAIVGGGTAGWMTANLLRHRWARLGVDVTLIESADIGTIGVGEGSTPFLRHFFRTLGIEERDWMPACDATFKSSIRFPGWSTVAGYESYVHPFFSEADRELGNLFFTNACLRRRGQAADANPRDFFLAAELARQRRAPLGTDYAYHFDAGKLGAFLRTHAVGLGVRHIVDTVARVELRENGDIAAVHMKSGARVDADLFVDCSGFKGLLITETLGEPFLSYRDNLFNDRAIAIPTPLVDGEDIPCETVSTALRHGWAWQIPLTTRYGNGYVYSSDFVSDDEAERELREQVGAAAEGATARRLRMRVGCVKQHWRQNCVAIGLAQGFIEPLEATALMLIQLSVEQFIAAMEGGEFERRQQDAFNRRVSEMFEGVRDYVVAHYQLNTRRDTDYWRANRANKNISDRLASLLDVWDRGGDFEAELERHGAKLMYLRPSWYCLFAGMGRFPAELRAAPQAVTAAVARQSLANMARAFRSHHRCLMGE

SEQ ID NO: 85940 - protein, 526 aa, unidentified
  source 1..526: note = Alteromonas confluentis
  REGION 1..526: note = tr|A0A1E7ZG93|A0A1E7ZG93_9ALTE Tryptophan halogenase; OS = Alteromonas confluentis OX=1656094 GN=BFC18_02950 PE=4; SV = 1
MQDTTQIKSVVIVGGGSAGWLTAALLAAQHSADIHITLVESPDVPLLGVGEGTWPTMRGTLQKIGIDEVTFLNACHASFKQGTHFHQWRTGNSNDEYYHPFSLPFNYFDTDCAAWWQREASQSSFAHAVTTQSTVCDHFLAPKQVETPPFAGVLNYGYHLDASQFAHLLKTHAVSKLGVTHVVDHVERVIAAPGNAIQGLTLKSGKQIKGDLFVDCSGFSARLIGEHFGEPLLSCKAQLPNDSAVALQCAYTQSDTEIPSVTRSTAQANGWIWDIALTNRRGVGHVFSSEYSAEDDAINALQQYILANSALAPKSRDDIAQQARLFRFQPGYRQRPWIQNCIAIGTASGFLEPLEASALVMTELAASHLAESLPRYHYQLPAAARQFNREFSTKWARIVDFLKLHYVLSERRDSDYWRKVTRMSDCSEQLYDWLTLWKTRSPSAADFSFREEIFPAASYLYVLYGMGFPTDFQHSASVLQHRQPQAFKQQEQHKLLQQHLAGLPGNRALLSQLAQIAVTSGKHHEQ

SEQ ID NO: 85941 - protein, 505 aa, Sphingopyxis witflariensis
  REGION 1..505: note = tr|A0A246JD86|A0A246JD86_9SPHN Tryptophan halogenase; OS = Sphingopyxis witflariensis OX=173675 GN=CDQ91_20145; PE = 4 SV=1
MNRVGDSRITKVVIVGGGTAGWMAAAALSRTMDNLSIRLVESDEIGTVGVGEATIPAIRLVNALIGIDENEFIRETGGTFKLGIQFHDWGGIGDVYMHAFGQIGRSLGMLPFQQYWLRGRSDGVAGRLGDYSLNETAARQNRFARLPQIPNTSLDGVAYAFHFDAALYAAYLRKIAEAAGVERTEGKIASVRRNAETGHVEAVVLENSTVIDGELFIDCSGFRALLIEEALETGFEDWTHWLPCDRAIAVPSANAGPARPYTQAIAHKAGWQWRIPLQHRTGNGHVFCSDFISEDEATATLLANIEGRPLAEPRTLRFRTGMRTKAWNGNVVALGLASGFLEPLESTSIHLIQNGIAKLLAHFPDRDFDAANIDAYNRRVRFDYERIRDFVILHYHANQRTDSPFWIRCREMGIPETLVRKIELFKSQGQIVREGDELFIEIGWFQVLTGQNIMPDGYHPMADQLTHDELAGFCADIETIVARTASHLPGHEDFIAQHCAAGVPA

SEQ ID NO: 85942 - protein, 525 aa, Paenibacillus curdlanolyticus
  REGION 1..525: note = tr|E0I5L9|E0I5L9_9BACL Tryptophan halogenase; OS = Paenibacillus curdlanolyticus YK9 OX=717606; GN = PaecuDRAFT_0941 PE=4 SV=1
MKERIQSVVILGGGSAGWMTASYLSKAFGDQLQITLIEADTIPKIGVGEATIPNLQRVFFDFLGLREEDWMPHCNASFKAAIKFVNWRKAPQEGEPDNYFYHLFGQVPDCDNVPLSHYWARRMLEDGDHEEMAYACYDKAPLLDAKLSPRMQDGTRKMSYAWHFDANLVAAFLRKLAVGWGVRHVVDELDNVELKPDGSIQALTMRKGGRYEADLFVDCSGFRGLLINQALKEPFIDMSDYLFCDSAIASNIPHDDERFGVEPFTSSIAMRHGWTWKIPMLGRFGSGYVYSSKFASEDEATEDFIKLWNLDPNKAKLNKIRFRTGRNRRAWVKNCVSIGLSSCFLEPLESTGLYFIYAAIYQLVKHFPDKSFNPTLINRFNEEIEGMFDDSRDFIQSHYLITSRDDTEFWRANKHELKISDALKHKLETYKAGLVVCPPLTTNESSYYNNFEMEFRNFWTNSNYYCMFAGMNWLPDQALPKLAYRPEAVKKANAMFAQLKKQTAELGTSLPSTYDYLKMLHGVTI

SEQ ID NO: 85943 - protein, 508 aa, Shewanella halifaxensis
  REGION 1..508: note = tr|B0TJC4|B0TJC4_SHEHH Tryptophan halogenase; OS = Shewanella halifaxensis (strain HAW-EB4) OX=458817; GN = Shal_1146 PE=4 SV=1
MDIKRVAIVGGGTAGWLAANHLGKALLNNEQLSITLIESPDIPTIGVGEGTVPAIRQSLKSFGISETELIRRCDVTFKQSIKFVNWLDKHKHGQDNFYHHLFDMPGSVMEELTERWLSKKESRYAGSVSPQHAVCGAFRAPKNISDPEYAGKLGYAYHLNAAKFAELLGENAKERFRVEHIRATVQEVILGQGGEIKSLVTDSAGTLDFDFYIDCTGFASLLIDKALKVPFVNKAEQLFVDKAVVVQVPTAGDDIIPPFTISTAHQAGWIWDIALSNRRGVGFVYSSKYMDDETAINKLNKYLGGKLVAHQHRVIPMTVGYRERSWEKNCVVLGLAQGFLEPLEATSILLTDFSAGLLAQRFPTSTLQLPRIQQRFNHVMNYAWERVVDFIKLHYCLSDRDDSPFWVDNRDPATMSDELKNRLAMWQDFVPSREDFFSKFEVFDLENYLYVLYGMEHTPKGKVCCEQRCADSNVLQQRLNTLATHLVTELPQHRDLLEKIKRYGLQKL

SEQ ID NO: 85944 - protein, 501 aa, unidentified
  source 1..501: note = Massilia glaciei
  REGION 1..501: note = tr|A0A2U2HLA2|A0A2U2HLA2_9BURK Tryptophan 7-halogenase OS=Massilia glaciei OX=1524097; GN = C7C56_012655 PE=4 SV=1
MQQNNVKKIVIVGGGTAGWMAAASLSKILGNKVALRLVESDEISTIGVGESTIPMIKMFNQVLGINEDEFMRETKATFKLGIEFADWGKLGDKYMHGFGKFGQDLWTVDFYQYWLKMHQAGKAPDLENYSINRMAAKAGKFMRPPADMGNSPLSEITYAFHLDAGLYARYLRKFSEAHGVVRTEGKVAETVLDPVNGHVAAVVMENGERIEGELFIDCSGFRGLLIEQALKTGYEDWSHWLPCDRAYAVPCELAGELLPYTRATARPAGWQWRIGLQHRTGNGHVYSSKFMSDDEAASILMNNLDGKALAEPRQLRFVTGKRKKVWNKNVVAIGLSSGFMEPLESTSIHLIQSTVARLITFFPDRGFDQADVDEFNRQCDFETERIRDFLILHYNATGRDDTPFWDHCRTMVLPESLRRKLELYKAHGRIVRDNNELFAEVGWLQVMHGQGIKAGGYHPLVDLLGEREVGEYLAEVAGVVGKCVSVMPSHAQFVAAIIAAK

SEQ ID NO: 85945 - protein, 497 aa, unidentified
  source 1..497: note = Pararheinheimera mesophila
  REGION 1..497: note = tr|A0A3P3QGL9|A0A3P3QGL9_9GAMM Tryptophan 7-halogenase OS=Pararheinheimera mesophila OX=1547515; GN = EIK76_12555 PE=4 SV=1
MNNVHNRIKKVVIAGGGTAGWMTAAGLTKLLGKNLEVVLVESDDIGTVGVGEATIPTLHIFHRLLNIKESEVMAATNATFKLGIQFENWKALGEDYIHSFGFLGKDCWACGFQHFWVKGRQKGIATEIGDYCVEHLGARQGRFAVLPNQDLNHAYHMDASLYAKFLRRISEQHGIRRMEGKIREVQQHMDGTISALLLESGELVEGDLFIDCTGFRALLIEQTLNTGFEDWSHWLPCDSAYAVQTKTTHEPVAYTRAIARQAGWQWKIPLQSRVGNGLVFCSKFITEAEAKQTLVDNLEGEMMFEPRLIKFKTGTRRQHWNKNCVAIGLSSGFLEPLESTSIHLIQRSIIRLLQMFPSNGINSADVAEFNRQTKIEMDNIRDFIILHYKATERTDTKFWRYCKDMEIPDTLAHRMELFKQSGKVYKFAQELFGESSWLQVLIGQGLMPEQYHPIVDLMPDSELNDFLMSIKQNVKRTVSQFPTHHEFIQHYCKSSLV

SEQ ID NO: 85946 - protein, 498 aa, unidentified
  source 1..498: note = Alteromonadaceae bacterium
  REGION 1..498: note = tr|A0A4R5GZT1|A0A4R5GZT1_9ALTE Tryptophan 7-halogenase OS=Alteromonadaceae bacterium M269 OX=2546219; GN = EYS14_19895 PE=4 SV=1
MTKPVKKVVILGGGTAGWMAAALLQKVVGPIIDVELVESEAIGTVGVGEATIPPIKLVNQVLGFNEAEFIKETNATIKLAIKFENWKRQGESYYHTFGAPGKSFAFCHFHHFWKRAVDNGYSESLWDFDLNYLCCEEGKFAQINSKDPILDLVYAYHFDASLYAKYLRKLAEGFGVTRTEGMVQKVEQNEQGYIEALHLKSGQKIAGDLFIDCSGFKGLLIQETLGAGFDDWSHWLPCDRAVAVPSERFEHTAPYTRSIAHSAGWQWRIPLQHRNGNGLVYSSSHYDEQDAMDLIMQNLESEPLDDPRVIRFKTGRRRKQWHRNVVSVGLSSGFLEPLESTSIHLIQSAIVRLIQLFPHQGIDDANVAEYNRQSKVEFEQIRDFLILHYHLNERDDSQFWRDLREMEIPDTLAHKMSLFAESGGLFREQNDLFLEPSWMQVMMGQGIMPKDYHPIANNMPQDKLFAMLNEILRVKREPLSKLPMHDAFLKTYCDSYRG

SEQ ID NO: 85947 - protein, 505 aa, unidentified
  source 1..505: note = Luteimonas cucumeris
  REGION 1..505: note = tr|A0A562KXR4|A0A562KXR4_9GAMM Tryptophan halogenase; OS = Luteimonas cucumeris OX=985012 GN=IP90_02990 PE=4 SV=1
MQNDADRDAESPKPVRRVVIAGGGTAGWMAAAAVSRLFGETLEISLVESEEIGTVGVGEATIPTLTTFHRLLDIDEREFMAAAQGTIKLGISFENWRSEQHRYIHSFGSTGKDHWSAGFQHFWRRGRELGLAGSYDDYCVELQAALQDRFAHLKHYRMNYAYHLDASLYARFLRGMSERNGCRRIEGKIAEVLTDPGSGFIRALRLERGEVIEGDLFIDCTGFRALLIEQALGVGFEDWSQWLPNDRAIAVQTSAVRDAVPYTRAIAEKWGWQWRIALQHRVGNGIVYSSRHVGDDEARQVLLGSVEGEVIKSPWPVRFRPGRRLQCWHRNCVALGLAGSFIEPLESTTIHLIQRGITRLMQSFPHVVSQAGIDEYNTQMADELQHVRDFVVLHYHATERRDSSYWEYLANMTLPATLQRRIDLFRETGTVFHAAGELFAENSWIQVMMGQGIEPRRHHPAAETMSETELARFLADIRGSVDRIVAQLPPHMDYIRRYAPGAVPA

SEQ ID NO: 85948 - protein, 493 aa, unidentified
  source 1..493: note = Pararheinheimera mesophila
  REGION 1..493: note = tr|A0A3P3QII9|A0A3P3QII9_9GAMM Tryptophan 7-halogenase OS=Pararheinheimera mesophila OX=1547515; GN = EIK76_12140 PE=4 SV=1
MQQVKKVVVAGGGTAGWVAAAALSKRLQGLIEVVLIESEEIGTVGVGESTVPPVQLFHNLLGIDEQEFMKATDATFKLAISFEHWGRTGDQYFHPFGVTGKGSFLTDFQHYYLHGLTQGVDAPFGDYCYELQAAKQHKFGKTEKSTINYAYHLDAGRYARFLRKFSEDLGATRVEGKIAQVQQHVNGDIRSVILESGEEISGDLFIDCTGFRALLIEQTLQTGYERWDHWLPCNKAVVVQTEPGPTIHPYTRAIAHDSGWQWKIPLQHRAGNGLVYASDYLSDEKAKQRLLDGLEAPALFEPRVLHYQTGRRKKLWNKNCIAIGLSSGFIEPLESTSIFLFMSGIIRLLRLFPFHGVTPALMDEYNQQSITEVEKIRDFIILHYHQTERNDSPFWDYCRTMTIPDTLAHRMELFRESAHAFQTGDEMFRLESWSHVMLGQRLQPNSYHQLVAGLGQGELSRHLQSIRETINAAVDRLPSHRDFLRQYCPSNLS

SEQ ID NO: 85949 - protein, 507 aa, Pelomonas sp.
  REGION 1..507: note = tr|A0A0Q6WVM4|A0A0Q6WVM4_9BURK Tryptophan halogenase; OS = Pelomonas sp. Root1237 OX=1736434 GN=ASC91_28615 PE=4; SV = 1
MSDPSIRKIVIVGGGTAGWMAAAPLAQRFAQAGQGACEIVLIESPDIGTIGVGEATLPPIRAYNQTLGLDGAEFVKRTQGSFKLGIEFRDWGHVGHRFFHGFGDFGPAIDARAPWQHWLRLQRQVDGLPSYEDWSTSTVMARRNRFTPPEGGAPSAANAYSFAYHFDAGLYAAFLREYAMARGAQRIEGLIVDVELRPEDGFVAAVKLKDGRRIDGDLFVDCSGFRALLIGGAMQSPFEDWSALLPCNSAQAVPSERVEPLTPYTMSTAKAAGWQWRIPLQHRTGNGHVYCSQFISDDEAASTLLAGLDSKALDTPRQLRFTTGRRKQGWVRNVVAIGLASGFLEPLESTSIQLIMDGVGRLIQFFPDRQFKPHLAAEFNRRMALQYESIRDFIVLHYKLTDRRDAELWRYCAAMPIPDTLAHQIELFRSAGRVAILDPDGFAEPSWVSLFFGLGLRPESYDPFVDHIDPEALLQHFVRLRQAITHTVGGMPEHGDYVARHVKAPSA

SEQ ID NO: 85950 - protein, 495 aa, Bowmanella sp.
  REGION 1..495: note = tr|A0A4V6MZS3|A0A4V6MZS3_9ALTE Tryptophan halogenase; OS = Bowmanella sp. JS7-9 OX=1605368 GN=TK45_15570 PE=4 SV=1
MRVQAVQKVIILGGGTAGWITASLMAKVLGKVVSIELIESDQIGTVGVGEATIPPIQNFNAALGIQESEFLRATKGTIKLGIQFENWWKQNSQYMHAFGNIGKNFPFCDFHHFWRRAQDLGIEQDYWDFSLNYQAAINNKFAPVQQIEGTNLPGIAYAYHFDAGLYAQFLRDWSIQRGVVRTEGTVAKVNVDEATGNIRSLQLQDGNEKSADLFVDCTGLRALLIEQTLNTGYEDWSHWLPCDSAWAVPCERTEPLVPYTRSIAHEAGWQWRIPLTHRTGNGIVFSSKFCDPEQAKATLLANLDGAPLNEPRLIQFKTGRRRKQWHKNVVAIGLSSGFLEPLESTSIHLIQSCATRLIKCFPHEGIRQQEVDEFNRQSALEIERIRDFIILHYKANERGDTDFWRYCQQMDIPDTLARKIDLFKSTGKVFRDYDDLFTEAAWQQVLIGQGVTPQDYMSIADSLSREQLQDLFDSLKTLINRTVDKLPPHDAYLPR

SEQ ID NO: 85951 - protein, 531 aa, unidentified
  source 1..531: note = Planctomycetaceae bacterium
  REGION 1..531: note = tr|A0A2E5K825|A0A2E5K825_9PLAN Uncharacterized protein OS=Planctomycetaceae bacterium OX=2026779; GN = CMJ82_04115 PE=4 SV=1
MTRLIRATLFINYLLTLQHNKSENMSGDKDSLAVRRIVIVGGGTAGWMTAAYLAKFTHLSECEITLIESPDQPTIGVGEASIPSLVRFVRNLGFDEVEMMKYCHATYKLGIRFDDWTGKGNSFWHPFGVCGSRINHADLFHFWYREIFNGNDEIANYAEYSLQVQLCEQNKAPRSFRDHSPIMESGGYAYHLDSHRFAEYLKAKAIPMGVLHYLENVSAVERGSDGQLISIRTETNNIVSGDFFVDCTGFESLLIEKELGSIFEKWDDELLCDRAIVCRTDATAPLPPYTISKSLSSGWAWRIPLSTNTGFGYVYSSEHLTDAEAKKELAIEFDLNADLLTQPPIEMKIGCRPKSWVHNCVAIGLSSGFTEPLESSGIHMIQMAIETLLDLFPDKTMNSSLQDSFNSRIYQSFMAIKDFLLIHYLFSATQDGAFWEDARNVAMSPRLNAILENYREHGWIGVAGDEVFGEASFHHLLSGCSVLPRRPHRLSEMVARDEIIAIMDQIRGRNSEVVSKMPEQSLLIDFFMNSP

SEQ ID NO: 85952 - protein, 538 aa, Burkholderia pseudomallei; identical to SEQ ID NO: 84273
  REGION 1..538: note = tr|A0A0F6L4G5|A0A0F6L4G5_BURPE Tryptophan halogenase; OS = Burkholderia pseudomallei MSHR4000 OX=1435370 GN=prnA; PE = 4 SV=1

SEQ ID NO: 85953 - protein, 511 aa, Pelomonas sp.; identical to SEQ ID NO: 84497
  REGION 1..511: note = tr|A0A0Q8GM57|A0A0Q8GM57_9BURK Tryptophan halogenase; OS = Pelomonas sp. Root662 OX=1736580 GN=ASD88_20715 PE=4; SV = 1

SEQ ID NO: 85954 - protein, 401 aa, unidentified
  source 1..401: note = Unknown
  REGION 1..401: note = tr|A0A0R2W0N8|A0A0R2W0N8_9GAMM Tryptophan halogenase (Fragment) OS=SAR92 bacterium BACL16 MAG-120619-bin48; OX = 1655625 GN=ABS23_11955 PE=4 SV=1
EAEFIAAVQGTFKLGISFENWKQRGENYIHSFGLTGQDCWAGGFQHFWLKGRQRGISEDFGHYSTELMAAKAGKFAVLPNNGLSYAFHMDASLYAKYLRKIAEQHGGQRVEGKIVQVNLNSDSGFIDSVTLASGRTLEGDLFVDCSGFRGLLISETLKTEYDDWSQWLPCDSAVAVQTASVSEPVPYTRAIARESGWQWRIPLQSRVGNGLVFCSRHLSDDDAKAALLANVEGETLTQPRVIKFRTGQRVEHWRKNCVALGLAAGFVEPLESTSIHMVQRGIIRLLQMFPLDGISAPDIVEFNRQMTDEYLFIRDFVIMHYHVTERDDTAFWRECKSMAIPASLQHRLNLFKQTGRVFQQAGDVFAENNWTQVMIGQGLIPDQYHPIVDMMSDTELDNFLK

SEQ ID NO: 85955 - protein, 525 aa, unidentified
  source 1..525: note = Unknown
  REGION 1..525: note = tr|A0A0R2W430|A0A0R2W430_9GAMM Tryptophan halogenase; OS = SAR92 bacterium BACL16 MAG-120619-bin48 OX=1655625; GN = ABS23_06750 PE=4 SV=1
MTTKIQKLVIVGGGTAGWLSAGIIAAEHSATATDNTAPDGFQLTLIESPDISTIGVGEGTWPSMRSTLQKMGVSETDFFRECSASFKQGTLFTGWTKGSNDTYTHPFTTPHGYAETNLAPHWQPLRNQVKFAEAVSPQSALFPAKLAPKQITTPEYAFNVNYGYHLDAGKFAEFLRKHCVEKLGVKHIKANVIGINSAANGDIASINTDSHGTIDGDLFIDCSGSRAILLGEHFGVGSCNKNSVLFNNTALAAQVPYNDEQDPIESCTLSTAQTAGWVWDIGLPTRRGIGHVYSSAHNSEEQAGQELLNYIGKTVGEKAAANTTMRKVQFSPGYRDEFWHKNCVAVGMSAGFIEPLEASALVLVELCAAMIAEQLPANREVMDLVAKRFNQKFLYRWERIIDFLKLHYILTQRTDTEYWRDNCRAESIPDSLQESLSLWRHQSPWHRDTRHVDEMFPSASFQYILYGMDFETQPNQTQRRSEMEAQKVAGTLFQENAMRTQKLCTSMPSNRDLINKIYRYGLQKI

SEQ ID NO: 85956 - protein, 530 aa, unidentified
  source 1..530: note = Erythrobacteraceae bacterium
  REGION 1..530: note = tr|A0A4R0NUV9|A0A4R0NUV9_9SPHN Tryptophan 7-halogenase OS=Erythrobacteraceae bacterium CFH 75059; OX = 2528174 GN=EYB45_07140 PE=4 SV=1
MAPSRNVRAGVAASPRCNHGSWVRRGAGVSERGLRHVVIAGGGTAGWMAAAALGVLSDLEVTLIESEEIGTVGVGEATIPQIRLFNAAVGLDEGEFFRATRGSYKLGIMFEGWSGEGSRYMHAFGPTGAAHGVLPFHHHWLHARSAGLARDFGAYSLNRVAATAGRVPSPLGRGDEPQSPYAYHFDAALYAKLLRAHAEAAGVRRVEGRIVDVVLSSDGEAVEALVLASGSRIPADFFVDCTGFRAVLLEALAPREFDNWSHWLPCDRAWAVPCAAAGDFTPYTRATARQAGWQWRIPLQHRIGNGYVFCSRFCDEEDARRVLLANLDGEPESDPRLLSFTTGTRRRHWVGNCVALGLAAGFMEPLESTSIHLVQSSIARLLQLLPSDPRATCCAVEFNRQAQSEWCRIRDFLILHYHANGRQGEPFWDERRAAALPDTLVEQLELWRHTATVSRRDEDLFTLEGWSQVLIGQNILPACVHPLAAGAEPEALRARLDAILARHAAAVERMPTHAAALRQAMMTEPQRKRA

SEQ ID NO: 85957 - protein, 514 aa, Caulobacter sp.
  REGION 1..514: note = tr|J2Q9U9|J2Q9U9_9CAUL Tryptophan halogenase; OS = Caulobacter sp. AP07 OX=1144304 GN=PMI01_00880 PE=4 SV=1
MARPIKNIVIIGGGTAGWLTAGIIAAKHRARAATGFSVTLVESPNTPIIGVGEGTWPTLRTTLATIGVSETDFFRECDAAFKQGARFARWTTGAADDAYYHPLMLPQGFSQVNLAAHWLAGDGAQSFCDAVTPQGRLCDDGLAPKTITAGPYQGVANYAYHLDAGKFAPFLQRHCCDKLGVRHVLADVRSVAMTEDGDIRGVVTEQCGEIQGDLFVDCTGFRSLLLGETLGVPFRDCGDVLFCDTALAIQVPYENENSPIASHTISTAQSAGWVWDIGLPTRRGVGHVYSSRHISDEDAERELRAYIGPAGRDLPARKIGIRSGHRETFWKRNCVAVGLAAGFLEPLEASAIVLIELSAKMIAMQMPACREVMDVVAARFNATTHYRWGRIIDFLKLHYVLSKRSDTAFWRDNRDPETVPERLADLLRLWRHQPPWLHDEFDRVEEVFPTASYQYVLYGMGFRTEIEPEALADERAMAERAMRENVVQTERLRANLPRHRDLIRKIVEHGLQPV

SEQ ID NO: 85958 - protein, 415 aa, Pseudomonas sp.
  REGION 1..415: note = tr|W2DA36|W2DA36_9PSED Tryptophan halogenase; OS = Pseudomonas sp. FH4 OX=1284393 GN=H097_20940 PE=4 SV=1
MPTVEMEHRQVVVIGAGPSGAIAAALLKRKGHDVLIIERQYFPRFSIGESLLSHCIDFIEEAGMLDAVNAAGFQLKTGAAFAWGERYSAFDFGDTFSDGKPTTFQVQRADFDKLLADQAALQGVEIRYGQTLVGVDFAAGHRYLHVRRENGREYHIKAGFVLDASGYGRVLPRLLDLEAPSNFPLRQAVFTHVEDRIEHPGFDRSKILITTHPTQRDIWFWTIPFSNGRCSVGVVAAKAHFDGHDADLDACLRGFIEQTPSLSRVLANALWDTPARTIGGYSANVTTLHGPGFALLGNAAEFLDPVFSSGVTIAMRSASMAAGLLHRQLTGESVDWQTEFAEPLKRGVDTFRCYVEGWYAGTFQDVIYHPGSSPEIRRMISSILAGYAWDERNPFVSEPKRRLRMLSEICAGDNV

SEQ ID NO: 85959 - protein, 506 aa, Pseudoalteromonas sp.
  REGION 1..506: note = tr|A0A4Q6YIH5|A0A4Q6YIH5_9GAMM Tryptophan 7-halogenase OS=Pseudoalteromonas sp. CO133X OX=1777237; GN = EXT40_12215 PE=4 SV=1
MKEIKKLAILGGGTAGWMCAAYLSKFHTDLDITLIESSKIGAIGVGEGSTPHLKQFMQQLGIAEQQWIPYCDATFKAGIYFKNWNGDHRAYFHPFYSEMDINTAEVFFVNANARRRGHEQWCGPDSYFLTGHLAKNALSPKAKSPMVREQHYGYHFDAKKLAHILKGYAIERGVTHIDDEFVAAITNAQGEISELKLKHSAPVNADFYIDASGFNALLIGETLGCRFQPFTDQLLNDSAVTVACPQNMNQPLQAATHSTALSAGWLWQIPLTSRVGTGYVYSSAFLSKQQAEQELAATLNISVNDVEFRHVSMKVGARSSAWQKNVMAIGLAQSFIEPLEATSLMVTQQSILWLSKAISKIQTSPTQTEKLRLHTNQQLHYLVNGIKDYICAHYTTSKRRDSAYWRAVTQTTEIPTRLEPLLAAWRNGDDFDAYLYHQYPESVYSRPSWYSLLAGMDYRDSALNAPTESAQQEIDLAAHAYLESLCSKHFEPHIMQLKAMQQNNFE

SEQ ID NO: 85960 - protein, 516 aa, Bowmanella sp.
  REGION 1..516: note = tr|A0A4Q9XRF5|A0A4Q9XRF5_9ALTE Tryptophan halogenase; OS = Bowmanella sp. JS7-9 OX=1605368 GN=TK45_05990 PE=4 SV=1
MTTSNSTKKTLTIVGGGSAGWMTALYLQRYFHQQGVQIHLIESDKIGPIGVGEATVHSIRFLFAALGLDEQELMRETNATLKLGILFRNWMKPSAAGVHEYFHPFEQQRPAGAIDISSEWVMGQHFNHQRYDQGVCLSSLLAEKSASPKTPMSRPYQGVVPYGYHLDATLLGQFLRKKGLEAGITYQVATVTNVNVEDGEISSLQTSEGVHQADFYIDCSGFSGKLIDALQPDNWESFTDVLPCNKAVAIQRDYAPGETPRPFTTSTALSHGWAWQIDLVNRQGNGYVYDGNRLSAEQAEAELREFLGDEAATRSALHLDMKVGFRPQSWVGNCVAIGLSSGFIEPLESTGLHLINVAARLFATHFSAANISDSVRRSFNRQMRGVYEDLKQFIVLHYCLTDRDDTDFWRQAQASAEGCEGLAEKLTLWKHKVCEFMDLSGGYSTTFNDENYRYILYGMGHLPALHLQPSSTQNQSLFDQVNHMAANLLLQTQSHLAYLQHLHGKPLFSAKDTRSQ

SEQ ID NO: 85961 - protein, 503 aa, unidentified
  source 1..503: note = Phenylobacterium deserti
  REGION 1..503: note = tr|A0A328AD71|A0A328AD71_9CAUL Tryptophan halogenase; OS = Phenylobacterium deserti OX=1914756 GN=DJ018_13510 PE=4; SV = 1
MDERIRSICIVGGGTAGWMTAAALTKVLGPEYARITLVESDEIGTVGVGEATIPQIGIFNRLLGIEEDEFVRRVNGTYKLGIQFVDWGRKGHTYFHPFGPFGVDMEGVSFHAFWLRLMQGGDPRPITDFSIQSAAADAGKFMRAITSDPRSMLSKIAYAFHFDAGLYARFLRELAEARGAVRQEGRIVEVAKRGSDGFIEAVVLQDGTRIEADLFVDCSGFRGLLIDGAMGAEFEDWSHWLPCDRAVAVPCERVSETTPYTRSTAREAGWQWRIPLQHRTGNGYVFSSAHISEDEATAVLLKNLDGAPTADPRVLRFKGGVRKTSWIKNCVALGLAAGFIEPLESTSIHLVQSGIAKLLTMFPSRSFHQADIDRYNRITAQEWEQVRDFIILHYKVTERSDTPFWDHVRTMDVPEALAEKLRVFQTHGRVFRENEELFNDTSWFAVLIGQLMTPNSYDPVADVLSLEETRRRLDQIQSAIATSVDYMPKHDRFIADNCAAARV

SEQ ID NO: 85962 - protein, 504 aa, Novosphingobium sp.
  REGION 1..504: note = tr|A0A102D3Z2|A0A102D3Z2_9SPHN Tryptophan halogenase; OS = Novosphingobium sp. FSW06-99 OX=1739113 GN=AQZ49_17990; PE = 4 SV=1
MDSNPHTLRSIVIVGGGSAGWMAAAALANAVGTAIAITLVESDAIGTIGVGEATIPPIHSFNARLGIAEADFLRATRGSFKLGIEFVGWGTAQSRYFHPFGSYGADFDRVSLHHWWLRERQRGDATSFDDYTMCWALARDNRFGPPVDNPRDVRSTHSYAYHFDAGLYARFLRAYAEARGVRREEGRVTGVGRDGASGLITHVTLDDGRQIAGDFFVDCSGFAALLIERTMQAGFESWAHWLPCDSAVALPCANAGPITPYTRSTAHAAGWQWRIPLQHRQGNGHVYCSAMMDDDAALGVLHAHLDAPATADPRVIHFTAGRRRKAWVGNCVAIGLSSGFLEPLESTSLHLIQSGIERLLLVLPDRRHDPLHAEEFNRATAAEYERIRDFIILHYHAQTRPEPFWRQCAAAPLPDELAYKIRHWVDAARLVSPQDELFKNPSWLAVYLGQGMIPARYDTMADVRAGSVDAATHLRRLREMMRAAAQTFPAHDAVLAQFAPQPAA

SEQ ID NO: 85963 - protein, 504 aa, unidentified
  source 1..504: note = Massilia umbonata
  REGION 1..504: note = tr|A0A4P8I286|A0A4P8I286_9BURK Tryptophan 7-halogenase OS=Massilia umbonata OX=864828 GN=FCL38_20530; PE = 4 SV=1
MVNHVVIVGGGSAGWLTAGVIAADHPSLTVTLIESPDVAPIGVGEGTWPSMRDTLHRIGVSEAAFFRECDAAFKQGSRFNGWRHGGGAEDYYFHPFVLPQGFGEADLVGCWQRDLPNVPFADLVSFQPHLCVQGRAPKQPATPEFAAVANYGYHLDAGKFGVFLRKHCLEKLGVRYVPDHVTAVNSRENGDIASLQTKEHGALEGDLFIDCTGMQSLLLGRHYGVPLLHRKDVLFNDSALAVQVPYASADSPIASQTTSTAQRAGWIWDIGLPTRRGIGHVYASSHTTDEQAEADLRAYVGVDMPTPRKLTFQPGYREQFWHRNVVAIGLSAGFIEPLEASALALVEMSAAMVSDDLPATRDAMDIVARRFNDAFTYRWERVIEFLKLHYVLSGRTDSDYWHDNRRSETIPARLRELLVLWRHRPPSRLDFNRIEEVFPSASWQYVLYGMDFRPDRERITRRDSTTGADGYFREAAELTRRMLRALPSNREMIDHIRLHGLQKI

SEQ ID NO: 85964 - protein, 521 aa, Xanthomonas axonopodis
  REGION 1..521: note = tr|A0A098PUH0|A0A098PUH0_9XANT Tryptophan halogenase; OS = Xanthomonas axonopodis pv. vasculorum OX=325777; GN = GW15_0218920 PE=4 SV=1
MSHTTPLDPQPRPVRRVVIAGGGTAGWMAAAALSKLLGRHLQITLVESDEIGTVGVGEATIPSLVTFHRLLEIDEAAFMAATQATIKLGIAFEHWRDVDQHYIHSFGHAGTDHWSAGFQHFWLKGRQRGVARDFGDYCLELRAAQEGRFAHLPNGGMNYAYHLDAGLYARFLRRFSEGFGVTRVEGRIGQVETDAQSGFLTALTLQDGTRVEGDLFLDCTGFAGLLIGKTLGVGSDDWSRWLFADSALAVQTESVGPPVTYTRSRADQAGWMWRIPLQHRVGNGIVYSSRYMDQDGARAVLERNLTGRALTEPRPLRFTPNRRHRVWEKNCVALGLASGFLEPLESTNIHLIQRGIIRLLQTFPQVINAVDIAEYNRQAAQEINHIRDFVILHYHATDRRDTPFWRDCAAMEIPDSLRHRMELFRQSGRVFHQANELFAENSWVQVMLGQGIVPQQHHPVADLMGDAELSRFLETIRTRVEAALVRLPAHADFLQRYCPAPPLPEPAARVPAPPVMATPAG

SEQ ID NO: 85965 - protein, 505 aa, Pseudoxanthomonas sp.
  REGION 1..505: note = tr|A0A4Q8LSS2|A0A4Q8LSS2_9GAMM Tryptophan 7-halogenase OS=Pseudoxanthomonas sp. NML140781 OX=2480812; GN = EA656_14650 PE=4 SV=1
MSVSSIRNIVIVGGGTAGWMAAAAFARVLGPTYNVTLVESEQIGTVGVGEATVPHIKAFNNLLGVDEAEFVRQTQGTFKLGIEFVDWHHVGDRYFHGFGSEIGHPLGLLPFHQYWIKARRAGWAKPLGHYTLNTVAAPQGRFMTSASDVPPGSPLANIAYAYHFDAALYARFLRSYAEQRGVRRIEGIVETVHQHPESGDVIAVTLQDDTRVGGDLFVDCSGFRGLLIEQALHTGYEDFTHWLPCDRALAVPCEKVGPPVPYTRSTARAAGWQWRIPLQHRTGNGYVYSSAHLSEDEAAATLLANLDGKPVGEPRPLRFTTGRRRKCWNKNVVALGLASGFMEPLESTSIHLIQSGISKLLELFPREGLSPVLRQRYNDRLAFEFDRIRDFLVLHYKATTRSDSSFWRQCSDMAIPDTLQTALDLFADSGRFYRNGEEMFAEISWVQVMIGQGILPASYHPLVDQIPDADLKGFLVSIERTIAHCAHAMPPHEAFIARTCAAAVS

SEQ ID NO: 85966 - protein, 496 aa, Caulobacter sp.
  REGION 1..496: note = tr|J2PDF3|J2PDF3_9CAUL 2-polyprenyl-6-methoxyphenol hydroxylase-like oxidoreductase OS=Caulobacter sp. AP07; OX = 1144304 GN=PMI01_04480 PE=4 SV=1
MAEQVVKKVVIAGGGSAGWMAAAALSKQLGPLLDITLIESDDIGTVGVGESTVPTARTFNALLNLDEPEFMSACQATFKLGISFENWGEIGDRYIHSFGQIGKSTWLGDFHHFWLQAKAQGFGGDLGDYCLELKAAEDHRFFTDENASLNYAYHIDATLYGRYLRAKSEGKGVRRVEGKITSVRQRSDDGFIEALVLESGEVIEGDLFIDCTGFRSLLMGGALEVGFEDWTNWLPNNSALAVQTRSDAPAYPYTRAIAHRAGWLWGIPLQGKIGNGFVYSSDHMSDDEAQAGLRDMIEGEMVAEPRLIRFRAGRRRKAWHKNCVALGLAAGFIEPLESTSIHMIMVAVHRLLQLFPFAGCNEALSDRFNHLADDEIEKIRDFVVLHYKLTERTDSPFWDHCRTMAIPDSLAHRIALFRDNGHVFRAPGELFQTDSWLQVMLGQRLQPGGHHHMGRLMPPEQLRQALNDLKGNIARAVDRMPSHQDFVNRYCPIAPA

SEQ ID NO: 85967 - protein, 504 aa, Sphingomonas sp.
  REGION 1..504: note = tr|A0A4Q0GRY4|A0A4Q0GRY4_9SPHN Tryptophan 7-halogenase OS=Sphingomonas sp. UV9 OX=1851410; GN = EQZ23_06165 PE=4 SV=1
MADHPLRIVIAGGGTAGWMAAATFARFLETGYEIDLIESDAIGTVGVGEATIPQIHLFNDALGLDEDAFLRATGGTFKLGIEFVDWFKPGHRYMHAFGDVGRDVGLLPFHQYWLRARSLGLAGDLGAYSLNTHAALAERMQRGAARTARTLPSMPYAYHFDAGLYARYLRRYSETRGVNRIEGEIVRVTRDGESGDVSGLVLENGTTVAADLYIDCTGFRGLLIEEALGTGYEDWTHWLPCDRAIAVPSARSEAFTPYTRSTAHTAGWQWRIPLQHRTGNGVVFSRAHMSEDEATATLLAGLDTPAMADPRTIAFRTGKRNRMWNRNVVALGLAAGFMEPLESTSIHLIQSAISRLLKLLPGRVIADADRTEFNRQSDFEYERIRDFIILHYKATARDDTPFWRECRDMAVPDTLAAKIELWRGNGHIVREHEELFTEVGWLQVLAGQGIIPAGHHPLADAISTNDLGEFMDTIDKLNAREVVQMQDHAAFVAQHCAAPAGLGA

SEQ ID NO: 85968 - protein, 504 aa, Caulobacter sp.
  REGION 1..504: note = tr|J2PUT6|J2PUT6_9CAUL Tryptophan halogenase; OS = Caulobacter sp. AP07 OX=1144304 GN=PMI01_02808 PE=4 SV=1
MAHLNKIVIVGGGSAGWICAAMLSHYFQNGPTQVELIESEEIGTIGVGESTIPPFLQLIRTLGIDEQDFIQQTQAAFKLAIRFENWRKKDEVYYHPFGQIGGPLEVNEFYQCWLRAKQNGHPSGLQDFAPATVMADTGKFMLPGKAQRTMIANANYALHIDARLVALYLRKFAEARNVKRTEGIVTDVALRADGGVEKVIMKDGREVAGDFFIDCSGFRSLLIGKTLGEPFRDWSDVLLCDRAVATQTENISPPHPYTLAQAQDFGWRWRIPLQHRAGNGYVYSSKYLSDDEATATLLSQTEGEVLRDPWVVHFKTGMRERLWVKNCVAIGLAGGFIEPLESTALHLIYKGMDYLLRFFPDMDADPTLAAEYNRRMTVDYEEIRDFVVLHYATTQRDDTPFWREYQKVELPESLQQRIALFKASAVLRDGVDDMFRAPSWQSVMEGMGIRPQRYQQLVDRIPLSVINNMLDKSAPMLAEFVATLPNHEDFLREHCPAEPLKRSA

SEQ ID NO: 85969 - protein, 509 aa, Sphingomonas sp.
  REGION 1..509: note = tr|A0A4Q0GTS1|A0A4Q0GTS1_9SPHN Tryptophan 7-halogenase OS=Sphingomonas sp. UV9 OX=1851410; GN = EQZ23_06180 PE=4 SV=1
MDGLGQHIVILGGGTAGWMTACLVAHRWSARGVRVTLVESPEIGIVGVGEGSTPQLKHFFDTLGIAEADWMPACDATYKLGIGFEGWSDRAGHERYFHPFPTALDGHTAPQFFYNARARRTGRDVEAHPDRFLLPARLAAESCAPQPAANFPFEVSYGYHFDAYKVGAFLASHATGTLGVVHLQRRIASVERIPAGEVVALIDTAGDRIAGDVFIDASGFRSTIFAALDVPFVSYADALFNDRAVVMPIAHTPGAPIPSQTRATALSAGWAWHIPLTSRIGNGYVYSSRHLTEAQAEAELRAHIGADAGEARHLAMRVGRVRDSWSHNALAVGLAQGFLEPLEATALHLVIATVEAFLDGVDTGGATDTVRTAFNTRIAARYDGVRDYIVAHYRLNQRHDDPTGYWAESRGVEVLSDDLKLLMSTWFTGGDMVAAIDRAGLARYYSAISWHCLFAGYGTFPDAARFPPPGADIDPVDIPKIADFLTRCASNFGSHASRLHQLADHKDYV

SEQ ID NO: 85970 - protein, 507 aa, Sphingomonas sp.
  REGION 1..507: note = tr|A0A5B8LDA8|A0A5B8LDA8_9SPHN Tryptophan 7-halogenase OS=Sphingomonas sp. HKS19 OX=1813879; GN = FPZ24_00095 PE=4 SV=1
MIDRPPSPIKTITIVGGGTAGWMTAGLLSHLFKSYTIRLIESDEIGIIGVGEATIPGIRDYVNMAGIDQIEMIRATQATFKLGIDFVGWRDGTDRYFHGFGRIGQDFMWLHTHQLWLAQRERGGARHFDDYALNCRAGMANKFCLPDTSSPGSPIAGLDFAYQFDASLFARYLRERSEPMGVERIEGKIVDVALDPANGHVAHVVLEDGRTVDGDLFVDCSGMRGLLIGQALGVEYEDWNHWLLNDRALAVPCERVEPLTPYTRVTARDHGWQWRIPLQHRTGNGHVYSSDHISDDEAASVLLANLDGKPLADPRPVRFRPGKRHHAWEKNVVAIGLSSGFLEPLESTSIHLIQTGITRLIALFPHQGFAAADIAEYNRRHDFEFTDVRDFIIAHYKVTERADTPYWDYLKNIQVPDSLASRLELFASSGRFFMRGAGELFREESWVQVLLGQGLKMQPDPNVRMVPDAVQDEFLADIVDVVADVADAMPDHAAFIDRHCKAPPLPA

SEQ ID NO: 85971 - protein, 501 aa, Sphingomonas sp.
  REGION 1..501: note = tr|A0A1I3ML93|A0A1I3ML93_9SPHN Tryptophan halogenase; OS = Sphingomonas sp. NFR04 OX=1566283 GN=SAMN03159338_0466; PE = 4 SV=1
MSAPLSHIAIIGGGTAGWMAAAALSRVLDTRAIAITLVESEAIGTVGVGEATIPPIQAFNALLGIDEAEFLRATKGTAKLGIEFVDWQAKGTRYFHPFGIHGIDFGAIPFEALWQRARLAGEAAPLEAYSICAEAARLGRFQRPATSGNNPLTHLGYAYHFDAALYAGFLREKAEQWGVRRQEGRIVTVARDADGAIASVVLENGTRIAADFYIDCSGFRSLLLGETLGVAFEDWAQWLPNDRAVAVPCALGPEGRSPFTRSTARGAGWQWRIPLQHRVGNGLVYASAHCSDAEAEAQLLGSLEGAPLAEPRLLRFQAGRRARFWEKNCVALGLASGFLEPLESTSIHLVQAGIARLLEMLPVGGGTPADIRRYNRLMAAEFETIRDFLVLHFHVTARDDTDYWRHLRTMALPDTLAERIAIYRASGRLYREADELFSKTSWLAVLHGQGVDPSGYDPIADGMPRDEAAARLARIAEVTALAASRMPTHEAFLHESGALQR

SEQ ID NO: 85972 - protein, 513 aa, unidentified
  source 1..513: note = Massilia umbonata
  REGION 1..513: note = tr|A0A4P8HNI1|A0A4P8HNI1_9BURK Tryptophan 7-halogenase OS=Massilia umbonata OX=864828 GN=FCL38_13190; PE = 4 SV=1
MNQHIKHIVIVGGGAAGWITAGRIAARHARADSGITVTLVESPTIGPIGVGEGTWPTMRGTLMKMGISETDFMRECEATFKQGAKFARWVDGTADDYYYHPLMLPQGFGQLDLVPYWQTACAGRSYSDSVCLQEQVCEHGLAPKMITTPEYASVANYAYHLDAGKFVGFLTRHCTGKLGVTHIQGDVTAVRSSPDGDIAAVVTAQQGEIAGDLFIDCTGFSSLLLGKHLGVPFVDRNDVLFIDKAIAAQVPYEREDAPIASHTISTGQAAGWIWDIGLVNRRGIGYVYSSRHTSDEQAEAALRAYIGPAGKTIGTRSIPIRSGHRQLFWKNNCVAVGLAAGFLEPLEASALVLVELSADMLAEQLPATRDTVDIAARRFNETFLYRWDRIIDFLKLHYILSKRTDNAFWIDNRAPETIPDSLKDLMRLWRYRPPGNCDFTSNNEVFPAASYQYVLYGMGFRTDPAFLRPSAGEQRAAQEHLSHNSAAVKKALKMLPPHRELIAKIHAYGLPAV

SEQ ID NO: 85973 - protein, 507 aa, Sphingomonas sp.
  REGION 1..507: note = tr|A0A1I3T6P0|A0A1I3T6P0_9SPHN Tryptophan halogenase; OS = Sphingomonas sp. NFR04 OX=1566283 GN=SAMN03159338_2088; PE = 4 SV=1
MRAAGQPLRSILIVGGGTAGWMAAALLERLLDRQPVTITLLESPDIRTVGVGEATVPAIRDYFRAIGVSEAEVLREAKGTAKLGIEFRDWARPGDSFFHPFGLYGIASRGVGFHHYWLKRRAAGDATPLADYCLATQMALRGLIMPPAENPPNDLGIFDWTVHFDAGLFARFLARLATGRGVRHVEGTVATVEQDGDSGFLTGVTLQDGSRIEADLFLDCTGFRSLLLGGTLGVPYVDWGHLLPCDRAVAMPCAHGDAFTPYTRSTALSAGWQWRIPLQHRVGNGYVYASAHLSDDEAQAVLRGGLEGEALAEPNFLRFTTGHRARVWEKNVVALGLSAGFLEPLESTSLTLIQSGVERLGNLMPDRGFAPELADEFNRITALEYARIRDFLLLHYWANGRVGEPLWDACRSLVLPEALAHKVALFRSRGVFARYEWESFRDPSWLSMYAGFDLLPDRYDPLADHFTDGELEGAFARMREAIGRAVSLAQPHRDYLQAIGGLAGAGV

SEQ ID NO: 85974 - protein, 529 aa, Sphingomonas sp.
  REGION 1..529: note = tr|A0A1I3UTI7|A0A1I3UTI7_9SPHN Tryptophan halogenase; OS = Sphingomonas sp. NFR04 OX=1566283 GN=SAMN03159338_2591; PE = 4 SV=1
MSVSSGIPFFFHGSARVKRVQNIVIVGGGTAGWLTAGVIAARHQSRMPGGFTVTLVESPGTPIIGVGEGTWPTLRTTLAKIGVSETDFFRECDAAFKQGALFARWTTGAEDDAYYHPLMLPQGFHQLSLVPHWITDAKGRSFCDTVTPQGRICDAGLAPKTIATPEYDGQANYAYHLDAGKFAPFLTRHCTTKLGVRHVLADVRAVERAENGDVAAINTEQAGRIEGDLFVDCTGFRSLLLGETMGVKFKDCGDVLFCDAALAAQVPYPEENAPIATHTLSTAQDAGWIWDIGLPTRRGTGYVYSTRHTSDDQAEATLRAYLGPAGADVPVRRIPIRSGHREIFWKNNVVAVGLAAGFLEPLEASAIVLIELSAKLIAEQMPAVREVMDVVAKRFNATTLYRWGRIIDFLKLHYVLTKRTDTAFWRDNLLPETIPERLQELLTLWRYQPPWFHDEFDRVEEVFPPASYQYVLYGMGFRSEVEPQALSGDQRLAERAMRENAAQTERLCAGLPRHRDLIRKIHEHGLQPV

SEQ ID NO: 85975 - protein, 505 aa, Xanthomonas axonopodis
  REGION 1..505: note = tr|A0A098PX53|A0A098PX53_9XANT Tryptophan halogenase; OS = Xanthomonas axonopodis pv. vasculorum OX=325777; GN = GW15_0213460 PE=4 SV=1
MTQAQIRKVVIAGGGTAGWIAACALSHQFRNLLDITLVESEQIGTVGVGESTVPPIRTFHRFLQIDEQEFLRAVAGTFKLSISFEHWRRQGERYIHPFGITGQSTLVCAFHHLWLESQRRGMPGSFGDYCLETVASRVDRFALQGEPAVNYAYHLDAALYARFLRARSEACGVTRVEGRIQQVTVQPHSGDVASLVLEGGQVIEGDLFIDCSGFRGLLIEQTLHTGYEDWSHWLPCDRAVAVQTEALGPPVPYTRAIAHEAGWRWHIPLQHRVGNGLVFSSEHLSDDEAHAKLLRDVAAPAVKDPWMVPFRTGRRLKAWNKNVVSLGLASGFIEPLESTSIHLTISAVVRLLALFPAEGIAPSQVQLFNDVSRAEMEHVRDFVTLHYHATQREEPLWQQCRQMELPESLALRLRAWRERAHAWQGADELFRVDSWTHVLIGQGIAPEQHHPLTRAFSDHDLRRLLEGIAQPIQHAVQQMPSQQTFIERYCKAGQPVWGMRSPVPA

SEQ ID NO: 85976 - protein, 516 aa, Pseudoxanthomonas sp.
  REGION 1..516: note = tr|A0A4Q8LNU4|A0A4Q8LNU4_9GAMM Tryptophan 7-halogenase OS=Pseudoxanthomonas sp. NML140781 OX=2480812; GN = EA656_16275 PE=4 SV=1
MDEAIRHVVIVGGGSAGWLTAGLIAAEHRDRHGPTLRVSVLESPDVPAIGVGEGTWPTMRDTLRRIGVGEADFVRACDATFKQGSQFVGWVDGGAHDRYTHPFTLPKGYGETQLAVAWAAQGELPFAHLACFQPHLCDAGRGPKQFATPEYAAVANYAYHLDATRLGAFLRQHCVERLGVQHVVGHMDAVLSHENGDIAALAVRDQPALQGDLFVDCTGLRALLLGAHYGIAPVGVEDILFNDRALALQVPYADLNAPIACQTLSTAQRAGWIWDIGLSARRGVGHVYSSAFTSDEEAEADLRAYIQASGGPAAATLPPARRIDLQPGYRPTAWHRNCVAVGLASGFVEPLEASSLVLVELAAARLADEMPATRAQMELLAARFNETFAYRWQRVIEFLKLHYVLSRRPTPYWQAHREDASLPPRLRELLQLWRHQSPSRSDFPRSEEIFPSASWQYILYGMGARPHSRPARRSEDLQAAQACFAESAALVQRMLPALPSHRALVEHIKAHGLPRL

SEQ ID NO: 85977 - protein, 509 aa, Sphingomonas sp.
  REGION 1..509: note = tr|A0A5B8LL05|A0A5B8LL05_9SPHN Tryptophan 7-halogenase OS=Sphingomonas sp. HKS19 OX=1813879; GN = FPZ24_12850 PE=4 SV=1
MAEAAPLRIVIVGGGTAGWMAAAALSKLLPARDYTLTLIESDEIGTVGVGEATLPHIKVFNDTLGIDEAQFMRETQASLKVGIEFVGWDRPGDRYVHPFGTFGEPWAGIDFQHHWARAKAAGCDVGELHDYSFAIAACRNNAFELPNEDPKSIRSTYAYAYHFDAGLYAAFLRRWSIARGVERIEGKVVDVARDASSGHVASVTLESGAVIEGDLFIDCSGFRSLLVGQTMDTAWCDWSHWLPCDRAFAVPSLRTEPLLPFTRATAQEAGWTWRIGLQHRTGNGHVFCSSFTDEDRARDVLLGALDAAPLGEPRMLRFQAGRRAAAWAGNCVAIGLASGFLEPLESTSIFLIQAAVMDLINLMPTRRSGIDPRLAAEFNRLFEVHYDRSRDFIVLHYLANRREGALWDHVRNMELPDGLAHKIALFEASAAAPDYRYGLFSRDSWLAVLVGQGILPNAHSLLAEAIPLAELEAQLADLKYRIDVNAADMTRHGDFIRSYCPAPALEPAA

SEQ ID NO: 85978 - protein, 504 aa, Sphingomonas sp.
  REGION 1..504: note = tr|A0A4Q0GRZ2|A0A4Q0GRZ2_9SPHN Tryptophan 7-halogenase OS=Sphingomonas sp. UV9 OX=1851410; GN = EQZ23_06230 PE=4 SV=1
MTDNRIRRVVIAGGGTAGWMAAAAIARTMGSLIDLTLVESDAIGTVGVGESTIPPMITFNRLLGINEAEFMRETQATFKLGILFDDWKVRGERYFHSFGITGKDHWSAGFQHFWLHGLTKGHDQPYDDYCLELRAALQGKFAHLPDDRMNYAYQLDSTRYAKYLRGMAEADGTRRLEGKIAQVELDSESGDIAALVLESGARIEGDLFLDCTGFRALLIEGALHAGFDDWTHYLPCDSAIAIQTESVRPALPYTRAMAHDAGWQWRIPLQHRTGNGLVYCSRYLDRDAALDRLLGNIEGKTLTEPNMIRFVTGARRQQWHRNCIAIGLSGGFMEPLESTSIHLIQRAVLRLLRLFPSGAVSPRDVAEFNDQQHTDMLQIRDFLILHYKATERRDSAFWRHCAAMPIPESLEQKIELFRETGRVFRKNEELFAENSWVQVMLGQGIVPQSYHPIATKLRDEELARLLGGLRENTNATVAGLPEHAAYVSRYCAPARPVPAHSAAA

SEQ ID NO: 85979 - protein, 501 aa, Sphingomonas sp.
  REGION 1..501: note = tr|A0A1I3TMQ8|A0A1I3TMQ8_9SPHN Tryptophan halogenase; OS = Sphingomonas sp. NFR04 OX=1566283 GN=SAMN03159338_2263; PE = 4 SV=1
MNAHSIRDVVIVGGGTAGWMAAAAFSRFLDNGYTRITLVESDEIGTVGVGEATIPPILRFNQMIGLAENQFLAETGGTFKLGIEFVDWGALGDRYFHPFGNYGQDLEGVPFHQLYLRERARRPMPEIAAWSMSAVAASLGRFGRPSATAQSPIRELFYAFHFDAGLYAQLLRTLAESRGVTRIEGKVVTVAQRAEDGFVQSVTLADGRVVAGDLFIDCSGFGGLLIEETLRTGYEDWRHWLPCDRAIAAPCAPVGEPTPFTRATARAAGWQWRIPLQHRIGNGLVYCSEYLEDDTAEQQLLDSLESPALAEPRRLRFTTGRRRALWSHNVVALGLAGGFLEPLESTSIHLIQSGIARLLTLFPDNRFDPVEREEYNRQMRALYDDVRDFIILHYKLTNRDDSAFWNRCRTMNLPDSLAHRLALFGQKGRIFREAAELFSSSSWVSVCLGQHLVPRDIAPLVDALDSDRVAAAMEQLRRGYQGTASKMPTHGAFLSQCLKGM

SEQ ID NO: 85980 - protein, 500 aa, unidentified
  source 1..500: note = Massilia umbonata
  REGION 1..500: note = tr|A0A4P8HVR4|A0A4P8HVR4_9BURK Tryptophan 7-halogenase OS=Massilia umbonata OX=864828 GN=FCL38_20515; PE = 4 SV=1
MEQQRQKKPVRRVVIAGGGTAGWMVAAGLSKSLGKLLDIKLIESEEIGTVGVGEATIPTLMNFHHLMEINEQEFMAETMATFKLGISFENWRNVNEDYIHSFGTTGTDHWTAGFQHFWHKGRERGIAGDYGDYCLELKAGLKDKFAHLPHNGMNYAYHMDAGRYAKFLRRFSERYGVQRVEGKIVEVRKNLLSGDITALRLDSGAELEGDLFIDCTGFRGLLIGQTMGVDYEDWSHWLFNDSAVALQTKSVRDAVPYTRSIARDAGWQWQIPLQHRVGNGLVYSTRYTDDETALRTLQAAVDGEPLMTPRVIRFTPGQRKQTWKGNCVAIGLASGFLEPIESTSIHLIQRGIIRLMQMFPQDGISQADIDEYNQQADYEIQHIRDFIILHYNVTNRRDTPYWRDAATMKLPPSLQHRIDLFRDTGRVFRVPNELFAENSWIQVMLGQGIMPASHHQTADLMGDEELAHFLGNISGAIDRTVAQLPSHQKYVEQYCSGTGW

SEQ ID NO: 85981 - protein, 519 aa, Novosphingobium sp.
  REGION 1..519: note = tr|A0A102D684|A0A102D684_9SPHN Uncharacterized protein OS=Novosphingobium sp. FSW06-99 OX=1739113; GN = AQZ49_14895 PE=4 SV=1
MTGTPDSRIRRIVILGGGTAGWITAGLIAARYRQRGDDGLQIALVESVALGTIGVGEGTWPSIRETLRQIGLSETEFLRTCDAGFKQGSRFVGWVDGAPQDAYLHPFTLPVLDGDALTRWMGQPHQGRTFADALSFQSAACGAGLAPKAMTHPEYAGAVSYAYHFDAGKFAQMLARHVTTRLGVEHHDAAIASVEARPDGDIAALIATDGRRFAGDLFIDCSGLAARLIAGHCQVPFTSCRDVLFANRAWTTQLPYPAPDAPIASTTNATAQAAGWIWDIGLQSRRGLGHVYSDAHQSDDDALAALHAYVRAAGGDADALTYRRIAFEPGHRQRFWQGNCIAVGLSAGFIEPMEATAIALIEMGARMIGDVLPATRDGLARAARQYNACFEYRWARIIDFLKLHYVLNRREGSDFWRDNRRAASIPASLAEALAAWHHQCPAPVDFAHREELFPAASYQYVLYGMGAWSAPPPRLDGATDALVAERVAACARMADGLATTLRPNRETLQTIARYGLKAI

SEQ ID NO: 85982 - protein, 505 aa, Pseudoxanthomonas sp.
  REGION 1..505: note = tr|A0A4Q8LS08|A0A4Q8LS08_9GAMM Tryptophan 7-halogenase OS=Pseudoxanthomonas sp. NML140781 OX=2480812; GN = EA656_14760 PE=4 SV=1
MGDNRIGSVVVVGGGSAGWMAAAALATYLGRQARVRLVESEQIGIVGVGEASVPHMRTFNAQVLGLDEREFAHRTQATAKLGIAFEDWGRIGERYVHGFGTIGQSRGPLPFHQFWLKQFLGGRAEPIGAYSLQTVMAPLERFVPGVANAPAGSPLADIAYAYHFDAGLYAQYLRQVSEARGVERIEGRIVQVHQHPETGHVTSLTLDGGQQVEGELFVDCSGFVGLLIEQTLQAGYIDWSQWLRCDRALAVPCARSGPIAPYTRATARGAGWQWRIPLQHRTGNGYVYSSAYVDDDQAAATLLGHLDGAPQGQPRQLRFTTGMRRRFWQGNVVALGLAAGFLEPLESTSLYLAQSGISRLLALFPTRDFDPLLAQRYNRESAFEYERVRDFLILHYHATTREDTPFWRDCRTMQVPESLREAMELFAADGRYFRNGEDFFALPSWVQVMLGQGIVPRGYHPIVDDMPQEALARYVEGTRERLAEAVAAMPTHQQFLDRYWKAEAP

SEQ ID NO: 85983 - protein, 503 aa, Limnohabitans sp.
  REGION 1..503: note = tr|A0A0P0LJ20|A0A0P0LJ20_9BURK Flavin-dependent tryptophan halogenase PrnA OS=Limnohabitans sp. 103DPR2; OX = 1678129 GN=prnA PE=4 SV=1
MQNPLIQNIVIVGGGTAGWMTATALASVLRGKYNIRLVESDEIGIVGVGEATIPMIQRFNKVAGIDENEFLKATYGTFKLAIEFVNWGQVGDRYMHGFGPIGQDLWTVPFEQYWHKMRTAGKAADLGSYSITRAAARANKFMRPDLSVPNSPLGDITYAYHFDANLYAKYLRKLCEARGVVRTEGKITQVSQRASDGHVDAVVLASGERVEGDLFIDCSGFRGLLIEETLKTGYEDWTHWLPCDRALAVPCESAPQLLPFTRSTAHKAGWQWRIPLQHRIGNGHVFCSQHISEDEAAATLLSNLDGKPLADPRLIKFNTGMRKKAWNKNVIAVGLSSGFLEPLESTSIHLIQAAVAQLVEFFPDQGFSQIDIDTYNAQSRFQYERIRDFIILHYHANQRTDSEFWKACAHMRVPDSLKEKIALYQTHGRIFRFNEELFSQVGWLQVMEGQNLKPARYNPLVDLQDEGSIQEYLESVRNVIAKCVDFMPDHAEYIAKHCAAPAM

SEQ ID NO: 85984 - protein, 496 aa, unidentified
  source 1..496: note = Phenylobacterium deserti
  REGION 1..496: note = tr|A0A328AFP1|A0A328AFP1_9CAUL Tryptophan halogenase; OS = Phenylobacterium deserti OX=1914756 GN=DJ018_13885 PE=4; SV = 1
MQGQVVKKVVVAGGGTAGWMAAAALSRHLGSLLEITLIESDDIGTVGVGESTIPTARTFNALLGIDEREFMRTTQSTFKLGISFENWGQVGDRYIHSFGQVGKSTWMGGFHHFWLQAKAEGFAGDLGDYCFELQAAEAGKFATSENANINYAYHLDATLYGRFLRKMSEGKGVRRVEGKIRSVRQNAQTGFIEALVMESGEEVEGDLFIDCTGFRGLLIEQTLKAGYEDWSHWLPTNSALPLQTRSVGPAMPYTRAMAHGAGWQWRIPLQHRVGNGFVYCSDYMSDDEAQAQLLANVEGEVLTEPRVIRYKTGKRRKTWDKNCVALGLASGFVEPLESTSIHMIMIGILRLMQLFPFSGCSEALMDRYNEQADAELEKIRDFIILHYKVTERSDTPFWDRVRTMEVPEPLAHRIALFRDSGQVYQSPGELFQVDSWLQVMLGQRLEPKGYHHMGRLMPPAQLRQSLVDLKGNIDRAVNSLPTHQAFLEQYCPADAT

SEQ ID NO: 85985 - protein, 514 aa, unidentified
  source 1..514: note = Phenylobacterium deserti
  REGION 1..514: note = tr|A0A328AAS8|A0A328AAS8_9CAUL Tryptophan 7-halogenase OS=Phenylobacterium deserti OX=1914756; GN = DJ018_16595 PE=4 SV=1
MDRRRSILIVGGGTAGWLTAAYLAKFLEASGQGALTITVLESPEIGIIGVGEATFPTIRTTLQFLGIDEARFIRETSATFKQGIRFTDWARAPTDGRQSHFLHPFEAPLHPDGASLVPYWLLQDERDRAPFAEAVTIQARVAEARRAPKRPHEDAFTGPLSYAYHFDAAKLAALLTRRATSLGVRHLQDQVRQVQLDEHGAISQVVTDANGALEADLYIDCTGFRAELIGRALKARFKPVSRWLFTDRAVTAKVPYAQPDAPLESYTISTAHEAGWIWDIGLNGMRGIGCVYSSRHMSDERAEGVLRSYLGPDAEPVTRRIAFEAGYRERQWIKNCVAVGLSAGFLEPLESTGVVLIEAAAAMIAEFFPHNGPIDAPAARFNELMTARYDNIINFLKLHYCLSQRPEPFWLDNRDPASIPERLAQLLEQWRYRPPSRFDFNLDVETFAFFNYQYILYGMGFRTDLTPGRNDFPNVGAAEKVFARIRAYGERASQDLPGHRELIEQINAEAPLPA

SEQ ID NO: 85986 - protein, 504 aa, Caulobacter sp.
  REGION 1..504: note = tr|J3A751|J3A751_9CAUL Tryptophan halogenase; OS = Caulobacter sp. AP07 OX=1144304 GN=PMI01_03772 PE=4 SV=1
MRAAPVNRVVVVGRDAPLWLAASVVQAALGAAGVTVQAVELPSLLTAGDVHATLPAQEALHNMLRLDESALLRATGGGFSLGQNFTDVSGAAPALFHAHGSYGAPIDGKDFFPFWLKARGLGLGVALEDFSLTAVAARHGRILLPDEATEAYGRTDYGYHLPALAYAARLKTLASRQGVAAHQAVVAEAVLDPDTGDILALALDEGRRVEGQLFIDATGREGRLIGGALGVARENWRPYFPADRLLTASGPRFAAIPPYAEVRAWAGGWVGLYPSQARTHVVQAYSSATCGDDEALQAAAEVAGLGLGEAVVRTLDPGRRLAAWERNCVAIGEAACAFDPVHGVDLQAVQLGLVHLLSLFPAGGDAGVERTEYNDVMRLTFERVRDFQSAHYVLNRYGASAFWTQARAAAVSPELAHQIETFQARGEMPPFEHETFPTDSWRALFTGHGLRPETHAPMIDRTAPDLMKSEFRRILGFVKDQVLKQPTHDLYLESVCQGDGAHGR

SEQ ID NO: 85987 - protein, 487 aa, Sphingomonas sp.
  REGION 1..487: note = tr|A0A5B8LJA5|A0A5B8LJA5_9SPHN Tryptophan 7-halogenase OS=Sphingomonas sp. HKS19 OX=1813879; GN = FPZ24_12845 PE=4 SV=1
MTRVVILGRDAPLWLAACVLQAALRAAGVVVTAIELPSKLYPSDVYATLPGIEALHARLGLDERDLLRGTRGAFSLGQNIVDMLGGNPAFLNAYGGYGTAIDGADFFGYWVKGRDAGLPAGFEDFSLTAAAARQGRVMIPDEASEVYGRADYGYHLPAIAYAGGLKSVATRTGITVLSANHIAVERDETGDLIALVADGQRIAGDLFVDATGDDAALIEKTLGIAQDSWRTHFPVDRMFVARGPAFDPIPTYAELRAWHGGWTALYPGQAATHVVHAFASSLIGDEDALRGAGSASGLALSDAVLRPSDPGCRTEPWAHNCVAIGGAACALDPVHNLDLHALQLGLIALLTHFPAGADAAPSRAEYNRVMRGSFERLRDYQAAFYALAPFPGLFWHAGRAAEPPATLAHIIATFHARGELPPMEEDSIPFDHWRAMLTGLGVVPVSWPPRIDATDDAEVAAQFRRMLGFVKDAVSRQPTHAQALGHG

SEQ ID NO: 85988 - protein, 525 aa, Shewanella sp.
  REGION 1..525: note = tr|A0A2N1EPT6|A0A2N1EPT6_9GAMM Tryptophan halogenase; OS = Shewanella sp. ALD9 OX=2058330 GN=CXF88_09760 PE=4 SV=1
MMQKPITEIVIVGGGTAGWITAGLLAAEHNVDNGVLAHSPKLNITLIESPDVATIGVGEGTWPSMRSTLSKIGIDENDFIRQCDASFKQGSRFINWCADPQSKVTDSYLHPFSLPHGHQELDLCQYWLPHAEQVSFAEAVCSQQVLTQLGLAPKSIATAQYHFQNNYGYHLNAAKFSQLLTEHCTQKLGVTHIRDHVSQIINNDHGDIDKLITKQHGEISGQLFIDCTGAKSLLLGEHLQVPFLCQKSVLFNDRALAIQVPYPDANSPIASCTHSTAQSNGWIWDIGLPTRKGVGYVYSSSHTNDIDAQQTLFNYLGVDGAAADKLEPRQLTINPGYRAKCWQNNCIAIGMAAGFIEPLEASALALIEWTASTLAQQLPPNRMVMDTIATRVNERYQLHWQQIIDFLKLHYVISRREVDGYWRDHRESNSIPDSLQAMLELWRYQTPSQQDISYKEALFPAASFQYVLYGMGYNTQLPNHVKPSMQQLAQRLFNDNQQRTQALAKNLPSNRELLDKVAQYGFPKL

SEQ ID NO: 85989 - protein, 496 aa, Bowmanella sp.
  REGION 1..496: note = tr|A0A4Q9XQN5|A0A4Q9XQN5_9ALTE Tryptophan halogenase; OS = Bowmanella sp. JS7-9 OX=1605368 GN=TK45_03600 PE=4 SV=1
MTMHTIKRIIIAGGGTAGWMAAASFGKLLGKTLDITLVESDEIGTVGVGEATIPPLLTLHKLLNINEQEFMAATNATFKLGISFENWRNVDEDYIHSFGTTGKDCWAAGFQHFWMKGQQLGIAAEYGDYCPELIAAQQNKFALLNNHSINYAYHLDATRYAGFLRKIAEMHGVKRVEGKIDKVHKCQDSGNITALQLQSGQIIEGDLFIDCTGFRALLIEQALHVGYDDWTHILPCDSALAVQTTSVEEPIPYTRSIAHEWGWQWKIPLQNRVGNGVVYCSKYVSDDEAKARLLASVTGDCLTEPRLIKFKTGQRRKHWHKNCVAIGLSSGFIEPLESTSIHLIQRSIVRLLQMLPYNQIEQSDIDEFNQQTEHEVNNIRDFIVLHYHVTNRSDSPFWNHCRNMDIPASLQHRIDLFKRTGRVFKVPNELFGENSWVQVMLGQGLLPEQYHPIVDMMSEQELDEFLKHIQSNVQRLVAQLPSHQTFIQHYCPTRVA

SEQ ID NO: 85990 - protein, 506 aa, Luteibacter yeojuensis
  REGION 1..506: note = tr|A0A0F3L2H4|A0A0F3L2H4_9GAMM Tryptophan halogenase; OS = Luteibacter yeojuensis OX=345309 GN=VI08_04140 PE=4 SV=1
MANGTTNIVIVGGGTAGWMAASAFARTLNRQATIRLVESEEIGIVGVGEATVPHIKAFNQLLGLNEAQFVARTQGTFKLGIEFRDWNRLGDSYVHGFGTMGHDIGLLPFHQYWIKARLRGQAEDLLDYSVNTVAAMRGKFMPAPVDVPANNPLGSIAYAYHFDAALYARFLREFAEGLGVRRTEGKVQDVETNPENGHVTAVRLENGDRVEGDLFIDCTGFRGLLIEGTCRSGYDDWSHWLPCDRAMAVPCAKVGPPTPYTRSTARGAGWQWRIPLQHRTGNGYVYSSQYISDDEAAATVLGNLDGVALADPKPLRFTTGVRRQPWMRNVVALGLASGFMEPLESTSIHMIQSGISRLLQLFPATGDIDPVLVERYNAQSRFEAERIRDFLILHYKATERNDTPFWDHCRTMSIPDSLQANIDLFRHSGRFFRNAEEMFAMVSWVQVMVGQGIMPTGYHPMVDQMPDADLPKFMASVREVVSKNVDLMPTHEQFIARECPAPQVAA

SEQ ID NO: 85991 - protein, 506 aa, unidentified
  source 1..506: note = Planctomycetaceae bacterium
  REGION 1..506: note = tr|A0A2E7EHE3|A0A2E7EHE3_9PLAN Tryptophan halogenase; OS = Planctomycetaceae bacterium OX=2026779 GN=CMJ77_04840; PE = 4 SV=1
  VARIANT 105: note = Xaa can be any naturally occurring amino acid
  VARIANT 171: note = Xaa can be any naturally occurring amino acid
  VARIANT 220: note = Xaa can be any naturally occurring amino acid
  VARIANT 282: note = Xaa can be any naturally occurring amino acid
  VARIANT 308..309: note = Xaa can be any naturally occurring amino acid
  VARIANT 326: note = Xaa can be any naturally occurring amino acid
MGDNTHVKQILIIGGGTAGWMAATYLNRFLRQLGCKVTLVESPEVSTIGVGEATIPSLVRFVREMKLDEDDFMRRCNASYKLGIEFNDWVHPKHKYWHPFGICGXIIDRLDLFHFWHKALRNGRDVGPYSSYALQVLLCESLKAPRPLGGSSTIIQRGTYAYHLDAALLGXYLADIGVTEGVEQIFDSVQHVQLGDDGLIEHVDTESGRRLSADLYIDCXGFRAQLIEKSLGVPFVDWSHHLLCDRAVVVDLPTDTKARPYTRSAALPAGWMWQIPLSHRLXCGYVYSSAHTDEENAVRELLGALGEXXPFTDAPRYLRFPVGHRXDFWRGNCISVGLAGGFIEPLESTGIHLAQKGIETVLRFLPDQSLCPALIRQYNETMSNLYEEVRDFIVLHYILSKRDGDPFWRDSRNVPLPESLAKTLEIYDENGLVEMSRDSVFHEISFYHILCGGDRLPRRVLPLADISNFNAACEILGKIKLQNQGLADTLPSHQALMEWLHGDIDG

SEQ ID NO: 85992 - protein, 495 aa, Acinetobacter sp.
  REGION 1..495: note = tr|A0A2U3MUA9|A0A2U3MUA9_9GAMM Flavin-dependent tryptophan halogenase RebH OS=Acinetobacter sp. KPC-SM-21; OX = 2126983 GN=rebH PE=4 SV=1
MLDLRNAKQITVIGGGAAGWFAALVIRKIFHPGVAVKVIASEKIGIVGVGEGGLLNIVQTLNHLQIPTGEFIKETKANYKLGFRYKGWRTGLENDEYFHFFMNHRLVEMSEKYADIYPVMAAYIALGKELHKIIPIYQDIIKPIGFDEMTKHLLQTENQGGIGVSFHFDSFAVAEFLKKIAIQRHVVYEDAEVQDFEQDEQGNVCKIITDKGITQTDFIIDASGFKRILIGKYLKSDFESFEKYLILDKAIPYHLQHPKENPELITTATAFEAGWEWQIPLKDRIGAGYVFSSAHKTEQQAMDELEQRHGNKIELFKTLSFVPGIYKKVWIKNVVSVGLASGFVEPLEATSLGQTFEQLRSLGQVISQSGWLITDKNIEKYNEGNLLAWHGIRDFLRMHYDCTRKDNAFWQDISNLPYPDEYHELKQIMQQRTLREIDINHYIGKGWQGIFHVHNWSLVADGLGLISKQAAVNDLNLLPKEVAIKAFEQVQMKMT

SEQ ID NO: 85993 - protein, 495 aa, Sphingomonas sp.
  REGION 1..495: note = tr|A0A1S6FIF2|A0A1S6FIF2_9SPHN Tryptophan halogenase; OS = Sphingomonas sp. LM7 OX=1938607 GN=BXU08_06865 PE=4 SV=1
MTVPGIRDIVIVGGGTAGWMCAAALAHTLGGTDHRITLIESDAIGIVGVGEATVPSIREFNRLLRIDEDEFLRATKGSFKLGIEFVGWNGADQRYFHPFGYFGVDMSGIGFHHHWLRHIEQAGIEDPWHYNMEAQAASAGRFARETRHGPVNHAFHFDAGLYARFLRERVEGRGVTRIEGEIVDVALDSENGHVTSIALKSGARIDGDLFIDCSGFRGLLIEGALETGYRDWSHWLPCDRAVAMPCASTGQITPYTRATAREAGWQWRIPLQHRTGNGYVYCSRYLDDDAAAELLMSRLDGEPLASPNKLRFTAGHRNKLWHRNVVALGLAGGFLEPLESTSIHLIQTGIIRLLGLFPRNGIDPAVVDRFNADSILEYERMRDFVLAHYAVSSGVESPFWRDVRATPLPDSLSARLDAFRTSGNILNEPAEFFGQTNWFAILWGQGLRPRDRHPIADALPAQELDRRLTVLRQRFAEGLAEMPAHAAFLAGHCAS

SEQ ID NO: 85994 - protein, 503 aa, Sphingomonas sp.
  REGION 1..503: note = tr|A0A1S6FIX6|A0A1S6FIX6_9SPHN Tryptophan halogenase; OS = Sphingomonas sp. LM7 OX=1938607 GN=BXU08_07220 PE=4 SV=1
MSDTVIRSIIIVGGGTAGWISAAVLSRFLDPKRCSITLIESEEIGTVGVGEATVPLMQHLNGLLGIDEREFVKATQGSFKLGIEFRDWGSIGNTHFHGFGDYGDAIEGIAPHHHWLKLRGEGDSTPIDEYSLPSAMARRGRFAPPSPDPASQTSFYRYAFHFDAILYARFLRTYCEQRGIRRVEGRVVNAELEGETGRIAAVLTADGQRHAADLFIDCSGFRGLLIEETLGTGYEDWRHWLPCDSAVVAPSAPVGPPAPYTLSTAREAGWQWRIPLQHRMGNGYVYSTRFTDDARARDLFTANVQGKLLADPRVLRFTTGRRRKFWNGNCVAIGLAGGFMEPLESTSIQLIQTAIARLIDYFPDRNWDPRIADEYNRVTTSEFERIRDFLILHYCLTRREDAPLWDYCRTMELPDTLAHKIETFRAAGRVPLLAEESYQEPSWVAIFAGNGFLPDRYDPLVDRIDSEKLRAGLAQRRRLLVRAAEAMPPHEVFIQRCCPAEAA

SEQ ID NO: 85995 - protein, 463 aa, unidentified
  source 1..463: note = Xanthomonadales bacterium
  REGION 1..463: note = tr|A0A2M7X1E7|A0A2M7X1E7_9GAMM Tryptophan halogenase (Fragment) OS=Xanthomonadales bacterium CG_4_9_14_3_um_filter_62_6 OX=1974107 GN=CO182_08620 PE=4; SV = 1
GWMAAAVLAKAMGPQLAIRLIESDEIGVVGVGEATIPQIRLINQFLGLDEDEVLRQSQGTFKLGIQFNDWRRLGDSYLHAFGDIGLPLGMLAFHPYWLRARQTTATSADLWAYSLNAQTAMANRCARLGPAADSPLSGIKHAFHFDAMLYSQMLRRHCEGQSLHRSEGRIVDVRLRADDGFIESVVLASGETISGDLFIDCSGFRGLLIEGALKVGYEDWSHWLPCDRALAVPSARTAPMRPYTQASARAAGWQWRIPLQHRTGNGHVYCSRYLSDDEASAILLANLEGEALAEPRPLRFTTGRRRQFWQRNCVALGLASGFMEPLESTSIHLVQSGISRLLNLFPDRHCDAALSAEYNRQTTFEYERIRDFIILHYHASERSDTPFWRDCAAMSIPESLQRKIDLFSSSGAIVRDGEELFTEVAWLQVMLGQGICPRRYHPLADAISAAQLKEFLANIRALI

SEQ ID NO: 85996 - protein, 508 aa, unidentified
  source 1..508: note = Planctomycetaceae bacterium
  REGION 1..508: note = tr|A0A2E8AXX5|A0A2E8AXX5_9PLAN Tryptophan halogenase; OS = Planctomycetaceae bacterium OX=2026779 GN=CMJ62_04145; PE = 4 SV=1
MADENPNSPYRKVGIVGGGTAGYLTALALKKQIPHLEVTVVESESIPVIGVGEATTPLIVMFLHQGLGLDAAEFYRVVQPTWKLGIKFEWGLPGDYAFHYPFDRNDSWNAIQQTGDIRNGCLTSVFMKNDKSHMLRSAGGSKLTPIHNKTNYAYHLENECFIGYLRSKLKDAGVEMRLGTIQEVKLNEAGTAIDHLFSPELGNLSFDLYVDCSGFRSVLLEKAMGSKFISYADSLYTDSAWTVTRPNNGQPKPYTTAVTMDHGWTWIIPVRTEDHLGYVYSSGFCDDESALAEMKRKYPDAIDPKLVKFRVGRHEQAFVGNVMSVGNSFGFVEPLESTGIHMIISTILEFVRNFPKSDNDVTSRQTINTTTNATWDNIRWFLGVHFRFNKRFETEFWKTCREKVDISGFETIRQLFYEKGPFLENGIDENPDYRHLGRYTIFPWNAFDLFMLGQGELPHEVATKIPAKTRGDLANKAVVWDQIQLRALPQNEALAAIDTWPSLVGSRN

SEQ ID NO: 85997 - protein, 497 aa, Sphingomonas sp.
  REGION 1..497: note = tr|A0A1S6FIG9|A0A1S6FIG9_9SPHN Tryptophan halogenase; OS = Sphingomonas sp. LM7 OX=1938607 GN=BXU08_07125 PE=4 SV=1
MSEQVVKRVVIAGGGTAGWVAAAALVKQLGPLIDITLVESDEIGTVGVGESTIPTSRNFHQLLGIDEQAFMRATQATFKLGISFENWGRIGDRYIHSFGENGKRSTWMAEFHHFWLEARAQGFGGSLSDYCFELQAADAGKFAKADGLDINYAYHLDATLYARFLRALAEPAGVKRVEGKIARVEQHAETGFITALVLESGVRVEGDLFVDCTGFRALLIEQTLETGFEDWTRYLGTNSAFAVQTRSTGPAIPLTRAIAHEAGWRWRIPLQHRVGNGIVYCSDFMSDEDARAKLLNDIEGEPLTEPRLIRYRTGARRKVWNKNCVALGLASGFIEPLESTSIHLVKVAVTRLIQSFPFGGCHEAAADRFNAQSRQEIEGIRDFITLHYHLTQRDDSPFWDRCRTMEIPDSLAQRLALFRGDAHAWQDGIDLFRVDSWVQVLLGQGLAPESHHRLAKMMNPSELRQALGALKANIDGAVARLPAHQDFLARYCPAGDA

SEQ ID NO: 85998 - protein, 512 aa, Pelomonas sp.; identical to SEQ ID NO: 84495
  REGION 1..512: note = tr|A0A0Q8GD62|A0A0Q8GD62_9BURK Tryptophan halogenase; OS = Pelomonas sp. Root662 OX=1736580 GN=ASD88_19315 PE=4; SV = 1

SEQ ID NO: 85999 - protein, 462 aa, unidentified
  source 1..462: note = Rokubacteria bacterium
  REGION 1..462: note = tr|A0A2V6RY24|A0A2V6RY24_9BACT Tryptophan halogenase; OS = Candidatus Rokubacteria bacterium OX=2053607; GN = DME16_21815 PE=4 SV=1
MASAWDFDVAVIGGGPGGSSAATALARRGRTVLLLERDRFPRFHIGESQLPWSNEVFRALDVHDAIAEAGFVKKWGASFRTVDGATEQYADFQFAAETPSPQTFQVPRATFDEVLLRHSERSGAKVLEEHRALDAAFEPDGVVLRFVGPDGTEQAVRVGFVVDASGRTGFLTKKLGHHEFDPVLRNIAVHAQYEGIPRLEGRRAGDIRMFTRADMGWIWLIPISQSVTSVGAVIPQSVHRRESKAVPEDSLTHYLTGTAGLAPLLAHARRVSPARFDADYSYLGSSLAGDRWIAVGDAAAFLDPIFSTGVLLAMQAGLEAAEAIDDSLREGEPARHRFAACERLVRQRYHHFRRFAVGFYDPYFRDLWFRPASRLGIFGAILSVLAGNWRPSWMTRQRIRLPSSAGASRSAWGGGPMPSSRIPGAAISAPSRSDPMSTAVPRSGSGTTWSSCSWPRGSSACP

SEQ ID NO: 86000 - protein, 509 aa, Pelomonas sp.; identical to SEQ ID NO: 82577
  REGION 1..509: note = tr|A0A0Q8GGZ6|A0A0Q8GGZ6_9BURK Tryptophan halogenase; OS = Pelomonas sp. Root662 OX=1736580 GN=ASD88_16495 PE=4; SV = 1

SEQ ID NO: 86001 - protein, 521 aa, Altererythrobacter sp.
  REGION 1..521: note = tr|A0A2E6K871|A0A2E6K871_9SPHN Tryptophan halogenase; OS = Altererythrobacter sp. OX=1872480 GN=CL575_06745 PE=4; SV = 1
MAVMQTSSHTTGDSAAPLNVAIAGGGTAGWMAAAALARLTACKVTLVESDAIGTVGVGEATIPQIRLFNRGLGIDEAEFLRETKGTFKLGIEFDGWRKAGTSYMHAFGNVGAGAGLLPFHHLWLRGRELGSAKDFGAYSLNEAAARAGRMQTWPADKAPQPDMPWAYHFDATLYAAFLRRFAETRGVTRIECRIETVERGGESGDIAALVLDGGRRIEADFYIDCTGFRGLLAGDMPVQGFEDWSHWLPCDRAMAVPCKTGGEFTPYTRAAAHTAGWKWRIPLQHRIGNGLVYCSDYLADEEAEAQLLADLDGEPLGDPRTMRFTTGMRRAPWSGNCLALGLAAGFMEPLESTSIHLIQSGIARFLSMLPRPGMEAAMADEFNRQSAFEWSAIRDFLILHYAANERSGEPFWDRARAMDLPASLATRIELFRSTGYLSREHDELFTEAGWTQVLLGQGILPRATHPNADALGPAALERLLAGIESDIADTVGAMPGHAQFLRSYCMPQTANRPAATKETAR

SEQ ID NO: 86002 - protein, 497 aa, unidentified
  source 1..497: note = Erythrobacteraceae bacterium
  REGION 1..497: note = tr|A0A4V2MM98|A0A4V2MM98_9SPHN Tryptophan 7-halogenase OS=Erythrobacteraceae bacterium CFH 75059; OX = 2528174 GN=EYB45_07120 PE=4 SV=1
MTDGVRAPDCVVLGGGSAGWIAACLLHQAFAGRGATVTLVENPEIGIIGVGEGSTPQLKAFFDRLGVDEAEWMAACDATFKLGIRFHGWSKRPGFSHYIHPFPSPVDLHTEPPYTRVCAAARRGAAVDFAHPDDWFLASRLALAGLSPHAADSFPFAPSHGYHFDAYKLGAYLRGWATSRGVRHVRAEVAAVECAGDERIGALVCADGTRLTADMFVDCSGFRSELMQKTLGEPFIAFDDNLFVDRAVVMATPPPGQATPLTEAIAMRAGWRWRIPLQSRCGNGYVYSSAFVSDDEAEHELRQALGMLSAGETRRLRMKVGRVRQSWRGNCLAVGLAQGFIEPLEATALHIVIHTVERFIAAWAPDAGPDRLRAFNEAVATRYDGIRDYIVAHYRLNQREGNFWRANASNHSLSEPLKQVITAWFTHADLRQRLAEIYGPHSAYSSASWHCLFAGYGTFPTRPQPVPHDMTMAGEALATVQTMLAACARNFGPLEAS

SEQ ID NO: 86003 - protein, 480 aa, Xanthomonas translucens
  REGION 1..480: note = tr|A0A199P2G0|A0A199P2G0_XANCT Tryptophan halogenase; OS = Xanthomonas translucens pv. poae OX=227946; GN = A6R73_17910 PE=4 SV=1
MAAAALVRVLGAGATRITLVESEAIGTVGVGEATIPPIALFNALLGIDENAFLRATQGSFKLGIEFVDWLQPGQRYFHPFGTYGVDFGTVPFDGLWQRMHRAGRAAPLAAYSLNTLAAMRGRFMRPQQGDALLSRLGYAFHFDAALYARLLREYAEGRGVTRLEGKVEQVLRRSPDGAIASIVLACGTRIDADFFIDCSGFRGLLIEDAPGAGFVDWSHWLFNDRAVAVPSARASAFMPYTRSTAREAGWQWRIPLQHRTGNGYVYSSDYLSDDAATATLLANLDEQILAEPRTLRLRAGRRALFWSGNCLALGLAAGFLEPLESTSIHLIQAGIARFLEMLPDRAGNPADIRRYNRLMAQEFDSIRDFIILHFHATARPGAYWERARTMPIPDSLAERLQIFAHSGRVFREADELFSKTSWLAVMQGQGLSARGFDPLAAAMPDAEAAARLQRVAAAAAMAVERMPTHADVIRAHCAAT

SEQ ID NO: 86004 - protein, 443 aa, unidentified
  source 1..443: note = Caballeronia arvi
  REGION 1..443: note = tr|A0A158GCC4|A0A158GCC4_9BURK Tryptophan halogenase; OS = Caballeronia arvi OX=1777135 GN=AWB74_01291 PE=4 SV=1
MSETQQQTWDVVVIGGGPAGSTAATLLADRGYRVRVLEKARHPRFHIGESLLPANLRLFERLGVADEVRAIGMVKLAAEFVSPQHDNRLQRFMFADAWDKSMPSAYQVRRSELDEILLRNAAKHGAHVSEGCRARDVAFATDHSSATISAEHDDGRIEEVRARFIVDASGRDTLLANQFKTKRRNARHNSSALYGHFSNARRNAGQNEGNITVFWFEHGWFWFIPLADGATSVGAVVWPTYLKRRPKGTTVEAYFRETIALCPPLAERLSDAELISEVHATGNYAYTGDMTHGRNFLLLGDAFAFIDPVFSSGVMLAMQSAFAGAEAIDGALSNPADAPAALAKFDRDVRHGPREFSWFIYRMTSPTMRNLFMGPRNPLRMKEALLSLLAGDIFGTTPIWHSLRAFKGIYYVTAALDWRNSLRAYRMRKRNLSDAERAELSAN

SEQ ID NO: 86005 - protein, 480 aa, unidentified
  source 1..480: note = Synechococcus phage
  REGION 1..480: note = tr|A0A0E3HW58|A0A0E3HW58_9CAUD Tryptophan halogenase; OS = Synechococcus phage ACG-2014c OX=1079998; GN = Syn7803C97_192 PE=4 SV=1
MKIVIVGGGTSGWMSAAALCKTFPKWNITMISNGESIGVGESTTPHFDQYLKYMDISDEEFIAASRATFKSSSRFEDFASVGSVFHYPNGQFQPENDYNEWMIAKEYFSDNLPSFAEVFMPFVTVAEQGKLPLKDPILGEYCLSKDRSFHIDAFSFVNYLKNRFCKDVKCIKGKVKKVNRSIGIDNIVVDGTKVSADLFIDCSGQNSILTNSEYIKYNTILTDTALVTRTEYTDKDKEMVSYTNAKGMTAGWQWTIPTWDFISRGYVFSSQFQSQDAAAYEFGYDDFKVVNFKNGRRVDAWVDNCISIGLSYGFIEPLESTGLFNTHHGILALLDILREGTLPARFARDRYNFNMAEHMDGWREFVEAHYYYSSRRDTRFWRAVSEVEYPIKGAHADIQQIMLSGDGFPPEHMPIVYILAGSGYTNVNKRLVEYFKPSFPIGQRKVDAWIQKYGRILRHSENLPTMHQHLSKYFYSNLGA

SEQ ID NO: 86006 - protein, 485 aa, unidentified
  source 1..485: note = Sphingomonadaceae bacterium
  REGION 1..485: note = tr|A0A419MYY8|A0A419MYY8_9SPHN Tryptophan 7-halogenase OS=Sphingomonadaceae bacterium KCTC 52944; OX = 2339262 GN=D5I55_07850 PE=4 SV=1
MSAALLSRFSENGYKVILVESEDIGTVGVGEATIPQINLFNTALGIDEDEFVRETQGTFKLGIEFVDWHRKGAAYMHAFGAVGRDIGIVPFQHYWHRARSLGKAKDLRHYALNEMAALDGRMQRGPLRTTDRLGDMPYAFHFDAGLYAAYLRRYAEARGAQRIEGKITTADLDPETGHVTCVRLEDGQSVSADYFIDCSGFRGLLIEEALKTGYDDWTHWLPCNRALAVPCAHGSGEIAPYTRSTARDAGWQWRIPLQHRIGNGYVFCSDFISEEDARATLLANLDGAAQAEPRLLKFVTGKRRKFWNKNVIAVGLASGFMEPLESTSIHLIQSSLSRLLKMLPGKQVNPAVADEFNRQADFEFERIRDFLILHYKATERDDTPFWRHCRDMAIPDTLTAKIELFRANGHIFREHEELFTEVGWLQVFVGQGVLPEGHHPLADDVEEKDLADYMETLELLIAREVRQMPSHMDFIRKHCSAKAAA

SEQ ID NO: 86007 - protein, 498 aa, unidentified
  source 1..498: note = Verrucomicrobiaceae bacterium
  REGION 1..498: note = tr|A0A4Q2XIQ3|A0A4Q2XIQ3_9BACT Uncharacterized protein OS=Verrucomicrobiaceae bacterium OX=2026800; GN = EOP88_04865 PE=4 SV=1
MIQNLLVLGAGSAGLIAAISLKKKIPQLNVRVVRSKSIGVIGVGEATTPNFPRHLFEYLGIPRKRFYSLARPTWKLGIKFLWGERGSFDYTFNLQLDTKWSDLKQPTGFYCDDDFDNASFPGALMNHNMAFPRQENGAPDIHEWHAFHIENKLFVQVLEDVAREYGIEFIEGDVESVEKGPQGIAALHLKDGQRVAADFFVDASGFRSELMGKALEEPFFSFNKSLFCDRAVVGGWDRRPGEAILPYTVAETMDSGWCWRIDHEKVIHRGYVYCSGAVSDDDAREEFLRKNPQNTEEPRIVKFRSGCYERQWVQNVVALGNSGGFVEPLESTGIMMLCSHTQTLVDFLTHTNLNPTDTIRDLYNDLTVNGWKDVRDFLAIHYKFNGKLDTPFWKQTREDCDVSGVAELIKFYQENGPTGFCRYRLPNTQTDFGLEGFLVMFVGNKVPYKNRYTPTAQEKQIWNARKLEYIEKAKRSLTSEEALAYVHHPGWKWNADPE

SEQ ID NO: 86008 - protein, 517 aa, unidentified
  source 1..517: note = Rickettsiales bacterium
  REGION 1..517: note = tr|A0A2E3I7F8|A0A2E3I7F8_9RICK Tryptophan halogenase; OS = Rickettsiales bacterium OX=2026788 GN=CMP20_06720 PE=4; SV = 1
MAQAIKSIVIVGGGTAGWITAGTIAAKLQSEHADGFNITLVESPDVKPIGVGEGTWPTMRRTLKAMGVRETDFIRQCNVSFKQGAKFAKWVTGAEDDFYYHPLVLPQDFDSTNLARHWMERPFEQSFSQAVSPQEAVCEVGLAPKSIATAEYTSIINYAYHLDAGRFSAFLQQHCTEKLNVRHVLDNITAINAAENGDIASVSTTTNGDIGGDLFIDCTGFKSLLLGEHFKVGFKSCKDVLFVDQALAIHVPYESEDAPIASHTISTGQSAGWVWDIGLQNRRGVGHVYSSAHTTEEQASEELLNYIAQTGGHVNEADIRKIPLNPGHRVKFWHQNCVAIGLSAGFLEPLEASSLLLMEISASMIADQFPATRDAMEIVAQRFNRTFLYRWDRIIDFLKLHYMLSKRNDSAFWIDNRDSASIPQSLQDQLTLWQYQPPWHNDFEHAIEVFPAASYQYVLYGMGFDTQASALGMSEVYKQKASSLRQKNTQQIQQMLKTLPSNRALINKIHQYGLQKV

SEQ ID NO: 86009 - protein, 512 aa, Lysobacter capsici
  REGION 1..512: note = tr|A0A108UBM5|A0A108UBM5_9GAMM Tryptophan halogenase; OS = Lysobacter capsici AZ78 OX=1444315 GN=AZ78_3686 PE=4; SV = 1
MHNDAERGASATRPIKRVVIAGGGTAGWMAAAAISKIFGATLQISLIESEEIGTVGVGEATIPTLSTFHRLLDIDEREFMAATQGAIKLGISFENWTTEQHRYIHSFGSTGKDHWSAGFQHFWRRGRELGLAGSYDDYCVELQAALQGKFAHLKNYRMNYAYHLDASLYARFLRTMSEGNGCRRIEGKIVEVLTDADSGYITALRLERGEVIEGDLFIDCTGFRALLIDKTLGVGFEDWSHWLLNDSAIAVQTTSVCDPVPYTRAIAEQWGWQWRIALQHRVGNGIVYSSRHVGDDEAKQALLGSVDGEILKNPWPVRFRPGRRLRCWSHNCIALGLAGSFIEPLESTTIHLIQRGITHLIRSFPQVISQAGVDEYNTQMADELQHVRDFVVLHYHATQRRDSPYWEYVSSMTLPDTLRRRIELFRETGTVFHVPGELFAENSWIQVMMGQGVTPKTHHPTADTMSEADLRRFLDDIRNHVDTTVRALPSHQAYLSQYCPSAPRATVPAHVA

SEQ ID NO: 86010 - protein, 505 aa, Sphingomonas sanguinis
  REGION 1..505: note = tr|A0A147IKA8|A0A147IKA8_9SPHN Tryptophan halogenase; OS = Sphingomonas sanguinis OX=33051 GN=SB4_17315 PE=4 SV=1
MDKPVTRIVIVGGGTAGWLAACRIAAATMGSVTVTLIESPDVPTIGVGEGTWPTIRRTLERIGIGEAEVLLACDGSFKQGTCFDGWTTGVDDDRYYHPFVPPIDVDPADLPGDRPFAFTACAQPQVCVENLAPRQPAMPDYGGALNYAYHLDAAKLATLLARHATTRLNVRHVRDHVVSVDRVESGDIGAVTTRQSGAIAGDLFLDCTGRRGLLIDETLGAELIDASSVLFNDRALAVQLPVTPDSPIASQTMATAHAAGWIWDIGLPTRRGIGCVYASAFMSDDQAEGILTDYCRRIALESPAPRRLSFRSAYRAQPWTANCLAIGQSAGFMEPLEASAIVMIELSLDALLDDFPVDRKVMAIQAQRFNALARYRWERIVDFLKLHYVLSQRDEPYWRAHRDPASIPDRLVEALVLWRHRAPSALDLPMQEELFPAASYRYILWGMGFPAPLPSPVRRAARPDLPNQLRQIDQRARALTASLPTNRAYLDALRAEQAPLAERIA

SEQ ID NO: 86011 - protein, 505 aa, Brevundimonas sp.
  REGION 1..505: note = tr|A0A0Q5V9L0|A0A0Q5V9L0_9CAUL Tryptophan halogenase; OS = Brevundimonas sp. Leaf363 OX=1736353 GN=ASG17_11425; PE = 4 SV=1
MQTEAIEDILIVGGGTAGWMTAAALAKGLKGSARITLVESEDIGTVGVGEATIPAILLFNCMLGLDEDAFVRETQATFKLGIEFRDWGALGDRYFHPFGRYGSDLEKMSFHQHWLRQRALGETHPLADYSLSTQAAAAGKFVRPVDDPKNVLSRIAYAFHFDAGLYAAFLRRFAEGLGVTRVEGRIADVRVADDGAVTGVALADGRTLDADFFIDCSGFRGLLIEQALKAGYEDWSHWLPCDRAVAVPCESSGPPTPFTRSTAREAGWQWRIPLQHRIGNGYVHCSRFISEEDATATLMSNLDGRPLADPRTLRFTTGRRRASWVKNVVAIGLASGFLEPLESTSIHMIQSAIARLMTLFPDRRFDPAVTAEYNRQTRIEAEQIRDFIILHYHATARVDSPLWDHVRTMEPPESLRQKIDLFRSSGRFFRDGDELFSETSWAAVLTGQNVIPERFDPMAATHDPQMMAAKMARMRDVIGRAVADMPSHADYIARHCRAPHVAFAA

SEQ ID NO: 86012 - protein, 495 aa, Brevundimonas sp.
  REGION 1..495: note = tr|A0A0Q5V197|A0A0Q5V197_9CAUL Tryptophan halogenase; OS = Brevundimonas sp. Leaf363 OX=1736353 GN=ASG17_04620; PE = 4 SV=1
MTQPKRTRVVIAGGGTAGWLAAALLTRQLGPLLDVTLVESEQIGTVGVGESTIPTVTRFHALIGVEERGFMTATGATFKLGISFEGWGRTGDRYIHSFGDVGKSTWMGDFQHFWLEARDRGVAGALGDYCFEHQAADAGKFAAGGDGRLNYAYHLDAGRYARFLRAHSEAAGLTRVEGKIETVERDAGSGVITALALDGGRRVEGDVFLDCTGFRGLLIGDAMGVGFEDWGHWLPTNRALAVQTVSTEPAAPYTRAIAHDAGWRWKIPLQHRVGNGLVYASDHLSDDEAQARLLSSIDGERLIEPGLIRFRTGRRLKTWEGNCIALSLAAGFVEPLESTSIHLIMTGLARLVQAFPFDGISPAVVDRFNAQSREEMERIRDFIVLHYHLNQRDEPFWKAHRENDVPQTLKDRLALFGEQAQAYQAPDELFRVGSWMQVMLGQNLTPRAHHAMARMMPTDQLAGALADLKSNIDRAVDRLPTHQAFVDSYCAEAVA

SEQ ID NO: 86013 - protein, 165 aa, unidentified
  source 1..165: note = Verrucomicrobiaceae bacterium
  REGION 1..165: note = tr|A0A4Q2X2R5|A0A4Q2X2R5_9BACT Tryptophan halogenase (Fragment) OS=Verrucomicrobiaceae bacterium OX=2026800; GN = EOP88_26985 PE=4 SV=1
MSNAEGMRGMIRTIVVVGGGSAGWLTACRLAARSVGMGSGIKVLLVESATVPSVGVGEGTWPTMRNTLRKIGIDETTFIRSCDVALKQGARFVGWTDGSADDAYYHPLNPPAGAGDVDLAPYWLGLPDAKAETDADGASFADWVDYQSALCDAGLAPKTITAPEY

SEQ ID NO: 86014 - protein, 507 aa, unidentified
  source 1..507: note = Stenotrophomonas panacihumi
  REGION 1..507: note = tr|A0A0R0AQ83|A0A0R0AQ83_9GAMM Tryptophan halogenase; OS = Stenotrophomonas panacihumi OX=676599 GN=ARC20_04060; PE = 4 SV=1
MDNSRRIRKVVIAGGGTAGWLAGCALSHQFGDQLEITLVESELIGTVGVGESTVPPIRAFHHFLNIDEQEFLRAVAGTFKLSISFENWRRHGERYIHPFGMTGQNTLVCHFHHYWLDSLRRGMKSELGDYCLETVASRDDRFALGTQPQVNYAYHFDAGLYARFLRARAEKQGLVRIEGKIQQVHQDSHSGDVTALTLEDGQRIEGDLFIDCTGFRGLLTEQTLHTGYEDWNQWLPSDRAVAVQTESVGPPVPYTRAIAHEAGWRWHIALQHRVGCGLVFSSRHMSDDEARAKLLRDVGAPAIKEPWLVPFRSGRRLKAWNHNVIALGLASGFIEPLESTSIHLTISAVVRLLQLFPSNGGEESLRALYNEVSQKEMEHVRDFIILHYHATQRDEPMWKAAREMELPESLAIRLRAWRERAHAWQGTDELFRVDSWTHVLLGQGITPGAPHPLAGALSDADLSRLLTAVRQPIDRAVAQMPSQQGFIDRYCKAPPEVWGARRPMATA

SEQ ID NO: 86015 - protein, 500 aa, unidentified
  source 1..500: note = Rickettsiales bacterium
  REGION 1..500: note = tr|A0A2E6MRA1|A0A2E6MRA1_9RICK Uncharacterized protein OS=Rickettsiales bacterium OX=2026788; GN = CMP33_04510 PE=4 SV=1
MKICVVGGGSAGWITLSYLVATVDADITIVHSDEVDPIGVGESTTPTIKHIADTVGVDEKVWMKDAKATFKYGVEFHNWNKKGSRWFHTFDDLVPHQVFHKPMCDNGKQNHKKELSSVDYYINHKKGKGDSIEYNDYHGPMEYLLTEGLSPFSKNGNCTISDYPGYSYHINAFQFGESLRKHTAKDKFTEIVGTVNKIHTEKQNISAIELSTGQKIEADIFFDCTGFKRLLIGTMSSWKHYDDLINDRAIWGTIKTQSFKPVTQAHAQPYGWIWEIPTVGQIGSGYVYSSKHQKYDDALKTITEFWKSKGHKFEPFKSVEFDAGMLENVSKHNVVANGLAQSFIEPLEATSVMVTCTTVKAFVDLYKKGSKNLVKAHDKVMQKFILHTKHFVHMHYRLSERNDTSYWREVGNDPNVVQELCDYADTFKNARWCETGDTKFNQFNLISLLFGYEKDYVNEIEKIDDELLENYNHYTKAMMEHYLFLIRNNLTVEQYLNSLD

SEQ ID NO: 86016 - protein, 503 aa, unidentified
  source 1..503: note = Xanthomonadales bacterium
  REGION 1..503: note = tr|A0A2H0HSE5|A0A2H0HSE5_9GAMM Tryptophan halogenase; OS = Xanthomonadales bacterium CG17_big_fil_post_rev_8_21_14_2_50_64_11 OX=1974109; GN = COW59_07120 PE=4 SV=1
MENADRAIRSIVILGGGTAGWMTAASLANTLGSNCRIELIESEAIGIVGVGEATIPPIKLFNHALGIDENVFLKASKGTFKLGIEFVNWTRLGQRYFHPFGQFGAEFDSVPLYQYWLRERARGDDTPLQDYAMAWVAARDNKFAPPLADRQRIQSTYDYAYHFDAGLYAQFLRVYAEARGVRRSEGKVVDVALRAEDGFIQSVKLDAGSVIEGDLFIDCSGFRGVLIEDALHTGYENWQHWLPCDRAVAVGCTHGSGPLTPYTRSTAHQAGWQWRIPLQHRMGNGHVYCSQFSSDDEATAVLLANLEGEPLATPRPLRFTTGRRKAFWNRNCIAIGLAAGFMEPLESTSIHLIQSAIARLLALFPDRHCEPLLAHEYNRITGQEYERVRDFLILHYKAVARDDAPLWRYTAAMNIPDTLRYKIDQFRSSGRIVAEPLELFQNPNWLAVLIGQEVWPQHYSALVDLRSAVDAPRLLASLRRVSAQASAALPDHAHYIAQHCRAG

SEQ ID NO: 86017 - protein, 504 aa, Brevundimonas sp.
  REGION 1..504: note = tr|A0A0Q5VCS6|A0A0Q5VCS6_9CAUL Tryptophan halogenase; OS = Brevundimonas sp. Leaf363 OX=1736353 GN=ASG17_12270; PE = 4 SV=1
MPANKIRDIVVVGGGTAGWMCAAALSKVMGTEQYNLTVVESEQIGTVGVGEATIPMILLFNQVLGIDEDEFVRETNGTFKLGIEFVDWRRLGHSYFHPFGLFGQDMDGVPFHNFWLRWAKSGGANADSGRFNAETEAARLNRFMRTPDTQNGALPRINYAYQFDAARYAAYLRRFSEKRGANRIEGKITQVHQNPTDGFITSVELEDGQQIRGDLFIDCTGFRGLLIEQTLKAGYDDWSHWLPANRAVAVPCAKSGDMTPYTRATAREAGWQWRIPLQHRTGNGYVFSSEYISEDEATAKLMSRLDGEPLAEPRVLRFVTGRRKKSWDKNVIAMGLAGGFLEPLESTSIHLIQVAISRILAYFPRDFIDPKLADQFNRDMAFDYDNVKDFLIAHYKVTEREDTPFWAYCKHMDIPEALKTRLQIFQERGDAMVRQYELFKEGSWWAVLSGQGMIPDSYHPVADVISEEDLRQRLSRIRTAIQDRVNAMPVQEAYLRDAKLSATA

SEQ ID NO: 86018 - protein, 507 aa, Sphingobium ummariense
  REGION 1..507: note = tr|T0IZK0|T0IZK0_9SPHN Uncharacterized protein; OS = Sphingobium ummariense RL-3 OX=1346791 GN=M529_00930; PE = 4 SV=1
MTCTRRILIVGGGTAGWLTAAYLARFFSLAGHGGIEITLLESPELGIIGVGEGTFPTIRATLSFLGIDETQFLRATSATFKQGIRFDDWLHAPAPDGTRHHYLHPFEAPLYTDDANLVSCWLHKDSESRPRFAEAVTIQHGVAESRRAPKKFDEGAFSGPLNYAYHFDASGFARVLRDRAVELGVRHVTGLLTGVEPDADGGIARVLTREHGALEADLFVDCSGFRAELIKKALGAPLKSVRHLLFTDRALACKIPYAAPDAPIESFTIATAHAAGWTWDIGLESARGIGCVYSSTHMTDDEAAEVLRGYIGHDAYKARIIPFEPGYRETQWVKNCVAVGLSGGFLEPLESTGVLLIEAAVAMLAELFPLAGPIDAPAKRFNELIVGRYERIIDFLKLHYCLSRRDEPFWRDNADPASIPETLQELLRQWRYRPPNRFDFLLDLESFAFFNYQYILYGMDFRTTLGERADELPSAAADRLFARIRGFSLQATRELPTNRALMRQINA

SEQ ID NO: 86019 - protein, 547 aa, unidentified
  source 1..547: note = Rickettsiales bacterium
  REGION 1..547: note = tr|A0A2E3M8F0|A0A2E3M8F0_9RICK Tryptophan halogenase; OS = Rickettsiales bacterium OX=2026788 GN=CMP19_13085 PE=4; SV = 1
MSNQPIKHVVIVGGGTAGWLCAGVLAARLGNRIGNSDESAINITLVESPNVPSIGVGEGSWPSLRDTLQEIGIKEADFLTCCHASFKQGSTFAGWRNGHQGDKYQHPFTTPTGYTELDIHRCWQQFFSSESFEQSFCLQPDICHAGLAPKQNSTPEYAYVLNYGYHFDASALATLLTNHCKTSLGVKHTQAHIANVVTQDNGDIESLVTENGDTIKGDLFIDCSGQQGLLIDKHYHVPWHSVSSVLLNNRAVAVQVPYGSIDLSASADTIASTTIATAQTCGWTWDIGLQHRRGVGLVYASDYASEENAESILREHLAKRLPQSELENLTYRHLQFDPGYRKQFWVNNCIGMGMSAGFIEPLEASAIAMVELGIRMLCDQFPQNRQHMSHVASRYNQRFTYRWERVIDFLKLHYVLSEREEPYWLAQRSESSIPDSLNALLDLWQYQAPSRYDLIENEEIFPSASYQYILYGMGFHTTGRQLDKNSNMVKKAFALKQSLQKGKRQLLAGLPTNRDLLTAISHCVEKETTTNDNDKKEGPRHDVIGFR

SEQ ID NO: 86020 - protein, 508 aa, unidentified
  source 1..508: note = Rickettsiales bacterium
  REGION 1..508: note = tr|A0A2E3IBK6|A0A2E3IBK6_9RICK Tryptophan halogenase; OS = Rickettsiales bacterium OX=2026788 GN=CMP20_14160 PE=4; SV = 1
MSKAVKKIVIVGGGTAGWLTAAIVAAQHKTDDNNGLQIILVESSDIPTVGVGEGTWPTMKNTLQQIGLKESEVFARCHAGFKQGGKFVDWVHGNGDFYYHPFTVPLGYGRIDLAPYVEKIENYAVESNFQHHICEAGLAPRSMAEAEYKGQCNYAYHLDAGEFAEVLKEHCRNNLNVTQIIGTVDRVNLSDDGAIASITLKSDEQIDGDLFVDCTGFASLLLGQALEVPFICADKVLFNDSAIALHMPYDDATSPIATHTIATGQNAGWIWDIGLTHRRGVGHVYSSQYLSDDEAEANLRRYLGSGSDDIPVRKIGFKSGHRAQVWKKNCVAVGMAAGFVEPLEATAIMLVEISARFIADNIPPDTSLTPIIEKRFNQQMAYRWSRIIDFLKLHYMLTKRPEPYWQAHTDPDSIPESLQEDLALWKFRGPITSDFDAAIELFPAASYQYVLYGMGFKPDFSRQPHLYNEQANAQKIIHRNQQLTQQLLQTLPPHREYIERWLSTQSMR

SEQ ID NO: 86021 - protein, 505 aa, Sphingomonas sanguinis
  REGION 1..505: note = tr|A0A147JE62|A0A147JE62_9SPHN Tryptophan halogenase; OS = Sphingomonas sanguinis OX=33051 GN=NS258_00265 PE=4 SV=1
MTKVTEDGVRVVIVGGGTAGWMAGAALTRLLSGQCSVRLIESEAIGVVGVGEATLPHIRAFNERLGIPEAEFMARTRATFKLGIEFRDWGRIGDSYIHPFGTFGRGTGAIDFHHYWARLMREGHDLPPLDALSYACALARDARFDHPDQTRGGLSSTFGYAYQFDALLFAPYLRGLAEEAGAIRTEGMVVDVERDGETGLIRSVTLADGERVEGDLFIDCSGFRSLLLGQTLEEPFEDWSKWLPTDRAVAMPCRTETAVTPYTSAIAMPAGWRWRIPLQHRTGNGYVYASDFISDADAARALEEAVEGEPLAEPRLLRFKAGRRRRSWIGNCVAVGLASGFLEPLESTSIYLVQQAITALIELFPGREIAASDRDEFNRVIDLEYDRIRDFLILHYHATTRDDSPFWNYVRTMPIPDSLAEKMELWRRRARVVKYREGVFLDASWIAVYLGQGIVPEGWDPRADVAGTPDLLRAVTDLRAEIAADVGARPEHRAFLEHYCPMVAA

SEQ ID NO: 86022 - protein, 287 aa, Sphingomonas sanguinis
  REGION 1..287: note = tr|A0A147IJY4|A0A147IJY4_9SPHN Tryptophan halogenase (Fragment) OS=Sphingomonas sanguinis OX=33051 GN=SB4_18185; PE = 4 SV=1
MVQPVQHIVIVGGGTAGWLTAGVIAARHQGRRPHGFTVTLVESPNVPIIGVGEGTWPTLRATLKTMGVSETAFFRECDASFKQGARFNRWTTGAAEDGYYHPLMLPQSFGQVNLASHWLAGEGDASFCDAVTPQGRICDAGLAPKTIATPEYEALANYAYHLDAGKFADFLRRHCCEQLGVRHVLADVEEVLLAESGDIRAVRTAQAGEVTGDLFVDCTGFRSLLLGEAMGVPFRPLNDVLFCDTALAIQVPYDDPEAPIASHTISTAQSSGWIWDIGLPTRRGVGQ

SEQ ID NO: 86023 - protein, 534 aa, unidentified
  source 1..534: note = Glycomyces artemisiae
  REGION 1..534: note = tr|A0A2T0U838|A0A2T0U838_9ACTN Tryptophan halogenase; OS = Glycomyces artemisiae OX=1076443 GN=B0I28_11644 PE=4; SV = 1
MDTSPTDHRIRNVVVLGGGTAGWMTASYVAKAFQGTVNVTVLEAPAVPRIGVGEATVPNLHKAFFSFLGIEEDEWMRECNASYKMAVKFVNWRTEGEGEAASRTHKGKPDHFYHTFGILPNHERLPLSHYWFADKQAGCTEDQFDYACYREPAAMDAKLAPRDREGNRWTNYAWHFDAQLVADFLCRFSVKTLGVTHIQDRFTEAVRDERGFVTALKTETGRTIEGDLFVDCSGFRGLLINQTLREPFLDMSDYLLCDSAVAAAVPHDDEANGIEPYTSAIAMKSGWTWKIPMLGRFGSGYVFSSRFTDRDTASADFCRLWGLDPDSTALNQISFRVGRNRRTWVKNVVAVGLASCFLEPLESTGIYFIYAAIFQLVKHFPDKRFDPVLAKRFNAEIETMFDDSRDFIQAHFKFAPRNDTPFWRENKHLVLDAGMQEKVDMYRAGMPVNMPVADESTYYGNFEAEFRNYWTNGSFYCIFSGLDLVPDHVYPAQALRPGDAAGAREVFAGIADERDRLLGTLPTAYESLRELHGK

SEQ ID NO: 86024 - protein, 515 aa, Sphingomonas sp.
  REGION 1..515: note = tr|A0A0Q8XVK7|A0A0Q8XVK7_9SPHN Tryptophan halogenase; OS = Sphingomonas sp. Root241 OX=1736501 GN=ASE13_10470 PE=4; SV = 1
MNSGHQQDIVILGGGAAGWIAAALLAKRLDPHRARITLVESEEIGIIGVGEATIPILAQCNALLGIDEFDFVRSTQGTFKLGIEFCDWGTVGNRHFHAFSDYGHPVEGVSTHHYWLRMRQSGEDRPIDDYSFAYAVAKNNNFVPGDPQNPRYHHAYHFDAGLYARYLRDVAIALGVQRIEGKMTHFDLDGESGDIAAIHLANGLKVPGDFFLDCSGFASELLGTALNTPFVDWSRWLLCNSAIAVPSKRTGAPTPFTRSTAHTGGWRWTIPLQHRSGNGMVYNSDLWSDDAAREALLGNIDGEPIAEPRLFRFTSGHRKHFWSRNCVGIGFASSFLEPLESTGIQLIVMGILKLLKYFPERTIDPVLRDEYNRLSTSEIERIRDFIIAHYYLSRRPEPLWSACRDMEIPDSLRHKLDVWNASGQIALGDSESYMEPSWLAILLGNGAVPARYNVSADLYPLEQIRTGMELRREEIIRSAQEVTSHQDFIDRHCKAPQTAPAIETAKVSGRTHFNE

SEQ ID NO: 86025 - protein, 511 aa, Sphingomonas sp.
  REGION 1..511: note = tr|A0A0Q8XMV4|A0A0Q8XMV4_9SPHN Tryptophan halogenase; OS = Sphingomonas sp. Root241 OX=1736501 GN=ASE13_16285 PE=4; SV = 1
MTDRGRAERAIERVVIVGGGTAGWMAATALSAHLAGTGVKITLIESSDIGTIGVGEATIPTIRRFYAQLGMSDAEVMQACEATAKFGIRFVDWLRDGQSFVHPFGRYGQDLKGVDFHHYWLTARASGDAAPLGDYSLGALLAGSGHATLPAPNPGSQLGIFDWALHFDAALFAQHMRRFAEKQGVTRLDARITDVKLRANDGFIEALTLDSGVEVAGDLFVDCSGFRSLLLGETLGVAYEDWSHWLLCDGAFAVQSERAGPPPSCTTVTARTAGWQWRIPLRAREGNGMVFSSRFQTDDDARDELLAKIPGKPTMEPRRLRFTPGRRAVAWAKNCVALGLASGFLEPLESTSIALIETGIERLKALFPDKDFDPAVVAEYNEQSAEEIERVRDFLILHYKLNGRSDAFWQACRDMTVPDTLKRKLELWRARGAFARYRWEMFSPPSWLAIYAGFEALPDRFDPAVAAVDPAQLTRSLEAMRRSLAETVADTPTHQEFLEIMDGAAAKGRAA

SEQ ID NO: 86026 - protein, 518 aa, unidentified
  source 1..518: note = Stenotrophomonas panacihumi
  REGION 1..518: note = tr|A0A0R0AEB7|A0A0R0AEB7_9GAMM Tryptophan halogenase; OS = Stenotrophomonas panacihumi OX=676599 GN=ARC20_00900; PE = 4 SV=1
MTQSIRHVVILGGGSAGWLTAGVLAAEHGGPGADDLRITVIESPDVPIIGVGEGTWPTMRDTLRRIGVSEADFIRECEGAFKQGSQFVNWTDAGPNDTYYHPFHLPGGYDEADLIGGWRQHHPDAQFDHLVCAQPHLCDANKGPKQFATPEYASVANYAYHLDAAKLGGFLRKHCVARLNVRHVPDLVTEVLSHDNGDIAALRTREHGDIAGDLFIDCTGLRALLIGQHLGEPLLPQQHLLFNDRAIPTQVAYADPRAPIACQTISTAQKFGWIWDIGLQGRRGIGHVYSSAYGSEQDAHDALVRYIVETGGREQDITWVPRVRIEPGYRLRPWRNNCVAVGLSSGFLEPLEASSLVLVELAAAMIADQFPATRDTMDILAGRFNDTFRYRWERVVDFLKLHYVLSRRDDSDYWRDHRREESWPERLRDLLSLWRYQPPSRYDLYRIEEVFPWASYQYILYGMGFVPQGRVGTAHTAAIQRAERCFRQTAEQTARMLAALPGHRELIDHIRARGLPRV

SEQ ID NO: 86027 - protein, 518 aa, Sphingomonas sanguinis
  REGION 1..518: note = tr|A0A147IVA4|A0A147IVA4_9SPHN Tryptophan halogenase; OS = Sphingomonas sanguinis OX=33051 GN=SB4_09390 PE=4 SV=1
MERPATAPQPRGSAGDPAAIGRIVILGGGTAGWMVAAALSRVLGRDGPSITLIESEEIGTVGVGEATIPPIQAFNALLGIDERAFVAATNGTFKLGIEFVDWRQTGHRYFHPFGTYGHDFGAIPFEAIWQRMKQQGRAEPLDAYALATLAARANRFTTPRPGNTPLGHIGYAYHFDAGLYARFLRSRAEAQGVVRHEGRVAQVERSAEPGRIEAIVMEDGTRIAGDLFLDCSGFRALLLGETLGVGFEDWGHWLPNDRAIAVPSQRTGPLTPYTRSTAHGAGWQWRIPLQHRTGNGIVYASTHLSDDEATARLLSGLDGAALAEQRMLRFRTGRRTRLWEGNCVALGLAGGFLEPLESTSIHLIQVGIARLLEMLPTRAFEAADRRRYNRLMAEEYEDIRDFIILHFHATERDDTPYWRGLRDMELPETLQDRLAIYRATGRIYREGEALFTKTSWLAVMDGQGLSPRGFDPVALGMPVDEAAARLAHIALVTRKSLEVMPDHDAFLRQHGYSMTDSA

SEQ ID NO: 86028 - protein, 505 aa, Sphingomonas sanguinis
  REGION 1..505: note = tr|A0A147IVR1|A0A147IVR1_9SPHN Tryptophan halogenase; OS = Sphingomonas sanguinis OX=33051 GN=SB4_08635 PE=4 SV=1
MTKVTEDGVRVVIVGGGTAGWMAGAALTRLLSGQCSVRLIESEAIGVVGVGEATLPHIRAFNERLGIPEAEFMARTRATFKLGIEFRDWGRIGDSYIHPFGTFGRGTGAIDFHHYWARLLREGHDLPPLDALSYACALARDARFNHPDQTRDGLSSTFGYAYQFDALLFAPYLRGLAEEAGAVRTEGMVVDVERDGETGLIRSVTLADGERVEGDLFIDCSGFCSLLLGQTLEEPFEDWSKWLPTNRAVAMPCRTETAVTPYTSAIAMPAGWRWRIPLQHRTGNGYVYASDFISDADAARALEAAVEGEPLAEPRLLRFKAGRRRRSWVGNCVAIGLASGFLEPLESTSIYLVQQAITALIELFPGREIAASDRDEFNRVIDLEYDRIRDFLILHYHATTRDDSPFWNYVRTMPIPDSLAEKMELWRRRARVVKYREGVFLDASWIAVYLGQGIVPEGWDPRADVAGTPDLLRAVTELRAEIAADVGARPEHRAFLERYCPMVAA

SEQ ID NO: 86029 - protein, 505 aa, Sphingomonas sanguinis
  REGION 1..505: note = tr|A0A147J727|A0A147J727_9SPHN Tryptophan halogenase; OS = Sphingomonas sanguinis OX=33051 GN=NS258_12085 PE=4 SV=1
MDKPVTRIVIVGGGTAGWLAACRIAAATMGSVTVTLIESPDVPTIGVGEGTWPTIRRTLERIGIGEAEVLLACDGSFKQGTCFDGWTTGVDDDRYYHPFVPPIDVDPADLPGDRPFAFTACAQPQVCVEDLAPRQRAMPDYGGALNYAYHLDAAKLATLLARHATTRLNVRHVRDHVVSVDRVESGDIGAVTTRQSGAIAGDLFLDCTGRRGLLIDETLGAELIDASSVLFNDRALAVQLPVTPDSPIASQTMATAHAAGWIWDIGLPTRRGIGCVYASAFMSDDQAEGILTDYCRRIALESPAPRRLSFRSAYRAQPWTANCLAIGQSAGFMEPLEASAIVMIELSLDALLEDFPVDRAVMPIQAQRFNALARYRWERIVDFLKLHYVLSQRDEPYWRAHRDPASIPDRLVEALVLWRHRAPSALDLPMQEELFPAASYRYILWGMGFPAPLPSPVRRAARPDLPNQLRQIDQRARALTASLPTNRAYLDALRAEQAPLAERTA

SEQ ID NO: 86030 - protein, 498 aa, Sphingomonas sanguinis
  REGION 1..498: note = tr|A0A147J1Z1|A0A147J1Z1_9SPHN Tryptophan halogenase; OS = Sphingomonas sanguinis OX=33051 GN=SB4_03680 PE=4 SV=1
MTDKRIRRIVILGGGTAGWMTAAALSRALAGQGVAITLVESDAIGTIGVGEATIPTIHWFNQIIGLDERQFMAETQATVKLGIEFVGWNGEGSRYFHPFGTFGPPGDGAMFLHRLIRARADGDLAPTEAYSLTAQAARAGRFARPVADRRSLLSTLGYAYHFDAGLYARYLRGLAERAGVTRIEGVVASVEQDGESGFVRSLTLDGGQAVAGDLFIDCSGLRALLIGQTLGVGFDDWSHWLPCDRAWAAPSAAESDLTPYTRATAAEAGWRWRIPLQHRVGNGYVFSSRFQDEEAARASLIAAMDGPPLADPRLIRFTPGMRREAWRANVVAIGLSSGFLEPLESTSIHLIQSGIAKLLSLFPAADGSPLLARQFNRVFGQEMLDIRDFLILHYHATTGRDEPLWRERQAMAIPGTLAEKLGHFRSSGRIVLSSDELFRDASWFAVLDGQGERPGDHNPLIEVLGAEDNLRQLAALRAEIAKTAAAMPPLPGRRSASA

SEQ ID NO: 86031 - protein, 505 aa, Novosphingobium aromaticivorans
  REGION 1..505: note = tr|Q2G7X6|Q2G7X6_NOVAD Tryptophan halogenase; OS = Novosphingobium aromaticivorans (strain ATCC 700278 / DSM 12444 / CIP 105152 / NBRC 16084 / F199) OX=279238; GN = Saro_1 607 PE=4 SV=1
MKRPNPAVPALPRRIVIAGGGTAGWMTAAALARTLGKVAQVTLVESEQIGTIGVGESTIPPLVAYNRILGISEAEFMRATQATFKLGINFENWRVPGEAYFHSFGGTGKDHWSAGFQHFWMHGLARGHDEAYGEYCLELKAAQAGRFAHLPEDRMNYAYQLDSGLYARFLRQMAEADGTVRIEGKIGGVPLDPETGDIAALVLEDGQRIEGDLFIDCTGFRALLIEGALHVGYDDWTHWLPCDGAIAIQTSSVRAPVPYTRAIAHGSGWQWRIPLQHRQGNGIVYCSAYMDHEAALEMLLSTVEGEKLVRPNPIRFRTGVRRKQWHRNCVAVGLSGGFMEPLESTSIHLIQRAILRIVRMLPAGTISARDVAEFNDQQMLDMEQIRDFLILHYKATDRRDTPFWRHCASMEVPESLAHRIELFRETGRVFRRNEELFAENSWVQVMMGQGIVPQSYHPVAAKLRDEELAHLLQTLREQVDRTVAALPAHGDYIARYCGAEMPAAA

SEQ ID NO: 86032 - protein, 499 aa, unidentified
  source 1..499: note = Rickettsiales bacterium
  REGION 1..499: note = tr|A0A2E3I970|A0A2E3I970_9RICK Tryptophan halogenase; OS = Rickettsiales bacterium OX=2026788 GN=CMP20_09585 PE=4; SV = 1
MAQPFKIVILGGGTAGWMAANLFAHKWAGKLNDKSLRVTLVESPDIGIVGVGEGSTPTLKRFFSMLGIADGDWMPQCNATYKMNIAFEDFTASGIKRYSHPFISQLDTFTQRAFMVNARTRRLGLDTHTNPGDFLLNGVLAKQNKGPQTPDNFPFNIEYGYHFDSHLLGAFLQQHAIGLSVEHVQANVESIKQHPNGDIAELHCKEGMVINGDLFVDCSGFSSALMQKTLGVKFNSYKDNLFNDSAVVVPTPISEHIPVETTSTALSAGWCWKIPLTNRFGNGYVYSSDFIDSSQAERELKQQLNLSEDSDCRHLSMKVGALAQQWQNNCLGIGLSAGFIEPLEATALHLTQISIEQFILEFEEGGFTNRLQGQYNAKMQHRTERTRDYIVAHYKLNTRNDSEYWRANRNNMHLSESLLQILDVWYKRGDLEAEIKRQDLSTHFNAVSWNCLLAGYGAFPPLATKQPGSGDLYLEQKIESFLHGCALNFEDHRTNLHNH

SEQ ID NO: 86033 - protein, 513 aa, Sphingomonas sp.
  REGION 1..513: note = tr|A0A0Q8XSG2|A0A0Q8XSG2_9SPHN Tryptophan halogenase; OS = Sphingomonas sp. Root241 OX=1736501 GN=ASE13_07770 PE=4; SV = 1
MRPIKNIVIVGGGTAGWLTAGIVAAKHRGRMAAGFTVTLIESPTTPIIGVGEGTWPTLRTTLPKIGVSETDFFRECDAAFKQGASFARWTTGALDDAYYHPLMLPQSFHQLNLVPHWLAGPVKGSFCDAVTPQGRICDAGLAPKTIATPEYDAVANYAYHLDAGKFAPFLQRHCCEKLGVRHVLADVRRVHLTEDGDIRSVETEQAGEIEGDLFVDCTGFRALLLGDALGVPFKDCGDVLFCDTALAVQVPYAREDSPIASHTTSTAQSAGWIWDIGLPTRRGTGHVFSSHHISDDEAERELRAYLGEAGKDLPVRKIRIRSGHRETFWKGNCVAVGLAAGFLEPLESSAIVLIELSAKLIAEQMPVCREVMDVVASRFNATTHYRWGRIVDFLKLHYVLTRRTDSDFWRDNVRPESIPDRLQELMLLWKYQPPWFHDEFDRVEEVFPPASYQYVLYGMGFRTEIEPSALAGEARLAERAMRENVTHTERLRVGLPRHRDLIYKVHEHGFQPV

SEQ ID NO: 86034 - protein, 511 aa, Sphingomonas sanguinis
  REGION 1..511: note = tr|A0A147JCF5|A0A147JCF5_9SPHN Tryptophan halogenase; OS = Sphingomonas sanguinis OX=33051 GN=NS258_02080 PE=4 SV=1
MTGAAHSNSPIKTVTIVGGGTAGWMAAALLSRLLLGAYTIRLIESEEIGTIGVGEATIPAIRTFNGLAGIEEFEMVRATQATFKLGIEFRNWRAPGHSYIHGFGKIGQDLYWLHCHQFWLKEAARGRAKHFDHYALNTLAARMNRFTMPDPAHPNSPIADIDYAYHFDASLYARYLRTRAEKAGVERIEGRIVAANARASDGHLDHVVLADGRTVDGDLFIDCSGMRGLLIGEAMGVGYEDWSQWLLCDRALAVPSARGSGPLTPYTRSTAHGAGWQWRIPLQHRTGNGHVYSSRFVSDEEAVATLLANLDTPALGDPRPVRFRPGKRTRAWEKNVVALGLAGGFLEPLESTSIHLIQTGLLRLLALFPGRGFHAADIAEYNRQTDFEYRDVRDFIIAHYKVTLREDTPFWQYCRHMDVPDSLAERIELFRSSARFFMHGKAELFREESWVQVLLGQGLDAQYDPMVDMIPDAQTTAFLRDVEEVIAEVASSLPTHEAFIARHCQAPPLQG

SEQ ID NO: 86035 - protein, 307 aa, Sphingomonas sanguinis
  REGION 1..307: note = tr|A0A147IVV1|A0A147IVV1_9SPHN Tryptophan halogenase (Fragment) OS=Sphingomonas sanguinis OX=33051 GN=SB4_08640; PE = 4 SV=1
MNATDRIAHVLVAGGGLTAWYAAAALKRRAPFLTVTLLATAPAADALADRIACTLPSLLGFQADLGIGEDDGVTRAGAGYRLGTRFIGWAEGLPDYVHAYGGYGHPIGSAAFHLHWVRAALDGEAAPFDSYAPAAHLARAGRFVPPTPNTPFAQHDYGLTLDLERHLAMVRAFARHVGVIERPGTIAETVVDARGFIGEVRLADGQRISADLYIDATGPAAHLRDAVDREWQDWHDWLPCDRVLLGTRASGEGAPVLTDVTAHAAGWRWSSGEQVGIAYSAAHMADADAAAMLGATPGEPIALRPGT

SEQ ID NO: 86036 - protein, 493 aa, Sphingomonas sanguinis
  REGION 1..493: note = tr|A0A147J6Y9|A0A147J6Y9_9SPHN Tryptophan halogenase; OS = Sphingomonas sanguinis OX=33051 GN=NS258_12070 PE=4 SV=1
MSAPRRIVIAGGGTAGWMAAAALARTLGRAVSVTLVESDAIGTIGVGESTIPPIITFNRLLGINEAEFMAATQATFKLGIQFDGWKGPDDRYFHSFGLTGKDHWAAGFQHFWLDGVRRGHDEPYDEYCLELVAAREGRFAHLPDERMNYAYQLDSTLYGRFLRRMAEGDGATRIEGRIAQVDLNPDTGDIAALVLDDGRRVEGDLFLDCTGFRALLIERALHVGFDDWSHYLPCDAAVAVQTESVRPPVPYTRATAHEAGWQWRIPLQHRAGNGIVYCSRYMDHDAARTKLLDTIEGKVLTEPNMLRFQTGARRRQWHRNCIAVGLSGGFLEPLESTSIHLIQRAILRLIRLLPGGPISAHDVAEFNDQQMTDMLQIRDFLILHYKVHERRDSAFWRQCADMDVPDSLAHKIALFRETGRVFRRNDELFAENSWVQVMMGQGITPESHHPITARLSDEELERLLSTLRQNVATTVRSLPPHADYVARHCGTAA

SEQ ID NO: 86037 - protein, 506 aa, Sphingomonas sanguinis
  REGION 1..506: note = tr|A0A147IK28|A0A147IK28_9SPHN Uncharacterized protein OS=Sphingomonas sanguinis OX=33051 GN=SB4_17505; PE = 4 SV=1
MAKQAVRRIVIAGGGAAGWMSAAVLAKVLKPQNCTIQLVESDDIGIIGVGEATIAGIHWLNNILGIEEDDFVRASQATFKLGIDFRDWTGAGRRYYHPFGRYGVPLGGVGFHHLWVKAQRLGLAASFEDYCMTSMAARLGRFDRPDRAPPGSPLKTLSYAYHLDAGRYAQYLRTLAVGMGVERIEGTIERVDQNPETGYITRLHTRRGDVVEGDLFLDCTGFHALLIQGVLQTGTIDLSNFLPCDRAWAVPCERTGDTIEPSTRCTARAAGWQWRIPLQHRTGNGHVFCNEFMSEDEAHDVLMRNLDGRPLGEAKLIKFKTGRTRQVWNKNVIAVGLSAGFLEPLEATTIHIILNSLNKIIGHFPRRTPDPLTVAEFNRQLDLQFDTIKDFLVLHYRLSEGRDEPLWRYFRQLTLPERLERMIESFRMTARIAPSEFDQFKEASWFSVMLGQGVVPEDHDPLADNIDDAALASHLARVRDNIRQIAERMPAHDAYIRANCATPVPA

SEQ ID NO: 86038 - protein, 518 aa, Sphingomonas sanguinis
  REGION 1..518: note = tr|A0A147I1N8|A0A147I1N8_9SPHN Tryptophan halogenase; OS = Sphingomonas sanguinis OX=33051 GN=NS319_05860 PE=4 SV=1
MERPATAPQPRGPAGDPAAIGRIVILGGGTAGWMAAAALSRVLGRDGPSITLIESEEIGTVGVGEATIPPIQAFNALLGIDERAFVAATNGTFKLGIEFVDWRQTGHRYFHPFGTYGHDFGAIPFEAIWQRMKQQGRAEPLDAYALATLAARANRFTTPRPGNTPLGHIGYAYHFDAGLYARFLRGRAEAQGVVRHEGRVAQVERSAEPGQIEAIVMEDGTRIAGDLFLDCSGFRALLLGETLGVGFEDWGHWLPNDRAIAVPSQRTGPLTPYTRSTAHGAGWQWRIPLQHRTGNGIVYASTHLSDDEATARLLSGLDGAAPAEPRLLRFRTGRRTRLWEGNCVALGLAGGFLEPLESTSIHLIQVGIARLLEMLPTRAFEAADRRRYNRLMAEEYEDIRDFIILHFHATERDDTPYWRGLRDMELPETLQDRLAIYRATGRIYREGEALFTKTSWLAVMDGQGLSPRGFDPVALGMPVDEAAARLAHIALVTRKSLELMPDHDAFLRQHGYSMTDSA

SEQ ID NO: 86039 - protein, 508 aa, Sphingomonas sanguinis
  REGION 1..508: note = tr|A0A147HY19|A0A147HY19_9SPHN Tryptophan halogenase; OS = Sphingomonas sanguinis OX=33051 GN=NS319_09085 PE=4 SV=1
MDAAPSADRIARRVVIVGGGTAGWMAAAALARFLPADHRITLIESDAIGTVGVGEATIPGIRLFNQMLGLDEAEFLRATNGSFKLCIRFEGWSGEGSGYLHAFGSIGRALGLVPFHHYWLRGGGAANPASLWGHSPSAQAAMSGRFAPDPGRPDLPSGLAWAYHFDASLYAALLRRHAEGTGVVRVEGRIASVARDMSGRIDHVVLDGGDAHAGDLFIDCTGFRALLIGETLAEPFDDWSELLPCDRALAVAGERAAPLPPYTRAIAHGAGWRWRIPLQHRTGNGLVYDSRHLSEDEAVDRLLTALNGEAMGEPRRLRFTTGRRRRAWVGNCVALGLAAGFLEPLESTSIHLIQSGIARLLEYWPGPTLQQVEIDAYNAETAAEWLAIRDFLILHYNANARTEPFWAERRAVPLPDSLAARIALFRANGRFRREGEELFAEPAWVQVMIGQGIIPTGHHALADTLSAHELDDFLNLTRRHAAQVAARLPTHDAFLAAHCAAPAPKVFA

SEQ ID NO: 86040 - protein, 503 aa, Massilia sp.
  REGION 1..503: note = tr|A0A1G6UIV1|A0A1G6UIV1_9BURK Tryptophan halogenase; OS = Massilia sp. PDC64 OX=1881046 GN=SAMN05428966_104195; PE = 4 SV=1
MENTHQQDRGRPIRRVVIAGGGTAGWMAAAALARTLGKVLDIKLVESDDIGTVGVGEATIPSLVHFHRLLDIGEQEFMAATQATFKLGISFEGWRARGEDYIHSFGMTGTDHWTAGFQHFWLKGRDRGLASDYGDYCLELVASQEKRFGHLPNQGINYAYHLDATRYARYLRRFSEHFGAQRIEAKIASVDTDPATGHITALVLDSGTRIEGDLFIDCTGFRSLLLGQTMGVEYEDWSQWLFNDSAIAVQTESTGPAVPLTRSMAHDWGWQWRIPLQHRTGNGIVFSSRYTDEATARATLLGNIEGKVLTEPRVIRFTPGQRRKVWAGNCIGLGLASGFLEPIESTSIHLIQRGIVRLLQTFPSHGIQQSDIDEFNAQAEEDIRTIRDFIILHYKVTNRRDTPYWHDAATMTVPDSLQHRIDLFRDGGRVFRAGNELFAENSWVQVMLGQGLTPERWHPSADLMGDDELRGFLDGIRNGVRRTVSQLPPHQQYVERYCPAGKP

SEQ ID NO: 86041 - protein, 513 aa, Octadecabacter sp.
  REGION 1..513: note = tr|A0A5B9ER09|A0A5B9ER09_9RHOB Tryptophan 7-halogenase OS=Octadecabacter sp. SW4 OX=2602067; GN = FTO60_04155 PE=4 SV=1
MSGAPKHIAVVGGGTAGWLSALVLQKAAQSARQPISISVIESPDIPTVGVGEGSTSVFRQVLLDLGIDESEFLAETGATFKFGIHHQGWRADGGSYYGPIDDPNALVPHPDGLPANWLHQARVAGGKPLADAHLFTALMRGRKAPYARKNGRLIALSQYHYAYHFDQARLGRFLATKASGIAHIRAEVAQTKRNSASGDITDLVMTDGTAVAVDLVLDCTGFRRAIIGKMDAGWTSYGTFLPLNKAMPFWLDHAPDKDIPTHTNARALGAGWMWGIPVRDRMGCGYVFSDAHTTPDAAQAEIEAALGQPIDPRGVLSIDPGRLGRAWINNCIAIGLAQSFLEPLEATSIHGSLVQALMLTQISLDTVLGGAPDRARSEYNAATARQVDDFAQFINLHYTGGRRDTPFWRDMAASGISQQSRDRLAQWQSHPLTRADFAPFPGNLPHVEEQLFAPVLDGLGHLPKAPAKQLFANTPQHRAAARKTLDRLSREFRGAANMALGQRTYLEQLRATH

SEQ ID NO: 86042 - protein, 500 aa, Sphingomonas sp.
  REGION 1..500: note = tr|A0A0Q8XEH1|A0A0Q8XEH1_9SPHN Tryptophan halogenase; OS = Sphingomonas sp. Root241 OX=1736501 GN=ASE13_16350 PE=4; SV = 1
MTDNRIRRIVIVGGGTAGWMAAATFARILGPEYASVTLIESDEIGIIGVGEATIPQMATFNRMLGVDENEFMRATQGSFKLGIQFVNWGRQGHTYFHPFGKYGVDMQGVSFHAYFLRLHQLGEAPDVDEWSLQAKAGQMGKFMRSIDAGRSPLSDIAYAFHFDAGLYARFLRGYAEERGVVRREGKIVDVKLRGEDGFVQSVVMEDGTEVEGDLFVDCSGFRGLIIEQALKAGFTDWSHWLPCDRAIAVPCESVDEWTPYTRSTAHKAGWQWRIPLQHRTGNGHVFCSKYMSDDEATAILLANLDGKPLADPRTVPFRTGHRNKLWIKNCVAMGLAGGFIEPLESTAIWLIQSGLSRFLTMFPDKHFNQADVDRYNRIMTTDYEEIRDFIILHYHATERQDSPFWDYCRTMEIPERLAEKMRVFRSHGRAFRENEELFNDTSWFAVMHGQLMGAQSFDPVAEVMSLEETRSRLAHIREAIANSADYMPKHRDFIRENCAA

SEQ ID NO: 86043 - protein, 518 aa, unidentified
  source 1..518: note = Alphaproteobacteria bacterium
  REGION 1..518: note = tr|A0A2N3DTU3|A0A2N3DTU3_9PROT Tryptophan halogenase; OS = Alphaproteobacteria bacterium HGW-Alphaproteobacteria-15 OX=2013661 GN=CVT76_00190 PE=4; SV = 1
MSDSSRPIRRIIIVGGGSAGWICAARIAAQNAANSPDGLKVVLIESSNVPTIGVGEGTWPTMRATLRKIGLSETDFLRRCDAAFKQGGKFVGWTDGTSAEAYYHPLNAPQGAPQINLSGHWAQMHAHGGSEFADAVDFQAALCEAGLAPKAITTPEYAAVTNYAYHLDAGKFAQLLQEHAVTRLGVEHVIDDVVNVRRADNGDISAVLLKQKGEVVGDFFVDCTGFAALLIGQTLGVPFRDCSDILFADRALAMQVPYPAPDAPIACHTIVTAQDSGWVWDIGLQSRRGVGHVYSSRHATDDAAELALRRYIGPAADQLEARRIKIRAGHRETFWRNNCVAIGLSAGFLEPLEASALMLIEAATDFIAERMPANRAVMDTAAAQFNRAFTHHWDRIIEFLKLHYVLTKRTDTQFWRDNCDPASIPDDLQECLKLWRYQPPSPQDFPHQPEVFSWPSYQYVLHGMRFETDYAQSALMADSENARRWFAVAANLRDRTLSELPKHRDLLNRVREFGLQPV

SEQ ID NO: 86044 - protein, 505 aa, Sphingomonas sanguinis
  REGION 1..505: note = tr|A0A147HX29|A0A147HX29_9SPHN Tryptophan halogenase; OS = Sphingomonas sanguinis OX=33051 GN=NS319_10515 PE=4 SV=1
MDKPVTRIVIVGGGTAGWLAACRIAAATMGSVTVTLIESSDVPTIGVGEGTWPTIRRTLERIGIGEAEVLLACDGSFKQGTCFDGWTTGADDDRYYHPFVPPIDVYPADLPGDRPFAFTACAQPQVCVEDLAPRQHAMPDYGGALNYAYHLDAAKLATLLARHATTRLNVRHVRDHVVSVDRVESGDIEAVTTRQSGAIAGDLFLDCTGRRGLLIDETLGAELIDASSVLFNDRALAVQLPVTPDSPIASQTMATAHAAGWIWDIGLPTRRGIGCVYASAFMSDDQAEGILTDYCRRIASESPTPRRLSFRSAYRAQPWTANCLAIGQSAGFMEPLEASAIVMIELSLDALLADFPVDRAVMPIQAQRFNALARYRWERIVDFLKLHYVLSQRDEPYWRAHRDPASIPDRLVEALVLWRHRAPSALDLPMQEELFPAASYRYILWGMGFPAPLPSPVRRAARPDLPNQLRQIDQRARALTASLPTNRAYLDALRAEQAPLAERTA

SEQ ID NO: 86045 - protein, 499 aa, Sphingomonas sp.
  REGION 1..499: note = tr|A0A0Q8XJT9|A0A0Q8XJT9_9SPHN Tryptophan halogenase; OS = Sphingomonas sp. Root241 OX=1736501 GN=ASE13_07965 PE=4; SV = 1
MQQLKRILIVGGGSAGWMTAALLSQLFQGLYEITLVESEQIGTIGVGEATIPAIKKYNELLGLDENEFMSRTQGSFKLGIQFVDWWRRGHSYIHGFGVIGQDLGWLRCHHYWLKARAAGKASDFAAYSINTAAALANKFMRADPKLAESPIGHIAHAFHFDAGLYARFLRGYAEARGVRRREGKVANVALRSEDGFVESVTMDDGEVIAADLFVDCSGFRGLIIEEALETGYETWSQWLPCDRAMAVPCARTEPFTPYTRATARTAGWQWRIPLQHRTGNGHVYSSAYIDDAEAEAQLLANLDGAQLAEPNRIRFTTGKRRKTWNRNCVAIGLCSGFLEPLESTSLHLIQSAIIRMVRLLPDAGFDPATIAEFNRQTDFEYERIRDFIILHYKATERDDTPFWRYCRDMEVPDTLQRKIDLFAANGRVFREDDELFTEESWIQVFLGQGVIPRGYDPLVDIKSDVQVAQFLGNVENVIGKCVAVMPRHADYVAKTCPAA

SEQ ID NO: 86046 - protein, 504 aa, Sphingomonas sanguinis
  REGION 1..504: note = tr|A0A147HRR3|A0A147HRR3_9SPHN Tryptophan halogenase; OS = Sphingomonas sanguinis OX=33051 GN=NS319_18315 PE=4 SV=1
MTTPSPDAIRSVVIVGGGTAGWMTAAALAHAMPRGLSITLVESDAIGTVGVGEATIPPVRLFNQTLGIDEAEFLRETKGSFKLGIEFIGWGRAGHRYFHPFGTHGKSFDLVAVHQHWLAAGGPDSGIAFDDLSMAWGAGKRGRFAQPMADPRSVASTFDYAYHFDAGLYARFLRRYAEARGVARVEGKIAGHALENTRGHVASVTLDDGRVLAGDLFVDCSGFRGLLIEEALGTGYEEWAHWLPCDRAVAVPCETGGDGLTPYTRSTAREAGWQWRIPLQHRTGNGYVYCSRHISDDQAAATLMANLDGQALGDPRFLRFTTGRRRLMWNRNVVAIGLSSGFMEPLESTSIHLIQAGIAKLLAYFPTQAFEPAGIVEYNRVAITEYERIRDFLILHYKLTERTDSALWQECAAMDIPDTLAMKIDHFRSAGRLVTRDMDLFGPASWAAVHIGQFNMPEGLDPLLAYGDPAQSRVFVAKLAGAIGQMAESMPTHAQWLKKIGATA

SEQ ID NO: 86047 - protein, 500 aa, unidentified
  source 1..500: note = Sphingomonadales bacterium
  REGION 1..500: note = tr|A0A1G3K4E2|A0A1G3K4E2_9SPHN Tryptophan halogenase; OS = Sphingomonadales bacterium RIFCSPLOWO2_12_FULL_63_15; OX = 1802170 GN=A3H25_09985 PE=4 SV=1
MSTLPPPRRIVVAGGGTAGWMTAAALARTLGPVAQVTLVESEQIGTIGVGESTIPPLVAYNRILGINEADFMRATQATFKLGINFENWRVPGESYFHSFGGTGKDHWSAGFQHFWMHGQAQGHDAPYGDYCLELKAAEAGRFAHLPDDRMNYAYQLDSGLYARFLRRMAEADGAQRIEGRIAKVELDSESGDIAALLLDGDRRIEGDLFIDCTGFRALLIEGALHVGYDDWTHWLPCDGAVAIQTSSVRPPVPYTRAIAHEAGWQWRIPLQHRQGNGIVYCSGFLDPDAALEKLLASVEGDKLVQPNPIRFRTGARRRQWHRNCVAVGLSGGFMEPLESTSIHLIQRAVLRILRMLPAGTVSPLDIAEFNDQQMTDMEQIRDFLILHYKATDRRDTPFWRHCAAMAVPDSLAHRMELFRQTGRVFRKNEELFAENSWVQVMMGQGITPQSHHPVASKLRPDELTHLLASLKDQVSRTVANLPDHAAYIARYCSAQEPVAA

SEQ ID NO: 86048 - protein, 487 aa, Sphingomonas sp.
  REGION 1..487: note = tr|A0A0Q8XL95|A0A0Q8XL95_9SPHN Tryptophan halogenase; OS = Sphingomonas sp. Root241 OX=1736501 GN=ASE13_09425 PE=4; SV = 1
MTAAALARTFGQRLSITLLESDEIGTVGVGEATIPTIHWFNELIGLDEAAFLRATGATFKLGIEFVDWARPGQHYFHPFGQYGIPLPGVSFHHRWLKARAEGLDLPLSAFSLANRLALEGRFAKPVNHARSILSTLGYAYHFDASLYGQHLRGLAEANGVTRIEGKLERVEQHPETGFVTALGTSRGDRLEGELFIDCSGFRALLIEGVMQAGYDDWSHWLPCDRAVAVPCARVAATTSYTRATARPAGWQWRIPLQHRTGNGYVYGSRFVSDDEAAASLLANLDGEALAEPRFLRFTAGRRRRAWLGNVVAIGLSSGFLEPLESTSIHLIQSGIAKLLTLFPDRDCDPALARRFDALFAADMDNIRDFLILHYHAQDRQDPIWEQCRHMELPETLVEREAQYRRSGRVMVGSDELFREASWLAVLNGQGILAQDYNPLADTLDPATNRAQLEQVADLIARSAETLPLHDAVLAEIQGAAAGGRTAR

SEQ ID NO: 86049 - protein, 505 aa, unidentified
  source 1..505: note = Sphingomonadaceae bacterium
  REGION 1..505: note = tr|A0A419MYZ3|A0A419MYZ3_9SPHN Tryptophan 7-halogenase OS=Sphingomonadaceae bacterium KCTC 52944; OX = 2339262 GN=D5I55_07830 PE=4 SV=1
MTPRPAPDSIVILGGGTAGWMAACLLAARWGGDRITLVESPEVGIIGVGEGSTPQLRAFFRTLGLDEADWMPRCNATYKNGIRFTGWSERPGFESYYHPFVTALDAQTQPVFTYNCLARRTGRDVWAHPDRFFLPAALSDRRLAPLPAESFPFDVSYGYHFDAHLVGDVLRDHALSRGVHHLQRHVEGVIRTESGDVAALVVRDDTDIPADFFVDCSGFGATIHQKALGVPFRSFADNLFNDSAVVMPTPCDATGLNPNTSATALSNGWAWNIPLTNRTGNGYVYASAFLSDDAAETELRRHLGTLDDPTPTRRIKMRVGRVEESWARNSLAVGLSQGFIEPLEATALHIVQTTVEQFLDAWDTGDRAGFNTAIGKRYDGIRDYIVAHYRMNQRTDTDYWRANAENQALSDNLKAMMTAWFRAQDMDAVIADLDIGGYYASLSWHCLFAGYGTFPPDARMTPPGEDITRYDMAQIDEFLRRCALNFQDHRTLLDGRAAAMTQGAA

SEQ ID NO: 86050 - protein, 548 aa, unidentified
  source 1..548: note = Verrucomicrobiaceae bacterium
  REGION 1..548: note = tr|A0A4Q3BIE9|A0A4Q3BIE9_9BACT Tryptophan 7-halogenase OS=Verrucomicrobiaceae bacterium OX=2026800; GN = EOP84_14905 PE=4 SV=1
MNEIRRLSLKILRTLLNANHCVRKSRLTDPRSCEFLSPILPVMIKSILVVGAGSAGLIAAISLKRKLPQLTVRIVRSPEIAVIGVGEGTTPNFPKHVFDYLGISRKRFYELAEPTWKLGIRFLWGSRGRFDYTFDQQLDSHWTDLPMPNGYYCDEDFRCTSVPSALMWHGKAFPRQPNGCPDIQGWHAFHIENKKFVDVLEIVARENGVEITDGKVTGSDRLPEGGIAAVHLDDGRRLEADFFVDCSGFRSELLGKALGEPFNSFDRSLFCDRAVVGGWERTDEPILPYTTAEAMDSGWSWQIEHEHHVNRGYVFSSEFISEDEAVAEFLRKNPKAPKTPRIVKFRSGSYRNAWVENVVAIGNSGGFVEPLEATALMLVCSHSQTLLEILNRSHLNPTPTWRSLYNDLAAQGWTDIRDFLALHYKLNTALDTPFWRHCREETDVSNAAPLLEFYAENGPTGFCRYRLPRMENDFGVEGYLVMLVGNRVPYAAKHIPTDAERQVWERHRAEFNRIAQDGLDVKEALAYVRHPGWQWHGDVAPASSASTV

SEQ ID NO: 86051 - protein, 493 aa, Sphingomonas sanguinis
  REGION 1..493: note = tr|A0A147IKD3|A0A147IKD3_9SPHN Tryptophan halogenase; OS = Sphingomonas sanguinis OX=33051 GN=SB4_17330 PE=4 SV=1
MSAPRRIVIAGGGTAGWMAAAALARTLGRAVSVTLVESDAIGTIGVGESTIPPIITFNRLLGINEAEFMAATQATFKLGIQFDGWKGPDDRYFHSFGLTGKDHWAAGFQHFWLDGVRRGHGAPYDEYCLELVAAREGRFAHLPDERMNYAYQLDSTLYGRFLRRMAEGDGATRIEGRIAQVDLNPDTGGIAALVLDDGRRVKGDLFLDCTGFRALLIERALHVGFDDWSHYLPCDAAVAVQTESVRPPVPYTRAIAHEAGWQWRIPLQHRAGNGIVYCSRYMDHDAARTKLLDTIEGKVLTEPNMLRFQTGARRKQWHRNCIAVGLSGGFLEPLESTSIHLIQRAILRLIRLLPGGPISAHDVAEFNDQQMTDMLQIRDFLILHYKVHERRDSAFWRQCADMDVPDSLAHKIALFRETGRVFRRNDELFAENSWVQVMMGQGITPESHHPITARLSDEELERLLSTLRQNVATTVRSLPPHADYVARHCGTAA

SEQ ID NO: 86052 - protein, 511 aa, Sphingomonas sanguinis
  REGION 1..511: note = tr|A0A147I467|A0A147I467_9SPHN Tryptophan halogenase; OS = Sphingomonas sanguinis OX=33051 GN=NS319_03850 PE=4 SV=1
MTGAAHPNSPIKTVTIVGGGTAGWMAAALLSRLLLGAYTIRLIESEEIGTIGVGEATIPAIRTFNGLAGIDEFEMVRATQATFKLGIEFRNWRAPGHSYIHGFGKIGQDLYWLHCHQFWLKEAARGRAKHFDHYALNTLAARMNRFTMPDPAHPNSPIADIDYAYHFDASLYARYLRTRAEKAGVERIEGRIVAANRRASDGHLDHVVLADGRTVDGDLFIDCSGMRGLLIGEAMGVGYEDWSQWLLCDRALAVPSARGSGPLTPYTRSIAHGAGWQWRIPLQHRTGNGHVYSSRFVSDDEAAATLLANLDTPALGDPRSVRFRPGKRTRAWEKNVVALGLAGGFLEPLESTSIHLIQTGLLRLLALFPGRGFHAADMAEYNRQTDFEYRDVRDFIITHYKVTLREDTPFWQYMRHMDVPDSLAERIELFRSSARFFMHGKAELFREESWVQVLLGQGLDAQYDPMVDMIPDAQTTAFLSDVEEVIAEVASGLPTHEAFIARHCQAPPLQG

SEQ ID NO: 86053 - protein, 488 aa, Sphingomonas sanguinis
  REGION 1..488: note = tr|A0A147HV07|A0A147HV07_9SPHN Tryptophan halogenase; OS = Sphingomonas sanguinis OX=33051 GN=NS319_12475 PE=4 SV=1
MSATDRIAHVLVAGGGLTAWYAAAALKRRAPFLTVTLLATAPAADALADRIACTLPSLLGFQADLGIGEDDGVTRAGAGYRLGTRFIGWAEGLPDYVHAYGGYGHAIGSAAFHLHWVRAALDGEAAPFDSYAPAAHLARAGRFVPPTPNTPFAQHDYGLTLDLERHLAMIRAFARHVGVIEKPGTIAETVVDTRGFIGEVRLADGRRISADLYIDATGPAAHLRDAVDREWQDWHDWLPCDRVLLGTQASGEGAPVLTDVTAHAAGWRWSSGEQVGIAYSAAHMADADAAAMLGTTPGEPIALRPGTRPRPWRGNCVAIGDAATQVEPLEWCNLHLALSAIDRLITMLPDRHMAEVEAADYNRQTLAEAERVRDFLAAHYRTARRAEPMWRTVTEATPPPGLAHTLAQFAERGRLPFYEEETFTRDSWAAILLGQGLMPRRVDPLVHFTPPEEARRAMSRMTDAIAAAIPHVPAHAEWRAAQMRRLAR

SEQ ID NO: 86054 - protein, 521 aa, Sphingomonas sanguinis
  REGION 1..521: note = tr|A0A147HZ71|A0A147HZ71_9SPHN Tryptophan halogenase; OS = Sphingomonas sanguinis OX=33051 GN=NS319_08170 PE=4 SV=1
MTGRAERTDGPVRRVVVVGGGSAGWIAACRLAAQSRRTGGDVRVTLVESRNVPTVGVGEGTWPTMRNTLAKIGISETDFIRSCDAAFKQGARFVGWTDGTADDGYYHPLNPPAGATEIDLAPHWLHRSEMGASFADWVDYQAMLCDAGLAPKSIVAPEYAGHANYAYHLDAGKFATLLRDHGVGQLGVEHVLGDVVRVAVSDHGDIAHLELADGGTVAGDLFVDCTGFAALLIGGVYDVPFRRCGDVLFADRAIALQVPYAQPDDPITCHTVSTAQGSGWIWDIGLWTRRGVGHVYSSAHTSDDAAETALRAYVGPAAEGLSARRITIDAGHRTRFWQNNCVAVGLSAGFIEPLEASALMLIETAMDAIADRLPRTRAAMDVMARQFNATFTHHWMRIIEFLKLHYVLTKRTDSDFWRDNVAASSIPDGLAERLELWRHHSPGPQDFDHAREVFSWPSYQYVLHGMGFESHRPPVDPAAPDAVLAERFVGRTARAKDELRARAPVHRDLLRAIREHGLQRV

SEQ ID NO: 86055 - protein, 502 aa, Sphingopyxis sp.
  REGION 1..502: note = tr|A0A0W1DSP9|A0A0W1DSP9_9SPHN Tryptophan halogenase; OS = Sphingopyxis sp. H050 OX=1759072 GN=ATE67_07410 PE=4; SV = 1
MTEGGAPIRTVVIVGGGTAGWMAAAAAARFLNDGQRRIILVESDAIGTVGVGEATIPPIRDFNRMLGIDEAEFLRETQATFKLGIEFVDWGALGERYLHPFGDPGHNFEGIAFHQFWLKHRCDPRIRPFTDYFITGAAVREGGYAPQSGDPRSPLHQMAAAYHFDAALYAAFLRRRAEADGVERIEGRIEGVDRDAESGHVTSLRLGDGREVAGDFFIDCSGFVSLLLGREMGVGYRDWSQWLPCDRAMAVPSARVDPLIPATRATAHGFGWQWRIPLQHRTGNGIVYGSAYASDDEARATLLAHLDGEPLADPRPLRFTAGVRERLWEGNVVALGLAGGFIEPLESTSIHLIQTGINKLFWLFPDMRFSAVERDEYNRLMIDQYEYVRDFIVLHYKATARRDTPFWRDRTAMEIPDSLAQKIELFRTKGRIRRFDHDLFGIANWAAVMLGQNILPEGYDPLVDATDDARIIAAMERIASVFDQQARAMPSHADFIARLVAR

SEQ ID NO: 86056 - protein, 496 aa, unidentified
  source 1..496: note = Rickettsiales bacterium
  REGION 1..496: note = tr|A0A2E3I904|A0A2E3I904_9RICK Tryptophan halogenase; OS = Rickettsiales bacterium OX=2026788 GN=CMP20_09580 PE=4; SV = 1
MKQVIKNVVIVGGGTAGWLTAALLQKVVGTSINITLVESEAIGTVGVGEATIPPIRLVNQVLGINEAEFLRETKATIKLAIKFENWRTPNESYFHTFGSPGKSMAFCHFHHFVNRAKHLGHESTIWDYDLNYLCATQGKFAHIKAQDPVLDLPYAYHFDASLYAQFLRRYCQKLGAKRIEGMIESVQQHPSGDIAGVTLQDGQQIHGDLFVDCSGFRGLLIQQTLGVGYDDWTHLLPCDRAVAVPSERFDNTVPYTRAIAHKAGWQWRIPLQHRNGNGLVYCSSHMSDDEATHSLLNNLDSTPIGDPKVIHFKTGRRRKQWHKNVVAVGLASGFLEPLESTSIHLIQSAIVRLIHLFPHQGIDSAAVDEFNQQSELEYTQIRDFLVLHYHLTERDDSQFWRNMQSMDIPASLAHKMALFKQTGKLFREQNDLFLESSWLQVMVGQGIEPNDYHPIANNLYEPQLLNMLNKMREVKQEPLTSLPSHDEFLKHFCKVT

SEQ ID NO: 86057 - protein, 488 aa, Sphingomonas sanguinis
  REGION 1..488: note = tr|A0A147JDQ1|A0A147JDQ1_9SPHN Tryptophan halogenase; OS = Sphingomonas sanguinis OX=33051 GN=NS258_00270 PE=4 SV=1
MSATDRIAHVLVAGGGLTAWYAAAALKRRAPFLTVTLLATAPAADALADRIACTLPSLLGFQADLGIGEDDGVTRAGAGYRLGTRFIGWAEGLPDYVHAYGGYGHAIGSAAFHLHWVRAARDGEAASFDSYAPAAHLARAGRFVPPTPNTPFAQHDYGLTLDLDRHLAMIRAFARHVGVIERPGTIAETVVDARGFIGEVRLADGQRISADLYIDATGPAAHLRDAVDREWQDWYDWLPCDRVLLGTQSSGEGAPVLTDVTAHVAGWRWSSGEQVGIAYSTSHMADADAAAMLGATPGEPIAIRPGTRPRPWRGNCVAIGDAATQVEPLEWCNLHLALSAIDRLITMLPDRHMAEVEAADYNRQTLAEAERVRDFLAAHYRTARRAEPMWRAVAQAAPPPGLAHTLAQFAERGRLPFYEEETFTRDSWAAILLGQGLMPRRVDPLVHFTPPEEARRAMSRMTDAIAAAIPHVPAHAEWRAAQMRRLAR

SEQ ID NO: 86058 - protein, 509 aa, unidentified
  source 1..509: note = Pseudomonas yamanorum
  REGION 1..509: note = tr|A0A143GEF6|A0A143GEF6_9PSED Tryptophan halogenase; OS = Pseudomonas yamanorum OX=515393 GN=AK972_1426 PE=4 SV=1
MLNLRNIRRVVIVGGGTAGWFAALSLRRVFAPNVEVRVIESPDIGIVGVGEGGLINLIDALTRNTIAVSDFMRETGAAFKLGFCYEGWRGGGEQDKFYHLFADPKVEELAWSEYGSYPLITALIHQNYGLDKGVLGYYRGYEAITENVSQAQMTELLVKGASGLAMSLHFDSYRVAEFLKQVAISRGVVHQQGKVESVTRDDQGLVKSLQVADVDGVRHSIDLELMIDASGFARLGVGKTKGAKWRSFKDYLLMDSAIPFHMPHPNKNPALVTRAIAMDAGWMWQIPLIERVGAGYVFSSAHLDPDRAVQEIEAKVGHAIEPIRTLCFEPGHFEQVWMGNVLALGLASGFVEPLEATSIGQMLEQLRNFERVLVEGQGVILDTVIEGFNAANAQCWSEIRDFLRMHYDCPRRDNEFWRDVAGSTLPASYQDFKASFALRTPRHIDVEGNSLHGWRAIFHMMNWLFVAQPLGLLSREAAQADLMALSEEKRRLLDAYMKKVRQAKSSKVS

SEQ ID NO: 86059 - protein, 512 aa, Sphingomonas sp.
  REGION 1..512: note = tr|A0A0Q8XE76|A0A0Q8XE76_9SPHN Tryptophan halogenase; OS = Sphingomonas sp. Root241 OX=1736501 GN=ASE13_13160 PE=4; SV = 1
MIPPTTEAPITRLVIVGGGSAGWMTAAAVSRLVDAGVAVTLVESDEIGTVGVGEATIPPLLDFNAALGIDEDEFVAATQGTFKLGIEFVDWGKRGDKYIHPFGKYGRPMLGINFHQIWLRQHLLGGDADPGPVDDYAISIAAARRGRFAKPANNPEAVLSGLAYAYHFDAGLYARFLRGHAEARGVARIEGKIANVEQAPLDGYITAVVLEDGRRIEGDFFVDCSGFRALLLGQTLSVPYRSWQHWLPCDSALAVPSASVAPPTPYTRSSAERGGWRWRIPLQHRVGNGHVFSSAHTDEETALRRLLDGLDAPTIADPRLLRFTAGRREKLWEKNCVAIGLAGGFIEPLESTSIHLIQSGIFRLMSLFPDRGFSGIEIDEYNRWLIEEYEHIRDFIILHYHATERADSDFWNHCRTMDIPDSLAARIELWREKGRIFRAHNSLFTEESWIAVLLGQNIVPRAADPLVAMLPVGETVQFMNHMREIVARTAEAMPTHEDYIAMNCAMARQVAQ

SEQ ID NO: 86060 - protein, 498 aa, Sphingomonas sanguinis
  REGION 1..498: note = tr|A0A147HWZ4|A0A147HWZ4_9SPHN Tryptophan halogenase; OS = Sphingomonas sanguinis OX=33051 GN=NS319_10415 PE=4 SV=1
MTDKRIRRIVILGGGTAGWMTAAALSRALAGQGVAITLVESDAIGTIGVGEATIPTIHWFNQIIGLDERQFMAETQATVKLGIEFVGWNGEGSRYFHPFGTFGPPGDGAMFLHRLIRARADGDLAPTEAYSLTAQAARAGRFARPVADRRSLLSTLGYAYHFDAGLYARYLRGLAERAGVTRIEGVVASVEQDGESGFVRSLTLDGGQAVAGDLFIDCSGLRALLIGQTLGVGFDDWSHWLPCDRAWAAPSAAESDLTPYTRATAAEAGWRWRIPLQHRVGNGYVFSSRFQDEEAARASLIAAMDGPPLADPRLIRFTPGMRREAWRANVVAIGLSSGFLEPLESTSIHLIQSGIAKLLSLFPAADGSPLLARQFNRVFGQEMLDIRDFLILHYHATTGRDEPLWRERQAMAIPDTLAEKLAHFRSSGRIVLSSDELFRDASWFAVLDGQGERSGDHNPLIEVVGAEDNLRQLAALRAEIAKTAAAMPPLPGRRSASA

SEQ ID NO: 86061 - protein, 493 aa, Sphingomonas sanguinis
  REGION 1..493: note = tr|A0A147HWX4|A0A147HWX4_9SPHN Tryptophan halogenase; OS = Sphingomonas sanguinis OX=33051 GN=NS319_10500 PE=4 SV=1
MNAPRRIVIAGGGTAGWMAAAALARTLGRAVSVTLVESDAIGTIGVGESTIPPIITFNRLLGINEAEFMAATQATFKLGIQFDGWKGPDDRYFHSFGLTGKDHWAAGFQHFWLDGVRRGHDAPYDEYCLELVAAREGRFAHLPDERMNYAYQLDSTLYGRFLRRMAEGDGATRIEGRIAEVDLNPETGDIAALILDDGRRVDGDLFLDCTGFRALLIERALHVGFDDWSHYLPCDAAVAVQTESVRPPVPYTRAIAHEAGWQWRIPLQHRAGNGIVYCSRYMDHDAARTKLLDTVEGKVLTEPNMLRFQTGARRKQWHRNCIAVGLSGGFLEPLESTSIHLIQRAILRLIRLLPGGPISAHDVAEFNDQQMTDMLQIRDFLILHYKVHERRDSAFWRQCADMDVPDSLAHKIALFRETGRVFRRNDELFAENSWVQVMMGQGVTPESHHPITARLNDEELERLLSTLRQNVATTVRSLPPHADYVARHCGTAA

SEQ ID NO: 86062 - protein, 491 aa, Sphingomonas sp.
  REGION 1..491: note = tr|A0A0Q8XEB0|A0A0Q8XEB0_9SPHN Tryptophan halogenase; OS = Sphingomonas sp. Root241 OX=1736501 GN=ASE13_15280 PE=4; SV = 1
MIIGGGTAGWMAASALGKMLPHACSVELIESAEIGIVGVGEATLPHLRAFIHTLGLDEAEFMTATHATYKLGIEFRDFGQPGDSYLHPFGDFGRPLNNVPFLQYWLRMRALGQGGEIFEYSMANVMAAAKRFAPPESDPASLLSRIGYAYQFDATRFGPYLRGFAEGQGVKRTEGRIVSVERDSETGDVAAVLLESGVRVEGDLFVDCSGFRSLLLGDALGEEWEDWSHWLPCDRAMALPCASPPGEIEPLTRATAMPAGWRWRIPLQHRVGNGYVYSSAHLSDDEASDAILGAVEGEALADPRVLRFRAGRRKRSWSHNVVAVGLASGFLEPLESTSIYLVQAAITQLLELFPIRGIEAADRDEFNRLIDYEYDRIRDFLILHYHASTRDDSEFWNYVRHMPIPDSLADKIELFRRAGRIQRYAHGLFFEPSWIAVLIGQGVMPEGWDQRIAAAPPQELGQALERLRGRIAVEVRALPGHRQTLERQKLL

SEQ ID NO: 86063 - protein, 517 aa, Sphingobium sp.; identical to SEQ ID NO: 84574
  REGION 1..517: note = tr|A0A0C5XSR1|A0A0C5XSR1_SPHYB Tryptophan halogenase; OS = Sphingobium sp. (strain YBL2) OX=484429 GN=TZ53_09885; PE = 4 SV=1

SEQ ID NO: 86064 - protein, 508 aa, Sphingomonas sanguinis
  REGION 1..508: note = tr|A0A147J1Y4|A0A147J1Y4_9SPHN Tryptophan halogenase; OS = Sphingomonas sanguinis OX=33051 GN=SB4_02635 PE=4 SV=1
MDAAPSADRIARRVVIVGSGTAGWMAAAALARFLPADHRITLIESDAIGTVGVGEATIPGIRLFNQILGLDEAEFLRATNGSFKLGIRFEGWSSEGSGYLHAFGSIGRALGLVPFHHYWLRGGGAANPASLWGHSPSAQAAMAGRFAPDPGRPDLPSGLAWAYHFDASLYAALLRRHAETAGVVRVEGRIASVARDRGGRIDHVVLDGGDAHAGDLFIDCTGFRALLIGETLAEPFDDWSELLPCDRALAVAGERAAPLPPYTRAIAHGAGWRWRIPLQHRTGNGLVYDSLHLSDDEATDRLLTALNGEAMGEPRRLRFTTGRRCRAWVGNCVALGLAAGFLEPLESTSIHLIQSGIARLLEYWPGSTLQPVEIDAYNAETAAEWLAIRDFLILHYHANARTEPFWTERRAVPLPDSLAARIALFRANGRFRREGEELFAEPAWVQVMIGQGIIPTGHHALADTLTAHELDDFLNLTRRHAAQVAARLPTHDAFLAAHCAAPAPKVFA

SEQ ID NO: 86065 - protein, 513 aa, Devosia sp.
  REGION 1..513: note = tr|A0A0Q8IAI3|A0A0Q8IAI3_9RHIZ Uncharacterized protein OS=Devosia sp. Root685 OX=1736587 GN=ASD83_09000; PE = 4 SV=1
MAKPAHFVVVGGGTAGWIAAFIIQDEARRRGFDFRISVVESSRIPTVGVGEATTAAFRVLLKHFGIDEFEFFRKTDASFKLGIRHEDWRRRGYTYYGPIDDPHQVVQAPAGAPSDYLNVYAVAAGRAVQEMHLFQPLLEEKKAPYALKADGSLIPLGPFHHAYHFDQALVGKFFASKSKGVEKVDALVAGVERDGESGDITALVLDDNSRLEGDFFIDATGFRKEIIVKALGAPWKSYAHELPVNRALPFWIDVKEGEELPNYTRAWAQSSGWMWQIPTRTRFGCGYVYSDEFSTPEQAKEEVERVLGHEIEVRSDIRFQIGRLEKAWIGNCVAVGLSSSFLEPLESTSIHGTIVQMMLFAQRFMDEPSKISQKARDDYNERVGRQVDDFRTFVNTHYVTERDDTPFWREVRANRIHPETKERLARWRLEMPRHEHFPNYLGGLPHIETQLHYPVLNGLGLLDQTLARREMDRDPKLRRFAQQAFESLVKEYRAAANQALGHREFLDIVQGMA

SEQ ID NO: 86066 - protein, 503 aa, Massilia sp.
  REGION 1..503: note = tr|A0A1G6KLD5|A0A1G6KLD5_9BURK Tryptophan halogenase; OS = Massilia sp. PDC64 OX=1881046 GN=SAMN05428966_101530; PE = 4 SV=1
MNAPLLNTIVIVGGGTAGWMAATALATALRGRYTIRLVESDDIGTVGVGEATIPMIQRFNTVAGIDEAEFMKATNGTFKLGIEFVNWGRQGERYMHGFGRVGQDLWMVGFEQYWHKMHALGRARPLGEYSITRMAANANKFMPARTDLGNSPLADIAYAYHFDASLYARHLRKLSESRGVERIEGRIVQVSQRAHDGFIDAVVLESGRRVEGDLFIDCSGFRGLLIEQTLQAGFEDWSHWLPCDRALAVPCESAAATTPYTRATAHGAGWQWRIPLQNRIGNGHVYCSRHISDDEAAATLLANLDGRPLADPRPIRFTTGMRKKAWVKNVVALGLASGFLEPLESTSIHMVQSGLQQLLDYFPDRGFSQVDIDAYNDLTRFHYERIRDFIILHYHANQRTDSDFWQACAHMAIPATLREKLDLYKSHGRIQRFNGELFTEVGWLQVLVGQNIHPDSYHPLVDVQSEEGIHDYMEGVADVIRQCVGFMPDHDRFIAEHCKAPRM

SEQ ID NO: 86067 - protein, 508 aa, Sphingomonas sanguinis
  REGION 1..508: note = tr|A0A147J9Y8|A0A147J9Y8_9SPHN Tryptophan halogenase; OS = Sphingomonas sanguinis OX=33051 GN=NS258_06580 PE=4 SV=1
MDAAPSADRIARRVVIVGGGTAGWMAAAALARFLPADHRITLIESDAIGPVGVGEATIPGIRLFNQMLGLDEAEFLRATNGSFKLGIRFEGWSGEGSGYLHAFGSIGRALGLVPFHHYWLCGGGAANPASLWGHSPSAQAAMAGRFAPDPGRPDLPSGLAWAYHFDASLYAALLRLHAEGAGVVRVEGRIASVARDRGGRIDHVVLEGGDAHAGDLFIDCTGFRALLIGETLAEPFDDWSELLPCDRALAVAGERAAPLPPYTRAIAHGAGWRWRIPLQHRTGNGLVYDSLHLSDDEATDRLLTALNGEAMGEPRRLRFTTGRRCRAWVGNCVALGLAAGFLEPLESTSIHLIQSGIARLLEYWPGSTLQPVEIDAYNAETAAEWLAIRDFLILHYHANARSEPFWIERRAVPLPDSLAARIALFRANGRFRREGEELFAEPAWVQVMIGQGVIPTGHHALADALSAHELDDFLNLTRRHAAQVAARLPTHDAFLAAHCAAPAPKVFA

SEQ ID NO: 86068 - protein, 507 aa, Devosia sp.
  REGION 1..507: note = tr|A0A1M3KHZ8|A0A1M3KHZ8_9RHIZ Uncharacterized protein OS=Devosia sp. 66-22 OX=1895753 GN=BGO81_06805; PE = 4 SV=1
MIVGGGTAGWITAFIVQDAVRRLRLDASVTVVEPSRIPTVGVGEATTAAFYVFLKSFGIDEFEFFQQTGATFKLGIRHEDWRRKGFTYYGPIDDPHQVVAPPQGAPSDYLNVYAIAAGRPIEDMHMFGPLLRQWKAPYALKADGTPIRLGPFMHAYHFDQALVGRFLAGKSKGVTIADGVVAGVERDQVNGDIRTLVLDTGERVEGDFFFDCSGFHKRLIVKELNAPWISYAHELPVNRALPFWLDIKDGEEIPNYTRAWAQEAGWMWQIPTQTRFGCGYVYSDEFRTPEEAKLEVERVLGREIEVRSDIRFQIGRLEKAWIGNTVAVGLSSSFLEPLESTSIHGTIVQMMLFARRFLKAPQAMTDDDRADYNRRVGRQVDDFRTFVNTHYMTERDDTPFWREVREHRIHPETKERLARWQKEMPRMTHFPDDLDGLPHVQTQLHYPVLEGLGLLNQDTARAEMALDPKLRQFARDTYESLVREYRDAARQALGHAQYLQLVREMKL

SEQ ID NO: 86069 - protein, 502 aa, Sphingomonas sp.
  REGION 1..502: note = tr|A0A0Q8XLL7|A0A0Q8XLL7_9SPHN Tryptophan halogenase; OS = Sphingomonas sp. Root241 OX=1736501 GN=ASE13_16345 PE=4; SV = 1
MTAPPIRSVVIIGGGTAGWMTAAALARMVQAGVQVTLVESDAIGTVGVGEATIPPIQTFNAMLGIDEKDFLSRTRGSMKLGIEFVDWNAPGHRYLHPFGEYGFDIEGVKFHQIWHRLHAAGQASALDDYSLCAVACRLCRYDAPARDPGSPLSRLVQAYHFDASLYARYLRDYAEVRGVVRREGKIIDVALRGEDGFIEAVTLEDGSRLGGDLFVDCSGFRGLLIEEALHTGYEDWTHWLPCDRALAVPTANTGPLAPYTRATARAAGWQWRIPLQHRTGNGYVYSSAHISDDEAAATLLANLEGEPLADPRPLRFVTGRRKLAWNRNCVAIGLSSGFLEPLESTSIHLIQAGISRLLALFPDSGWGDAERDTYNDFTRTQYEQVRDFVILHYKANARDEPLWRYVREMAVPESLTRRIELFRNRGRVFRREDELFAETSWIAVMLGQGITPQGWDPLADALDPGQLRQMLDRIRSTFRRTAEAMPAHADWLARHCPSRGTA

SEQ ID NO: 86070 - protein, 497 aa, Sphingomonas sp.
  REGION 1..497: note = tr|A0A0Q8XDQ1|A0A0Q8XDQ1_9SPHN Tryptophan halogenase; OS = Sphingomonas sp. Root241 OX=1736501 GN=ASE13_18070 PE=4; SV = 1
MNEQVVKRVVIAGGGTAGWVAAAALVKQLGPLIDITLVESDEIGTVGVGESTIPTSRSFHELLGINEQAFMRATQATFKLGIAFENWGQIGDRYIHSFGEIGTRSTWMADFHHFWLEAREQGFGGSLADYCFELQASEAGKFAKAEGLPINYAYHLDATLYARFLRGLAEPAGVKRVEGKIARVLQHPETGFITALVLESGVNIEGDLFLDCTGFRALLIEKTLQTGYEDWTRYLATNSAFAVQTRSVGPAIPLTRAIAHEAGWRWRIPLQHRVGNGIVFCSEFMSDEDARAKLLNDIDGDPLIEPRLIRYQTGARRKVWNKNCVALGLASGFIEPLESTSIHLVKVAVTRLIQEFPFGGCHEAIANRFNDQSRHEIEGIRDFITLHYHLTQRDDSPFWDRCRTMEIPDSLAQRMALFRDDAHAYQDGNDLFRVDSWVQVLLGQGLAPTSYHRLAKMMDPDELRTALGTLKANIDKGVARMPSHQEFLAQYCPAGDP

SEQ ID NO: 86071 - protein, 511 aa, Sphingomonas sanguinis
  REGION 1..511: note = tr|A0A147IYD5|A0A147IYD5_9SPHN Tryptophan halogenase; OS = Sphingomonas sanguinis OX=33051 GN=SB4_06595 PE=4 SV=1
MTGAAHPNSPIKTVTIVGGGTAGWMAAALLSRLLLGAYTIRLIESEEIGTIGVGEATIPAIRTFNGLAGIDEFEMVRATQATFKLGIEFRNWRAPGHSYIHGFGKIGQDLYWLHCHQFWLKEAARGRAKHFDHYALNTLAARMNRFTMPDPAHPNSPIADIDYAYHFDASLYARYLRMRAEKAGVERIEGRIVAANRRASDGHLDHVVLADGRTVDGDLFIDCSGMRGLLIGEAMGVGYEDWSQWLLCDRALAVPSARGSGPLTPYTRSTAHGAGWQWRIPLQHRTGNGHVYSSRFVSDDEATATLLANLDTPALGDPRPVRFRPGKRTRAWEKNVVALGLAGGLLEPLESTSIHLIQTGLLRLLALFPGRGFHAADMAEYNRQTDFEYRDVRDFIIAHYKVTLREDTPFWQYMRHMDVPDSLAERIELFRSSARFFMHGKAELFREESWVQVLLGQGLDAQYDPMVDMIPDAQTTAFLSDVEEVIAEVASSLPTHETFIARHCQAPPLQG

SEQ ID NO: 86072 - protein, 536 aa, Sphingomonas sp.
  REGION 1..536: note = tr|A0A0Q8XU59|A0A0Q8XU59_9SPHN Tryptophan halogenase; OS = Sphingomonas sp. Root241 OX=1736501 GN=ASE13_00205 PE=4; SV = 1
MTAAALIRFLGPGSSVTLVESEEIGTVGVGEATIPQIRMFNAGLGVDENAFIAATQATFKLAIEFVGWTKGGRYMHAFGDVGRPNGGVAFQHSWLRGMAEGVARPLAEYSLNNAAALANRMQRGPAHTAAMLPEMPYAFHFDAGLYARFLRSYAEQAGVVRHEGRIVEVLRDSGTGDVTALRLERTYDGLNRPSSVRAEPVEALPSTGASQADSRPSTSSGRTVGVASAQAEAAPDDSPEIAGDLFIDCTGFRGLLIADALGVGYEDWSHWLPCDRALAVPSARAGDFTSYTRATAHAAGWQWRIPLQHRTGNGIVYSSDALSDDEAAAQLLANLDGPALADPRPLRFMPGKRRAFWQANVIAVGLASGFLEPLESTSIHMIQSAVERILKLLPGRCIGEAQRAEYNRQADREYDRIRDFLILHYAANDRDEPFWRARRETPLPESLAHKIALWRASGQIVREESDLFSEVAWLQVLVGQGIAAEGHHPLADRPGSAELAEYLDLLAKLTAREVAQMPDHAAFIRQHCAAHEEIAA

SEQ ID NO: 86073 - protein, 488 aa, Sphingomonas sp.
  REGION 1..488: note = tr|A0A0Q8XEI6|A0A0Q8XEI6_9SPHN Tryptophan halogenase; OS = Sphingomonas sp. Root241 OX=1736501 GN=ASE13_18005 PE=4; SV = 1
MAAAALSTALKPHQCRIVLVESEEIGTVGVGEATIPPIQLFNKLLGVDECEFVRETQGTFKLGIEFVGWLREGERYFHPFGRYGDDFGLTPFHQQWLRARTLGNATPLDAWSLNHQAAYRGRFEIPTPQSGRVFSTFSWAYHFDASLYARYLRGLAESRGVERIEGKIAEVVLRPENGFVERLTLADGRGLEADLFLDCTGFRGLITEALDTGYEDWTRWLPCDRALAVPCARIADPEPFTRSTARPAGWQWRIPLQHRTGNGQVYCSGAISDDAVHASLMANLDGAPEAEPRQLRFTTGRRRRAWNRNCIALGLASGFLEPLESTSIHLIQTGISRLLSWFPDRNFDPLLATEYNRLVDAEMESIRDFLVLHYQANQRDEPFWRQCRAMAIPDTLAAKIEMFRANGRLIERQHELFHPPSWLAVLLGQGVHPATHDPLADTIAPQELAAILGGMRQVIDQAVDRMPTHQQFIEHHCRAAARPIPLAS

SEQ ID NO: 86074 - protein, 609 aa, Fischerella thermalis
  REGION 1..609: note = tr|A0A2N6LUZ7|A0A2N6LUZ7_9CYAN Tryptophan halogenase; OS = Fischerella thermalis CCMEE 5205 OX=2019671; GN = CEN40_25840 PE=4 SV=1
MTTHNTQSQVYDVVIMGAGIGGVCQARHLLLNIPNIKIALVDPRPEERTDRDMKVGESTVEISTLMICKELGLYDYMIENHPPKFGLNFHWAKEAGKTENTEDYYHIWTVKQPPLASVLINRPKFERDLLRMNQQMGAEFYNGRVVDVDLTPGDELNTVHVKQGDRYLELKTKHVIDSAGRKFLIGRKTDNLITGPENLYGINNGSVWMRVRNVDRTIFHSGYDPYVCTCSHYYAANHWMGHGHWVWMLPTDTQNMELSIGLLYHHDIISPHSVNTKEKFYAFLEANHNVVYRLLKSGEEVDFHHWPRIAHKSKQMYSQDNWYIIGDAAAIFDPFYSQGLTMMSFQIESVTEIIHAKLAGEANAREKCALYNKFALNMIDRTNVLVSRHEKQIGDASIMTWRMYLENIWWFKMLIPMFVGKWHLDLDFLKNVVAKPGRLYVVQIMNAVYEHLDELVERKANIGFLHTHIADQLPFGFTMSNDFDNFLHLTKYEPQRANIYVSIQWSHFFVALWYLKFLWKAYGLKGVLSPQNLKHVFALFKAFAEAAWDHLIFRIKTKNIPGNSIIANIRKEFKNYRAPAKLEPWLEEVTEASNGNVTTQSRELVKAEI

SEQ ID NO: 86075 - protein, 510 aa, Sphingomonas sp.
  REGION 1..510: note = tr|A0A0Q8XC81|A0A0Q8XC81_9SPHN Tryptophan halogenase; OS = Sphingomonas sp. Root241 OX=1736501 GN=ASE13_16290 PE=4; SV = 1
MRAPDALRKICIVGGGTAGWIAAAVMAHHFKGKLFEIELVESDDIGTIGVGESTIPPFMELIAKLDINEQDFVRATQASFKLGIEFEDWHRKGESYFHPFGAIGQQVELSEFYQCWLKARQGGQPFELQDFAPATAMARTGKFMLPFKAQKTPIGGAAYALHVDAKRVAQFLRGHAEDRGVKRIEGIVSDVRLDDRGFVDTLVLKDGREVGADFFIDCSGFRALLIEKALGVGYQDWSEWLFCDRAIAAQTRNVGPPRPYTLAQAQDFGWRWRIPLQHRTGNGHVFCSEFLSDDDATRILLDQIEGEIVAGPMVVPFKTGVRKQIWHKNVLSLGLASGFIEPLESTAIHLVYRGMDFFFRYLPDRNCDPRLAAEYNRRMTADYIEIRDFIVLHYCATERDDTPFWRKCRDMILPDSLQARIELFRTNGALREGLDELFRAASWHSVLEGMGIHPATYHPLVDRIDEAWLYEAMEKVRAQLRQVVETLPTHQEFIDAHCRADAVDLGKPAR

SEQ ID NO: 86076 - protein, 536 aa, Sphingomonas sanguinis
  REGION 1..536: note = tr|A0A147J298|A0A147J298_9SPHN Tryptophan halogenase; OS = Sphingomonas sanguinis OX=33051 GN=SB4_02440 PE=4 SV=1
MTTPSPDAIRSVVIVGGGTAGWMAAAAFARLLNNGYTQVTLVESEEIGTVGVGEATIPPIITFNQMLGLDENDFLAKTAGTFKLGIEFVDWGDKGERYFHPFGRHGQDLQGVHFHQLWLRERSRRALPDIAEWSMSAMAARSGKFGRAKPDARSPIRELFYAFHFDASLYARYLRGYAERGGVTRIEGRIDAVNLRPEDGYVEAVTLADGRRIEGDLFIDCSGFRGLLIEEALETGYDSYAQWLPCDRAVAAPCALPNPAEPDPFTRATAREAGWQWRIPLQHRMGNGLVYCSEYLEADAAEAQLLASLEGELLGDPRHLRFTAGRRRESWNRNVVALGLSSGFLEPLESTSIHLVQAAIQRLIALFPDKRFDPAERTEFNRQMRDLYEDVRDFIILHYKATRRSDTPFWDRVRTMDVPDSLARKMALWSGKGRLFREGYDLFSNPSWVAVSLGQGIVPQSWEPAADALDEDLVAQALEQLRVGYADTAARMPSHGDFLRMTAPSPLAPALAPGRLADGGFDFARTPSGGGKAPLL

SEQ ID NO: 86077 - protein, 499 aa, Alteromonas sp.
  REGION 1..499: note = tr|A0A3N5YCQ7|A0A3N5YCQ7_9ALTE Tryptophan 7-halogenase OS=Alteromonas sp. U0105 OX=2259342; GN = DRW07_06020 PE=4 SV=1
MTEKKLVQKVIIAGGGTAGWMAAATLAATIGKRLQITLIESDDIPTVGVGEATVPSLLTIHQLLKIREDDFLRAVNGTYKLGIMFENWTKLNHKYFHSFGKSGLSCWAAGFHHFWVRANEQKMAKDYAAYSLESVAAEKGKFAHIKDPQLNYAYHLDSAAYGQFLRSIAQQHGTTRIEGKIDRVNVHSQSGHIESLTLASGQVVDGDLFIDCTGFRSLLLGQALKVGYNDWSDVLPANAAYAVQTESHRPAVPFTRSIALDAGWRWQIPLQHRVGNGVVFSTEFKSEQSALDDLLQGIDGTPLTDPRLIRFTTGQRKEFWHKNCVSVGLSSGFIEPLESTSIHLIQQAIIWLISLFPTEGVDENLVNRFNQQMRVETETIRDFIVLHYHLQQRDDHEFWRYLRNMKVSDRLQQIMDLFANNGTIVEEQDDLFAENSWVQVMMGQGLTPKQYHPIVDMMSDRDLNTFMRQQESQIQQQLANLPMHTQFIQYLLQAQTRAN

SEQ ID NO: 86078 - protein, 498 aa, Erythrobacter nanhaisediminis
  REGION 1..498: note = tr|A0A1I5NPC4|A0A1I5NPC4_9SPHN Tryptophan halogenase; OS = Erythrobacter nanhaisediminis OX=604088; GN = SAMN04488060_1999 PE=4 SV=1
MSTGSAPRVVVLGGGSAGWITACLLHHEWAARGGSVTVVESPAIGIIGVGEGSTPQLKAFFDHLGIEEAEWMAACDATYKLGIRFTGWSEREGCESYFHPFPGPVDLHSEPGFVKNCGLRRRGIDLPAHPDDWFLAAHLAKSCRGPVPEANFPFPQSYGYHFDAHKLGAFLRDWAVPRGVTHRPLKVEDVELDQSGDIAALLCEDGERIEGDLFVDCSGFAALLAQQKLGANFLPFAENLFNDRAVVMPTSHAGPIVPQTESIAMSAGWRWSIPLTSRVGNGYVYSSRHISDDNAAAELASALGVAADKAQPRFLKMKVGRLENSWVRNCLATGLSQGFIEPLEATALHIVIATALDFAKAYESGGFTDAHRETFNQRIAARYEGIRDYIVAHYRMNQRTDTDYWRENATNQSLSDNLKAMMTAWFTHGSIEEVNAKAYGPAAPYAPMSWHALFAGYGTFPPPAKMQEPPPGLDVADREATGKMLAACALNFPEYAPV

SEQ ID NO: 86079 - protein, 166 aa, Bacillus thuringiensis
  REGION 1..166: note = tr|A0A0K0SI14|A0A0K0SI14_BACT3 Tryptophan 2-halogenase OS=Bacillus thuringiensis subsp. indiana; OX = 180850 GN=cmdE PE=4 SV=1
MVTPISKNRISVGLVINEERLREEQKNATNDEIFEAYLQLFPRVQKRLTSAKPIGKMRVESNFCYYADSLTGPDYLLVGDSGCFVDPMFSGGVFLAMATGMKAGKTLDQILNKQNSQQQLLQHYENFYNTGYDTYLRFLYWFYESNCDFYKALNSIPTEHREGISQ

SEQ ID NO: 86080 - protein, 514 aa, unidentified
  source 1..514: note = Sphingomonadales bacterium
  REGION 1..514: note = tr|A0A1G3K4B3|A0A1G3K4B3_9SPHN Tryptophan halogenase; OS = Sphingomonadales bacterium RIFCSPLOWO2_12_FULL_63_15; OX = 1802170 GN=A3H25_09915 PE=4 SV=1
MVHPVRNIVIVGGGTAGWLTAGIIAARHRTRIGQGFSVTLVESPNTPIIGVGEGTWPTLRTTLSRMGVSESDFFRECDAAFKQGARFDRWTTGAVDDGYYHPLMLPQNFGQVNLAPHWLASNQGESFCDSVSAQGRICDDGLAPKTIATAEYDALANYAYHLDAGKFAPFIQRHCCETLSVRHVLADVQQVLMHENGDIRAIQTAQAGEIEGDLFVDCTGFKALLIEGAMKVPFKDCNDVLFCDTALAMQVPYERPDSPMASHTISTAQTSGWIWDIGIQTRRGVGHVFSSSHISDEEAERELRAYIGPAADGLNARKIKIRSGHRETFWKGNCVAVGLAAGFLEPLEASAIVLIELSAKIIAEQMPACREVMDIISSRFNATTHYRWGRIIDFLKLHYVLTKRTDSDFWRDNVRDETIPDRLKELLLLWRYQSPWFHDEFDRVEEVFPAASYQYVLYGMGYHTEVDPASLSRDYRLADRARRENAALTDKLCAGLPRHRDLINKIVAHGLPPV

SEQ ID NO: 86081 - protein, 497 aa, unidentified
  source 1..497: note = Pelagimonas varians
  REGION 1..497: note = tr|A0A238L734|A0A238L734_9RHOB Flavin-dependent tryptophan halogenase RebH OS=Pelagimonas varians; OX = 696760 GN=rebH_3 PE=4 SV=1
MGKFKRVLVVGGGSAGWITAAYLDAVLNGIGKARDPVVSISLVESAKIGRIGVGEATIPSIRLTLQRIGISEADVMTATEATFKHGIRFCDWNGPGHSYFHPFDRRQAGRFDPTGVNWMLSDRSVPFSDLVSVQPRLALSDRAPKSADMPDYEGELGYAYHLNAEALADLLARVATGRGVEHIEGKITGVALRGTLGHVDHVVLEDGRKLGADLFIDCSGFAAVLIEKALKTPFRDDSKWLPCDRAVTMQIPYQDGETARPYTTATAMASGWRWEIGLKSRRGTGYVYSSAYCSDSEAEEALRKENGEADLPVRILQFPVGRRVQAWVGNVVAIGLSAGFIEPLESTGLYLVEKAVLHLSENFPFGGVENAEPLRSRFNELTAREYDELLPFVALHYVIAQRSDTPFWQDAKSEERIPDRLRTLLKLWECKPPSASDFDFWDGCFFAENYEYILYGLGWHPANVRASTQMQPPRRSQVVEQALEQMLKNLPLHKDAL

SEQ ID NO: 86082 - protein, 499 aa, Sphingopyxis sp.
  REGION 1..499: note = tr|A0A0W1DX10|A0A0W1DX10_9SPHN Tryptophan halogenase; OS = Sphingopyxis sp. H050 OX=1759072 GN=ATE67_01330 PE=4; SV = 1
MSEAKPVRRVVIAGGGTSGWMMAAAIARTMGKTVDLTLVESEQIGTIGVGESTIPPLVNFNRILGIPEPEFMRAAQATFKLGILFDNWKYDGHSYFHSFGLSGKDHWSAGFQHFWLHARAKGYPHSYDDYCLELVAGLQGKFAHLPEDRMNYAYHVDATLYGRFLRKLAEADGAKRVEGKIQKVELDGESGNIAALLLDGDRRVEGDMFVDCTGFRGLLIDGALHAGFEDWSHWLPNDSAIAVQSDHLGPPMPYTQAIAHDAGWQWRIPLQHRMGAGIVYASGYLSRDEALNRLMSSVGTPRIEPFDIKFKGGVRRKQWYRNCVAVGLAGGFVEPLEATTVHLIQRAVLRFIRLMPNGRVSERDAIEFNEQQRQDIEQIRDFVILHYKATERRDSPFWRHVANMPVPDSLQQKIELFRETGRTFRKNEELFAENSWVQVMMGQGVDPQSYHPIAEKLSDDELERLMASLRESVTRTAATLPSHQDYVAQYCGAAEPKAA

SEQ ID NO: 86083 - protein, 538 aa, Burkholderia sp.
  REGION 1..538: note = tr|U2FKI4|U2FKI4_9BURK Tryptophan halogenase PrnA; OS = Burkholderia sp. AU4i OX=1335308 GN=L810_8678 PE=4 SV=1
MSNPIKNIVIVGGGTAGWMAASYLVRALQQHTSITLVESAAIPRIGVGEATIPSLQKVFFDFLGIPEREWMPQVNGAFKAAIKFVNWRKSPEHARDDHFYHLFGTVPNCDGVPLTHYWMRKREQGFQQPMEYACYPQPGALDAKLAPCLSDGTRQMSHAWHFDAHLVADFLKRWAIERGVKQVIDEVEQVHLNERGHIASLSTKEGRTLEADLFIDCSGMRGLLINQALKEPFIDMSDYLLCDSAVASAVPNADARVGVEPYTSAIAMNSGWTWKIPMLGRFGSGYVFSSKFTSRDQATADFLNLWGLSDKQPLNQIKFRVGRNGRAWVNNCVAIGLSSCFLEPLESTGIYFIYAALYQLVKHFPDTSFDPRLADAFNAEIVHMFDDCRDFVQAHYFTSSRDDTPFWLANRHDLRLSDAIKEKVQRYKAGLPLTTTSFDDSTYYETFDYEFRNFWLNGNYYCIFAGLGLLPDRSLPLLQHRPESIDKAEAMFARIRREAERLRTSLPTNYDYLRSLRDGGAGLSRSQPGSTLAAPEIL

SEQ ID NO: 86084 - protein, 516 aa, Alteromonas sp.
  REGION 1..516: note = tr|A0A3N5YEI2|A0A3N5YEI2_9ALTE Tryptophan 7-halogenase OS=Alteromonas sp. U0105 OX=2259342; GN = DRW07_01720 PE=4 SV=1
MQDNSIKSIVIVGGGTAGWMTAAALANLLKDTKITLIESDQIGTVGVGEATLPHLRFFIQRLGIDEHAFMRATNATYKMGIEFINWGEIGDAYIHPFGDFGHPIKGIDFHHYYVKLHQQGLNKPIGQYSLPVMASKAKKFAYPSTDEKSILSTYSYAFHMDAGLFSNFLRDYSETRGVTRFEGMVTRVNQCNESGFIKSVTLNDETEFDADFFIDCSGFKGLLIEQCLKTGYDDWRHWLPCDRAIAIPTQATSAPLPYTKATARNAGWQWRIPLQNRVGNGHIYSSPYMNDDTALETLLANIDGKPISEPNFLRFTTGKRKKAWSKNCVAIGLSAGFLEPLESTSIHLIQLGIMKLLDFFPDRNCDEIRVNEYNRMMQLEFERLRDFLVLHYHATQRSDSAFWNYVRTMPLPAGLDHKIKLFKERGRVVQYSEGLFLKASWLAVYFGQGIIPTHYDWQLDTIPTEHIVKQLDDIESDINSAVHQMPSHADSIAQHCALAKSWRTPPPRASFSLYGG

SEQ ID NO: 86085 - protein, 503 aa, unidentified
  source 1..503: note = Oleiagrimonas soli
  REGION 1..503: note = tr|A0A099CZB1|A0A099CZB1_9GAMM Tryptophan halogenase; OS = Oleiagrimonas soli OX=1543381 GN=LF63_0100955 PE=4 SV=1
MNDPRIQKIVIVGGGTAGWMAAAAFAKLLGRAYDVRLIESEEIGTIGVGEATVPHLKLFNNLLRIDEIEFVKKTRATFKLGIQFNDWGRIGDSYIHGFGKIGTELGLLPFHQYWIKAHREGIAGELGDYSINTLAAPRGKFMPSATDVPPNSPLADIAYAYHFDAGRYAQFLRAFAEEFGARRTEGKITQTHLRESDGFVEAVTLESGERIEGDLFIDCSGFRGLLIEQALQTGYEDWTHWLPCDRAIAVASERTGPPPPFTRATARTAGWQWRIPLQHRMGNGYVYSSQYQSQDEATSILLGHLEGKPLAEPRHLRFTTGMRRKFWNRNVVALGLAGGFMEPLESTSIHLIQSGISRLLNLFPQRDFDPVLMERYNAQMTFEFERIRDFLILHYYLTERTDTPFWNYCRTMQIPESLQENIRLFEDSGRFFRNAEEMFAEPSWVQVMIGQRLMPRSHHPLVDEVPQDYLKQFIGNVGQVIDQCVGAMPMHQAFIDRHCAATE

SEQ ID NO: 86086 - protein, 500 aa, Sphingomonas sp.
  REGION 1..500: note = tr|A0A4R2YFS8|A0A4R2YFS8_9SPHN Tryptophan halogenase; OS = Sphingomonas sp. JUb134 OX=2485112 GN=EDF69_103158 PE=4; SV = 1
MIGGKRMRRIVVAGGGTAGWMAAAAIARTMGRAVEVTLVESDAIGTVGVGESTIPPLINFNRLLGIDEAAFMAATQATFKLGIQFENWMLPGHRYFHSFGFTGKDHWSAGFQHFWLYGRTRGHDAPYDAYCVELIAALEGKFGHLPGDRANYAYQLDATLYARFLRTMAEGDGARRVEGKIAQVELDGESGDIAALVLESGTRVGGDLFLDCTGFRALLIEQTLHTGYDDWTHWLPCDSAIAVQTDNVGPPVPYTRAIAHDAGWQWRIPLQHRTGNGLVYCSRYLGRDAALERLLGNLEGAVRTEPNHLRFTTGVRRRQWVRNCVAIGLAGGFAEPLESTSIHLIQRAVLRLIRMLPLSAVSPRDVAEFNEQQLQDMTQVRDFLILHYKATERRDSAFWRHCADMEIPDSLTQKIELFRETGRVFRKNEELFAENSWVQVMMGQGIEPRAWHPIAEKLRDEELARLLTTLRENVARTVAAMPRHADYVASYCGAAREQAA

SEQ ID NO: 86087 - protein, 413 aa, Salinispora arenicola
  REGION 1..413: note = tr|A8LZN8|A8LZN8_SALAI Tryptophan halogenase; OS = Salinispora arenicola (strain CNS-205) OX=391037; GN = Sare_2031 PE=4 SV=1
MRQPVAEYDVIVVGGGPAGACTAGLLALEGHRILLLEREKFPRYHVGESLITGVVPTLTALGLLDRMAELRFQVKYGGSLLWGENQTEPWSFRFREIRGGRYEYAWQVRRAEFDAMLLDRARELGVHVVEGATVRDALTDGDRLAGVRYQLKGESGSVPARATMVVDASGQHRWLGRRFGLVDWYDDLRNVAVWSYWQGALRYPGEHEGDLLTESCRQGWLWYAPLSPELTGIGYVTTSDRLVASGLTPEQLLERHIAESSEVSWLTAGAKRVDIYRAARDWSYTCQQFSGPGWVLVGDAAAFIDPLLSAGVTLAMRAASSVAKAVHETLTAPDKERHVMKDYEDRYRDFLGSLLELVRFFYDGAHGKEELHLRAQAIVDPDRSLPPKLSFVSLLSGLVRGDESLGADAVDEY

SEQ ID NO: 86088 - protein, 495 aa, unidentified
  source 1..495: note = Verrucomicrobiaceae bacterium
  REGION 1..495: note = tr|A0A4Q2YR72|A0A4Q2YR72_9BACT Uncharacterized protein (Fragment) OS=Verrucomicrobiaceae bacterium; OX = 2026800 GN=EOP85_14890 PE=4 SV=1
VIVVGSGSAGLIAALSFKRKVPLLDVSIVRSPEIGVIGVGEGTTPNFPTYLFDELGISRKRFYELAGPTWKLGVRFLWGPRGRFDYSFSPQLDSQWTDLPKPHGFYCEDQFANNNLAAALMRQDKVFCRQQNGCPDIQPWHAFHIENVKFVEVLEQIAREIGVNIIDGKVVGADRGDGGISAVHLEDGRRMEADFFVDASGFRSELLGQALEEPYTSFDKTLFCDRAVVGGWERGPDEPILPYTTAEQMDAGWSWRIDHEHHVNRGYVYSSQAISDEDAAEEFIRKNPKVPKSPRVVKFRSGCYKRLWVDNVVAIGNAGGFVEPLEATALMIVCSHCKTMVDFLLHSSLEPTPSIRNLYNDLVAATWSDIRDFLGLHYKSNSAMDTPFWKHCQNDTDLSGIGALLEFYEENGPTGFCRYRMPTSQSDFGIEGYFTILTGNKVPHRKPHYPTEKEVAQWKAHCKAFEQEARTGMGVKEALDYVRHPGWRWFGEKTG

SEQ ID NO: 86089 - protein, 510 aa, Massilia sp.
  REGION 1..510: note = tr|A0A1G6UJR5|A0A1G6UJR5_9BURK 2-polyprenyl-6-methoxyphenol hydroxylase OS=Massilia sp. PDC64 OX=1881046 GN=SAMN05428966_104198 PE=4 SV=1
MSKPIEHVVVVGGGSAGWLAAAVLAAEHPRLAVTLVESPGVPPIGVGEGTWPSMRETLQRIGVSETAFFRECDAAFKQGSRFDRWVDGSDSDIYFHPFSLPQGYGEANLVAAWQRAHRDVPFADLVSYQPHLCLQGRAPKQPQTPEFAGVANYGYHLDAGKFGVFLQKHCTDKLRVRHVLAHVVDILSTEDGDIAALRTREAGLVEGDLFIDCTGMASLLLGRHYGVPLVSQRDVLFNDRALAVQVPYPAPDTPIASQTTSTAQPHGWIWDIGLPTRRGVGYVYSSAHAEDDAAERTLRAYLASTGIEGDIPAPRRIAFDPGYRARFWERNVVAIGLSAGFIEPLEASALALVELSAAWLADDLPATRAQMDTISARFNEAFTYRWERIIDFLKLHYVLSKRTDTGYWLDHRAPHTQSPRLRELLALWRTRTPSRRDFPRIEEIFPSASWQYILYGMGFRPELTARASDLPERADHYFREAARLTARMLPQLPANREMLHHIRQYGMPPG

SEQ ID NO: 86090 - protein, 502 aa, Asticcacaulis sp.
  REGION 1..502: note = tr|V4Q0K6|V4Q0K6_9CAUL Tryptophan halogenase; OS = Asticcacaulis sp. AC460 OX=1282360 GN=ABAC460_07270; PE = 4 SV=1
MMIRKLVVVGGGTAGWMAAAALSRTFGSAGYSITLIESDEIGTVGVGEATIPPIIEFNQMLGIDENDFLKAVNGTFKLGIRFINWSALGSDYLHPFGVYGVDMNGLNFNHHLMRYRKAGGNADFGLFNPQTVASRQNRFGRMQEINPQAPRVNYAFHFDAALYARYLRAYCEKLGTIRQEGRITKVEQNPETGDVTAVVLENGKVITGDLFIDCSGFRGLLIEQTLKSGYEDWSKWLPCNRAAAVPCDKAGPVTPYTTSTAREAGWQWRIPLQHRTGNGYVFSSEYMSEDEASSLLMQRLDGKAQADPRIIRFVTGKRKQQWNRNVVAMGLASGFLEPLESTSIWLVQEAITMLLRYFPRDGITQNQRDCFNREMLGAYDNVKDFLIAHYKVTAREDTPFWAYVKHMDIPDSLAFRLESFAEHNQPLVRNHELFKDASWFAVLVGQGMEPKSYNPMADVMPQDEFRWRMQRVREGTAGLAGMMPQHEAYLAKACPSPQRVTV

SEQ ID NO: 86091 - protein, 503 aa, unidentified
  source 1..503: note = Asticcacaulis biprosthecum
  REGION 1..503: note = tr|F4QHY6|F4QHY6_9CAUL Tryptophan halogenase PrnA; OS = Asticcacaulis biprosthecum C19 OX=715226 GN=ABI_01270; PE = 4 SV=1
MQSPDPIRSIVIVGGGTAGWMAAAAFARNLGRHLSITLVESEDIGTVGVGEATIPPIKLFNAMLGLDEAEFMRETRATYKLGIRFHDWRHLGQDYFHPFGVYGLKPELGHFLQFWLRMQAQGHDIGPVSDYSLCTLAALQGRMGRQSDDGAMATFGSAYHFDAGLYARYLRRYSQQLGVIRVEGLIADVQQHPESGNVQSVRLKDGRGIAGDLFIDCSGFRGLLIEQTLGTGYDDWSHWLPCDRAMAMPCAHGGAQIQPYTSSTAREGGWQWHIPLQHRVGNGYVYSSRFVDDDTAEATLRANLEGEPLAEPNRLRFQTGRRKKFWNKNVVALGLASGFIEPLESTSIHLIQSGINKLLLHFPDRSFAPANIEAYNRRQHLDYERIRDFIILHYHATARDDSGLWRYTRTMEIPDSLAHKIEVFRERGAFAHAAEEMFTPTSWMAVMMGQGIIPQSHDPLVAYEDIATLRDGFARMKDHLKQLADTLPTQHAYLKQNGMLAIS

SEQ ID NO: 86092 - protein, 497 aa, Asticcacaulis sp.
  REGION 1..497: note = tr|V4P6Y6|V4P6Y6_9CAUL Uncharacterized protein; OS = Asticcacaulis sp. AC460 OX=1282360 GN=ABAC460_12475; PE = 4 SV=1
MDTAKRRQVVIVGGGTAGWMSAALLAKITQGRLGDITLVESEEIGTIGVGEATIPAIKRFNRLLDVQERDFVRQTQASFKLGIEFVDWGKLGARYFHPFGPIGNPIGRTDFHHFLTRRRLAGEVEDFETYSLNCVAAKQNRFVVAPQDDSLLSTLAYAYHFDASLYAAYLRRYAEAKGVQRVEGRIKHVAQNSETGFIETLTLDSGQTIAGDFFIDCSGLSGLLIEKTLHSGFEDWSALLPCNSAAFVPSEKTDPITPYTRSTARTAGWQWRIPLQHRTGNGHVFCSDFMNDDEAAATLLRHLDGKALADPKFVRFKTGRRKLSWNRNVVAIGLSGGFLEPLESTSIHLIQSGLVKLLDFWPGETIDPLLAEQYNRAMANQYNWIRDFIILHYKASQRDDSEFWRYCRDMAVPDSLTYRLDHFRSSSRIVLTPGELFQPPSWLAVMLGQHIEPEGYDPLADIADAEKVAMQFNRIRTAVSQVAQTIPSHQAYLDSLG

SEQ ID NO: 86093 - protein, 492 aa, unidentified
  source 1..492: note = Rickettsiales bacterium
  REGION 1..492: note = tr|A0A2E3ID23|A0A2E3ID23_9RICK Tryptophan halogenase; OS = Rickettsiales bacterium OX=2026788 GN=CMP20_17010 PE=4; SV = 1
MQKDSIKHIVIAGGGTAGWMTAAALGKLFGANIKVTLIESDAIPTVGVGEATIPTLHLFHDLLKIKESEFMAATNATFKLGIKFEDWYQRNQSYIHSFGRFDHGCWAAGFQHFWLRGRQLDIASEIGDYCPEHLACRMGKFATAPKQERNHAFHLDAGLYAKFLRNFAEQYGVRRIEGKIDNVNLNHTNGFIQSLSLESGQRVEGQLFIDCTGFRGLLIEQALHTGYEDWSHWLPCDSAIAVQTELNESNEPYTRSIAHHAGWQWQIPLQTRMGNGMVFCSKYISDDEAKTQLLANIQGKTLNPPRVLKFKTGVRRKLWNKNCVAIGLAGGFIEPLESTSIHLIQQSIIRLMQSLPTKKMEAALRDRFNASMREEIDNIRDFIILHYHATARKDSAFWRYCKDMPIPDSLQARMDQFAQSGHVYQGNGELFGEASWLQVMLGQGITPKAYHPIVDLMPEQELAKFLASVKQQTERRVNQLPNHLDFIRHYCQ

SEQ ID NO: 86094 - protein, 505 aa, Asticcacaulis sp.
  REGION 1..505: note = tr|V4PLP8|V4PLP8_9CAUL Tryptophan halogenase; OS = Asticcacaulis sp. AC460 OX=1282360 GN=ABAC460_16085; PE = 4 SV=1
MTAIETIVIVGGGTAGWMAAAALSRLRSGRPVNIVLVESEEIGTVGVGEATIPPFQDFNRLLEVDEQEMMAAVQGTFKLGIQFVNWGKLGDSYIHPFGNYGYQIDGVSFHHIWHRYRMAGDKRPIQVFNIETMAAHFGRFARTEDYKHDDLPPINYAYHIDAGRYARYLRGYAEKRGVVRIEGKVADVGLNAETGFVESLTLNNGETLKGDFFIDCSGFRGLLIEQALKTGYDDWSHYLPCNRAVALPCLREDGSGPLPYTRATAHTAGWQWQVPLQHRNGNGHVYCSSFMEDDEAHDILVRNLAGKPGAAPNFLRFVTGRRKKFWNKNVVALGLASGFMEPLESTSIHLINTGINKLISLISLDGVTQAQEDAFNRLTGKEYERIRDFLVLHYKSTVRDDSPFWNHCRTMDVPQSLTEKMALFQQNGQIFREDDELFTETSWAAVMMGQGVTMKGHNAMADTLNDAKTRKEMDGIEKSIQHVVQHMPSHGDYLKKYCPATPSGN

SEQ ID NO: 86095 - protein, 510 aa, unidentified
  source 1..510: note = Rickettsiales bacterium
  REGION 1..510: note = tr|A0A2E3I4V5|A0A2E3I4V5_9RICK Tryptophan halogenase; OS = Rickettsiales bacterium OX=2026788 GN=CMP20_02000 PE=4; SV = 1
MARLVLNNEKKQSTQNGQKLQRVQKVVIAGGGTAGWMAAASLSKLLGKSLDVTLVESDEIGTVGVGEATIPPIRTLHKLLNIDEQGFMRATNSTFKLGIEFNNWGQKDDSYIHSFGVTGKECWAGEFHHFWLRGKELGIDIPFGDYCYELQASKQGKFAFSANAPMNFAYHLDATLYAKFLRDFCTDSVTRIEGKIQQVNKHQESGFIQSLTLESGQIVEGDFFIDCTGFKGLLIEEALHTGYEDWSHWLPCDSAVAVQTQANSDPLPYTRATAHEFGWQWRIPLQSRVGNGMVFCSRYTSDEQAKATLLANLDGFPINEPRVIKFKTGRRRKGWNKNCVALGLASGFVEPLESTSIHLIMTGIVRLMRLFPFDGVRQSTIDEYNEKLTSELHSIRDFIVLHYKVTTRDDSPFWQHCQSMEVPASLAHKIRLFKETGRVFLDDGDIFRVDSWTQVMLGQGLAPEQYHRIVNEMNKDELTRFLAGMRSAIEQRVAQLPSHQQFIQRYCKAS

SEQ ID NO: 86096 - protein, 479 aa, Asticcacaulis sp.
  REGION 1..479: note = tr|V4PNU2|V4PNU2_9CAUL Tryptophan halogenase; OS = Asticcacaulis sp. AC460 OX=1282360 GN=ABAC460_14480; PE = 4 SV=1
MFMIKSIVIAGGGTAGWMTAAALARVFGPSLNITLVESDEIGTIGVGEATIPAIARFNTMLRLDEDAFLRETQGTFKLGIEFRGWRERGHSYMHSFGAVGRDLAYLPFHHYWYQDRMQGGDAGELGDYDLNHAAAYAGRFARADDLVHAFHFDAGLYAAFLRRYAEAGGVTRIEGRIADVTVDGDIRSLRLADGREIAGDFFIDCTGFRALLIEGALKTGYEDWRHWLPCDRALAVPSARTGALLPYTRATAQVAGWTWRIPLQHRTGNGHVYCSAHTSDDEAHAALMGQLDGEALADPRPIRFTTGRRKKLWHRNCLAIGLSAGFIEPLESTSIHLIQSAIERFIMLFPRGPNHDRLAEDFNNSSIMEMENIRDFIILHYHVNGRYDETFWNSCRNMTVPDSLHHRIELFRETAALHIPTADIFRLPSWLQVLHGQGVEPQAVHPFTERVARDDRARFLRGQRHDCRERLKHLPSLAG

SEQ ID NO: 86097 - protein, 504 aa, Brevundimonas sp.
  REGION 1..504: note = tr|A0A0Q5UY05|A0A0Q5UY05_9CAUL Tryptophan halogenase; OS = Brevundimonas sp. Leaf363 OX=1736353 GN=ASG17_12210; PE = 4 SV=1
MSDDQSIRSVVIVGGGTAGWMMAAALVQHFRNAPVRITVVESSDIGTIGVGEATIPTIRRFYAQLGLGDAELMAATEATCKLGIRFQDWSGPGSDFIHPFGLYGQDLNGIGFHHYWRKAHQAGDPAPLADYSLGASLARAGRFTLPSRNPPSTLSVFDWALHLDAGLFAQRLRRYAEEGGCTRIDARIGQVRLREDGFVAALELEGGRTVEGDLFIDCSGFRGLVIAEALKTPYEDWSRWLPCDAAYAVQSTLPDGDPQPFTRVTARSAGWQWGIPLRHRAGNGLVFSSRYQSDEGAVAELMPHLMGEPLMEPRRIGFKPGRRAQAWFKNCVSVGLSSGFLEPLESTSIALIETAIERLKGLFPDKRFDPAVIDEFNEQSAEEMERVRDFVILHYKLNQRTDTAFWRDCREMEIPETLQRKIALWRARGQFVRYRWEMFHPASWLAIYDGFDVWPDRVDPAVEALDPEQLKRSLEAMRRAVAEAVSQTPTHAQFLSAVGRQAAA

SEQ ID NO: 86098 - protein, 509 aa, unidentified
  source 1..509: note = Oleiagrimonas soli
  REGION 1..509: note = tr|A0A099CT63|A0A099CT63_9GAMM Tryptophan halogenase; OS = Oleiagrimonas soli OX=1543381 GN=LF63_0113170 PE=4 SV=1
MNASPIRRVVILGGGTAGWISAALLGRAFGSRLAIRLIESDAIGTVGVGEATIPQIQHINRFLGLDEREVLKASQGTYKLGIQFNDWGRVGDSYLHAFGDIGLPLGLIPFQHYWLRDRQERSAAASQGAAELWAYSINARACHAGRMARMERIGDTPLTGLRHAYHLDAGLYARFLRAQCDPTVVQRIEGKVVDVALREDDGFIQSLLLESGERIEGDLFIDCSGFRGLLIEETLHAGYDDWKHWLPCDRAMAVASTRVAPMRPYTQASARAAGWQWRIPLQHRSGNGHVYSSDFISDDEATATLLSHLEGEAMGEPRPLRFQTGCRRRFWHRNCIAIGLAAGFMEPLESTGIHLIQSAVSRLISLFPDSAFDAAMIDAYNRQTRFEYERIRDFLILHYRATERRDTPFWRHCAQIEPPESLRRKLDVFRASAQLFRDGEELFTDVGWLQVLIGQHVQPQRHHPLANAVTPAQLDEFLTHIRTLLDRAIDSMPSHDAFIERHCKAPPLP

SEQ ID NO: 86099 - protein, 501 aa, Asticcacaulis sp.
  REGION 1..501: note = tr|V4P627|V4P627_9CAUL Tryptophan halogenase; OS = Asticcacaulis sp. AC460 OX=1282360 GN=ABAC460_12945; PE = 4 SV=1
MTSYLKKIVILGGGSAGWMTAAALSSQLDPKFVSVTLVESDQIGTIGVGEATIPEIINFNRHLGIREDEFMKATHATFKLGIEFVDWGRKGDAYIHPFGGHGVDMNGYEFHQYWLRSRADGNAYPIDAYSMSAVASRQSRFDLPGTTNSPRSHLRYAYHFDATLYARYLRSYAEARGVRRVEGKVEDILQAPESGDITALRLDTGETIDGELFFDCTGFSALLIGKTLGVGYHDWSHWLPCDTAQAVPCAHAGPLLPYTRSTARTAGWQWRIPTQTRTGNGHIYSSAFMEDDEATAILLANLDGEAMASPRKIRFKAGHRHAFWKNNCVAIGLSAGFLEPLESTSIYLIQEGISRFIALFPDASLPEVVRKEYNQHMQTEFEQVRDFIILHYNATERDDTPFWNYCRNMSIPDSLSHKIDLFRTAGRTYAYREELFGRPSWIAVFLGQGIMPRSFDPVIAMLPSDAVRDSLDSMRQAMHAEAGRMPTHAAFLQSYCPAVGA

SEQ ID NO: 86100 - protein, 501 aa, unidentified
  source 1..501: note = Verrucomicrobiaceae bacterium
  REGION 1..501: note = tr|A0A4Q2YJI9|A0A4Q2YJI9_9BACT Tryptophan 7-halogenase OS=Verrucomicrobiaceae bacterium OX=2026800; GN = EOP86_04070 PE=4 SV=1
MVMNISRKIEKVVVLGGGSAGLIAALTVKKMLPELKVEVVHSVELGVIGVGEGTTAAFPRHFFEYLKMDPLGFYLGAEPVWKMGIRFDWGPQPQGFYYSFQHEYKSRWPEMSRNTGFYCTEQTRWLGITSACMAHNKVFPRKPDGSPHFHKGHAFHIENIKLIGWLTTECRQAGVEFTEGKVSRVERGAEGVEFLELEDGRGIVGDLFVDASGFRSELLGRTMGEEYISFEKSLFCDRAVIAGWPRTTEPVQPYTVAETMDAGWCWRIDHEHWINRGYVYSSRFISDEDALAEFRRKNPKIANEPRVVRFKSGRYKRQWVGNVVGIGNAVGFVEPLEATALQVICVESSTLADTLKDSLCEPTPSLIDLYNRYNSRQWDDIRDFLSIHYAFNRRLDTPFWRACQEETDIAGAAEIVRFYQENGPSLVADAVLFDPTNSFGLEGYLALLVGQGVPHGKPWSPPPAEAKVWRDRLAAYGQHGARAYSAEECLSLIRAGKIKFS

SEQ ID NO: 86101 - protein, 500 aa, Nostoc calcicola
  REGION 1..500: note = tr|A0A1U7HHA3|A0A1U7HHA3_9NOSO Uncharacterized protein OS=Nostoc calcicola FACHB-389 OX=1357508; GN = FACHB389_30835 PE=4 SV=1
MEKTIHNVVVFGGGSAGFLSALALKVKMPALNVVVVHSTTIPIIGVGEATTAWIPWFLHKYLELNREQFYEETQPIWKLGIKFIWGDSSQSHFNYPFVTHLADKLSVLSKSTAYYCLDSTTESSLYSLLMEQCKSPCFRRENGDFVVDERFGYHIENVSFVSYLERRATEIDIKIIDRPVVNIEVAENGYIRQLKFDDGTMLAGDLFVDCSGFRSALLGEILQEPFCSFASSLFCDSAVTGTWMRDDAINPFTTAQTMQSGWCWQIDLPDKVNRGYVYSSAFINDDDALQEMKRHNPLMSDRHSIVRFKSGRHQRFWVNNVVAVGNASGFVEPLESTGLHMIGETIKCVCDVLIDSDQQPTPALINLANRAIAQKWDDIRDFLSIHFKFNHRVESEFWQHCWHQTDIGDAEAIVDFFQSNGPSSLGQILLRPNSVFGYNGYLNLLMGQQVATKYQSHNDILDLDRWRQIQNYFTKQCANALSIHEAIQVVKERKCQWLTS

SEQ ID NO: 86102 - protein, 512 aa, Brevundimonas sp.
  REGION 1..512: note = tr|A0A0Q5UYP8|A0A0Q5UYP8_9CAUL Tryptophan halogenase; OS = Brevundimonas sp. Leaf363 OX=1736353 GN=ASG17_12205; PE = 4 SV=1
MEAKAPNALRKVCVVGGGTAGWVAAALMAEHFKGKLFEIELVESDDIGTIGVGESTVPPFLQLLAKLGVNEQEFIRETQASFKLGIEFKDWLEKGQSYFHPFGTIGLPIDLSDFYQVWLKAKLAGYDRPLQDFAPASVMAREGKFTLPFKAQRTPLAGASYALHVDAKRVAQFLRRFAEARGVTRTEGMVSEVQTRADGFVEQLVLKDGRTVEADFFIDCSGFRALLIGKTLDVGYEDWSHWLLCDRAIAVQTENVGPPPPYTLAHAQDYGWRWRIPLQHRAGNGYVFSSQYLSDDEATATLMAQVEGKPVVDPMVVPFRTGVRDRIWDKNVLALGLAGGFIEPLESTAIHLIYRGMDFFFRFLPDRDCAPELATEYNRRMRADYEEIRDFIILHYCVTRRTDTPFWDACRTMTVSESLQRKIDLFRINGTVAEGLDELFRDPNWQSVLDGMGVVPRTYHPLVDRIPFGRATDGLDEAVANLERMVAGLPDHQSFIAQHCAAERPTAPVVAA

SEQ ID NO: 86103 - protein, 513 aa, Novosphingobium aromaticivorans
  REGION 1..513: note = tr|Q2G7X9|Q2G7X9_NOVAD Tryptophan halogenase; OS = Novosphingobium aromaticivorans (strain ATCC 700278 / DSM 12444 / CIP 105152 / NBRC 16084 / F199) OX=279238; GN = Saro_1 604 PE=4 SV=1
MDEGEVRRIVIVGGGTAGWLSACFLAAELRSRRVDVSITLIEAPDIPTIGVGEGTWPTMRGTLRAIGIAEDNFLAACDASFKQGSVFSGWVTGEPGDRYQHPFTPPPAGALDDIVAAWAGRGDQPFASAMTAQAAVIDRDLAPRQPNMPFYAGALNYAYHLDAGKFAALLSSRATGHLGVTHVRDRVRNTVADDRGHLLAVELASGDRVEGDLFIDCSGHAALLIGGACGVPFIDRSDVLLNDRALAAQVSVQPGTPVASATVATAHRAGWLWDIGLPGRRGIGCVYSSRFLSDDDALAVLRAYVSANVPGADPAAVEPRRIAFPTGHRERFWHGNCIAIGLSAGFLEPLEASAIVMIELSLRALAENFPRQRQAMPFLAGRFNDLFRYRWDRVIEFLKLHYLLSKRQEPYWQAQRDPAAVPQRLAELVALWRHQPPSAWDFPQVDEIFSAESHAYILYGMGFPPPASTARDPLAARALDDVAQRTRALCAALPTNRSYLSSLMPAQGAAALP

SEQ ID NO: 86104 - protein, 425 aa, unidentified
  source 1..425: note = Caballeronia humi
  REGION 1..425: note = tr|A0A158JEN6|A0A158JEN6_9BURK Tryptophan halogenase; OS = Caballeronia humi OX=326474 GN=AWB65_06496 PE=4 SV=1
MRTNFDALIVGAGPAGSTAAILLALAGWSVALVEKQSFPRRKVCGECISPSALPLLSALGIEHELTHAAGPNLQRFALMRGPDTVVSDFPQAPDSAYRWSRALGRETLDTLLAEHARELGVQLFQPCSLVGIVGGPGAWRCDVRDLNVFATSTLRARVAIAAHGSWEALPSDPPRRQRRPSDLLAFKANFTGASLEEGLLPVLSFDGGYGGMVVTERDVTTVAGCLRRDKLDVLRRGKLGASAGECFEAMLRQQCAGAGEVLDKASRQGPWIGAGPIYPGIRLSAEDGLFRIGNAAGEAHPIIGEGISMAVQSAWLLCMQLLGEDASPDRLSRGRTWQRLVARRYEREWRRQFVPRIRLACAFAHASMHPRGSALLLALAKRWPGFLPSGSRWAGKIRCAIHPADVARLAQHHFAHVALWPTSIP

SEQ ID NO: 86105 - protein, 588 aa, unidentified
  source 1..588: note = Micromonospora kangleipakensis
  REGION 1..588: note = tr|A0A4Q8B976|A0A4Q8B976_9ACTN Tryptophan halogenase; OS = Micromonospora kangleipakensis OX=1077942 GN=EV384_2721; PE = 4 SV=1
MYGNMGGFGGPSTRTQLDTLVESLTESDADAVRDWLGGANGQGMPGVLNPRALTQHHEAVASDRRRPADDDPQGVRSVGVIGGGTAGFMAALALKAKRPWLDVTLVQSKEIPIIGVGEATVTYMVMFLHHYLGIDANELYRKVMPTWKLGIKFDWGPADDEPFMATFDWHHHSIGGLGALDATGSVNGFTLQSLMMMADRSAVYEVDGRPVSLMKYLPFAYHLDNGRFVGYLTELAEQRGIKHVEARLADVVLSGEEWVDHLTTTDGRELEFDFYVDCTGFRSMLLGKTLGTPFHSYSDTLFTNSAVTGNMPHDGVLKPYTSATTMQAGWTWNIPTPESDHIGYVYSTDHLSDEQAADEVQERFPTVDGLRQVRFRSGRHDKAWRGNVYAIGNSYAFVEPLESTGLLMSALSIQAMVATLPTSWSETPARDVVNLGLGQRWDAIRWFLGIHYKFNTKLDTPFWKDVQERCDVSGFKPLLDLYANGAPLTRRDPFLLDLALGAAPTFFGLAGIDNLLLGQKVPATLLERTETNDDWWQRRKAADALVAKAMTQADALKAFAEHPELNKQLLEDFDSWAGRHIAPYIGMN

SEQ ID NO: 86106 - protein, 520 aa, unidentified
  source 1..520: note = Rickettsiales bacterium
  REGION 1..520: note = tr|A0A2E3I505|A0A2E3I505_9RICK Tryptophan halogenase; OS = Rickettsiales bacterium OX=2026788 GN=CMP20_02005 PE=4; SV = 1
MSNRSIKNIVIVGGGSAGWLTAGIIAAEHQCGLQQSKINVTLIESPDVNIIGVGEGTWPSMRNSLQRMGISETEFIRHCGAAFKQGSKFVGWKNGTDNDFYYHPFVIPSGYGKANQYSAWKTYASEHPFADVVCAQSHICQAGLAPKQNATPEYAGVLNYGYHLDAGKFGQLIQQHCVAKLGVRHIQDHVEGVISQDNGDIKALQTRQNGELAGDLFIDCTGARSLLLGQHFNVPFIDKSDVLFNNSAMALHVPYTNDDEPIVSATVSTAQEAGWVWDIGLQDRRGVGYTYSSKHADDEQAQRTLKAYVAQSIGPERANALEARKINFEPGHRSHFWHKNCVAVGLSAGFLEPLEASALALVELSATAIAENMPVTTEHMHIIRDNFNQRFLLHWENIVEFLKLHYVLSERNEPYWQQMRAPESISPRLKALLTQWRFQPPNRSDFVQNEIMFPSASYQYVLYGMGFETLNDVSSREFDTPQSAVKHLQENQQHVRKLMAGLKSNRQLLEHVKHYGFQKV

SEQ ID NO: 86107 - protein, 503 aa, Massilia sp.
  REGION 1..503: note = tr|A0A1G6KMJ7|A0A1G6KMJ7_9BURK Tryptophan halogenase; OS = Massilia sp. PDC64 OX=1881046 GN=SAMN05428966_101528; PE = 4 SV=1
MTQQTPLQDIVIVGGGTAGWMAAAALARLLQGRFAIRLVESDEISTVGVGESTIPMIRLFNDVLGINEDEFVRETKATFKLGIEFKDWSRPGERYMHGFGRFGQDVHTVEFFQYWLKAHQAGFAPDLEHYSINRMGARAGKFMRPPPEAPNSPLADIVYAFHLDAGLYARYLRTYAEARGVRRTEGKVVEVRQRADDGFIEAVVLASGEVVAGDLFLDCTGFRGLLIEQTLHAGFEDWSHWLPCDRAWAVPCALSGDLLPYTIAHARPAGWQWRIGLQHRTGNGHVFSSRHMSEDEAAAILLQNLDGEALAEPKLLRFTAGRRRKAWHRNVVAIGLSSGFLEPLESTSIHLIQSALSRLLAFFPDKGFHQADIDEFNRQGDFEIERIRDFLILHYHATTRADTRFWNHVRTMDIPDTLRRKIDLFKAHGRVVRENEELFTPVGWQQVLHGQGVRAGGYHPLVDLMDEPTLRDFLANTERVIGRCVDVMPAHKDFVAAVTGAKR

SEQ ID NO: 86108 - protein, 503 aa, Brevundimonas nasdae
  REGION 1..503: note = tr|A0A0B4CHA1|A0A0B4CHA1_9CAUL Tryptophan halogenase; OS = Brevundimonas nasdae OX=172043 GN=RM53_14910 PE=4 SV=1
MTPAPLKRILIVGGGTAGWMAAAALAHVTRGTVKVELVESEVIGTVGVGEATIPPILLFNQLLGIDENEFVRATQATYKLGIQFNDWFQKGRSYFHPFGTYGTRIDAASFHQYWLRLNKAGLDDDLDAYSVTTMAARMGRFTRPDTDPRGAGSQMTYAFHFDAGLYARFLRQRAEANGVVRHEGKIADVRLRDGDGFIQSVRLDDGRELEADFFIDCSGFRGLLIEGALKTGYEDWTHWLPADRAVAMPCTRVGDPTPYTQSTALEAGWRWRIPLQHRTGNGYVYCSPYISDDEAQAKLRASLDGEAMAEPNFLRFTTGRRKKTWNKNCLALGLASGFLEPLESTSIHLVQSGISKLLLHFPDTGFAQADIDNYNRMMRLETERIRDFIILHYHATARDDSPLWRHVRAMPIPETLQQKMDQFRSRGRIFRYEDELFQETSWIAVLLGQGVIPERHDPITETIPLEQVQQWLQKMKAMIQQGVARMPTHEAFIAANCKAPPIN

SEQ ID NO: 86109 - protein, 496 aa, Pseudoalteromonas sp.
  REGION 1..496: note = tr|A0A1Y5JVA4|A0A1Y5JVA4_9GAMM Tryptophan halogenase; OS = Pseudoalteromonas sp. A601 OX=1967839 GN=B5G52_21300; PE = 4 SV=1
MTHNKQIKNVVIAGGGTAGWMAGAALCKLLGKNITVTLIESDEIATVGVGEATIPPIRTFHKLLGINEQAFMKATQASFKLGISFENWGQKETDYIHSFGMTGKECWAGEFHHFWLHSLSLGLESEFGQYCYELQAAKQGKFAFNQQNPINYAFHMDATRYALFLRDFSEGLGVKRLEGKITSVNKSPHNGYIESVSLEGDSTITGDFFIDCTGFKGLLIEQALHTGYEDWSHLLPCDSAIAVQTKAISNDILPYTRAIAHDAGWQWQIPLQQRVGNGLVYCSRYLADADAKQLLLNNIQGETLTEPKVIKFKTGRRRKGWNKNCLALGLASGFVEPLESTSIHLIMSGIIRFMRLFPFNGITEQAINEYNKQLKSEIENIRDFIVLHYKVTDRTDSEFWQHCQSMEVPDTLAHKISLFKQTGRVFLDDGDIFRVDSWVQVMLGQGIMPKQHHLIASLMSDDELTRFLNSIKQQISQRVSQLPSHQAFLQQYCPAE

SEQ ID NO: 86110 - protein, 499 aa, Pseudoalteromonas sp.
  REGION 1..499: note = tr|A0A1Y5JU17|A0A1Y5JU17_9GAMM Tryptophan halogenase; OS = Pseudoalteromonas sp. A601 OX=1967839 GN=B5G52_15900; PE = 4 SV=1
MQNKKIKNVVIAGGGTAGWITAALLNKVLGKVVNITLVESEQIGTVGVGEASIPPILHLNAALGIPENEFIKATQATIKLGIEFENWQKQNHKYMHAFGDIGKDFPFCEFYHFWLRAKQQGTASDFWDFSLNYQAAKQHKFAHLRHIPNTQLTGLNYGYHFDATLYGEFLKELTISRGVKRIEGKIAHVKQCEESGFVRALALDDGQSISGDLFIDCTGLRALLIEQTLNTGFEDWSHWLACDSAIAVQTKSAVDPVPYTRSIAHDAGWQWQIPLQYRVGNGLVFSSRHMTDEQARQQLLDNLPGEPITEPRVIRFKTGRRRKQWHKNVVSVGLSSGFLEPLESTSIHLIQTAAIRLIKLFPHNGIDETLIDTFNQQSQTEIERIRDFIILHYKLTERSDSAFWRQCKQMSIPDTLQKKIDLFKATGKIVRQDDELFAEVAWQQVMIGQGLEAEDFHPLANALNDEQLAELFTNLKTLIDGTVNQLPTHNEFLHRMKSN

SEQ ID NO: 86111 - protein, 483 aa, unidentified
  source 1..483: note = Asticcacaulis biprosthecum
  REGION 1..483: note = tr|F4QIC8|F4QIC8_9CAUL Tryptophan halogenase PrnA; OS = Asticcacaulis biprosthecum C19 OX=715226 GN=ABI_01970; PE = 4 SV=1
MAAACLARNLGTRNHTIEVIESPDIGTVGVGEATIPMINLFNKILGVSPTDMVRETEATFKLGIEFVDWGGLGRSYIHPFGTYGADMGGISFIHYFLRQSLLNGTWTPEIYNLETAAARAGKFGVLPNNDPSRPSLNHAYHFDAALYADFLRRYSLKRGVVRHEAAVTQVHQDAETGFVTALDLKDGGQVEGDFFIDCSGFRGLLIEQTLKAGYEDWSHWLPCNRAWAVPCERVETPLPYTRSTALEAGWQWRIPLQHRTGNGYVFCDGFIDEDQAADKLMGWLDGKPLADPRKLSFVTGHRRKMWSKNVVALGLASGFLEPLESTSIHLVQSALAKLMAFFPRDGFDPDVEDHFNTVMCGEYANVRDFLIAHYKVTDREDTPFWAYCKHMSVPDSLTQRLAIFERGGMYVEPPYELFREASWFAVLTGQGIRPRSWHPVADMMTDAELTHHTAQIRDLVASTAARLPPHETFIRHCQQRQAS

SEQ ID NO: 86112 - protein, 492 aa, Asticcacaulis sp.
  REGION 1..492: note = tr|V4PQ05|V4PQ05_9CAUL Tryptophan halogenase; OS = Asticcacaulis sp. AC460 OX=1282360 GN=ABAC460_12955; PE = 4 SV=1
MAASALAHEFKRLPISITLVESDEIGTVGVGEATLPHIRNFNTALNIDEVTFMKATEATFKLGIEFCNWGRIGDRYIHPFGDYGEPIDGIAFYQHWLRLQKLGLASHLDDYAFPTSIAEANRFRHPSNDRTRIESTFGYAYQFDATRYAAFLRQFAEARGVVRRQGKVVDTRLDAETGHVASMTLDSGEVVAADLYVDCSGFRGLLIEQALKTGYDDWSQWLPCNRALAVPCESRGSLTPFTRATALEAGWQWRIPLQHRTGNGYVYCSSFISDEDAAHRLLGNLDAPTLADPRQLYFTTGRRKAFWNRNVVAIGLAAGFLEPLESTSIHLIQEGITELLHIFPDKRFLQSDIDEYNRRMGVNFERVRDFLLLHYVATQRDDTEMWRHFRNLKLPDSLEEKIQIWLTRGQLIRYEFGVFLPPSWIAVMTGQNLLPRNYDPRVNRMVQDALIQSSEDLRQRVKAAVSATPDHKDYIRQMGAASDTGPLVAQVG

SEQ ID NO: 86113 - protein, 501 aa, Sphingomonas sp.
  REGION 1..501: note = tr|A0A4V2TIB8|A0A4V2TIB8_9SPHN Tryptophan halogenase; OS = Sphingomonas sp. JUb134 OX=2485112 GN=EDF69_1202 PE=4; SV = 1
MTPTDVPQRRRVVIAGGGTSGWLAAAALAQQLGALLDITLVESEEIGTIGVGESTIPTARAFHRLIGLDEQRFMSETGATFKLGIAFEDWAQKGDRYIHAFGETGQSTWMGAFHHFWLQARDQGFGGDFGEYCLELQAADAGRFGIGAKVPELSYAYHLDAGRYARHLRGIAEQAGVRRVEGMIERVEQQGDGADITALVLRSGQRIEGDLFLDCTGFRALLIGQALGSPFEDWGHWLPTDRAVAVQTRAVEPARPYTRAIAHRAGWRWRIPLQHRVGNGFVYDNRHLSDDEARAQLLRDIEGEIVAEPRLIRFRAGRRAEAWRGNCVALGLAGGFVEPLESTAIHLVMIAITRLLQLFPFAGDCAAAARRFNAQAAAELDGIRDFIILHYVLTERDDTPFWRDMRAMEIPESLRDRIALFRDGGIAYQDGADLFRVDSWAQVMIGQRSLPHHHHRMGEIMGAPRLRQVLADMKARVAQQVLLLPPHATFLQDYCPAEDAA

SEQ ID NO: 86114 - protein, 491 aa, Massilia sp.
  REGION 1..491: note = tr|A0A1G7LGI0|A0A1G7LGI0_9BURK Tryptophan halogenase; OS = Massilia sp. PDC64 OX=1881046 GN=SAMN05428966_11647; PE = 4 SV=1
MTYERIVVLGGGTAGWMAATALATGMKGSTVELVESEEIGTVGVGEATFPSIRNYHQILGIPEADFLRATNGTYKLGIRFRDWRVKGEDYYHTFGDFGMLSGPESLWGQYRRHPRAHLPTFGEQCLPTVMAMNDRFCAPGKDAANFNYAYHFDATLYARFLRDVGVKRGVRRTEGKVVEVARRPDGGVASLRLDDGRVVKADLFVDCSGFSSLLLGRTLGEPFVDFSHWLPVDRAWAVPSARVGDNLTPYTRATALDAGWAWRIPLQDRTGYGHVFSSRFIDEDKAREQLLQQLDGEALAEPRLLRFTTGHRAKFWSHNVVGIGLATGFLEPLESTSIYLVQAGVGRLMTLLQGGGPVAPHLVDAYNMGLTRQFERIRDFILMHYCLTARRDTPFWQYMAAADLPETLAYKLHAWRETGILHQYDEEGFDGHSWLAIHAGMQNWPVRSDPTLKLIPEAQSLEWVRERASQLAAAVATVPTHQAFLDKVLGR

SEQ ID NO: 86115 - protein, 521 aa, Xanthomonas axonopodis
  REGION 1..521: note = tr|A0A3G2WDM5|A0A3G2WDM5_9XANT Tryptophan 7-halogenase OS=Xanthomonas axonopodis pv. commiphoreae; OX = 1101443 GN=Xcom_16225 PE=4 SV=1
MPDTTPSDPQQRPVRRVVIAGGGTAGWMAAAALSKLLGRHLQITLVESDEIGTVGVGEATIPSLVTFHRLLEIDEAAFMAATQATIKLGIAFEHWRDVDQHYIHSFGHAGTDHWSAGFQHFWLKGCQRGVARDFGDYCLELRAAQEGRFAHLPNGGMNYAYHLDAGLYARFLRRFSEGFGVTRIEGRIGQVETDAQSGFLTALTLQDGTRVEGDLFLDCTGFAGLLIGKTLGVGSDDWSRWLFADSALAVQTESVGPPVTYTRSRADQAGWMWRIPLQHRVGNGLVYSSRYMDQDGARAVLERNLTGRALTEPRRLRFTPNQRHRVWEKNCVALGLASGFLEPLESTNIHLIQRGIIRLLQTFPQIINAADIAEYNRQAAQEITHIRDFVILHYHATDRRDTPFWRDCAAMDIPDSLRHRVELFRQSGRVFHQANELFAENSWVQVMLGQGVVPQQHHPVADLMGDAELGRFLETIRARVEAALVRLPAHADFLQRYCPAPPLPEPAARVPAPPVMATPAG

SEQ ID NO: 86116 - protein, 507 aa, unidentified
  source 1..507: note = Asticcacaulis biprosthecum
  REGION 1..507: note = tr|F4QGH6|F4QGH6_9CAUL Tryptophan halogenase PrnA; OS = Asticcacaulis biprosthecum C19 OX=715226 GN=ABI_20980; PE = 4 SV=1
MPNPIENIVIVGGGTAGWMAAAMLAKLIVAKAPKPPTVTLIESDDISTVGVGEATIPAIKKYMSLLGINEADFLKFTQGTFKLGIEFVDWERLGESYIHGFGKIGQDLGWMRPHQYWLKMRNSGKVSPRFDDYAINPTACRHNRFNKRNGDDRKTPLNDIGYAYHFDAGLMAQYLRRIAEPLGVKRVEGTIVDVRLKAENGHVKSVALKDGQVVGGDFFIDCSGFRSLLIGGALGVGYESWSQWLPCDRALAVPCASVTPTTPYTRSTARTAGWQWRIPLQHRIGNGHVYSSRFTSDDEAARVLMDNLDGKALADPRPIRFETGKRKKLWEKNVLAVGLSGGFIEPLESTSIHLIQTTVLRLLNLFPDKDFDPATAAEYNAQADFEIERIRDFVIAHYKLTSRDDSEMWRYCRDMAVPDTLARKLDGFAASGRVFKENEELFAEDSWIQVLMGQGLMPRGYDPIVDNYPEETIIAYLNNISGVVAKCVAAMPTHDQFVAAYCAAEMP

SEQ ID NO: 86117 - protein, 508 aa, Sphingomonas sp.
  REGION 1..508: note = tr|A0A4R2Y0P5|A0A4R2Y0P5_9SPHN Tryptophan halogenase; OS = Sphingomonas sp. JUb134 OX=2485112 GN=EDF69_11235 PE=4; SV = 1
MNPIRSIVIVGGGTAGWMAAAFLARQLDHLRVSITVVESSAIGTVGVGEATVPAIGDFFAAVGLSDAEVLRETEGTIKYGIRFDGWKAPGHRFFHPFGLYGTPARGVAFHHYWLKLRQAGDPTPLGAYSLATQLAEQGRFLAPAQKPANDLGVFDFAVHFDASKFATLLRHRAVAAGVVHLDGRIDRVERDGETGHVAAVLLEDGRRIGGDLWIDCSGFRSLLLGEALEVPYVDWRRWLPVDRAIAIPCRPRDAAQEPFTVATARRAGWQWRIPLRHRIGNGHVYCSDFLDDGSAETMLLEQLEGEPLGQPNRLRFTTGHRARFWERNVVGLGLASGFLEPLESTSISLIQTGLERLVRFLPDRACDPRLAAIYNYQSVLEFERLRDFLLLHYWANGRHGEPFWDRMRAMPPTEGLQLKLDTWRASGEFVRREWETFQDPSWLSLYAGFEDLPEHSSPLADRFSIAELTDTFARMRAAIAATVAQAEPHAAFLARTVGGDGGGRAAAR

SEQ ID NO: 86118 - protein, 500 aa, unidentified
  source 1..500: note = Verrucomicrobiaceae bacterium
  REGION 1..500: note = tr|A0A4Q3AT09|A0A4Q3AT09_9BACT Tryptophan 7-halogenase OS=Verrucomicrobiaceae bacterium OX=2026800; GN = EOP83_01510 PE=4 SV=1
MIKEVLVLGGGSAGFIAALSIKRKIPQLKVLVVRSPAIGVIGVGESTTPNFPRHLFEYLGISRKRFYALAQPTWKLGIRFLWGARGSFDYTFNLQLDSHYTDMEKPIGFYCDDDFRDASLPGALMRRDMAFPRQQNGAPDVHPWHAFHIENKKFIEILEIVAKEEGVEVTDGKVTGSERGEEGIAAVHLEDGRRLTADLFIDASGFRSELLGKTLEEPFESFDKSLFCKKAVIGGWERGPDEPILPYTTAETMDAGWSWRIDHEHLINRGYVYCPDFISDDQAADEFQKKNPKAKVEPRIVNFRSGFYKRQWVGNVVGFGNAGGFVEPLESTAIMILCSHIQTLVDFLKHSDLQPTPTMRNLYNELTANTWNDIRQFLSLHYKFNGKLDTPFWKTAREETDVSGVQDFIDFYQENGPTGFCRYRLPRTENDFGLEGFLVMMVGNQVPYNKRHNASPQDVQIWKRRKEEFGREAARGIRSEEALAYVKHPGWEWHGDAAKS

SEQ ID NO: 86119 - protein, 501 aa, unidentified
  source 1..501: note = Asticcacaulis biprosthecum
  REGION 1..501: note = tr|F4QJF0|F4QJF0_9CAUL Tryptophan halogenase PrnA; OS = Asticcacaulis biprosthecum C19 OX=715226 GN=ABI_15730; PE = 4 SV=1
MDRHIRNIVIAGGGSAGWMAAAALSNALQRNCTITLIESEEIGTVGVGEATIPPIVRFNKTLGIDEAEFVRATQGSFKLGIQFVNWGRLNHAYFHPFGSFGRDFDMAGVFHYWQAAFEAGQAGGLDDYCMAWSAAKRNRFAPPSADPRHVLSTYDYAYHFDAGLYAAMLRTYAQAKGVKRLEGRIVAVGQNAETGFVETLTLDDGRSVAGELFIDCSGFRGLLIEGALKTGYQDWTHWLPCDRALAVPCTSSADFTPYTRSTAHQAGWQWRIPLQHRTGNGHVYASQYISDEDAAAVLIANLDGAPLADPRPLRFTTGRRNHFWNKNVVAIGLSSGFMEPLESTSLYLIQSGIAKLLILFPDRDFDPVLVDEFNRLTRTEFERIRDFIVLHYKLTQRDDSPLWRYCAAMDIPDSLRETIALFRRYGKIAHRELDLFGDPSWLAVHIGQMNFPERNDPLLAYREADGAAWLTKFRSVIEGAAETLPDHGEFIARAGMKAAGR

SEQ ID NO: 86120 - protein, 507 aa, Massilia sp.
  REGION 1..507: note = tr|A0A1G6Q9Z5|A0A1G6Q9Z5_9BURK Tryptophan halogenase; OS = Massilia sp. PDC64 OX=1881046 GN=SAMN05428966_102572; PE = 4 SV=1
MQQNPIRKIVIVGGGTAGWMAAAPLALRMGRRCDIVLVESPDIGTIGVGEATLPTIRFYNAALQLDHADFIKKTQASFKLGIEFKDWGHVGNRFFHGFGDFGPALNGIQPHHYWLRLARTFDRMPAMENWSMASVMARENKFTMPNDTQPGVTDAYSFGYHFDAGLYAAYLRDYALARGAKRVEGTITSVDQHPETGFVTAVRLADGRTLDADLFIDCSGFRGLLIEGALQAGYEDWSEHLPCNSALAVPCARVEPLTPYTRSTAKGAGWLWRIPLQHRTGNGHVYSNAFTTDDKARQDLLDGLDGAALDEPRQLRFVTGKRKKSWVKNVVAIGLSAGFVEPLESTSISLIETAVGTLIEQFPDRDFRPELADEFNRIIGSRYESIRDFIVMHYKLTKRDDTEFWRYCANMRIPDSLAHQIELFRETGRVAILDRDSFLLPSFVSMLVGLGVEPKRYDPFVDDVDMRQLHGHFAGLRDLIAQTVAKMPSHSAYLEKNAKAPMVGKAA

SEQ ID NO: 86121 - protein, 534 aa, Sphingomonas sp.
  REGION 1..534: note = tr|A0A4R2XR15|A0A4R2XR15_9SPHN Tryptophan halogenase; OS = Sphingomonas sp. JUb134 OX=2485112 GN=EDF69_12030 PE=4; SV = 1
MNEHMIRNVVIVGGGTAGWMAAAAFSRFLNNGVTRITLIESEEIGTVGVGEATIPPLLNFNRMLGINENDFIRETGGTYKLGIEFDGWGDIGERYFHPFGAHGHDLGGIHFHQLYLRERKRRVMQDISAWSMSAVAAQAGKFARPAEGAQSAVKELLYAFHFDASLYARFLRRYAEAGGVQRIEGKIVEVALRPEDGHVAAVKLENGQAVEGDLFIDCSGFRGLLIEEALETGYEDWSQWLPCNRAVAVPSSYSGDPDPFTRATARGAGWQWRIPLQQRMGNGLVYCSDFMTAEAAERELLANLEGEPLAEPRHLSFVTGRRKLGWNRNVVALGLSSGFVEPLESTSIHLVQAGITRLISLFPDRRFNPVERDEYNRQMRDLYKDVRDFVILHYKATRRRDTPFWERCRTMDVPESLQRKIDLFRAKGRVFRDGAELFATTSWVAVCLGQHIVPEEHEPAADALDEDKVAAALEEMRQGYLRVAAQLPTHAEFLRHTGASLANTPAPPQPAEVPGEPNFSFASETPFNFSANPL

SEQ ID NO: 86122 - protein, 498 aa, unidentified
  source 1..498: note = Verrucomicrobiaceae bacterium
  REGION 1..498: note = tr|A0A4Q3C392|A0A4Q3C392_9BACT Uncharacterized protein OS=Verrucomicrobiaceae bacterium OX=2026800; GN = EOP84_03220 PE=4 SV=1
MIKNVLVVGSGSAGLIAALSFKRKIPQLHVSIVRSPEIGVIGVGEGTTPNFPTYLFDELGISRKRFYQLAGPTWKLGVRFLWGPRGRFDYSFSPQLDSQWTDLPKPHGFYCDDEFANNNLAAALMRQDKVFGRQQNGCPDIQPWHAFHIENVKFVEVLEQIAREIGVDIIDGKVVDADLGPAGITAVHLEDGRRMEADFFVDASGFRSELLGRKLQEPYTDFGKTLFCDRAVVGGWERTDEPILPYTTAEAMDAGWSWRIDHEHHVNRGYVYSSQAISDDQAAEEFLRKNPKVPQSPRVVKFRSGCYKRLWVDNVAAIGNAGGFVEPLEATALMIVCSHCKTLVDFLNHSSLEPTDSIRNLYNDLVANTWADIRDFLGLHYRSNSAMDTPFWKHCQEDTDLSGIAELLDFYEENGPTGFCRYRMPTSQSDFGIEGYFTILVGNQVPYRKRHQAAEKERAVWNSHCKTFASEAKTGLTVKEALDYVRHPGWRWHGERNN

SEQ ID NO: 86123 - protein, 502 aa, Brevundimonas sp.
  REGION 1..502: note = tr|A0A0Q5UYY0|A0A0Q5UYY0_9CAUL Tryptophan halogenase; OS = Brevundimonas sp. Leaf363 OX=1736353 GN=ASG17_12280; PE = 4 SV=1
MAQPLEVVIVGGGTAGWMTAAALTSVVRPEFRSVRLIESDQIGTVGVGEATLPQMKDFNDWIGVIESEMMRETNATFKLAIEFRDWGFKGSSYLHPFGAHGQPISGVAFHQHWLRAAQAGPTPDIEDYSYAIVAARRNRFEFPVEDKAAINSTYAYAYHFDAGLYAAYLRRFAEARGLERTEGKIVSVQRKPENGHIASVTLESGEVVTGDLFIDCSGFKGLLIGETMESPFEDWTKWLPCDRAMAVPCARSNDFTPYTRSTAREAGWQWRIPLQQRTGNGYVYSSAFISDDEAARTLMDNLDGEALAEPRPIRFKAGRRTASWTGNCVAIGLASGFLEPLESTSIYLVQIAINNLVQLWPRKAMDPVLIKEFNRLVDNEYDRVRDFLILHYHANTREDAELWRYTREMSVPDSLQDKIDRFRHRGDIPFYRSGLFAPPSWVSVMFGQGLKPEGHDRLTERLKLEDVQQRLETLRRKISDRVDAMPTHEQFVRDYCGVKEAA

SEQ ID NO: 86124 - protein, 504 aa, Thalassomonas viridans
  REGION 1..504: note = tr|A0A0D8DI57|A0A0D8DI57_9GAMM Tryptophan halogenase; OS = Thalassomonas viridans OX=137584 GN=SG34_02600 PE=4 SV=1
MSDNQAKSIVIVGGGTAGWMAANLMAKSWQHLDFDIRLIESPDIGIIGVGEGSTPQLKGFMDFLGIEESDWMPKCNATYKNGIEFVDWSTKPGFSSYFHPFPAQTDDYSAPGFFHNSFVRRKGIDVEGHPDHFFLATYLAKHKLAPTPEFHFPFETNYGYHFDSALLGKFLSEKAAAFGVSHSRGTVAEVKLHLNGDIQSVITDAGETIAGDIFIDCTGFSSLLLQKHLNVLFKSFGNNLFNDAAVVLPTEQREQIGSQTVSTALKHGWAWEIPLTNRNGNGYVYSSAYASADDAETELRAKLGLLDADVQARHLKMKVGRVEQHWHKNCVAVGLSQGFIEPLEATALHLVQETIQGFIDNYQKGNFSHQYQGEFNASVNARFEAVRDYIVGHYRINSRTDSQYWLDNANNNQLSPSLVAILQCWMRGDNLSDELDRQKIDHYYPSISWHCLLAGYGLYPDQAQLVPGNAQANKYNMEQIADFISRCGLNFKPHRERLTALSPA

SEQ ID NO: 86125 - protein, 587 aa, Microcystis aeruginosa
  REGION 1..587: note = tr|L7EBH9|L7EBH9_MICAE Tryptophan halogenase family protein OS=Microcystis aeruginosa TAIHU98 OX=1134457; GN = O53_984 PE=4 SV=1
MNTTQALHYDVVIMGAGFAGLCQARHLMLNIPNIRVALIDPRPENRPDTDLKIGESTVEIAALLICKELGLHDYMIENHPPKAGLNFHWPKNPAETDSIDDYYHVWINRQPPIPTFQINRAKFERDLLKMNKEMGAIFYNGRVVDVDLTEGDQLKTVTVKLEDTTIEITAKHIVDAAGRRFIIGKKTDNLIFGSDQLLGVNNGSAWVRIKDVDRTIFHSGYHPAGTTVSHYYATNHYFGPGHWLWMIPIDRDSKELSLGVIHHHDVIPAATINTQEKFTAFLKANHTVLYKLLQNSELVDFHYLPRVAHKSKVMFSHDNWYVVGDSACIFDAFYSLGTTMIAIAVESITEIIRAKLANEANAEEKRAVYNDFNLAFSDSVNTFMQEHQKQLGHASIMSWRIYFEYMWWFGVLVPMYIGKWHLDPAFLKQFTGPFRTFLNGLFVDVYQDCNKLVERGVNMGLMDAIRADQLIGSYYTFKHFEDFLENSKLEPQRCNIFTSMKNTFFYVAIWYAMFQWKGFGWRGLLKPRNLAHFSYLLAQSGLSALGEMRHNFLTRSLPDNSEIEEMRQEFKEYRYQGKLQPWSAELS

SEQ ID NO: 86126 - protein, 513 aa, Pseudoalteromonas sp.
  REGION 1..513: note = tr|A0A1Y5JMZ1|A0A1Y5JMZ1_9GAMM Tryptophan halogenase; OS = Pseudoalteromonas sp. A601 OX=1967839 GN=B5G52_21295; PE = 4 SV=1
MNKTIQHIVVLGGGSAGWLSAGLLAAEHPDKKITLIESANIAISGVGEGTWPSMRNTLKRIGIKEVDFLRHCDASFKQGSKFINWRNLTAGENYYHPFMTPSGYLDTDLHAYWQQHAASQKYADAVNMQSFVCQAALAPKQLNTPEYAAVTNYGYHLDAGKFATFLNQHCVNNLGVEHIIDDVTSVHNDLDGYIEYLQTSHHGNLCADLFIDCSGSHARLIGEHYNTPLMTQDHILFNNSAIAAHLPYTKQQQDIASATLSTAQQFGWIWDIGLPSRRGIGYTYSSQYCDEQTAIDTLKQYAAKSIGHDAAAQLQTRTLHFTPGYRAQFWVKNCLAIGMSQGFIEPLEASALAMVELSLNMLSEQMPQSREHMALLATRFNSRFNYRWQRVIDFLKLHYVLSERNDSPYWQDIKAPSSAPTRLKELLNLWQYQTPSRFDLIENEEVFPSASYQYVLYGMGFKTQIANSNNAFNNPEVGQYFYQHNRKKIAKYLHGLPSNRALLNQLLSNKADT

SEQ ID NO: 86127 - protein, 497 aa, unidentified
  source 1..497: note = Rickettsiales bacterium
  REGION 1..497: note = tr|A0A2E3I8E5|A0A2E3I8E5_9RICK Tryptophan halogenase; OS = Rickettsiales bacterium OX=2026788 GN=CMP20_08500 PE=4; SV = 1
MDKQPIKRVVIAGGGTAGWMAAAAFSKLLGKNLTVSLIESDDIPTVGVGEATIPTLHIFHRLLGINEQEFMAATNATFKLGIKFENWKAQGEDYIHSFGFLGQGCWAAGFQHFWLKGKQKGLVTQIGDYVPEHLACREGRFAVLANQEQNHAYHLDAGLYAQFLRKMAEQHGCKRIEGNIQAANLNEESGDISSLSLASGEIVEGDLFIDCTGFRALLIEQALHTGFEDWSHWLPCDSAVAVQTTAQPNPVPYTRSIARDAGWQWRIPLQNRTGNGLVFCSKYMSDEQAKAALLANVEGETLNEPRVIKYKTGTRRKHWNKNCVAVGLSSGFIEPLESTGIHLFQRAIVRLMLMFPSNGIEQADVDEFNTQSRADVEDIKDFIILHYHQTERTDTPFWRYCKSMPIPDTLTHRMELFAGTGKVFKKAEELFGETSWIQVMLGQGIMPKQYHPIVDMMSDDELQRFLENIKNNVKRKVSNWPDVNDFIRHYCQTKIAN

SEQ ID NO: 86128 - protein, 537 aa, unidentified
  source 1..537: note = Rickettsiales bacterium
  REGION 1..537: note = tr|A0A2E3IBF9|A0A2E3IBF9_9RICK Tryptophan halogenase; OS = Rickettsiales bacterium OX=2026788 GN=CMP20_13640 PE=4; SV = 1
MTFNEQLNREKYVQLNSQVKDIVIVGGGTAGWLTAGLLASRLSSRVQSGELNITLCESPDVPTIGVGEGSWPTLRSTLQTIGVTETDFIRQCNVSFKQGSRFINWQHEIPSQYDHPFDVPQQASQGAEAQRWLSTQSQVPFSQAYCLQTELANNNLAPKLITTPEFTGFANYGYHLNAALFAEFLREHCIQHLQVKHVLSNVKQVEQDENGDITCLHLAVPSQNNSNHPDHINGDLFVDCTGFRALLLGDTLGVCNTQVDDVLFANNAIATQLPYVEHNSPIASFTESTAQDNGWIWDIGLPNRRGIGYVYSDRYCDEQDAHHTLVKFLQKTQQNTDTLSYKQIHFTPGYKQQFWKKNCVAIGLSAGFIEPLEASALVLVEMSANMLAEQLPNTRSCMEVIAKRFNQTFTYRWQRIIDFLKLHYVLSQRSSAFWQDNRAQSSVPDSLKELLALWQHKVPDINDFPARDEVFQAASYQFVLYGTGFKSQLLSTPDKNLLEAAEQQFLSIQGYTSQLTNKTLSNRDLLSKIYRYGLQKR

SEQ ID NO: 86129 - protein, 504 aa, Novosphingobium aromaticivorans
  REGION 1..504: note = tr|Q2G744|Q2G744_NOVAD Tryptophan halogenase; OS = Novosphingobium aromaticivorans (strain ATCC 700278 / DSM 12444 / CIP 105152 / NBRC 16084 / F199) OX=279238; GN = Saro_1 889 PE=4 SV=1
MPPSNKRRIVIAGGGTAGWMTAAALARFAMPHWQVTLVESEEIGTIGVGEATIPMVRLFNRSLGIDERQFLRETHGTWKLGIAFEGWGGFDERYIHGFGLTGRSLGVLPFHHYWLRGRAMGAAGPLGDYVLNAVACEEGRFAHIDRPEGSALPPMPYAYHFDASLYAAFLRRYAEERGVLRIEGRIQSAARDCSTGDIASLKLADGHEVEGDLFIDCSGFRSLLLGQEMGVEYVDWSHWLRCDRAVAVPCERAGPLVHYTRSIAQPAGWCWRIPLQHRTGNGHVFCSDAMGEDEATARLLGRLDGRQLAEPRTIRFKAGRRETFWKNNVVAVGLSSGFIEPLESTSIHLIQTAISRIIDFLPNGPVQAADRDAYNRLSVFEIERIRDFVILHYVANGRHGEPFWDSLRAMEIPETLAKRIAMFRASGRIVREHEELFDVPGWVQVMVGQGIMPERWHPLADQLDRTNLSAFLETVSEAYRKDVARMPLHADYLEHVCGKVAAHA

SEQ ID NO: 86130 - protein, 506 aa, Massilia sp.
  REGION 1..506: note = tr|A0A1G6S6W6|A0A1G6S6W6_9BURK Tryptophan halogenase; OS = Massilia sp. PDC64 OX=1881046 GN=SAMN05428966_103273; PE = 4 SV=1
MVKDRWIAKVVILGGGTAGWMTAAALSHTFGRAVEVVLVESDAIGTVGVGEATIPPIRTFHQMIGIDEAEFIRATGATFKLGIEFRGWLNESSTYFHPFGAYGVERDIGYFFQYWLRLKEKGQVSDFSEFSLCTLAARNNVFAPASERPGDPLQHLQSAYHFDAGRYVTYLKGVCLARGVSHKIGDMLAAERDSENGHVTGLKLKSGELVSGDLFIDCSGMRAMLLGQALGVDYEDWSRWLPMNRACAVPCEQKLALTPYTISTARPFGWQWRIPLQHRVGNGVVYSNEFTTDEAAERSLLDGLEGEPLALINRIRFTAGRRKTPWCKNVVAIGLASGFLEPLESTSIHFIQSSIQRLIRYFPDAGFAPVCAQAFNKEATREIENVRDFLILHYHATERDDSELWRYVKAMQIPDSLQERIELFRERGQLNLAAEELFQSTSWHAVLLGQGIRPRTYMPTMALQDDAMLANAYGNLERNFKKIVSRLPDHAAYIKEHRLTSTMENR

SEQ ID NO: 86131 - protein, 472 aa, unidentified
  source 1..472: note = Verrucomicrobiaceae bacterium
  REGION 1..472: note = tr|A0A4Q2Z9I7|A0A4Q2Z9I7_9BACT Uncharacterized protein (Fragment) OS=Verrucomicrobiaceae bacterium; OX = 2026800 GN=EOP83_27240 PE=4 SV=1
MIQNLLVLGAGSAGLISAISLKKKIPQLNVRVVRSKSIGVIGVGEATTPNFPRHLFEYLGIPRKRFYEIARPTWKLGIKFLWGERGSFDYTFNLQLDTKWSDLRHPTGFYCDEDFNNVSLPGALMNQNKAFPRQENGAPDIHEWHAFHIENKLFVSVLEQVAREYGIEFTDGDLESVEKGPGGIAAIHLKDGQRLEADFFIDASGFRSELMGKALEEPFISFNKSLFCDRAVVGGWDRAPGEAILPYTVAETMDAGWCWRIDHEKVIHRGYVYCSQAISDDAAAEEFLRKNPKNTEELRIVKFRSGCYQRQWVDNVVVLGNSGGFVEPLESTGLMMLCSHTQTLVDFLLHTNLNPTDSMRDLYNDLTVNGWKDVRDFLAIHYKFNGKLDTPFWKQTRAECDVSGVAELIKFYQENGPTGFCRYRLPNTQTDFGLEGFLIMFVGNKVPYKNRYTPTPQEAQIWQQRKAGFVQE

SEQ ID NO: 86132 - protein, 504 aa, unidentified
  source 1..504: note = Rickettsiales bacterium
  REGION 1..504: note = tr|A0A2E3M878|A0A2E3M878_9RICK Tryptophan 7-halogenase OS=Rickettsiales bacterium OX=2026788; GN = CMP19_13090 PE=4 SV=1
MMSSDSDNSNTSGAKTSPVKRVVIAGGGTAGWMAATALSKLLGKSLSITLVESKDIGIVGVGEATIPPIRTFHKLLGIDEKAFMRATNATFKLGIEFENWREQNHSYIHSFGVTGRECWAGEFHHFWLRAKDLGFGGDFGDYCTELKAAKEGKFAYGERMPMNFAYHFDAVAYGRFLKELAVEAGVTHIEGDIQHVSKCSHTGCISSIKLSDGQEIAGDLFIDCTGFKGLLIEKTLHTGYENWSHWLPCDSALAVQTASTGAPIPYTKSVAHTAGWRWKIPLQNRVGNGLVYCSNYMSDDEAKDTLLSAIEGETLNEPRIIRFTPGKRRLGWNKNCVALGLASGFIEPLESTSIHLIMTGIVRLMRLFPFDGITQSTVDEYNNKYNSEMAAILDFIVMHYKVTNRKDSPFWEHCNSMDIPPSLTHKINLFKQTGRVFLDDGDIFRVDSWTQVMMGQGVVPEQYHRVADEMSETELERFLAGLKQQVDKQVSALPYHQDFLKKYL

SEQ ID NO: 86133 - protein, 506 aa, Xanthomonas axonopodis
  REGION 1..506: note = tr|A0A3G2W7M3|A0A3G2W7M3_9XANT Tryptophan 7-halogenase OS=Xanthomonas axonopodis pv. commiphoreae; OX = 1101443 GN=Xcom_01375 PE=4 SV=1
MIPAPLRNIVIVGGGTAGWMAAAAFARVLGPTFKVQLIESDQLGTVGVGEATVPHIKAFNNLLGIDEAEFVRQTQGSFKLGIEFVDWQRPGTAYMHGFGTQIGHPLGLLPFHQYWIKQHARGRAQPLGAYTLNTVAAARGKFMTSAGDVPANSPLANIAYAYHFDATQYAHFLRRYSQQRGVTRIEGLVEQVQLHPESGHVQSLQLASGQTVHGDLFIDCSGFRGLLIEEALHTGYHDFTHWLPCDRALAVPCEKVGPPTPYTRSTARAAGWQWRIPLQHRTGNGYVYCSAHISDDEAAATLLANLDGKPLADPRPLRFTTGRRKQCWNRNVVALGLASGFLEPLESTSIHLIQSGISKLLELFPREGISPVLVQRYNDRLAFEFDRIRDFLLLHYHATERDDSAFWRHCRHMPITPELQTTLDLFRDSGRFYRNAEEMFAEISWVQVLVGQGILPQGYHPLVDQVPDRDAEGFLASVAQTISHCVDVMPSHQQFIDRYCKAAALP

SEQ ID NO: 86134 - protein, 485 aa, unidentified
  source 1..485: note = Xanthomonadales bacterium
  REGION 1..485: note = tr|A0A2H0HQV8|A0A2H0HQV8_9GAMM Tryptophan halogenase (Fragment) OS=Xanthomonadales bacterium CG17_big_fil_post_rev_8_21_14_2_50_64_11 OX=1974109; GN = COW59_09895 PE=4SV=1
MSNSRIRSVVIVGGGTAGWMAAAILAKAMGQQLSIRLIESEEIGIVGVGEATIPQIRLVNTFLGVDENAVLRASQGTFKLGIEFNDWRRVGDSYLHAFGETGMPLGPLPFHQYWLRSQQAGGNSRLWDYSLNTAAAEGRRFGRMDKVGDTPVGGIRYAYHFDAGLYGQFLRRYAEQRGVRRSEGKVLDVQLRAADGFIESVQMASGERIEGDLFLDCSGFRALLIEGALKAGFDDWSGWLPCNRAVTVPSVRAEPMRPFTQSNARPAGWQWRIPLQHRTGNGHVYCSEFMSEDEASALLLANLEGEALGEPRALRFTSGIRNKVWHRNCVALGLASGFVEPLESTAIHLVQSCINRLLTLFPDRHCSVALSDEFNRQTRYEYESVRDFLVLHYKATERDDTPFWRHCARLQLPERAARKVALFRASGQIVRENEELFTEGSWLQVMLGQGIVPARYHPSADAISAEQLDGFLHGIRGTVAQAAAT

SEQ ID NO: 86135 - protein, 510 aa, unidentified
  source 1..510: note = Asticcacaulis biprosthecum
  REGION 1..510: note = tr|F4QN16|F4QN16_9CAUL Tryptophan halogenase PrnA; OS = Asticcacaulis biprosthecum C19 OX=715226 GN=ABI_30240; PE = 4 SV=1
MTQPVPLKVVIIGGGTSGYMTAAGLVALVGSAVASVRLIESDDIGTVGVGEATLPQIKEFNDALGINEAEFMRETKASFKLAIEFRDWGRIGNSYLHPFGAFGQPVRGVEFQHLWARARKMGMTTPLEAYSYAIVTARQLRFDFPSDNRQSLKSTFSYAYHFDAGLYAAYLRRFGEARGLVRTEGKVTSAAQAPDSGRITSVTLESGEVVEGDLFIDCSGFIGLLIGREMKAEWESWTPWLPCDRALAVPCERAGDFTPYTRSTALEAGWQWRIPLQHRTGNGYVYASSFISDDEAAARLLGNLDGAALADPRPLRFSAGRRKKSWTRNCIGIGLASGFLEPLESTSIYLVQIAVMNLIALFPTRAWNPGLATEFNRLMDIEYERVRDFLILHYHANSRDEPLWTHMREMTVPDSLTARIEQFRHRGHLVRYRDGLFNPASWLAVLTGQDIVPEGYDRLADSLDEDTIRTKLEEISERIAVNVDIMPTHADFIRDYCYIPPVRESEGVPA

SEQ ID NO: 86136 - protein, 520 aa, Asticcacaulis sp.
  REGION 1..520: note = tr|V4RBR5|V4RBR5_9CAUL Tryptophan halogenase; OS = Asticcacaulis sp. AC460 OX=1282360 GN=ABAC460_13895; PE = 4 SV=1
MTSPRRVLIAGGGTAGWLTAAYLARVLGHGKPTCPQITLIESPEIGTIGVGEGSFATIRTTLQTLGLDEETFLREATATFKQGIRFADWEKKDSWYFHPFDPPYPVEGAGLLPYWLLQDEATRLPFAQAVALQKKVAETQRAPKRLYENRFGGALNYAYHFDAGKFAKLLSRHAISMGVTHLQGRINDVKLAQDGSIAGVVTDSHGELNADLYVDCTGFAAVLIGKALGSPYKSVRKQLLTDRAIACQVPYARPDAPIESYTVSTGHEAGWTWDIGLDVRRGVGYVYSSDHTSDERAEEVLRNYVGPTATDFSTRVIRFDTGYREQQWIKNCVAIGLSGGFFEPLEATGIMLIEVAIGMLTEYFPHAGPIDANATIFNRLMTLRNEKLVNFLKLHYCISKRPESFWRENCDPATIPDELNELLAMWQHRMPSRFDVLDDIDTFAYFNYQYILYGMNFATDLSAQRDSHPKIAEAKAIFDKVALIGDQAARDLPTHRALIDQVYNHGYAEPPAQRFMSVKR

SEQ ID NO: 86137 - protein, 502 aa, Brevundimonas sp.
  REGION 1..502: note = tr|A0A0Q5UZS2|A0A0Q5UZS2_9CAUL Tryptophan halogenase; OS = Brevundimonas sp. Leaf363 OX=1736353 GN=ASG17_13060; PE = 4 SV=1
MRPLKRILIVGGGSAGWMAAALLSKLFRGLYEITLIESDAIGIIGVGEATIPAIKKYNELLDLDENEFMQRTQGTFKLGIQFNDWDRLGDSYIHGFGVIGRDLGWLRAHHYWLQANQRGAAPDFADMSINTAAALENRFMRAEPKMAESPLGHIGHAFHFDAALYVRYLRGRAEAAGVTRLEGKVEGVALDPEDGFVRSVTLESGQVVEADLFIDCSGFRGLITEQALKTGYEDWSRWLPCDRAIALPCPRVEPMTPYTRATARPAGWQWRIPLQHRTGNGHVYSSQYMDDAEAERILVENLDGPPLAEPNRIRFVTGKRKKVWNRNCVALGLASGFLEPLESTSIHLVQSILIRLIRLLPDAGFDEATTAEFNRQTDFEYERIRDFIILHYKATRRDDTAFWRYCRDMEVPETLQRKMDLWMANGRIFREDEELFAEESWIQVFLGQGMVPRGYDPMVGLRPDAEVDAFLGNITGVIRKCVDRMPDHAAYVQKVCPAGPPN

SEQ ID NO: 86138 - protein, 501 aa, Novosphingobium aromaticivorans
  REGION 1..501: note = tr|Q2G751|Q2G751_NOVAD Tryptophan halogenase; OS = Novosphingobium aromaticivorans (strain ATCC 700278 / DSM 12444 / CIP 105152 / NBRC 16084 / F199) OX=279238; GN = Saro_1 882 PE=4 SV=1
MATSDRTIRSVAIVGGGTAGWMTAAALAQALRHNCRITLVESDDIGTVGVGEATIPPIRTFNETLQIDEREFVRKTQGTFKLGIEFVDWARVGNRYFHPFGPHGRAFDMVNLHHYWLRARAEGETAPLDEHSMAWALARENRFAPPMPDQRNVLSTFDFAYHFDAGLYARFLREYAEARGVVRIEGKIGSVQQNGETGFVTGVTLEDGRAVEAELFVDCSGFRGLLIEGALQAGYEDWTHWLPCDRAMAVPCENAYPLTPYTRSTAREAGWQWRIPLQHRTGNGYVFCSQFLSEDEAAEKLLSRLDGKALADPRPLRFVTGRRKKFWDRNVIAIGLSSGFMEPLESTSIHLIQAGISKLLALFPDRGFDPIVIDEYNRIAVSEFERIRDFIILHYKLTERDDAELWRYCAAMDIPDTLKTKIEHFRSFGRLVQRDADLFGPPSWLAVHIGQLNFPERTDPLADYRGIDGREWLAKLRAAMHHAAMQQPTHEQFIAANCAAA

SEQ ID NO: 86139 - protein, 494 aa, Sphingomonas sp.
  REGION 1..494: note = tr|A0A4R2XLQ9|A0A4R2XLQ9_9SPHN Tryptophan halogenase; OS = Sphingomonas sp. JUb134 OX=2485112 GN=EDF69_1301 PE=4; SV = 1
MDAQGDAAAAIEHVVIVGGGTAGWMAAAAAARFLNDGRRRITLVESNAIGTVGVGEATIPPILTFNRRLGIDEAEFLRETGGTFKLGIEFVGWRDGKDRYFHPFGTHGRPIEGLAFHQIWLKFRDAAGVGRLDDYSLPTLAAAAERFAHPVADERSPLSGLAYAYHFDAGRYAALLRRHAEAGGVHRIEGRITRVERDPSGSAVAAVVLSDSRRVAGDLFIDCSGFRSLLLGDAMETPFESWAHWLPCDRAIAVPGGALRPRPLATRATAHDAGWRWRIPLQHRTGNGIVYASAFLSDDAAERQLIDALDTSAMGEPRPLRFTAGRRVQQWTGNVVALGLAGGFLEPLESTSIHLIQEGISKLFALFPDRGDCSVERVTFNRFMAASYEAVRDFIILHYHANARTGEFWRHLREMPVPDTLAEKIALFRRKGRVFRYDDELFAVPSWVSVMLGQGIVPVGYDPLVDALDERRTTDALVMMRQVNEAAVAQMRVA

SEQ ID NO: 86140 - protein, 521 aa, Thalassomonas viridans
  REGION 1..521: note = tr|A0A0D8D2B0|A0A0D8D2B0_9GAMM Tryptophan halogenase; OS = Thalassomonas viridans OX=137584 GN=SG34_26620 PE=4 SV=1
MEKYGSDDIHHIVIVGGGTAGWLMAARLAAKYQTPAHSPAQTPVSITLVESPSVKPVGVGEGTWPGMRSTLKAIGIRESDFMRECDASFKQGSQFIGWLNGENTDSYYHPFTLPQGYEDVDMMRFFQQSQTPGPFAGAVCSQSAVCQQELAPKQITTPEYAGVVNYGYHLNAGKFAYLLKRHCLANFTVRHVLDEVVKVNGAENGDIASVSTENHGDISGDLFIDCTGFACLLLGDFYQVPFIGQNHILFADTALAVQVPYPAADSPVASVTRSTATRAGWIWDIGLTNRRGIGHVYSSRYCSESQAEQALASYLGEEFGGAEIRKIPIKSGYRSHAWEKNCLAVGLSAGFLEPLEASAIVQIELAADWLCMQLPAKRSGMDIIAKRYNREFNYRWQRIIDFLKLHYLLSRRCDSDFWLDNRRPDSVPDSLQELMSLWSYHYPTKNEFSRSHEIFSLYSYQYILAGMGFKCESAYALTVAENGIGRQHVQNSRELTEKYLRHLPGHRELLEQVARFGFKSV

SEQ ID NO: 86141 - protein, 513 aa, Devosia sp.
  REGION 1..513: note = tr|A0A1E4AH73|A0A1E4AH73_9RHIZ Uncharacterized protein OS=Devosia sp. SCN 66-27 OX=1660097 GN=ABS47_13085; PE = 4 SV=1
MAGQPHFVIVGGGTAGWIAAFIIQDSIKRLKLDARLSVVESSKIPTVGVGEATTAAFHVFLTHFGIDIFEFFRKTEATYKLGIRHEDWRRKGYTYYGPIDDPHAVARPPAGAPSDYLNVYAVSVNEPVQDMHLFGPLLKQKKAPWAQKADGSLIPLGPFLPAYHFDQSLVGKFLKEKSSGVEIVDNVLTGVERHGETGDVTALVFEDGQKLEGDFFIDATGFRKRLIVGEMQAPWISYQHELPVNRALPFWLPVEPGEEIANYTRAWAQEAGWMWQIPTQYRYGCGYVYSDEFRTPDEAHAEVERVLGRKIEVRGDIQFKIGRLEKAWINNVVAVGLSSSFLEPLESTSIHGTIVQMMMFAGQYLRDPAKMGQPLRDDYNRRVGRQVDDFRTFVNTHYMTERDDTPFWREVRANRIHPETRQRLERWKVEMPRREHFADYLFGLPHVETQLHYPVLDGLGLLDPAVAKAEMARDPKLRKFARETHAGLVKEYRQAAAKALGHAAFLEVVRGMG

SEQ ID NO: 86142 - protein, 505 aa, Xanthomonas axonopodis
  REGION 1..505: note = tr|A0A3G2W547|A0A3G2W547_9XANT Tryptophan 7-halogenase OS=Xanthomonas axonopodis pv. commiphoreae; OX = 1101443 GN=Xcom_07695 PE=4 SV=1
MTQAQIRKVVIAGGGTAGWIAACALSHQFRNLLDITLVESEQIGTVGVGESTVPPIRTFHRFLQIDEQEFLRAVAGTFKLSISFEHWRRQGERYIHPFGITGQSTLVCAFHHLWLESQRRGMAGSFGDYCLETVASRVDRFALHGEPAVNYAYHLDAALYAKFLRARSEACGVKRVEGRIQQVTVQPHSGDVASLVLEDGHVIEGDLFIDCSGFRGLLIEQTLHTGYEDWSHWLPCDRAVAVQTEALGPPVPYTRAIAHEAGWRWHIPLQHRVGNGLVFSSKHLSDDEAHAKLLRDVAAPAVKEPWMVPFRTGRRLKAWNKNVVSLGLASGFIEPLESTSIHLTISAVVRLLALFPAEGIAPSQVQLFNDVSRAEMEHVRDFVTLHYHATQRDEPLWQQCRQMELPESLALRLRAWRERAHAWQGADELFRVDSWTHVLMGQGIAPEQHHPLTRAFSDHDLRRLLDGIAQPIQHAVQQMPSQQDFIERYCKAGEQVWGMRSPVPA

SEQ ID NO: 86143 - protein, 513 aa, unidentified
  source 1..513: note = Asticcacaulis biprosthecum
  REGION 1..513: note = tr|F4QTE5|F4QTE5_9CAUL Tryptophan halogenase family protein OS=Asticcacaulis biprosthecum C19 OX=715226; GN = ABI_44420 PE=4 SV=1
MQDLRIRKVVIVGGGTAGWMAAAGMSKLLPANQVAFRVVESEAIGTVGVGEATIPHILYFNRLLGIDENEFVRKTNATFKTGIEFVNWGRLGQSYIHPFGPYGAPMDGIHFHHFWLRYAAMGKAPPLERYSLMIQAARAAKFQRPDPSKVNTALSLIAYAFHFDASLYARLMREHAEARGVTRTEGRITNVVQDPHSGHVQNVVLETGEVIEGDLFIDCSGFRGLLIEQTLKAGYDDWSHYLPCDRAVARACEKVADPIPYTRATAKASGWQWRIPLQSRTGNGHVYSSAHISDDAALDSLNADLDGAPLTEPNFLRFTAGIRKSPWTKNVVSLGLASGFLEPLESTSIHLIQTAIARLMTNFPDKTFNQPDIDYYNRRTRLEYEQVRDFIILHYNATARDDSPFWNYCRTMEIPQTLADRLAIYRENARQYRHDNELFNEVSWLAVMQGQNIEPKRYHPIADMISEEELVRRMTHFEDDVTRSLATMPGHQAFIDQHCRSAGGCIKSASQNV

SEQ ID NO: 86144 - protein, 530 aa, unidentified
  source 1..530: note = Asticcacaulis biprosthecum
  REGION 1..530: note = tr|F4QN13|F4QN13_9CAUL Tryptophan halogenase PrnA; OS = Asticcacaulis biprosthecum C19 OX=715226 GN=ABI_30210; PE = 4 SV=1
MDTAVSKGRSVLIVGGGSAGWLTAAYMAKVMGNRPDGVSITLMESPEIGIIGVGEGTFPTIRDTLRVIGIEEAQFMRECDATFKQGIRFDDWEFTPEDGHHSHYLHPFEPPHVGRENINLVPYWLLHNPAQRPPLAEAVTFQKRVTDARLGPKRLHHDNYTGPLNYAYHFDASKFAAILARRAKELGVQHLSGMLSDVVLNDEGAIDHIVSSEHGPLKADIYVDCTGFRSELLGKALKVPFHPIDDMLLTDRAVACQVPYATADGPLESYTISTAQEAGWTWDIGLPSRRGVGYVYSSRHSSDERAEEVLHAYVRRALPDARDIPTRRIRFEAGYRTAHWVKNCVAIGLSAGFLEPLESTGMVLIESAINKLVEFFPHTGAIDASAAMFNDQMIRRYDTIIDFIKLHYCLTRRTEPFWRDNTLPASLSPRLRNLLDLWKHRPPSRYDFILDYESFAFFSYQYILYGMNFETDLSPAAGAFPRTDEANQVFARLRSYGDQACRDLIPHRSLIRAVYDGGFIRTGPVPAMQR

SEQ ID NO: 86145 - protein, 508 aa, unidentified
  source 1..508: note = Asticcacaulis biprosthecum
  REGION 1..508: note = tr|F4QP46|F4QP46_9CAUL Tryptophan halogenase; OS = Asticcacaulis biprosthecum C19 OX=715226 GN=ABI_25180; PE = 4 SV=1
MDDPRLQSIIVAGGGTAGWMAAASLVRKFGSNRHTRITVVESSQIGTIGVGEATVPAIRPWLESLKINEIDFIKRCNATFKLAIGFDGWAGEGSHFFHPFAEHGLPMSGVPFQHLWTRMHQAGKASSIDAYCLGSQLASNNRFALPRKDERGELLFNYAYHFDAALVAAYLKSWSMTHGVRHIDARIDTVEQNSETGDVTGLVLEGGRVLTGDFFIDCTGFQGLLIEKTLKTGYDTWSQWLPCDRAVAIPCESRQEPAPYTRSMACEAGWQWRIPLQHRVGNGYVYCSDYLSDDRAMTDLMRNLEGPAIAEPRLIPFVTGMRRNIWTRNVFALGLASGFLEPLESTSIYLVQTSIQSLINNFPTRRDNPHLRDEVNRRNREHQEHLRDFIILHYALNKRVGQPFWDRCRAMSLPDSLAAQIELFRHTGRIQAGANDFFRYSSWLAMFAGFGVVPEYYHPSADDIALADLEREFEGMKGGIDTAVEGALSHQDFIARNCAAARMAEAVQ

SEQ ID NO: 86146 - protein, 489 aa, Acinetobacter sp.
  REGION 1..489: note = tr|U7GX95|U7GX95_9GAMM Uncharacterized protein; OS = Acinetobacter sp. COS3 OX=1397525 GN=Q674_12185 PE=4; SV = 1
MNRVVVVGGGTAGWFAALQLRQLFSPSVEVMVISAPEIPIVGVGEGGVLNLLSVLHDLNIDLKDFIEQTGSTLKLGFRYERWRTGKQEDYYYHLFPLPTPDFAWNEFGFNPYLSGLFNHGIDISRYMASYQFSEDRKPFHEVLQILLDGKNNFGASLHFDTFRVGQYLKEIALSRGIIHVEQRVHDFELNPQTEYVTAIQLLDQKIQCDFVVDASGFSRLLIGKKYQSGWHSFADTLPMNRALPFHLQHQDKIELVTRATAMSSGWVWQIPLQERIGAGYVYHDQFITDEQAQQEVEQWLGVKISPAQPIAFEAGFYEKVWMKNVVAIGLASGFIEPLEATSIGQMLSQLQLMISFIQENHGVISQQNIDFYNRQNSQYWKGICDFIRMHYDTGRKDTPFWQYMLTVPQSQSYQELKKCWEHRTPRDIDFVEHSMGGMSMFSAASWFAVGAGVGVIKPEATSAELYALSTEKKQKLAKYLQQIKQQLFL

SEQ ID NO: 86147 - protein, 507 aa, Pseudoalteromonas sp.
  REGION 1..507: note = tr|A0A1Y5JQ28|A0A1Y5JQ28_9GAMM Tryptophan halogenase; OS = Pseudoalteromonas sp. A601 OX=1967839 GN=B5G52_19400; PE = 4 SV=1
MMIKNIAIVGGGTAGWLTANHLGQVLLEQGVSITLIESPNIPTIGVGEGTVPSMRQSLKKFGIRESDFIRECDVTFKQSIKFVNWLDKKKHGENYYHHLFDSPVLFGDELTAGWLGSEQNESYADYVSKQTFCCDKMLAPKTITTPEYIGINGYAYHFDAKKFALFLSKHAIKHFAIQHLLADISDIKVDCDGYITHLETADNESIAFDFVIDCSGFSAAIIGDKLGVEFLDRSDLLLTDTALTLQVPTCSSDAIPPYTIATAHQAGWIWDIALTQRRGIGLVYSSKHMSDEQAHKKLHHYLGNQFTDLVPRKIPMKVGRRKLFWHKNCVAIGLSQGFVEPLEATAILLADFSASLLAKRFPRTHADISLLNDAYNKKVSYVWDQTFDFIKMHYCISDRKDSAFWLENKAPDSQSEKLQNNLARWQRFSPIREDFDSKFDLFDFDNYLYVLNGMKLGDNKLKQTPVLMKKVSEQKKRQQYRVKQLLSELPDHRELINKIKEFGLQKQ

SEQ ID NO: 86148 - protein, 500 aa, Asticcacaulis sp.
  REGION 1..500: note = tr|V4PX52|V4PX52_9CAUL Tryptophan halogenase; OS = Asticcacaulis sp. AC460 OX=1282360 GN=ABAC460_10365; PE = 4 SV=1
MDRHIRNIVIAGGGSAGWMAAAALSNALQKDCSITLIESEEIGTVGVGEATIPPILRFNKTLGIDEAEFVRATQGSFKLGIQFVNWGKLNHSYFHPFGSFGRDFDMAGVYHHWQAAFEAGQAGGLDDYCMAWSAAKRNRFAPPSGDPRHVLSTYDYAYHFDAGLYAAMLRRYAEAKGVKRLEGKIVDVGLNGETGFVETLTLDDGRSIAGELFIDCSGFRGLLIEGALKTGYQDWTHWLPCDRALAVPTTSSADFTPYTRSTAHQAGWQWRIPLQHRTGNGHVYASQYISDEDAAAVLMGHLDGEPLADPRPLRFTTGRRNRFWNRNVVAIGLSSGFMEPLESTSLYLIQSGIAKLLTLFPDRDFDPVLVDEFNRLTRVEFERIRDFIVLHYKLTQRDDSALWRYCAAMDIPDSLRETIEMFRRYGKIVHRELDLFGDPSWLAVHIGQMNFPQRNDPLLAYREADGVAWLAKFRSVIEAAAEGLPGHGEFIARAGMMAAR

SEQ ID NO: 86149 - protein, 385 aa, Prochlorococcus sp.
  REGION 1..385: note = tr|A0A0A2CSY6|A0A0A2CSY6_9PROC Putative tryptophan halogenase OS=Prochlorococcus sp. MIT 0701 OX=1499502; GN = EV12_0096 PE=4 SV=1
MFHTSTIPTTGVGEGGGPWLKQWLDEEGISRELMQRDVKATTKQGILFVDWGQQPKQILHAFTPKGQAHSYHFDAKRLSKILLDGLELDIRNQVVEIVESEKKNKELIHTKESGIEAFDYIIDCRGIPSAHHSDQEENCSPLIASGALLQTCEPLQSVHEDLNNFQTTNAIARPHGWIFLIPLQSRTSIGYIHDSHITNTEAVKQDLKMYLAASNLTPISPTRNIQFKTHISTQFLKNRIYKLGNRAAFIEPLEATAIESTILHCKLITAHIAKRKRNQPTTKEEVEMENNFNRVILNNMERIALFVSWHYSQGSIYDTPYWCKAKANHEILKENRVHPIIARDFDKWIEKGLQRQPRKVPSQGRDNMFFAWSEQSFAAIANILS

SEQ ID NO: 86150 - protein, 497 aa, Asticcacaulis sp.
  REGION 1..497: note = tr|V4PJJ7|V4PJJ7_9CAUL Uncharacterized protein; OS = Asticcacaulis sp. AC460 OX=1282360 GN=ABAC460_18965; PE = 4 SV=1
MDGQVIKKVVIAGGGTAGWCVAAALSKMLGTLLDITLVESTEIGIVGVGEATIPTIKTFHQLLGIDERDFMRSTNAAIKLGISFDNWTRINDHYFHSFGTVGKASWMTPFHHIWMHAREQGIAGDLGDYCLELQAGEAGKFEVAERSRLNYAYHFDTNLYGPFMRRISQPHVNRIEGKITGVNQDAETGFVTAIVMESGQVIDGDLFIDCTGFRGILIEQTLKTGYEDWSHWLANDSAWAAQTPTVGQIMPYTSAIAHDAGWRWKIPLQSRVGNGLVYSSKHLSDDAAHQRFLDLIDAPPLTEPNLIKFRTGRRLKIWNKNVIAFGLASGFIEPLESTNIHLMQSCATRLVQLFPFSGIHESMVNHFNELTRNEVALIRDFVIMHYKLTERDDSQFWRDRRDMEVPETLAARLAMYRDAGHAYQAPDEVFRVDSWMQVTTGQRLYPKGYHHVGQMIPRDDLEQALKNMKADIDRKVAQMPKHEDFIRQYSAEAAPVG

SEQ ID NO: 86151 - protein, 520 aa, unidentified
  source 1..520: note = Asticcacaulis biprosthecum
  REGION 1..520: note = tr|F4QN15|F4QN15_9CAUL Tryptophan halogenase family protein OS=Asticcacaulis biprosthecum C19 OX=715226; GN = ABI_30230 PE=4 SV=1
MSPEMTPDLMPDPIHDLIHDLAQPIRKLVIVGRDAAAWLAANALVRALGHALTVEVVELPSLLRPSDVYASQPALSSLHGMLGLRESDLLSAVRGVYSLGQSFANFSRSRPAFFHPYGVHGAMINGRAFAQVWLKARQGGMRVDFEDFSLNTAAAKQGRFFLPNSHTDNLGPCDFATHLKAVPYVQALKRVALSLGVSVRPARHIEARIDPVSGDVTAVVLSDGSEAVGDLFIDATGTASLLLGEARKVGFDSWQPWLRFDRTVTVSADALAVIPAYSQVRALEQGCLHLAPVRDATSLTFAFAGGLMTDDDALQTAAIVTGLRLRQDAVADDLHCGRRQAVWDGNVIALGEAAAVFDPIDNLGLHAVHQGLANLISLFPLDTTQVPERAEYNRRMASHFDRLRDFQIAHYKLNQNTDMEVWDALRTMPVPDELAYKIELFRTRGIIAQYDDETFETDNWLSIFFGHGLMPDSYDPLVDALPEDQLIQTFQRMLGVIKTEVAAMKPHAAYLEAGKTRTHA

SEQ ID NO: 86152 - protein, 510 aa, Sphingomonas sp.
  REGION 1..510: note = tr|A0A4R2XTE1|A0A4R2XTE1_9SPHN Tryptophan halogenase; OS = Sphingomonas sp. JUb134 OX=2485112 GN=EDF69_12029 PE=4; SV = 1
MRPDAIRRVVIVGGGTAGWMAAAAITRVLGEMPGLSIELVESEEIGTVGVGEATIPQIVLFNKMLGIDEAEFVRETRATYKLGIEFVDWLRPGHRYVHPFGFYGLDMKGIEFHHFWLKGRELGDPTPLDAYSLGIVGGLQGRFAHPRPDQPSSPLSKLGYAFQFDAGLYARFLRRLAEANGATRTEGRIVDVERDGETGHVAAVVLQSGARIEGDLFLDCSGFRGLLIEGAMAAGFEDWTQWLPCDRAVAVPCANGGDRQPLTRSTARGAGWQWRIPLQHRIGNGYVYSSVHLSDDEAAATLLANLDGAPLADPRLLRFTAGHRRRAWVGNVVALGLAGGFLEPLESTSIHLVQSAIARLLTYWPTRRFDQLEIDRFNAAHVSDYLEIRDFLVLHYKATERDDTPFWDYCRALEPPPGLASKLAIFGANGRIFREGNELFTETSWLSVMVGQGVEAGGYHPAADLLSDAETLTRLEHIRQVIADTASLLPHQDDHLRQIGCDPRPSLVVA

SEQ ID NO: 86153 - protein, 514 aa, Sphingobium ummariense
  REGION 1..514: note = tr|T0IYV7|T0IYV7_9SPHN Tryptophan halogenase; OS = Sphingobium ummariense RL-3 OX=1346791 GN=M529_01310; PE = 4 SV=1
MTHPVRHIVIVGGGTAGWLTAGVIAAKHKSRMPGGFTVTLVESPNTPIIGVGEGTWPTLRTTLSRMGVSETAFFRECDASFKQGARFARWTTGEADDAYYHPLVLPQSFGQVNLAPHWLARNDDLSFCDAVCAQGKICDDGLAPKTMATAEFDALANYAYHLDAGKFAGFLQRHCCETLGVRHILADVEQVVLKEDGDIASLTTAQAGTIEGDLFVDCTGFRALLIGEAMGVPFRECSDVLFCDTALAMQVPYGDPDDPIASQTISTAQSAGWIWDIGLPTRRGIGHVYSSNHISDEEAERELRAYIGPAAEKLSARKIKIHAGHRETFWKRNCVAVGLAAGFLEPLEASAIVLIELSAKLIAEQMPARREVMDIVASRFNATTHYRWGRIIDFLKLHYVLTKRTDSDFWRDNVRPETIPDRLQELMQLWRYQSPWFHDEFDRVEEVFPPASYQYVLYGMGFRTEVEPEALGGDARLAERAMRENAAQTEKLRAGLPKHRDLINRIVERGLQPV

SEQ ID NO: 86154 - protein, 514 aa, Sphingomonas sanguinis
  REGION 1..514: note = tr|A0A147I3T3|A0A147I3T3_9SPHN Tryptophan halogenase; OS = Sphingomonas sanguinis OX=33051 GN=NS319_04200 PE=4 SV=1
MVQPVQHIVIVGGGTAGWLTAGVIAARHQGRRPHSFTVTLVESPNVPIIGVGEGTWPTLRATLKNMGVSETAFFRECDASFKQGARFNRWTTGAAEDGYYHPLMLPQSFGQVNLASHWLAGEGDASFCDAVTPQGRICDAGLAPKTIATPEYEALANYAYHLDAGKFADFLRRHCCEQLGVRHVLADVEEALLAESGDIRAVRTAQAGEVTGDLFVDCTGFRSLLLGEAMGVPFRPLNDVLFCDTALAIQVPYDDPEAPIASHTISTAQSSGWIWDIGLPTRRGVGHVFSSSHIGRDEAERELRAYLGEAGRDLPVRELKIRAGHRARFWERNCVAVGLAAGFLEPLEASAIVLIELSAKLIAEQMPACREVMDTVARRFNDTTLYRWGRIVDFLKLHYALTQRTDSDFWRDNSRPETMPGRLRDLMELWRYQVPWMHDEFDRVEEVFPSASYQYVLYGMGQRTEIAPGSLAAETIAAQRAWRENEVQTGRLLAGLPRHRDLIRKIVERGLPTI

SEQ ID NO: 86155 - protein, 101 aa, Sphingomonas sanguinis
  REGION 1..101: note = tr|A0A147J424|A0A147J424_9SPHN Tryptophan halogenase (Fragment) OS=Sphingomonas sanguinis OX=33051; GN = NS258_18170 PE=4 SV=1
IGRDEPLWRERQAMAIPDTLAEKLAHFRSSGRIVLSSDELFRDASWFAVLDGQGERPGDHNPLIEFVGAEDNLRQLAMLRAEIAKTAAAMPPLLGRRSAST

SEQ ID NO: 86156 - protein, 284 aa, unidentified
  source 1..284: note = Alphaproteobacteria bacterium
  REGION 1..284: note = tr|A0A2N3CRW8|A0A2N3CRW8_9PROT Tryptophan halogenase (Fragment) OS=Alphaproteobacteria bacterium HGW-Alphaproteobacteria-15 OX=2013661 GN=CVT76_11170 PE=4; SV = 1
MQIQRIIIVGGGTAGWMAAAALSRIKAGRPVEITLIESEAIGTVGVGEATIPPFVGFNDLLGVNEAEMLAAVGGTFKLGIQFENWNRIGDSYIHPFGAYGYTMGGISFHHVWHRMANAGDKRPIQVFNLETMAAYFGKFPRTQDFARDDLPPVNYAYHLDATRYAAFLRRFAEARGVVRQEGRIADVALDGETGFVTTVTLDDGQQFAGDLFIDCSGFRGLLIEQALQTGYDDWSHYLPCNRAVALPCQREDGSPPPPFTRATAHRAGWQWQVPLQHRNGNGHV

SEQ ID NO: 86157 - protein, 536 aa, Sphingomonas sanguinis
  REGION 1..536: note = tr|A0A147JDF2|A0A147JDF2_9SPHN Tryptophan halogenase; OS = Sphingomonas sanguinis OX=33051 GN=NS258_00275 PE=4 SV=1
MTPNHDQMIRRVVIVGGGTAGWMAAAAFARLLNNGYTQVTLVESEEIGTVGVGEATIPPIITFNQMLGLDENDFLAKTAGTFKLGIEFVDWGDKGERYFHPFGRHGQDLQGVHFHQLWLRERSRRALPDIAEWSMSAMAARSGKFGRAKPDARSPIRELFYAFHFDASLYARYLRGYAERGGVTRIEGRIDAVNLRPEDGYVEAVTLADGRRIEGDLFIDCSGFRGLLIEEALGTGYESYAQWLPCDRAVAAPCALPNPAEPDPFTRATARDAGWQWRIPLQHRMGNGLVYCSEYLDADAAEAQLLASLEGELLGDPRHLRFTAGRRRESWNRNVVALGLSSGFLEPLESTSIHLVQAAIQRLIALFPDKRFDPAERTEFNRQMRDLYEDVRDFIILHYKATRRSDTPFWNQVRTMEVPESLARKMDLWAGKGRLFREGYDLFSNPSWVAVSLGQGIVPQSWEPAADALDEDLVAQALEQMRVGYADTAARMPSHGDFLRMTAPSPLAPALAPGRPADGGFDFARTPSGGGKAPLL

SEQ ID NO: 86158 - protein, 510 aa, Sphingomonas sp.
  REGION 1..510: note = tr|A0A0Q8X7P2|A0A0Q8X7P2_9SPHN Tryptophan halogenase; OS = Sphingomonas sp. Root241 OX=1736501 GN=ASE13_17610 PE=4; SV = 1
MPDKRGIIVVGGGTAGWLTAAYLARFFEGRIAITLLESPEIGIIGVGEGAFPTIRSTLQFLGIDETHFIRAASATFKQGIRFDDWLHAPGPDGARHHYLHPFEAPFYTEGGSLVPYWLLQGEATRPPFAEAVTIQNRVAEARRAPKKAGEGDYAGPLNYAYHFDARRLAEVLEARAAELGVRHLRGLLTGVELAEDGSIACVRTDAHGALEADLYVDCSGFRAELIGKALGSPFKSVKHQLFTDRALACKIPYDRPDAPLESFTVATAHAAGWTWDIGLEGARGIGCVYSSAHMSDEEAAEVLRGYIGHDDYKARIIPFEPGYREAQWVKNCVAVGLSGGFLEPLESTGVVLIEAAVAMIAELYPHNGPADAPAARFNRLIAGRYANIVNFLKLHYCLSRRQEPFWRDNADPASIPEALRELLDQWRWRPPSRFDFLLDLESFAFFNYQYVLYGMEFRTDLASGRGDFPNVAAAEKLFARIRAFSEQATKDLPGHRALIREINAGASLGA

SEQ ID NO: 86159 - protein, 505 aa, Sphingomonas sanguinis
  REGION 1..505: note = tr|A0A147HV24|A0A147HV24_9SPHN Tryptophan halogenase; OS = Sphingomonas sanguinis OX=33051 GN=NS319_12470 PE=4 SV=1
MTKVTEDGVRVVIVGGGTAGWMAGAALTRLLSGQCSVRLIESEAIGVVGVGEATLPHIRAFNERLGIPEAEFMARTRATFKLGIEFRDWGRIGDSYIHPFGTFGRGTGAIDFHHYWARLLREGHDLPPLDALSYACALARDARFDHPDQTRGGLSSTFGYAYQFDALLFAPYLRGMAEEAGAVRTEGMVVDVERDGETGLIRSVTLADGERVEGDLFIDCSGFRSLLLGQTLEEPFEDWSKWLPTDRAVAMPCRTETAVTPYTSAIAMPAGWRWRIPLQHRTGNGYVYASDFISDADAARALEAAVEGEPLAEPRLLRFKAGRRRRSWVGNCVAVGLASGFLEPLESTSIYLVQQAITALIELFPGREIAASDRDEFNRVIDLEYDRIRDFLILHYHATTRDDSPFWNYVRTMPIPDSLAEKMELWRRRARVVKYREGVFLDASWIAVYLGQGIVPEGWDPRADVAGTPDLLRAVTDLRAEIAADVGARPEHRAFLERYCPMVAA

SEQ ID NO: 86160 - protein, 520 aa, Sphingomonas sp.
  REGION 1..520: note = tr|A0A0Q8XFN8|A0A0Q8XFN8_9SPHN Tryptophan halogenase; OS = Sphingomonas sp. Root241 OX=1736501 GN=ASE13_13165 PE=4; SV = 1
MVSEGRRILVVGGGTAGWITAGYLARMLGADRPGGIAITLVESHDIGILGVGEGTFPTIRRTLARIGIDEAELVRRCGATFKQGAKFVHWRHAPGTPGRDHYLHAFQETDDRDGPELLPYWLLGLAGDANWDEVNTPQKRAADAHRAPKLPSHPDFVGPLNYAFHFDAVSLAVLLREQGIANGVTHLVDTVQEVLLGEDGAIAGVRCAERGVLTADLYIDCTGFRAELIGKALGQPWKSCRDVLFCDGAVAIQVPYARPDDPIASYTISTAQQAGWIWDIGLEARRGIGHVYSSAHGDADEAERVLRDHIGPAGAKLEARRFRFDAGYREVNWVKNCVAVGLSSGFFEPLEATGIVFSEIAAGVIANLFPWAGDFETSARQFNDNMRRRYERTLDFIKLHYCLSERRDSQFWCDNVDPASVPDSLKELLDRWRFRPPNEMDIDRNVDIFTESSWQYVLYGMGWKTDLSAKAGVFRFEEEAKAAFATIRQQGEFAIRQLPSNRELVRFAQRSGFGQGANAA

SEQ ID NO: 86161 - protein, 503 aa, Brevundimonas sp.
  REGION 1..503: note = tr|A0A0Q5VBG0|A0A0Q5VBG0_9CAUL Tryptophan halogenase; OS = Brevundimonas sp. Leaf363 OX=1736353 GN=ASG17_13600; PE = 4 SV=1
MAEPIKSVLVVGGGTAGWMAAAALNSALGPHCKVRLVESDEIGIVGVGEATVPTVRDFNNLIRLNEPEFMRETRATLKLGIEFVDWGRKGTAYFHPFGTFGGGATLGEFAQTWLTLNQRGLNGDVTDWSICAQAAQRGRVGARQADPRSPYLNLYTAFHFDAGLYALYLRKVCEARGVERIEGKIVEVVQRPEDGFVSGVKLADERVLEADLFIDCTGFRGLLIEGAMKAGFEDWSHWLPMNRAVAMPCAPVSGITPYTRSTAMDAGWRWRIPLQHRTGNGHVYCSDHTDDETALNQLVEGLDGEAMADPRVIKFQTGKRKAFWAKNVCALGLATGFIEPLESTSIHLIHVGIAKMLQHFPDRDFSPVNIDIYNRRMEREVQQVRDFVILHYHASERDDSEFWRRVRDMPIPDTLAERVGAFRDRGMIYQVAADEYFSMASWMAVMVGQGIQPRMANPLYGFQNLERATEGFERVRTTFAQAAEALPTHEAFLKAENLWKTAS

SEQ ID NO: 86162 - protein, 503 aa, Sphingomonas sp.
  REGION 1..503: note = tr|A0A0Q8X8D4|A0A0Q8X8D4_9SPHN Tryptophan halogenase; OS = Sphingomonas sp. Root241 OX=1736501 GN=ASE13_18000 PE=4; SV = 1
MSDQAIRSIIIVGGGTAGWISAAVLSRFLDPARCSITLIESEEIGTIGVGEATVPLMQHLNGLLGIDEREFVKATQGSFKLGIAFRDWGTIGNTHFHGFGDYGDAIEGIAPHHHWLKLRGEGDATPIDDYSLPYAMARRGRFAPPSADPASQTSFYRYAFHFDALLYARFLRNYCEQRSVRRIEGRVVDTELEGETGRIAAVVTADGQRHAADLFVDCSGFRGLLIEEALGTGYEDWRHWLPCDSAVVAPSALMGPPTPYTISTAREAGWQWRIPLQHRMGNGYVYSTRFTDDERARDLFTANVEGKLLADPRVLRFTTGRRRKFWNGNCVAIGLAGGFMEPLESTSIQLIQTAIARLVEYFPDRNWDPRIADEYNRLTTNEFERIRDFLILHYSLTRRDDAPLWDYCRAMEMPDTLRHKIEVFKATGRVPLLSEESYQEPSWVAIFAGNGFLPDRYDPLVDRLDPERLRAGLAHRRRLLAKAAETMPPHELFIQRCCLAEAA

SEQ ID NO: 86163 - protein, 503 aa, unidentified
  source 1..503: note = Stenotrophomonas panacihumi
  REGION 1..503: note = tr|A0A0R0ANB6|A0A0R0ANB6_9GAMM Tryptophan halogenase; OS = Stenotrophomonas panacihumi OX=676599 GN=ARC20_00885; PE = 4 SV=1
MTRDALDLPATPVRRVVIAGGGTAGWMAAAAISKILGRQLEITLVESEQIGTVGVGEATIPPLVTFHRLMEIDEREFMAATQGAIKLGILFENWRDIGHRYFHSFGTTGRDHWTAGFQHFWLRGRERGLASDYADYNVESVAARERRFAHLPKMGMNYAYHFDASLYGKFMRQIAEQHGTRRVEGKIADVLLHEDTGCIRSLRLESGDVIEGDLFIDCTGFRALLIDKALGVGFEDWSHWLFNDSAQAVQTAAVEDAAPYTSAIAEEAGWQWRIPLQRRVGNGIVYSSRHMDDGRAREIFEGSLRGEQTSRMLQIRFRPGRREHSWYRNCIALGLAGSFIEPLESTTIHLIQRGITRLMQCFPKVLTAVDIEEYNRQMAEELVHVRDFVVLHYALTDRRDTAYWRACHEMTLPPSLQHRIDLFRETGIVFHQPNELFAENSWIQVMMGQGNMPKQHHPTADLMGDEELARFLNAAREHAARTAAQLPSHQAYLDRWCPATTQR

SEQ ID NO: 86164 - protein, 521 aa, Sphingomonas sanguinis
  REGION 1..521: note = tr|A0A147J800|A0A147J800_9SPHN Tryptophan halogenase; OS = Sphingomonas sanguinis OX=33051 GN=NS258_10805 PE=4 SV=1
MTGRAERTDGPVRRVVVVGGGSAGWIAACRLAAQSRRTGGDVRVTLVESRNVPTVGVGEGTWPTMRNTLAKIGISETDFIRSCDAAFKQGARFVGWTDGTADDGYYHPLNPPAGATEIDLAPHWLHRSEMGASFADWVDYQAMLCDAGLAPKSIVAPEYAGHANYAYHLDAGKFATLLRDHGVGQLGVEHVLGDVVRVAVSDHGDIAHLELADGGTVAGDLFVDCTGFAALLIGGVYDVPFRRCGDVLFADRAIALQVPYAQPDDPITCHTVSTAQGSGWIWDIGLWTRRGVGHVYSSAHTSDDAAEAALRAYVGPAAEGLSARRITIDAGHRTRFWQNNCVAVGLSAGFIEPLEASALMLIETAMDAIADRLPRTRAAMDVMARQFNATFTHHWMRIIEFLKLHYVLTKRTDTDFWRDNVAASSIPDGLAERLELWRHHSPGPQDFDHAREVFSWPSYQYVLHGMGFESHRPPVDPAAPDAALAERFVARTARAKGELRARAPIHRDLLRAIREHGLQRV

SEQ ID NO: 86165 - protein, 560 aa, unidentified
  source 1..560: note = Bartonella apis
  REGION 1..560: note = tr|A0A1R0FAC5|A0A1R0FAC5_9RHIZ Tryptophan halogenase; OS = Bartonella apis OX=1686310 GN=PEB0149_013690 PE=4 SV=1
MLDLGQAKKIAVIGGGLTGWFAALMLRRVFSPKVDIVVFEDPKRPHYSGGEGGLANFVVNLQRASIDIDEFVHNTDATFKMGNVYRGWRNGGQNDIYYQLFPSPDDHVEEIDFSYRGVWPYLATRIATKTPLHTLFPGFSLIEAGSSQVEANAVFKLRRSGIQPTFHFSVGKLVTLLKNAGVSRQISFRNQRVADLVIASNGDVTSLKLDSGEEVPVDFVIDASGFERISAGKKYKSEWRSFSGSLLENSILSFSVPNGRKNPSFVSEAAALGAGYLWQVPLAGHVSAQYVFSSQYITATRVRDELQSYLGSAISPTGITTFNPGNFKKIWANNVVALGVASGFISPLETPSLGFMLQQLGELERTFLACRGIIGEQTIEAFNQANDKSFSEIADFLRLHYDGGRSDYTFWCDAGLAKRSASLEAMEACFHKRLPRIIDIDGYNTGWPPLYHLMNWIFVAAPLAIVSVEGAMSELNNMPPQIRQRMEQYARELMRMRTPVTQSQQRQGLKREGASGQGFSLDQNSSSRGASYGTGKNNGQVSDKPGSFQEEEGSLRATHR

SEQ ID NO: 86166 - protein, 416 aa, Flavobacterium anhuiense
  REGION 1..416: note = tr|A0A444W238|A0A444W238_9FLAO Tryptophan halogenase; OS = Flavobacterium anhuiense OX=459526 GN=NU08_0705 PE=4; SV = 1
MTKEFVDVLVIGAGPSGCVSASYLFKNNVKVKVVEKTKFPRLVVGESLIPRVMDHFAEAELFDALDAMNFEKKLGARFIRGEEICNFDFSVKFGEGWDWTWQVPRADFDNTMAQEIIRKGIDLEFETEVLEVSFEGKNSKTIVKDKDGNLKEIHAKFIIDSSGYGRVLPRLLDLDTPSKLDPHSSIFTHVKDINREEGVEGTQISFDILETEVWLWVIPFSNGNTSLGVVGPTDFINSLSENKDNAEALRNAIQKSDYYIKRFAGTEFLFEPVKLENYSRAVKRMYGDGFALTGNSSEFLDPVFSSGVAFATESGMLAAKLYLKESQGIPVDWEVEFTQYMKRGIAVFTTYVQEWYTGNLQTLFFHQPENPEVKEKICAVLAGYVWNEENSFVKKHDHVIANMAYLLNMQKEQSPE

SEQ ID NO: 86167 - protein, 444 aa, unidentified
  source 1..444: note = Caulobacterales bacterium
  REGION 1..444: note = tr|A0A1F8I8G1|A0A1F8I8G1_9PROT Tryptophan halogenase (Fragment) OS=Caulobacterales bacterium GWE1_67_11; OX = 1797583 GN=A2093_01600 PE=4 SV=1
RDFIQKTQASFKLGIQFEDWTQKGESYFHPFGAVGVPVDISDFYPVWLKARMNGYDRPLMDFAAAARMASQGRFMLPFKAQRTPIGGASYAVHVDAKRVARYLRDFAEARGVKRTEGIVEDVMTRPDGFVSGLKLKSGQTVEADFFIDCTGFRALLIGKTLGVGYTDWSEWLMCDRAIAVQTENVGPPTPYTLAQAQDCGWRWRIPLQHRTGNGHVFCSRYMSDDEATARLLAQVEGRPVVNPMVVPFKTGVREKIWDKNVLSLGLASGFIEPLESTAIHLIYRGMDFLFRLMPDLDCDPNLAAEYNRRMTVDYEEIRDFIILHYALTRRDDTAFWRQCRDMVLPEGLQHKLEVFRANGSLVEALDPLFRNVSWYAVMDGMGVRPRSYPPLVDRIDSTGLTDEMDRAANILNAFVADLPTHQAFIDTHCPAPSVDLPAPLAVPA

SEQ ID NO: 86168 - protein, 501 aa, Asticcacaulis excentricus
  REGION 1..501: note = tr|E8RVA6|E8RVA6_ASTEC Tryptophan halogenase; OS = Asticcacaulis excentricus (strain ATCC 15261 / DSM 4724 / VKM B-1370 / CB 48) OX=573065 GN=Astex_3619 PE=4 SV=1
MSQKIRHVVIAGGGTAGWMTAAWFARLLKDDVDTITLVESEEISTIGVGEATTPYIRVFNQVLDIDEHAFLKSTYGTYKLGIEFVDWGAINNRYVHPFGPFGREFGALPFHSVWLRHALSDRNASLDAYNLQALAAKAGKFMPPAGANSPLAEISYAYHFDASHYAAFLRQMSEAEGVRRVEGRIEHVDLDERGFISGLRLNGERLIEGDLFIDCTGFRSLLLGEALGVGFEDWSRWLPCDRALAVPSRSTEPPVPYTRSTAHSAGWRWRIPLQHRVGNGSVFCSQFMDEETARENLLANLDGEPLAEPRAIRFQTGRRQKFWEKNCVAIGLSSGFLEPLESTSIMLIQNGIARLQYLFPDRDFHQADIDTYNADLTREYEEVRDFLILHYYVGSRCDSDFWRYCRDMSVPDALTQRLNLFRSRGRIPQERGEQFRTGNWLAVMWGQGLRPAAPDPLVLSIPEERSETWLRQTRDVIAACRDRMPPHEDYIRHFCAATISA

SEQ ID NO: 86169 - protein, 505 aa, Asticcacaulis excentricus
  REGION 1..505: note = tr|E8RV31|E8RV31_ASTEC Tryptophan halogenase; OS = Asticcacaulis excentricus (strain ATCC 15261 / DSM 4724 / VKM B-1370 / CB 48) OX=573065 GN=Astex_2586 PE=4 SV=1
MNVKGMYRLVIVGGGTAGWMAAAALRRSFSALPYTVTLIESDEIGTVGVGEATIPPMIQFNDMLGLDENAFLKAVNGTFKLGIRFKDWSAPGSDYFHPFGVYGVDMGGLNFNHYWMRYQKAGGSADFGLFNPQTLAARANRFGRMKEINPNVPAVNYAFHFDASLYARYLRDVCVQRGVVRKEGRITEVQQDPDNGDVTAVVLASGERIEGDLFIDCSGFRGLLIEQTLKSGYEDWSKWLPCNRAVAVPCDKVDPLTPYTTSTAREAGWQWRIPLQHRTGNGYVFCDSYLSEETASDLLMQRLDGQAQAEPRVIRFQTGHRKQMWNHNVIAMGLASGFLEPLESTSIWLVQEAIATLQLYFPRGGITDTARACFNRAMLDAYTNVKDFLIAHYKVTTREDTPFWSYCKHMDIPDSLQFRLDSFRENNQPLVRPQDLFKEASWFAVLAGQGLMPQSYHPGADVMPDDEFRWRIQKVREGTTGLVNMMPGHEAYIAKTCASPHFVSA

SEQ ID NO: 86170 - protein, 506 aa, Xanthomonas campestris
  REGION 1..506: note = tr|Q8P3D8|Q8P3D8_XANCP Tryptophan halogenase; OS = Xanthomonas campestris pv. campestris (strain ATCC 33913 / DSM 3586 / NCPPB 528 / LMG 568 / P 25) OX=190485; GN = prnA P E=4 SV=1
MIPAPLRNIVIVGGGTAGWMAAAAFARVLGPSFNVQLIESEQLGTIGVGEATVPHIKAFNNLLGIDEAEFVRQTQGSFKLGIEFIDWQRPGTSYIHGFGTQIGHPLGLLPFHQYWIKQQRRGKAQPLGAYTLNTVAATRGKFMTSAGDVPANSPLANIAYAYHFDASQYARFLRGYAEQRGVTRLEGLIEQVQLDAHTGHVQSVQLASGQVVSGDLFIDCSGFRGLLIEEALHTGYHDFTHWLPCDRALAVPCEKVGPPTPYTRSTARAAGWQWRIPLQHRTGNGYVYSSAHVSDDEAAATLLANLDGTPLADPRPLRFTTGRRKQFWNRNVVALGLASGFLEPLESTSIHLIQSGISKLLELFPRESISPVLVQRYNDRLAFEFDRIRDFLVLHYHATERDNSAFWRHCRTQPITPELQATLDLFRDSGRFYRNAEEMFAEISWVQVMVGQGILPQGYHPLVDQVPDTDAEGFLASVAQTISHCVDVMPTHQQFIDRYCRADRVR

SEQ ID NO: 86171 - protein, 631 aa, unidentified
  source 1..631: note = Bartonella apis
  REGION 1..631: note = tr|A0A1U9MDD0|A0A1U9MDD0_9RHIZ Tryptophan halogenase; OS = Bartonella apis OX=1686310 GN=BBC0178_018370 PE=4 SV=1
MIPIDGGSTSPSFPKPSSGLQKSLYSVERKSAGCQTREKIAIIGGGLSGWLSALMLRRVFSANVDIAVFEDPNLPCFKGGEGGLHHFIAMVRRLNIDLQHFVHTTKPTFKMGNVFRGWRNGSASDIFYNLHPGMNDHLEELDFSLYGFWPYLATAIASGVPLETIFPAFALIEQKANQIEATAVFNTHRSGVEPTLHFDCRLVVDYLKKIGMERKIRTFARKVVDFGISPDGHVDALKLSGGDIFNVDFVIDASGLRHLLVGQKLNGKWHSFSDSLLTNSAIDFRLANSGAKVDLVSEYFATPAGYICRIPLSDHYSGIHVFSNNHTDWLRAKREVELLFRSPVAARPVITFDPGNFEKTWMGNAIAIGVSSGYLGPLQASATETTIHQIARLERILLECNGVIGEHIIEDYNKSNNGAFKANADFLRMHFDGGRRDTAFWRDAASARRSSHYQQMLACFAERLPRVIDFENYGAGFPPLYHVLDWLFIASSLGIVSKAAALNELEGLPPNIRDKMERYGRDILVRGNVQSDLGAQSDLGAQSELPLQNGLGAEGELSPQNGLGAQSKLSAQKNLPPVSGHSFGQEPLHEGEEIKEAGQNWQRGGYQFQFANHARFSQARTEQDKGGVHAG

SEQ ID NO: 86172 - protein, 497 aa, unidentified
  source 1..497: note = Rhodospirillaceae bacterium
  REGION 1..497: note = tr|A0A2E3ZK50|A0A2E3ZK50_9PROT Tryptophan halogenase; OS = Rhodospirillaceae bacterium OX=1898112 GN=CMM37_00975; PE = 4 SV=1
  VARIANT 246: note = Xaa can be any naturally occurring amino acid
  VARIANT 256: note = Xaa can be any naturally occurring amino acid
  VARIANT 261: note = Xaa can be any naturally occurring amino acid
  VARIANT 408: note = Xaa can be any naturally occurring amino acid
  VARIANT 417: note = Xaa can be any naturally occurring amino acid
  VARIANT 421: note = Xaa can be any naturally occurring amino acid
  VARIANT 473: note = Xaa can be any naturally occurring amino acid
MKNIVILGGGTAGWMAANLLQKKWQQRGIKITVVESPDIGIIGVGEGSTPLLKEFFDSLDISESEWMSQCNATYKNGISFNDWSTVTGYESYFHPFPCSLDFATFGLLYKYTELRRKGLDVLAHPNRFSLMAGLTERKLAPLPEKNFPFHFQYGYHFDSVLIGKFLRGKAKESGVSHIEATVENVEQETDGSIKSLRLNTGEILSGDFFVDCSGFASILLQKTLKVPFLSFSENLFNDSAVAVPTXIEAEVPAETXSTALXNGWAWKIPLTNRFGNGYVFSSNYCSQDEAETELRTHLGILDSEVEARHLKMKVGRVQESWAKNCLAVGLSQGFIEPLEATALQFVYSTVEQFSQALEEGNFTNQYRGEFNTRMNANFEGIRDYIVLHYKTNSRNDSQYWIDNRDNQXISDNLRAMXECWXAIEDMQEALTRLNIGSYYSQRSWTCLLAGVGVFPKQENLVIPDKEKAGKAMXDLKYVDDFINGCSMNFKSHSKLLF

SEQ ID NO: 86173 - protein, 583 aa, unidentified
  source 1..583: note = Bartonella apis
  REGION 1..583: note = tr|A0A1U9MK37|A0A1U9MK37_9RHIZ Tryptophan halogenase; OS = Bartonella apis OX=1686310 GN=BBC0122_019690 PE=4 SV=1
MESDLRAGRIFPVAALNLRWRQKLLDLRHAKRIAVAGGGLTGWLAALMLRRVFSPNVEIVVLEDPDNPAYSGGEGGSGNFIASLERASIDIDEFVRETDATFKIGNAYHGWRADNANDIFYELFPAPDEHVEEVDFSFRGVWPFLATRIATGTPLHTLFPGFSLVATGASQVEANAVFNLRRSGIKPTFHFNVGKFLKLLKKIALSRQISSRSRKVVEFVKSESGDVVALKLVGGAEISADFIIDATGFERLGAEKAYKSVWRSFSSQLPEDRYLSFKIPEERKNPSLVSAAVALANGYLWQVPLRDHVFVHYVFSGKSGTETQIRQALQSYFGFAVTAGVISTYEAGNFKTVWNNNVVSLGVASGFISPLESSSFAHMLQQLGELERTFIACQGIIGAHTIGAFNEANDRSFGEIADFQRMHFDGGRSDSAFWREAGQAKRSPNYEAMKACFSERLPRIIDIAGYNSGWSPLFHLMNWLFVAAPLGIISAGAAIRDLNYLPPRIMERMQQYGAELMRINAANAKPQWKDSGNIEPREQQGFAAYRNYSTVPAGEFGVKPDRQFSESSGTIETAEGNLRATHG

SEQ ID NO: 86174 - protein, 494 aa, Sphingomonas sp.
  REGION 1..494: note = tr|A0A0Q4IZ01|A0A0Q4IZ01_9SPHN Tryptophan halogenase; OS = Sphingomonas sp. Leaf230 OX=1735694 GN=ASE82_04915 PE=4; SV = 1
MTDALRSVTIVGGGTAGWMAAVAFGRLLGPAGTRVTLIESDDIPTVGVGEATIPPIRTFHAMLGIDEDAFLRATGGSYKLGIRFEGWTRPGESYVHPFGQIGTDIAGVPFAAQWLRARQAGLAAPLGAYSLEARAAETRRFSRPIANGDSPLSRIGYAYHFDAGHYAAFLRAQAEAYGVVRHEGLVERVERGPAGIAAVHLADGSRIAGDLFLDCSGFRALLIEGAMEAGWTDWSEWLPCDRAVAVPSVADAAPLPLTRAIAERAGWRWRIPLQHRTGNGHVFSSRHMSEDEATATLLAGLHGEALAEPRVIRFATGHRNRFWSGNCIALGLAAGFMEPLESTSIHLVQSGLQHLLRMLPAGRPAAATVERYNRIMTAEFVRIRDFLVAHYHLNDRTERFWLDRAAAAIPEGLAEKLALFHAGGRIFREADELFNETSWLAVLTGQNAPVSGYDPICDAIPIETAANRLAQIERVVATSLTHMPSHAHALARLA

SEQ ID NO: 86175 - protein, 490 aa, unidentified
  source 1..490: note = Rhodobiaceae bacterium
  REGION 1..490: note = tr|A0A2E6U413|A0A2E6U413_9RHIZ Tryptophan halogenase; OS = Rhodobiaceae bacterium OX=2026785 GN=CML95_08190 PE=4; SV = 1
MRKIVIAGGGTAGWMTAVAFANTMGETVDLTLVESDAIGTIGVGEATIPPMITFNNLMKIDEAEFMRETQATFKLAIAFEGWKERNHRYIHPFGQAGHDHWTCGFQHFWLNGKDRGHHEDYSLYSLESTAADNFKFGHLPDKRISYAYHLDSGRYARYLRRISEANGAKRIEGKIHSVELNNENGYIDHLVLEDGQRVEGDFFVDCTGFRALLIGDALGVGFEDWSHWLPNDSAIAVQTESIHPPAPYTRSLAHEAGWQWRIPLQHRMGNGIVYCSKYMDQEKALQTLLESVEGETLTEPNFIRFQTGARAKHWEKNCVAVGLSSGFMEPLESTSIHLIQRNVIRLLHMLPNDEICQNDVDEFNKQAEIDMEQIKDFLILHYVANNREGEPFWDYVREMAIPESLRHRIDLFRKTGRIFRHNDELFAENSWVQVMMGQGIVPESYHPITTKMRDEEVSHFLKTLKDSVAATVDNLPSHSDYIAKYCPAEK

SEQ ID NO: 86176 - protein, 504 aa, Sphingomonas sp.
  REGION 1..504: note = tr|A0A0Q4JC06|A0A0Q4JC06_9SPHN Tryptophan halogenase; OS = Sphingomonas sp. Leaf230 OX=1735694 GN=ASE82_04430 PE=4; SV = 1
MANHPLRIVIAGGGTAGWMAAATFARFLETGYEIDLIESDDIGTVGVGEATIPQIHLFNDALGLDEDAFLRATGGTFKLGIEFVDWFKPGHRYMHAFGDVGRDVGLLPFHQYWLRARSLGLAGDLGAYSLNTHAALAERMQRGPARTARTLPSMPYAYHFDAALYARYLRRYSETRGVNRIEGKIVRVTRDGESGDVAGLVLENGTTVAADLYIDCTGFRGLLIEEALGTGYEDWTHWLPCDRAISVPSARSEKFTPYTRSTAHAAGWQWRIPLQHRTGNGVVFSSAHMSEDEATATLLAGLDTPAMAHPRTIAFRTGRRKRMWNRNVVALGLAAGFMEPLESTSIHLIQSAISRLLKLLPGRVIADADRTEFNRQSDFEYERIRDFIILHYKATARDDTPFWRQCRDMAIPDTLAAKIDLWRGNGHIVREHEELFTEVGWLQVLAGQGIMPAGHHPLADAISTSDLGEFMDTIDKLNAREAGQMQDHAAFVAQHCASPAGLGA

SEQ ID NO: 86177 - protein, 521 aa, Asticcacaulis excentricus
  REGION 1..521: note = tr|E8RTM7|E8RTM7_ASTEC Tryptophan halogenase; OS = Asticcacaulis excentricus (strain ATCC 15261 / DSM 4724 / VKM B-1370 / CB 48) OX=573065 GN=Astex_3213 PE=4 SV=1
MAKRPYSSKFGNRFMNSVQQQDIVILGGGAAGWIAAGLLARKTDRRQTRITVVESEEIGIIGVGEATVPVLAHCNALLGIDEYDFIRRTQGTFKLGIEFCDWGVVGNRHFHAFSDYGHQVEGVSTHHYWLRLRQAGEAHPIDDYSFAYAVAKNNRFAPGDPQNARYHYAYHFDAALYARYLREVATGLGVQRIEGRMTHVDLDSESGHITAIHLADGRKVPGDLFLDCTGFASELLGKALNTPFVDWSHWLLCNSAMAVPAMRTGAALPFTRSTAHAGGWRWTIPLQHRSGHGMVYNSDLWSDEAARDALLGAIDGEPLAEPRVFRFTSGHRKAFWNRNCIGIGFASSFLEPLESTGLQLIVMGVLKLLQFFPEKTINPVLRDEYNRISTREIERIRDFIIAHYYLSRRPEPLWAACRDIEIPDSLRHKLEVWNASGQVSLGDLESYMEPSWLAILLGNGAVPARHAVAADLHPLEQIKKGMDLRREEIRRSAQTVMSHQEFIDRHCKAASERPQAEAGTA

SEQ ID NO: 86178 - protein, 505 aa, Xanthomonas axonopodis
  REGION 1..505: note = tr|A0A1T1P5Z0|A0A1T1P5Z0_9XANT Tryptophan halogenase; OS = Xanthomonas axonopodis pv. melhusii OX=487834; GN = Xmlh_01615 PE=4 SV=1
MTQAQIRKVVIAGGGTAGWIAACALSHQFRNLLDITLIESEQIGTVGVGESTVPPIRTFHRFLQIDEQEFLRAVAGTFKLSISFEHWRRHGERYIHPFGITGQSTLVCAFHHLWLESQRRGMPGSFGDYCLETVASRVDRFALHGEPAVNYAYHLDAALYAKFLRARSEACGVKRVEGRIQQVTVQPHSGDVASLVLEDGQTIEGDLFIDCSGFRGLLIEQTLHTGYEDWSHWLPCDRAVAVQTEALGPPVPYTRAIAHEAGWRWHIPLQHRVGNGLVFSSKHLSDDQAHAKLLRDVAAPAVKEPWMVPFRTGRRLKAWNKNVVSLGLASGFIEPLESTSIHLTISAVVRLLPLFPAEGIAPSQVQLFNDVSRAEMEHVRDFVTLHYHATQRDEPLWQQCRQMELPESLALRLRAWRERAHAWQGADELFRVDSWTHVLMGQGIAPEQHHPLTRAFSDHDLRRLLDGIAQPIQHAVQQMPSQQDFIERYCKAGEQVWGMRSPVPA

SEQ ID NO: 86179 - protein, 503 aa, Brevundimonas sp.
  REGION 1..503: note = tr|A0A4P8Q9N0|A0A4P8Q9N0_9CAUL Tryptophan 7-halogenase OS=Brevundimonas sp. SGAir0440 OX=2579977; GN = E7T10_08940 PE=4 SV=1
MTPAPLKRILIVGGGTAGWMAAAALAHVTRGTVKVELVESEVIGTVGVGEATIPPILLFNQLLGIDENEFVRATQATYKLGIQFNDWFQKGHSYFHPFGTYGTRIDAASFHQYWLRLNKAGLDDDLNAYSVTTMAARMGRFTRPDTDPRGAASQMTYAFHFDAGLYARFLRQRAEANGVVRHEGKIADVRLRDGDGFIQSVRLDDGRELEADFFIDCSGFRGLLIEGALKTGYEDWTHWLPADRAVAMPCTRVGDPTPYTQSTALEAGWRWRIPLQHRTGNGYVYCSPYISDDAAQARLRASLDGEAMAEPNFLRFTTGRRKKTWNKNCLALGLASGFLEPLESTSIHLVQSGISKLLLHFPDTGFAQADIDNYNRMMRLETERIRDFIILHYHATARDDSPLWRHARAMPIPETLKQKMDQFRSRGRIFRYEDELFQETSWIAVLLGQGVIPERHDPITETIPLEQVQQWLQKMKAMIQQGVARMPTHEAFIAANCKAPPVN

SEQ ID NO: 86180 - protein, 510 aa, Asticcacaulis excentricus
  REGION 1..510: note = tr|E8RS89|E8RS89_ASTEC Tryptophan halogenase; OS = Asticcacaulis excentricus (strain ATCC 15261 / DSM 4724 / VKM B-1370 / CB 48) OX=573065 GN=Astex_2721 PE=4 SV=1
MQDLPRKQPGFRKIVIVGGGTAGWMTAALLARLTEGKLGQIHLIESEDIGTIGVGEATIPPIQDFNRLLGIDETTFLRETKATFKLGIEFRNWHQRDDSYIHPFGVIGAQIGRAAFHHYYTRAALSGDTTPFEAYSLASVAARQGRFAPAPRHDTGVHSTLGYAYHFDAGLFAQFLRRYAEARGVVRHEGRIAQVNQRAEDGFITGVQTEMGDILDGDLFLDCSGMHALLLQKTLDTGFEEWSHWLPANRAWAVPCANVSAPLPYTRATAHSAGWQWRIPLQHRTGNGHVFSADFMSEDEARRILLDNLDAPTLAEPRLIRFRTGRARQFWHKNVVAIGLSGGFLEPLESTSIHLIHSGLIKFMDLFPDPDFNPLLAQQYNQAVGMDYDTIRDFLIAHYKLTKRDDSEFWRYCREMSIPASLQYKLDQFSESGRVIMSRGDLFQIPSWLAVLFGQGLRPKRYDPLADLIEPQDLSAILRQMQGTITDYANTMPPQARYIEKLGLTIVAGE

SEQ ID NO: 86181 - protein, 498 aa, Brevundimonas sp.
  REGION 1..498: note = tr|A0A4P8QBI2|A0A4P8QBI2_9CAUL Tryptophan 7-halogenase OS=Brevundimonas sp. SGAir0440 OX=2579977; GN = E7T10_13050 PE=4 SV=1
MIIDRIVIVGGGTAGWMAAAALAHSFEGAGKTVILVESEAIGIIGVGEATIPEILKFNARLGIDEADFLRETKATFKLGIEFDGWRREGERYFHPFGAFGLDMEGIAFHHFWLKACAEGRSEPLETYSMAWQAARRGRFVHPQGGPQSPLSSLGYAYHFDAALYAGFLRRFAEGLGVVRHEGRVVEVQQAADGDIAGVKLDDGRIVEGDFFIDCTGFVGLLIEQALKSGYEDWSSWLPCDSAVAVPCEREEPLSPYTRSTAREAGWQWRIPLQHRVGNGYVYSSAHLSHQAAEDALMSRLEGKALAEPRRLRFTTGRRKDCWKRNCVAVGLSSGFLEPLESTSIHLIQSAITKLITLFPSRKDSEGLRREFNALMEEEFVTVRDFLILHYKITQREGAFWQQVRDMPIPDRLVAKIALFEETGRIVRRDHDIFSESSWLAVAVGQGLTPHGRHPISDVISRDANLSRLAAIRDSIWRTADALPTHEDVLATTMNRKAF

SEQ ID NO: 86182 - protein, 506 aa, Xanthomonas axonopodis
  REGION 1..506: note = tr|A0A1T1NSL2|A0A1T1NSL2_9XANT Tryptophan halogenase; OS = Xanthomonas axonopodis pv. melhusii OX=487834; GN = Xmlh_19590 PE=4 SV=1
MIPAPLRNIVIVGGGTAGWMAAAAFARVLGPTFKVQLIESEQLGTVGVGEATVPHIKAFNNLLGIDEAEFVRQTQGSFKLGIEFVDWQRPGSTYMHGFGTQIGHPLGLLPFHQYWIKQHARGKAQPLGAYTLNTVAAARGKFMTSAGDVPANSPLANIAYAYHFDATQYAHFLRRYSQQRGVTRIEGLVEQVQLHPESGHVQSLQLASGQVVHGDLFIDCSGFGGLLIEQALHTGYHDFTHWLPCDRALAVPCEKVGPPAPYTRSTARAAGWQWRIPLQHRTGNGYVYCSAHISDDEAAATLLANLDGKPLADPRSLRFTTGRRKQCWNRNVVALGLASGFLEPLESTSIHLIQSGISKLLELFPREGISPVLVQRYNDRLAFEFDRIRDFLLLHYHATERDDSAFWRHCRHMPITPELQATLDLFRDSGRFYRNAEEMFAEISWVQVLVGQGILPQGYHPLVDQVPDRDAEGFLASVAQTIGHCVDVMPTHQQFIDRYCKAAAPR

SEQ ID NO: 86183 - protein, 509 aa, Sphingobium amiense
  REGION 1..509: note = tr|A0A494W2D1|A0A494W2D1_9SPHN Tryptophan 7-halogenase OS=Sphingobium amiense OX=135719; GN = SAMIE_1002480 PE=4 SV=1
MATVEGHQIRDIVIVGGGTAGWMMAAAASRVLADGRRRIRLIESDAIGAIGVGEATIPPIIGFNDLLGIDEDAFLSATKGSFKLGIQFENWGAVGERYFHPFGRTGRDFEGIPFHQLWHWLRDEEGVGPLEDYSMCAVAARHGRFAAPSADPRSPLSNLSYAYHFDAALYAAFLRAYAEERGVERIEGRILGAELDGESGNVAAVRMEGDRRVAGDLFIDCSGFRSLLLGEALGVRFIDWSHWLPCDRAIAVPTESEPAIAPYTRSRAHGAGWQWRIPLQHRTGNGHVFASAFMGEEEAQRILLDNLDTAATAEPRLIRFRTGVRERLWHRNVVALGLAGGFLEPLESTSIHLIQTGISKLLALFPDRRWADVERDEYNRLMTSGYGAIRDFIVAHYHVTRRADTPFWTYVRTMDIPDTLARRLALYRLKGRIFRYDDELFTVGSWSAVLNGQGLPPADVDPLTAALDGEALAGAMRKMRQVHENMAVRLPPHRRAIEQGQKMRSAQPV

SEQ ID NO: 86184 - protein, 69 aa, Bifidobacterium adolescentis
  REGION 1..69: note = tr|A0A1X2Z168|A0A1X2Z168_BIFAD Tryptophan halogenase; OS = Bifidobacterium adolescentis OX=1680 GN=B0487_1053 PE=4; SV = 1
MSDYRDGYVQAICEIGAIAYERAAKARYREGLAYEAGEYEKESFWHAVAVTAEMFYDYCQERLNKEDAE

SEQ ID NO: 86185 - protein, 531 aa, Streptomyces sp.
  REGION 1..531: note = tr|A0A365ZHX8|A0A365ZHX8_9ACTN Tryptophan halogenase; OS = Streptomyces sp. PT12 OX=1510197 GN=DEH69_12900 PE=4; SV = 1
MDRRIKKIVILGGGTAGWMSAAYLARALGDTVRITVLEAPSIPKIGVGEATIPNLQRVFFDHLGLSEEEWMPECNAAYKVAVKFVNWRTPGEGQAAARTIDGRPDHFYHPFGLLPEHDGVPLSHYWVHNRHSGVTDEPFDYACFPGVALMDALKAPRDRDGRPVTWYAWHFDAHLVADFLRRHATSKLGVVHVEDEMTEPRLDARGFVTALATRSGALLDADLFIDCSGFRGLLINKALHEPFIDMNDHLLCNSAVAYALPNDDEAVGVEPYTSAIAMRAGWTWKIPMLGRFGTGYVYSDAFSTRDRATEDFCRLWGLDPDAYADKFNHVRFRVGRNRRAWVNNVVGIGLASCFLEPLESSGIYFIYAALYNLVKHFPDKGFDQVFTDRFNAEIEWMFDDTRDFIQAHFALAPRDDTPFWRANKELRLPDQIREKIAMYRAGLPINRPFSTEGEYYGNFDVEFRNFWTNGSYYSIFAGLGLVPDHPLPTLMHRQDSVEGAQHLFARVKEEQRELVDSLPSNYAHLRRLHGK

SEQ ID NO: 86186 - protein, 494 aa, Pseudoalteromonas sp.
  REGION 1..494: note = tr|G7F6N9|G7F6N9_9GAMM FADH2 O2-dependent halogenase I OS=Pseudoalteromonas sp. BSi20429 OX=1097676 GN=prnA; PE = 4 SV=1
MNQNAIKKIVIAGGGTAGWMCSAAMAKLLGKNIEVCLVESDLIPTVGVGESTIPTLHIFHDLLKISESEFMAATNATFKLGISFEGWKQNQQSYFHSFGYVGQGCWAAGFQHFWLKGMQQGVAADIGDYCTEHVASRLGKFAVVPNQDRNHAYQLDAGLYAKFLRNFAQQNGAKRIEGMISKVNLEPTNGFIKSLTLGDGQIIEGDLFIDCTGFKGLLIEQALHTGYEDWSHWLPCDSAVAVQTELVSPIVPYTRAMAHKCGWQWQIPLQSRRGNGLVFCSKYMSDDEAKTALLNNVEGKPINEPRVIKYRTGTRRKHWNKNCVAIGLASGFIEPLESTSIHLIQQSIIRLMQNMPTKAIESCYQDDFNNKMRFEAENIRDFIVLHYHVTQRTDSDFWRYCKNMPIPESLAKRIELFKQSGHVYKAEQELFGEASWLQVMLGQGLVPRNYHPIVDSMSDDELKRFLESIKNNVAKKANSLPSHIDFINHYCNAK

SEQ ID NO: 86187 - protein, 447 aa, Streptomyces sp.
  REGION 1..447: note = tr|A0A0N0ADP1|A0A0N0ADP1_9ACTN Tryptophan halogenase; OS = Streptomyces sp. NRRL B-3648 OX=1519493 GN=ADL04_12680; PE = 4 SV=1
MSNNSADVVVIGGGPSGAVSAYTLAKEGHSVVLLEREENPRFHIGESLLPYMMGLFDRIGIREAVESGGYVPKFGGEFIDPTETKFFSGVFRADFAKQGEGRYDRAFQVQRARFDRMLVEEAGKAGAEVHYGAVVGDLLMEGDRMVGVRYTKDGEEHEVRAQYVVDASGRAGRIAHKFGLRKTLEKLRMVAVFRHYDGLDEQHNLGVEGDIQVGAHADGWVWAIPLSKDVISVGTVMPRDVFRASTPEKVFEEHLARVPRITARLTGTRPIMDLKVETDYCYHTDTVTGPGWVMVGDAGCFGDPMFSGGVLVASATAVRAAENLSRALKNPEDADRLIAEYENFFKTGYDTYIRLIHAFYDGELVAVAADAGRTTDRDTLERYLIRLIGGDFWSEHNAVAQEMRRRTEWDTFEPFQRVFGCPSYPHLDEQDRKERAESRVRRVTAGQ

SEQ ID NO: 86188 - protein, 499 aa, Sphingomonas sp.
  REGION 1..499: note = tr|A0A0Q4FXR6|A0A0Q4FXR6_9SPHN Tryptophan halogenase; OS = Sphingomonas sp. Leaf17 OX=1735683 GN=ASE75_02655 PE=4; SV = 1
MTEPRIRPSIRRVVIAGGGTAGWMAAAAIARTMGGTIELTLVESDAIGTIGVGESTIPPMMTFNRLLGINEAEFMRETQATFKLGILFEGWKDVGDRYFHSFGVTGKDHWSAGFQHFWLHGLTRGHHQPYDDYCLELRAALQGKFAHLPDDRMNYAYQLDSTRYARFLRRMAEADGTRRIEGRIARVELDGESGDIAALELESGARIEGDLFLDCTGFRALLIEGALHAGFDDWSHYLPCDSAIAIQTESVKPALPYTRAIAHDAGWQWRIPLQHRGGNGIVYCSRYLDRDAALDRLLGTIEGRTLTEPNMIRFVTGARRQQWHRNCVAIGLSGGFMEPLESTSIHLIQRAVLRLLRLFPSGAVSPRDVAEFNDQQHTDMLQIRDFLILHYKATDRRDSPFWRQCAAMPVPASLEQKIELFRETGRVFRKNEELFAENSWVQVMLGQGIVPDRYHPIATKLPDAELARFLGQLRDGTNATVASLPEHAAYVARYCAAAA

SEQ ID NO: 86189 - protein, 486 aa, unidentified
  source 1..486: note = Flavobacteriales bacterium
  REGION 1..486: note = tr|A0A1Z9D5D0|A0A1Z9D5D0_9FLAO Uncharacterized protein OS=Flavobacteriales bacterium TMED113 OX=1986662; GN = CBC73_05590 PE=4 SV=1
MKKVNKLVIVGGGTAGWITASWFSRRWGSKIDVTIIDKYQPERVGVGEATLLSFPSVMQKMGFRVEDWVKRIDATFKAGILFPGWGREDKVIWHPFGFTSIGDNKVPMYDIWSNYQSKYDVKEISPLYRTAMGNKIELDYIKDTYAYQIDCGKLVTFLHDNCNKICNYIQSDVKTVVKVDDDVEKIILEDGSEIKADLFIDCTGWNQLLIGKEDNVDLSDRLFIDSALAARVKYENPDKEMHPYTDCQAMEHGWRWRIPTRSRIGTGYCFNKNITSPDEVAKQFSEHWNGRIKPEDMRLLDWKPQMIDKFWKGNVVSIGLSAGFIEPLESTGLAMMIRGCEYLEESLYGCIYNPVFEPDIYNIRMKASFETAVDYVNMHYSYSERKGKFWDYVRLSHEKSGMQILMENQILDPNNETLQTDKISSFFGGTNWHIWLLQLMPEITKKTYWYPDTVDILSRFEKYIQTLDNNVKEATPQKILLKEWYG

SEQ ID NO: 86190 - protein, 127 aa, Streptomyces sp.
  REGION 1..127: note = tr|A0A429TYM1|A0A429TYM1_9ACTN Tryptophan halogenase (Fragment) OS=Streptomyces sp. WAC04770 OX=2487423; GN = EF908_38555 PE=4 SV=1
EYNRLTDVQMEQVRDFVILHYHANARREGDLWRRAREMAIPETLARKLALFRNRGRFFRTEDELFAESSWIAVLLGQGVIPAGWDPLADGLDEDKLALSFERIHEMFARAARAMPRHEEWLARNAPA

SEQ ID NO: 86191 - protein, 503 aa, Shewanella baltica
  REGION 1..503: note = tr|A9L4Z9|A9L4Z9_SHEB9 Tryptophan halogenase; OS = Shewanella baltica (strain OS195) OX=399599; GN = Sbal195_1209 PE=4 SV=1
MTTAIKRVVIAGGGTAGWMAAAALTKLMGKHLEIVLVESDEIGTVGVGEATIPTLHIFHRLLGLKEQEVMAATNATFKLGISFENWQDINKNYLHSFGFLGKDCWACGFQHFWLKGKQLGMVSEIGDYCAEHLAARQGRFAVLPNQDYNHAYHMDASLYAKYLRKMAEQHGIHRIEGKIKQVLQHHDSGNIKAIVLENDETIEGDLFIDCTGFRALLIEQTLNTGFEDWSHYLPCDSAIAVQTQSVGAPIPYTRSIARDSGWQWRIPLQNRTGNGLVFCSKFISDEDATELLLANLEGEPLNKPRVIKFKTGTRRLHWHKNCVAVGLSGGFLEPLESTSIHLIQRSIIRLMQLFPSAGIVQSDIDEFNQQTKLEMDNIRDFIILHYKATEREDSRFWRYCKNMDIPASLKHRIEMFADSGKVYKYGSELFGESSWIQVMMGQGIMPKHYHPIVDVMEEPELEAFLNNIKSTVKRKVESLPAHIDFIQHYCPAEVLANTKPMAM

SEQ ID NO: 86192 - protein, 543 aa, Shewanella baltica
  REGION 1..543: note = tr|A9L502|A9L502_SHEB9 Tryptophan halogenase; OS = Shewanella baltica (strain OS195) OX=399599; GN = Sbal195_1212 PE=4 SV=1
MQQATHTAINNIVIVGGGTAGWLTAALLAAEHNVDKGQLAHSPKLNITLIESPDVATIGVGEGTWPSMRNTLDKIGISETEFIRQCDASFKQGSRFIHWQHDDTEHTKPFDSNQYLHPFSLPHGHQELDLCPFWLPHSDKVSFAQAVSNQDALTQLGLAPKTIATPEYHFQNNYGYHLDAGKFSQLLMLHCTEKLGVKYIRDHVTQVHSHANGDIESLATKKHGVILGDMFVDCSGTKSLLLGEHFNVPFHSQKAVLFNDSALAIQVPYAEENSPIASCTLSTAQPNGWIWDIGLPTRKGMGYVYSSAHCSDDEAEQTLRAYLTNDTSTNPQSASSNALDSRKQECRKLNINPGYHAKCWQNNCIAIGMAAGFIEPLEASALALVEWTANTLATQLPTHRGVMDTIAQRVNERYERHWQQIIDFLKLHYVVSRREVDGYWRDHREAASIPERLQQQLDLWRYQAPSSHDISYKEPLFPAASFQYVLYGMGFNTTLPTHIKPSQQQVAQRLFSENQQKVHALSQSLPSNRDLLNKVRQFGFPKI

SEQ ID NO: 86193 - protein, 492 aa, Colwellia sp.
  REGION 1..492: note = tr|A0A396U051|A0A396U051_9GAMM Tryptophan 7-halogenase OS=Colwellia sp. RSH04 OX=2305464; GN = D1094_14535 PE=4 SV=1
MKKIQRVIIAGGGTAGWMAAAAFSKLLGKNLQITLIESDNIGTVGVGEATIPPIKTFHKLLGINEQEFMRETHATFKLGIGFEHWNKLNDNYIHSFGMTGKECWAGEFHHFWLHGKSKGVHAPFGDYCFELQAAKANKFALNQNVPINYAYHLDATLYAQYLRKFSEQLGVQRVEGKITNVSKQDATGDIASLTLDSGAEIEGDFFIDCTGFRGLLIEQALHTGYEDWSHWLPADSAVAVQTSSVNEPIPYTRSIARESGWQWKIPLQNRVGNGLVYCSKFLSDEQAKAQLLSNIEGETITEPKVIKFKTGRRRKGWNKNCVALGLSSGFIEPLESTSIHLIMSGIIRLLRLFPFDGIEQSAIDEYNSKLDSELNAVKDFIILHYKATSRTDSEFWHHCQRLEIPDSLTHKMNLFKSTGRVFLDDGDIFRVDSWTQVMLGQGILPNQYHRIADIMNDKELENFLSGLRQSISNAVEQLPSHAHFIDQYCRSR

SEQ ID NO: 86194 - protein, 498 aa, Pseudoalteromonas sp.
  REGION 1..498: note = tr|A0A4Q6JEB2|A0A4Q6JEB2_9GAMM Tryptophan 7-halogenase OS=Pseudoalteromonas sp. MEBiC 03485; OX = 2571103 GN=EVU92_11495 PE=4 SV=1
MESKKITKVVIAGGGTAGWITAALLNKVLGKVLDITLIESAEIGTVGVGEASIPPILHLNGALGISEKEFIKATGATIKLGIEFENWRSQGHSYMHAFGEIGKDFPFCEFYHFWLKANQTQNAPDFWDFSLNYQAAKAHKFSHLSHIPNTQLAGLHYAYHFDATRYGEFLKELAQSRGVKRIEGKIESINQCHQSGYISSLLMQNGKQIDGDLFIDCTGLRALLIEETLNTGFEDWSHWLPCDSAVAMQSESATDAIPYTRSIAKDSGWQWQIPLQHRVGNGLVYSSRFLSDESAKQQLLDNLPAKPLTEPRIIKFKTGRRLKQWHKNVVSVGLSSGFLEPLESTSIHLIQSAAIRLIKFFPHQGIKQSLVDEFNKQSKTEFERIRDFIILHYKLTERDDTAFWRFCKGMDIPSSLKKKIELFKTSGKLVREDDELFAEVAWQQVMIGQGLIADDHHPLTDALSDEQLNELFSNLKTLINNTVEQLPSHSQFLEKVQN

SEQ ID NO: 86195 - protein, 527 aa, Paucibacter sp.
  REGION 1..527: note = tr|A0A3N7CHP7|A0A3N7CHP7_9BURK Tryptophan halogenase; OS = Paucibacter sp. KBW04 OX=2153361 GN=DBR47_00440 PE=4; SV = 1
MRSGVTSCAAGRGAELTMSGQPPAHIVIVGGGTAGWMAANLLARRWGGPQRPRCKISVLESAEIGIIGVGEGSTPFLRQFFQLLGVAEHEWMPACNATYKSGIRFPDWSTVPGYESYVHPFFNEQDRVTGTEFFLNACLRRRGAAADANPQDFFIAAALARACKAPVLPPDPQGRPQLQTDYAYHFDAALLGQFLRRHALSLGVVHKVDTVLGVQLAENGDIASLQLQGGAQLAGDFFIDCSGFKGLLINEALGEPFISYKDNLFNDRAIALPTALNPAADIPSETVSRALRHGWAWQIPLSSRYGNGYVYASDFVSDEEAELELRRLLGPAAEHSEARRLKMRVGRVERHWRNNCLALGLSQGFIEPLEATALMLIQLSLFNFMELFERAGFGRQQQGLFNQRINKMFEGVRDYVVAHYHLNTRRDSDYWRANRAHHHISNRLASILEVWDGGGDFEAELSRHGDALMYLRPSWYCLLAGMGRFPAELRPLDRPRLSGAQARAATEALVREQFPSHRQQLVALAEA

SEQ ID NO: 86196 - protein, 499 aa, Shewanella baltica
  REGION 1..499: note = tr|A9KUG1|A9KUG1_SHEB9 Tryptophan halogenase; OS = Shewanella baltica (strain OS195) OX=399599; GN = Sbal195_1436 PE=4 SV=1
MKVKQAIRKIIILGGGTAGWMAAAALANNPVFAAIELCLVESDNIGTIGVGEGSTPHLKRFMDNLGISEKDWMEQCHASYKTGIDFINWNGDGQQYFHPFYFQMDVKPAEVFFINANARRRGHGNAVKPDAFFSSGVLAKHNLSPRPNKTLPCANEYGYHFDATELANYLKDYACQRGVRQIIADVVEVSTSPNQQIETLILANGERLSADFFIDASGFSAKLIHKALGVPFQSFAEELLNDSAVTVPALMDSTQTQQAKYHTRATALSAGWLWQIPLTHRLGNGYVYSSRHLSANAAAKELLHSVNLPESTQVRFLKLRVGVSDKAWHNNVLAIGLAQSFIEPLEATSIMMTQFTLERFMSLFERYQLNKQAETLSRQTLNQAVMQLVLGIKDYIQAHYVTSQRSEPYWMAARKVAISQRLTQLLKAWYQGEDFDLLLYQYDQQLAYFRPSWYALLAGMDYRDPKLKRPFEPISADITAQAISYCQTLVEQYFQPKHS

SEQ ID NO: 86197 - protein, 526 aa, Sphingomonas sp.
  REGION 1..526: note = tr|A0A0Q4FRM3|A0A0Q4FRM3_9SPHN Tryptophan halogenase; OS = Sphingomonas sp. Leaf17 OX=1735683 GN=ASE75_02640 PE=4; SV = 1
MTTDTGDRPVQHIVVVGGGTAGWLSACLIAARADPRVRRPITVTLVESPDVATIGVGEGTWPTMRGTLERIGISETAFLLACDGAFKQGSRFDGWRTGAADDRYFHPFTAPIEGDPRDIVAAWADQPTHDGAGFAHRVGAQADMCARDLAPRQRAMPDYAGTLNYAYHLDAGKLAALLMRQATETLGVRHVRDHVVGIDTTGDGDIAAVRTRDNGAIAGDLFLDCTGQPALLIGGHYGVGTVDRGGELFNDRALAVQIPVAPDSAIASQTNATAHAAGWIWDIGLPTRRGVGCVYSSAHCSDDAAADTLARYCRRVAPDMAVPSFRQLTFQSRHRQRFWERNCLAIGLSAGFLEPLEASAIVLIELSLEALLDNFPVTRAAMDIHAARFNTLFRYRWDRIVEFLKLHYVLSRRKEPYWRDHRDPASIPDRLAELLRLWQHQPPSRADFPMIDEIFPAASYQYVLYGMGFSPPTSGPIASGSRTRAQILLGQMEQRKRQLAAGLPTNRAYLDALRRESGMPVLEPVA

SEQ ID NO: 86198 - protein, 454 aa, Pseudoalteromonas sp.
  REGION 1..454: note = tr|A0A4Q6JFP9|A0A4Q6JFP9_9GAMM Multifunctional fusion protein OS=Pseudoalteromonas sp. MEBiC 03485; OX = 2571103 GN=trpF PE=3 SV=1
MANVLDKIVADKRIELEQRKAQRPLESFIEDVVPTKRDFEAALAATGTQFILECKKASPSKGLIREPFNLDEITSVYKKYATCMSVLTDEKYFQGSYQYLEYVRSQVEQPLICKDFFIDEYQVYLARLSGGDAILLMLSVLDDEQYLALHKVADSLNMSVLTEVSNEQEVSRALALNASLIGINNRDLRDLSTDLATTERLRQLIPNDKVVISESGIYTHKDVKRLAPLCDGFLIGSSLMAERDLEAACRKVILGENKVCGLTRSQDAMAAYASGAVYGGLIFYPKSPRYVDIDCAKQVTQSAPLAYVGVFVNAPVEQVVDYAQSLKLAAVQLHGDENSEYIQTLRKQLPLGCEIWKAQAVKGELPKPLEGVDRHLYDTYSKSQKGGTGETFDWSVLETATVPFMLAGGLNPENIHAALYRGANGLDLNSGVEASAGKKCQTKLQNAFSHIRNY

SEQ ID NO: 86199 - protein, 415 aa, Burkholderia multivorans
  REGION 1..415: note = tr|B9BIX1|B9BIX1_9BURK Tryptophan halogenase; OS = Burkholderia multivorans CGD2 OX=513052; GN = BURMUCGD2_5027 PE=4 SV=1
MNEMKSNSVDVAIIGAGPSGAVAAALLRKCGRSVLVLERQHFPRFSIGESLLPQSMCYLEEAGMLQAVVEAGFQFKNGAYFVHRDRTSSFDFREKFSDGWGTAYQVERATFDDLLIRCAASQGADVRFGHTVRAFEPGDMPRLDVVDEAGSEYAVEASFVLDASGFGRVLPRLLGLEAPTGLPTRAAIFSHVQDGLPAGSTDRDKICIAVHPDRRDVWFWMIPLTNGRSSVGCVADAAFLDVPEAQQESLLRELLQSEPTLARLVGSKPFVMPVRRIAGYASNVASLHGRGYALLGNAGEFLDPIFSSGVTIAMRSAHLAVAALERQLRGETVDWARDYDLALRKGIDTFRAFVERWYSGVLQDIVFHEDKASDVKRMVCSILAGYAWDEANPFVREPARGLDLLAEICRSNAAR

SEQ ID NO: 86200 - protein, 513 aa, Pseudoalteromonas sp.
  REGION 1..513: note = tr|A0A4Q6J994|A0A4Q6J994_9GAMM Tryptophan 7-halogenase OS=Pseudoalteromonas sp. MEBiC 03485; OX = 2571103 GN=EVU92_00430 PE=4 SV=1
MQQNEVKKVVILGGGTAGWLSAGLIAAQPHLTHNAHITLIESPDIATIGVGEGTWPTMRQTLKTIGISESEFIQRCDASFKQGSRFDSWCDDEGDAHYYHPFSLPVAYQQLNIAPYWFANKDAVSFSHAVASQTYLCDHHKAPKNHLHSAYQGEANYGYHLDAGKFAMLLQQHCTTKLKVEHIVSHVESINSDEDGYISSLQTHDHGAITGDIFIDCSGTHAKLLHQHYGIELIEQQDVLFNDRAVAVQVPYLNPQQEILSYTKATAQDAGWIWDIGLQSRRGLGMVYSSRFASSEDAKHALSQYIAKTQPGTEQSELTFREISFNPGYRRRFWYKNCLAIGMSAGFIEPLEASALVMVELGLNNLLANFPTHRAAMPTLAKRFDEQCHYRWQRIIEFLKLHYVLSKRTSPYWQAHKEANSIPAQLQENLALWQYQSPWLNDFDRTQEVFSAASYQYVLYGMKQLPQFPVLAMPTAIIEHFSANQQQAKRGLQQLPTNRELLNHIQQFGIQPI

SEQ ID NO: 86201 - protein, 495 aa, Pseudoalteromonas sp.
  REGION 1..495: note = tr|A0A4Q6J8H6|A0A4Q6J8H6_9GAMM Tryptophan 7-halogenase OS=Pseudoalteromonas sp. MEBiC 03485; OX = 2571103 GN=EVU92_19700 PE=4 SV=1
MRQQQIKQVVIAGGGTAGWMTAAALAKLLNKDIKICLIESDDIGTVGVGEATIPPIRTFHKLLGIDEQEFMRATQATFKLGISFENWHQPNSDYIHSFGMTGKECWAGEFHHFWLHWQKMGNTDDFADYCYELQAAKQGKFGISPQNPINYAFHMDASRYATFLRAFSENLGVKRIEGKIERVNKHSDNGFIKSLSLDNNTEIAGDFFIDCTGFKGILIEQALHTGFEDWSHLLPCDSAVAVQTKGTSDPLPYTRSIAHQSGWQWQIPLQNRVGNGLVYCSRYLNDHDATKLLLDNLIGDTLTEPKIIKFKTGRRRKGWNKNCLALGLASGFLEPLESTSIHLIMTGIIRFMRLYPFAGVTQQAIDEYNKQLKSELESIRDFIVLHYKVTDRQDSEFWRHCQAMEIPESLAHKIALFKETGRVFLDDGDIFRVDSWVQVMLGQGVKPKQYHYVASLMNDQELSRFMQGIKQQIAHRLAQLPTHKEFINKYCRIDD

SEQ ID NO: 86202 - protein, 504 aa, Colwellia sp.
  REGION 1..504: note = tr|A0A396U4V8|A0A396U4V8_9GAMM Tryptophan 7-halogenase OS=Colwellia sp. RSH04 OX=2305464; GN = D1094_00890 PE=4 SV=1
MKIKKIAIVGAGTAGWLAANHLGSELQHEDIQITVIESDKVPTIGVGEGTVPYIMKGLERFGISEAELLISCDATFKQGIKFVNWMKPEQEKEHFYYHPFDSPYPAGFDISRHMSNLETSRPFDDVGIQARICELGLAPKRKSSAEYQGDLAYAYHFDAAKFAKLLANNAIKKFNVNHVIATILGAKKDSAGNITHLLTDEDSELAFDFYIDCSGFSSVLIEKELSVPFVKKDKELLTDTVLVQQVPISESEALNPYTTATAHKAGWVWDIPLTTRRGTGFVYSSQHMSETEAKACYAKYLGVNEKDFSPRKIPMDIGYRESFWQKNCVALGLAQGFLEPLEATSILLSDFSAEMLAKNFPRTFSDIDCSYQYYNKVVTYAWERTVDFIKLHYCLSDRDDSEFWQQNSDKDALSAELKQRLNKFKLRPPLQSDFFSRFDLFNEKNFLYVLYGMNFNTQKAITSEKEQRHSEQLLEQNDQLVKQAANILLNHKEWLMALKAAMSE

SEQ ID NO: 86203 - protein, 484 aa, Sphingomonas sp.
  REGION 1..484: note = tr|A0A0Q4G2W0|A0A0Q4G2W0_9SPHN Tryptophan halogenase; OS = Sphingomonas sp. Leaf17 OX=1735683 GN=ASE75_01060 PE=4; SV = 1
MAAAALAALLPGRASVHLIESEEIGIVGVGEATLPHLRAFNERLGLDESAFMAATRATYKLGIEFRDWGRIGDSYIHPFGTFGRDIDGIAFHQFWSRMAAQGRAAPLEAYSLPVVAARMAKFAPHDDPDAAVPGFGYAYQFDATLFGPYLRRFSEDRGVTRTEGRVVDVTQDAQSGDVTALTLADGTIVTGDLFIDCSGFRSLLLGGTMAEPFQDWSHWLPCDRAIAAPCGGVGPLAPYTTAAAMPAGWRWRIPLQHRVGNGYVYSSAHVDDGAAEDSLVQAMESAPIVSPRKLRFRAGRRARSWVGNVLGVGLAGGFLEPLESTSIYLVQLAVQTLIELFPTPGEPVVSVDRDAFNRKVDLEYDRIRDFLILHYHATTRDDSPFWDHVRTMTIPDTLAAKMELFRRRGRIVQYGEGLFLEPSWVAVYLGQRVAQQGIDQRAMAIPADQLAAAMDRLARETQAFAQSMPDHAAYIARRGASMAA

SEQ ID NO: 86204 - protein, 520 aa, Arenicella xantha
  REGION 1..520: note = tr|A0A395JIW6|A0A395JIW6_9GAMM Tryptophan halogenase; OS = Arenicella xantha OX=644221 GN=DFR28_10566 PE=4 SV=1
MQRSVRNIVIVGGGTAGWLTAGILASHYSDDPDTGLTISLVESPDVATIGVGEGTWPSMRTTLQKIGISETEFMRACDVSLKQGSRFNSWVTGANDYYYHPFSMPQGYSEFNLVPFWQTVREQVSFTDAVSPQGQLADRGLAPKQISTPEYAFQVNYGYHLDAGKFAEFLRRHCTEKLGVKHISDHVQTVHTHPNGDINGVHTSQHGLVTGDLFVDCTGFNGLLIDKHYEIPFNSVADTLFNDRALAVHVPYQRDNEPIASATLSTAQSAGWIWDIGLPSRRGVGHVYSSEFTSDEAAEVELRQYLEALVGRRQAHELTVRKIQFKPGHRASFWHRNCVAIGLSAGFVEPLEASALVLVEYAANMLAEQLPANRDVMDITAKRFNHKFAYRWQQIIEFLKLHYVLNQRDDAAYWQAHRHQDSVPDSLREKLKVWRHQAPWHLDTPHIDELFPSASYQYVLYGMGFVTYPQSLEARNASQQLAQANQLLHDNAKRTASLLNAMPNNRELINKVAEFGFQKI

SEQ ID NO: 86205 - protein, 503 aa, Massilia sp.
  REGION 1..503: note = tr|A0A354J0Z9|A0A354J0Z9_9BURK Tryptophan halogenase; OS = Massilia sp. OX=1882437 GN=DDZ22_21160 PE=4 SV=1
MQNLPIKDIVIVGGGTAGWMTAAALSTILNGRYNIRLVESDEIGIVGVGEATIPMIQRFNRVLGIDEAEFMRATQGSFKLGVEFVNWGRKGERYMHGFGRLGQDLATVPFEQYWLKMRALGKAAPLEEYSIARMAAKAGRFMPARHDVPNSPLADIAYAYHFDASLYARYLRKLSESRGVTRVEGKIVRATQRPGDGYIDAVELENGARIGGDLFIDCSGFRGLLIEQTLQTGYEDWSGWLPADRALAVPCESVKTMTPFTRATAHQSGWQWRIPLQHRTGNGHVYCSRYISDDEAAATLLANLDAPALADPRLIKFQTGMRKQAWNRNVVAVGLAGGFLEPIESTSIHLIQSAIARLIEFFPDRGFQEVERAEFNRQSRFEYERIRDFIVLHYHLNQRTDSPYWLACANMAIPDTLRQKMDLYRARGKVVRVDNELFSEVGWIQVLEGQNMPVNAYNPLVDVQSEADIADYLDSVRGVIAKCVSVMPTHEEYIARHCAAPKM

SEQ ID NO: 86206 - protein, 507 aa, Lysobacter soli
  REGION 1..507: note = tr|A0A3D8VEC1|A0A3D8VEC1_9GAMM Tryptophan 7-halogenase OS=Lysobacter soli OX=453783 GN=DX912_09040; PE = 4 SV=1
MSETDIRTRPIRRVVIAGGGTAGWMAAAALSRTLGKVLDITLVESEEIGTVGVGEATIPTLVTFHRLLEINEQEYMSAVKGTIKLGISFENWLDKGHRYIHSFGVSGKDHWSAGFQHFWLRGQKLGIASGYEDYCVELKAALQDKFAHLPRGGINYAYHMDASLYARYLRTLSQGHGARRVEGKIVEVVKDEASGFVTAVKLADGSMLEGDLFIDCTGFRALLIGQALGVGFTDWSHWLFNDSALATQTTAVRDAVPYTRAIAGSAGWQWRIPLQHRMGNGIVYSSRFMSDDEARHDFLSSIEGEVIKDPWPIRFKPGQRQKSWEKNVVALGLAGSFIEPLESTTIHLIQRGIVHLLRMFPQVIAQPDIDQYNAQLDSELAHVRDFVVMHYKLTNRRDTPYWQAVQDMEMPATLKHRIDLFRETGKVFRSSEELFAENSWIQVMMGQGVMPQQYHPTADVMSEPDLRRFLDDIRAHVDNTVRQLPPHQAYIDQYCPGVRAPEPAAAG

SEQ ID NO: 86207 - protein, 505 aa, Caulobacter sp.
  REGION 1..505: note = tr|A0A2T9K3R4|A0A2T9K3R4_9CAUL Tryptophan halogenase; OS = Caulobacter sp. 774 OX=2172652 GN=DDF67_09345 PE=4 SV=1
MSDQRVRSVVIVGGGTAGWMTAAALARTLSGQDLKIALVESEAIGTVGVGEATIPPILTFNAMLGIDERAFMRATKASFKLGIEFVDWGALGETYHHPFGTFGLDIEGIRFHQVWRKFKQAAGPIGDYNLTEAAARRWRFALPDPDPAKVMSSLKYAYHFDAGLYARFLRGFSEQRGVVRIEGRIGQVAQNGETGFVEAVVLEDGRRVEGDFFVDCSGFRGLVIGQALKVPYQDWSRWLPNNRAVAIPCELGGDGLTPFTRATAREGGWQWRIPLQHRIGNGYVYSSHHVDDQRALDTLLANLDGAPTDEPNLLRFTPGRRERAWEKNVCSIGLSAGFIEPLESTSIHMIQAGITKLLALFPGGGVDPLEIDEYNRLTAEQVDRIRDFVILHFHATRRDDTDYWRYLSSMTVPDSLARRMELFARRGRWFPSEYDLFHESNWLAVLLGQGIVPEEWDPLVDSLPEGEARQRLFQLSALIARTAEAMPSHAEFVARYCGAVQGVAA

SEQ ID NO: 86208 - protein, 521 aa, Sphingomonas sp.
  REGION 1..521: note = tr|A0A4D7CBU4|A0A4D7CBU4_9SPHN Tryptophan 7-halogenase OS=Sphingomonas sp. W1-2-3 OX=2567938; GN = E6W36_05135 PE=4 SV=1
MAEQRIRRVVIAGGGTAGWLAAAALSRQLGQMLDLTLVESEEIGTVGVGEATIPTIRAFHAILGLDEREFMRETLATFKLGISFENWAREGDRYIHSFGEVGRSTWMGDFQHFWLEARAQGIADPIGDYCLEHAAAEKGCFAIPSEGEISYAFHLDAGRYARYLRRRAEADGLRRVEGRIVDVERDGQTGDIAALRLDNGARVAGDLFLDCTGFRSLLIAQTLGVGYEDWTHWLPADRALAVQTATTAPAPPYTRAIAHDAGWRWRIPLQHRDGNGLVYSSRHLSDDAARERLLAAVEGETLIEPRLIRFQTGRRDRVWERNCIALSFASGFVEPLESTTIHLTMIGLSRLMQVFPFAGIQPSIVQRYNEQARNELERVRDFIVLHYHLNERPDPFWRACRETPPPESLQERIALFREAALAYQAGDDLFRVSSWLQVMLGQRLEPQAYHHMARIMGPERLAQALGNMRRAIADIVETMPAHQDFLNQYVQAPQPEPRRLHLPAAHSYRSANAWSHSLKRT

SEQ ID NO: 86209 - protein, 506 aa, Lysobacter soli
  REGION 1..506: note = tr|A0A3D8VA29|A0A3D8VA29_9GAMM Tryptophan 7-halogenase OS=Lysobacter soli OX=453783 GN=DX912_14490; PE = 4 SV=1
MEKGRIRRVVIAGGGTAGWLAAAALTHQFRDLLDVVLIESEQIGTVGVGESTVPPIRNFHRFLQIDEQEFLREVAGTFKLAISFENWRRHGERYIHPFGITGQGTLVAAFHHFWLESLQRGMDSKLGDFCLETQAALADRFALPAQPQVNYAYHLDAGLYARFLRKRSEAFGLKRIEGKIREVRQNGESGFVEALVLEDDQVIEGDLFIDCTGFRGLLIEQTLKSGYEDWHQWLPCDRAVAVQTESTGGPVPYTRAIAHDAGWRWHIPLQHRVGTGWVYSSQHMSDDEATARLLKDAAATPIRDPWRVPFRSGRRLKAWNKNVVSLGLASGFIEPLESTSLHLSMTSIIRLIEAFPFDGIPESLTEIYNDTGRREMEHVRDFIILHYHANQRDEPMWKQCREMEIPDSLSIRLRAWRDRAHAWQGANELFRVDSWTHVMLGQGLEPQQHHPLTRALPDDQMRRFLDQIRKPIDEAVAKFPTQQEFIDRYCKAAPEVWGARRPAVQA

SEQ ID NO: 86210 - protein, 496 aa, Arenicella xantha
  REGION 1..496: note = tr|A0A395JG77|A0A395JG77_9GAMM Tryptophan halogenase; OS = Arenicella xantha OX=644221 GN=DFR28_10569 PE=4 SV=1
MEHKKINKVIVAGGGTAGWMAAASLAKLLGKTLDISLIESDDIPTVGVGEATIPTMLTLHELLGINEREFVAEVNGTFKLGISFENWRDVDQDYIHSFGFTGKDCWAAGFQHFWLKGQQLGIAKDFGEYCGELIAARQNKFAVTPKNGLNYAYHIDAGRYAAYLRKLAEQHGAKRIEGKIVEVGLNSDSGDIESLTLASGQVVEGDLFIDCSGFRGLLIEQALHTGYDDWSHWLPCDSAIAVQTESLAAPIPYTRSIARGAGWQWRIPLQSRVGNGLVFCSRYLSDDDAKQLLLDNLEGAPINEPRVIKFRTGTRRKHWNKNCIALGLSSGFIEPLESTSIHLIQRGITRLMQMFPYDGIRKPDVAEFNAQMDAEIVNIRDFIILHYHVTNRDDTPFWRFCRAMDIPDTLRHRIELFKQTGRVFKGPNELFGENSWTQVMLGQGLLPEQYHPIVNMMSDDELSAFLRGIDQTVTNQVRQLPSHQQFIDHYCKSSAG

SEQ ID NO: 86211 - protein, 521 aa, Duganella sp.
  REGION 1..521: note = tr|A0A3E1S878|A0A3E1S878_9BURK Tryptophan 7-halogenase OS=Duganella sp. BJB480 OX=1871181; GN = D0T24_21820 PE=4 SV=1
MKTTAIKHVLIVGGGTAGWLTAAFLARTLGAGADPDSVRITLVESKEIGIIGVGEGTFPSIRGTLAAIGIDEARFIRECSATFKQGIKFTDWVRAPGAPGNDHYFHPFSLPSQRPGGPELLPYWLQGAAAPGAGFAAAATMQKRVADAAHGPKRFNDADFMGPLNYAYHFDAGKFAALLGTHARSLGVRHVLATVERVELDEQGAIGAVHTTEAGALTADLYIDCTGFRAALIGEALGTPFRNIQDTLFVDRALAMQVPYATPDAPIPSYTIATAHEAGWTWDIGLQQRRGIGYVYSSRHTDDARAEQVLRRYIGPASDGLDPRQLKLNVGYREQHWVKNCVAVGLSGGFLEPLESSGIGLIETAAYLVGYLFPHDGDLAPVARVYNEMMKARYERIVDFVKLHYCLTQRRDNAFWTDNTDPASIPESLRDKLAMWRKRAPHRMDFVVDLEMYPPSSWQYVLYGMEYATAQYANARTLPRFDEARREFQMIEQMSHRAVADLPTHRALVEHFLQRGERKFA

SEQ ID NO: 86212 - protein, 516 aa, Massilia sp.
  REGION 1..516: note = tr|A0A353HYR7|A0A353HYR7_9BURK Tryptophan halogenase; OS = Massilia sp. OX=1882437 GN=DDX04_19420 PE=4 SV=1
MASSTIRHVVIVGGGSAGWLTAGLIAAEHRAASPDGLRVTLIESPDVAPIGVGEGTWPSMRDTLRRIGVSESDFLRECDAAFKQGSLFARWSTGQDNDYYFHPFSLPQGYGDASLVERWQQAHAQVPFADLASYQPHLCMAGRAPKQAATPEFAAVANYGYHLDAGKFGVFLKKHCLERLGVHYVPDHVLGIASHENGDIAALRTQSHGLLAGDLFVDCTGMRSLLLGQHYGVPFLSQQHVLFNDTALAVQVPYASEDMPIASQTTSTAQQAGWIWDIGLPTRRGVGHVYSSAHTTDEEAERALRAYVVASGGPRDCPAPRKIGFQPGYRERFWHRNCVAVGLSSGFIEPLEASALAMVELSAAMICDEMPVTREHMDVVARRFNDTFRYRWERVIDFLKLHYVLSRREDSAYWLHNRAPESIPERLRELLSLWRYRAPMRGDFPRIEEVFPTASWQYVLYGMGWRNDAGATRRADGALADAFFREAADLTRRMLPALPANRELLAHIRAYGLPRT

SEQ ID NO: 86213 - protein, 499 aa, Pseudoalteromonas phenolica
  REGION 1..499: note = tr|A0A4Q7IL91|A0A4Q7IL91_9GAMM Tryptophan halogenase; OS = Pseudoalteromonas phenolica OX=161398 GN=C1E23_12735; PE = 4 SV=1
MQKKINDVVIVGGGTAGWMTANLLAKVLSKSINVTLLESDDISTVGVGEATIPPIMQFNQAIGVNEHAFMQASKATIKLGIQFENWLRPEHNYMHAFGSIGKNFPFCDFHHFWLKQQNKNDQVNNLTYWDFSLNYQAAKHSKFQKLKHLPNTNLPGIAYAYHFDAGLYAKFLTEHGKQQGVNHLIGTVKQVNQNHETGFIESLLLDDDTQLSGDLFIDCTGMHALLIEKTLSTGYEDWSHWLPCDRAMAVPSENAETVVPYTRSIAHHVGWQWQIPLQHRTGNGLVYSSKHMSDEEAKQTLLGNMPGKPLSDPRIIKFRTGRRRKVWNKNVISIGLSSGFLEPLESTNIHLVQSVATRLLKFFPHNGISQTLVDEFNRLCKAEVEGIRDFIILHYKLNARTDSAFWRQCQQMDIPDTLNTKIELFKQTGKVHCEPNDLFTEIAWQQVMLGQGITPTDTHPLVDGLSDEQIEDMMESLRTLVDKTVANMPTHQDFLMQFK

SEQ ID NO: 86214 - protein, 499 aa, Duganella sp.
  REGION 1..499: note = tr|A0A3E1SEH8|A0A3E1SEH8_9BURK Tryptophan 7-halogenase OS=Duganella sp. BJB480 OX=1871181; GN = D0T24_06775 PE=4 SV=1
MADKAIRKIVIVGGGTAGWMTAAPLALKLGRACDIVLVESPEIGTVGVGEATLPTIRYFNQALGLDLSDFVAKTKATFKLGIEFKDWGHLGNRFFHGFGDFGPDIEGRSSYLYWQRLAREIHDMPPYEDWSVAAVMARNHRFTPPSGDQPSASNAYSYAYHFDAGLYAAYLRDYAVARGVARIEGYIDEVEQHPQTGNIAAVKLRDGRRVEGDLFIDCSGFRGLLIEGVYQAGYDDWSAMLPCNSAQAVPCASVERFTPYTVSAAKSAGWTWRIPLQHRTGNGHVYCDGFTSDAEASRVLLDGLDGRALDEPRQLRFTTGRRRKMWIKNCVAIGLSGGFLEPLESTSINMIENAAGWLLELFPDRDFRPELADEFNRRAASRYESVRDFIVLHYKLTKRTDSEFWRYCADMAIPDTLTHQIELFRETGRMVIYDKEGFSASSHIAILAGLGVAPRADDALIHLMDMRKLHAHYYQLRQVIAQTVNAMPGHTHYLRQLAG

SEQ ID NO: 86215 - protein, 499 aa, Pseudoalteromonas phenolica
  REGION 1..499: note = tr|A0A0S2K7E4|A0A0S2K7E4_9GAMM Tryptophan halogenase; OS = Pseudoalteromonas phenolica OX=161398 GN=PP2015_3630; PE = 4 SV=1
MQNKINNVVIVGGGTAGWMTANLLARVLGKSINVTLLESEDIPTVGVGEATIPPIMQFNQAIGVNELDFMQASKATIKLGIQFENWLKPNHHYMHAFGSIGKNFPFCDFNHFWLKQQNKNDQVDNLTYWDFSLNYQAAKHNKFQKLKHLPNTNLPGIAYAYHFDAGLYAKFLTEHGKQQGVKHVIGTVKQVNQNHETGFIEGLLLDNDTQLSGDLFIDCTGMHALLIEKTLSTGYDDWSHWLPCDRAMAVPSENAETVVPYTRSIAHHVGWQWQIPLQHRTGNGLVYSSKHMSDEEAKQTLLGNLPGKPLNDPRIIKFRTGRRRKIWNKNVISIGLSSGFLEPLESTNIHLVQSVATRLLKFFPHNGISQTLVDEFNRLCKTEVEGIRDFIILHYKLNARTDSPFWRLCQQMDVPDTLKTKIELFKQTGKVHCEPNDLFTEIAWQQVMLGQGVTPADIHPLVDGLSDEQIKDMMESLRTLVDKTVENMPTHQDFLSSLT

SEQ ID NO: 86216 - protein, 507 aa, Duganella sp.
  REGION 1..507: note = tr|A0A3E1S519|A0A3E1S519_9BURK Tryptophan 7-halogenase OS=Duganella sp. BJB480 OX=1871181; GN = D0T24_22725 PE=4 SV=1
MVRRIVIVGGGSAGWLTAGLIAADHQGSSLHITLIESPDIAPIGVGEGTWPSMRDTLRRIGVSESDFFRECDASFKQGSRFNRWVTGADNDYYFHPFVLPQGYDEVNLPEQWLAQHPDIPFADLVSYQPHLCVNGRAPKQVVTPEFSSVANYGYHLDAGKFGVFLRKHCLEKLGVHYVPDNVAGVASHDNGDIAALHTQAHGALEGDLFIDCTGMQSLLLGKHYQVPFLSQKHVLYNDTALAVQVPYPDDNYPIASQTSSTAQSAGWIWDIGLPTRRGVGHVYSSAHIGGEQAEAELRRYISDTGGPQDIPPPRKLSFNPGYRERFWHRNCVAIGLSAGFIEPLEASALALAEMSAAMVSDELPATRAAMDIVAARFNEAFTYRWERVIDFLKLHYVLSQRRDSDYWRDNTASVPERLGDLLTLWRHRAPSRNDFNRIEEVFPWASYQYVLYGMGFRSEFTNPQPRQAALADGYFREAAELTHKMLGGLPDNRTLINHIKRHGLQKI

SEQ ID NO: 86217 - protein, 503 aa, unidentified
  source 1..503: note = Alteromonas mediterranea
  REGION 1..503: note = tr|S5AL77|S5AL77_9ALTE Putative tryptophan halogenase OS=Alteromonas mediterranea 615 OX=1300253; GN = I633_20160 PE=4 SV=1
MAYGWRIAAQHQCATRKDIKVTLVESPNVPIIGVGEGTWPTMRSTLIALGISETTFIKECDATFKQGAKFAKWTTGEESDFYYHPLMLPQGFSQTNLGPYWQTVAPELNESFSHAVCVQEAICEAGCAPKSIRHAEFAGTANYAYHLDAGKFTAFLTKHCTEKLGVHHVLADVNRVESFDNGDIKALHTEQGVIVEGDLFVDCTGFKSMLLGEHYKVPFIPCDDVLFIDRALAVHVPYDTPQSPIASHTISTAQDAGWIWDIGLQSRRGVGHVYSSRHQSKDDAYARLDTYVRQTSSLNGIDDINVKDITIQSGHRQRFWQNNCVAVGLAAGFLEPLEASALVLVELSASMIAEQLPANRAVMAIVAKRFNDTFSYRWQRIIDFLKLHYMLSKREDSAFWRDNRDSHTIPDSLKELLALWQYHPPSDKDFTSNNEVFPAASYQYVLYGMGFTSQLGTHQQWVNADFAKQQLMQNRKARSMAVEKLPKHRELINKIHQFGLQAV

SEQ ID NO: 86218 - protein, 518 aa, Pseudoalteromonas phenolica
  REGION 1..518: note = tr|A0A4Q7ILL2|A0A4Q7ILL2_9GAMM Tryptophan 7-halogenase OS=Pseudoalteromonas phenolica OX=161398; GN = C1E23_15605 PE=4 SV=1
MSAIRQVVIVGGGTAGWISAALLAKKLNTINPGSVQITLVESPDIPIMGVGEGTWPTIRKTLAEIGIAEDEFIRECDASFKQGAEFVNWYQNPDEIGKHSYFHPLNATFHAAYDFNLAPYWLLDQSEHKLPYDMATASQSYISQQGLAPKLITTPQYDAILNYSYHLNAAKFADLLTKHAVKLGVKHIKANVQNVALDTAGFIKQVDTDSAGSINGDLFIDCSGSKALLLNGALDVKWKSISDYIFNDTALAIQVPYEDESAPIASNTIATAHQHGWTWDIGLQNRRGVGYVYSSNHTSDENAYDTLLQYLGLQDTDLNIRKIPLNLGYREKFWHKNCVAVGMSAAFIEPLEASAIFLIEAAVNMIAEQFPHHRDNLSFVEKQFNDTFTLRWKKSVDFIKLHYCISKRKDTQYWIDNTSEASIPKSLQEKLAFWRHNVPSKFDFDYAFEPFVLDSYLFVLYGLEFETDLSLKQSCYLHKQEAAKKMHEVQKFNQQLASGLSTNRDLIDKILKNGLSKI

SEQ ID NO: 86219 - protein, 516 aa, Novosphingobium sp.
  REGION 1..516: note = tr|A0A2T6M738|A0A2T6M738_9SPHN Tryptophan halogenase; OS = Novosphingobium sp. GV027 OX=2135689 GN=C8K10_104399; PE = 4 SV=1
MSGTSPRAIRSVCIVGGGSAGWLTAGLIAARHGRDLAVTLVESVSRGTIGVGEGTWPTMRNTLRKIGLAETDFMRACHASFKQGAKFARWRTGAADDFYYHPLVLPEGFPDLDLAPYWNSAEQGIGNGGPSFSDAVCFQEYLCEQGLAPKLMTSPDYAGIANYAYHLDAVKLGELLATHCTGKLGVNHIDDEIVGVTRRDDGDIAAVIGRDSGAIAADLFVDCTGFSSRLLGEALEVPFIDRSDVLFIDRALAVQLPVEEDSPIASHTISTAQKHGWIWDIGLPTRRGIGYVYSSRHAGADRAEEELAAYVGPGFAKLTPREIPIRSGHRAQFWKNNVVAVGLAAGFLEPLEASALVLIELSADYIATSMPATRQAMDFVARRFNSMTRYRWDRIIEFLKLHYVLSERSDTAFWRDNRDPATIPQDLQDQLELWRDTPPGEHDFASAHEMFPAASYQYVLYGMGFRTRPRAGQLAQRDMADDAFARTAAMKRKLGQMMPTNRALLDKLAQHRFPPL

SEQ ID NO: 86220 - protein, 524 aa, Shewanella frigidimarina
  REGION 1..524: note = tr|A0A106BXB7|A0A106BXB7_SHEFR Tryptophan halogenase; OS = Shewanella frigidimarina OX=56812 GN=AWJ07_08245 PE=4; SV = 1
MQKPITEIIIVGGGTAGWITAGLLAAEHNVDKGVLAHSPKLNITLIESPDVATIGVGEGTWPSMRSTLSKIGIDENDFIRQCDASFKQGSRFINWCADPQSKVTDSYLHPFSLPHGHQELDLCPYWLPHAEQVSFAEAVCSQQVLTQLGLAPKSIATAQYHFQNNYGYHLNAAKFSQLLTEHCTQKLGVTHIRDHVSQIINNQYGDIEKLITKQNGEISGQLFIDCTGAKSLLLGEHLQVPFLCQKSVLFNDRALAIQVPYSDANSPIASCTHSTAQSNGWIWDIGLPTRKGVGYVYSSSHTNDIDAQQTLFNYLGVDGAAADKLEPRQLTINPGYRAKCWQNNCIAIGMAAGFIEPLEASALALIEWTASTLAQQLPPNRMVMDTIATRVNERYQLHWQQIIDFLKLHYVISRREVDGYWRDHRESNSIPDSLQAMLELWRYQTPSQQDISYKEALFPAASFQYVLYGMGFNTQLPTHVKPSMQQLAQRLFNDNQQRTQALSKNLPTNRELLDKVAQYGFPKL

SEQ ID NO: 86221 - protein, 499 aa, Novosphingobium sp.
  REGION 1..499: note = tr|A0A2T6M1X7|A0A2T6M1X7_9SPHN Tryptophan halogenase; OS = Novosphingobium sp. GV027 OX=2135689 GN=C8K10_10726; PE = 4 SV=1
MTDRPLRIVVAGGGTAGWMTAAALARTLGPVAIVTLVESEAIGTVGVGESTIPPLVAYNRLLNIAEADFMRATSATFKLGIAFENWKAPGESYFHSFGGTGRDHWSAGFQHFWLHGLSRGHAAPYGDYCLELMAAQAGRFAHLPDGRMNYAYQLDSGRYAAFLRRLAEGDGATRIEGRIARVELDGDSGEIAALHLDGDRRVDGDLFVDCTGFRALLIEGALHAGFDDWTHWLPCDRAIAVQTASVRPPVPYTRAIAHDAGWQWRIPLQHRQGNGIVWCSRYLDEDQALDRLLSSVEGQVLTEPNRIRFTTGARRRQWVKNCVAVGLSGGFMEPLESTSIHLIQRAVLRLLRLLPVAARPDPADIAEFNEQQWADMVQIRDFLILHYKATERRDSPFWRHCAGMEVPESLSHRMDLFARTGRVFRKNEELFAENSWVQVMMGQGITPAAYHPVAAKLRDDELERLLASLRREVADTVQGLPGHAAYVDHYCGARTGAAA

SEQ ID NO: 86222 - protein, 515 aa, Novosphingobium sp.
  REGION 1..515: note = tr|A0A2T6MCZ0|A0A2T6MCZ0_9SPHN Tryptophan halogenase; OS = Novosphingobium sp. GV027 OX=2135689 GN=C8K10_101342; PE = 4 SV=1
MPHDTAPSHIRSIVIAGGGTAGWMVAAALSRTIAPHRCRITLVESETIGTIGVGEATIPPIQTFNQVIGLDEAAFLQATKGTFKLGIEFAGWRAREHRYFHPFGRQGNDFGGTQFHQHWLRAQALGDDTPLGAFSLNEQAAYAGKMRQPDGDPRSVYSTFSYAYHFDATLYGQHLRALAEERGVERREGLIQEVVLDGECGRIASLRLDDGGMLDGDLFIDCTGLRSLLLGEALGVPFEDWTHFLPCNRALAVPTDCVDLMRPYTRSTAHEAGWQWRIPLQHRMGNGMVYSAEHWSDDQAHAALMANLDGQPLADPRLIRFTTGRRVQSWAKNCVAIGLSAGFLEPLESTSIHLVQIAVAKLLNWFPDMGFDPMTMAEFNRQIANEYDRIRDFLVLHYHANEREGEPFWDQCRTGAIPDSLAEKIAMFRRSGRLLSRETDLFQDASWLAVLLGQGVMPQAHDPLTESLRPLELDQMLRGMRDLIGRAAQAMPSQADHLARIGGTIANAQREAALG

SEQ ID NO: 86223 - protein, 423 aa, unidentified
  source 1..423: note = Pedosphaera parvula
  REGION 1..423: note = tr|B9XK92|B9XK92_PEDPL Tryptophan halogenase; OS = Pedosphaera parvula (strain Ellin514) OX=320771; GN = Cflav_PD2551 PE=4 SV=1
MSENYDAILIGGGPAGSCAAAILAEYGHRVLIIERAKFPRYHIGESLIPFTFAPLERIGMIPKMKASHFVKKYSVTFVQPDGRRSQPFYFFNRYDRETVAQTWQVLRSEFDQMLLDNAREKGAEVREETNVNRLLVEGGKVVGVEATDKSGRTYEVRAPITLDCTGKEAFTANRFNWRMRDPYLNKIAVWTYYRGSKREADIDEGATTVAYVPEKGWFWHIPQHDDMVSVGIVAEGKYLTRGGVKSARDIFNREVDENQWIKDHLLSGESTGEYFITSEYSRHSQHCAAPGLLLLGDALAFLDPVFSSGVMLALKSGHLAGEAVHAGLVEGDLSPARFTEYGTTIRQGVENMRKLVYAFYDPKFSFREVIKKHPEAAGQITDCLSGDVNKDFSELWGWIREFVPLPEDLPYGEPLSEAVDWKG

SEQ ID NO: 86224 - protein, 454 aa, Streptomyces varsoviensis
  REGION 1..454: note = tr|A0A0L8QRN5|A0A0L8QRN5_9ACTN Tryptophan halogenase; OS = Streptomyces varsoviensis OX=67373 GN=ADK38_13125 PE=4; SV = 1
MPRTTRRTTDPEYDVIVVGGGPGGSTVATLTAMRGARVLLLEKERFPRYQIGESLLPATVHGIGKLLGVLPELEAARFTTKRGGTFRWGKSPEPWTFAFAVSSRFPGPTSTAYQVERMRFDQILLDNARRKGVEVRERCPVVDVLEADGRVGGVRFADPDGVRRGRIHGRTGGRRVYSEFFKNIALFGYFEGGRRLPEPNSGNILCAAFESGWFWYIPLTDQLTSVGAVLHRDALERVQGDREQALARLIEECPLIAEYLADARRVTTGPYGEIRVRKDYSYCQERFWRPGMVLVGDAACFIDPVFSSGVHLSTYSALLAARSINTVLSGGPGSPDETRCFEEFEARYRDEFGRFHDFLMSFYDMRQDSDSYFWTARRITHATGSPLEAFVELVGGGASDEGALFDSPFVDATLEAGAKVQVQAALGESFDDEPIRENGLVPSLDGMRWTDPGS

SEQ ID NO: 86225 - protein, 515 aa, Shewanella frigidimarina
  REGION 1..515: note = tr|A0A106BZ61|A0A106BZ61_SHEFR Tryptophan halogenase; OS = Shewanella frigidimarina OX=56812 GN=AWJ07_18490 PE=4; SV = 1
MNQPIKHIVILGGGTAGWITAGTIAAHLLKNADSGFSVTLIESANIPPIGVGEGTWPTMRRTLKKMGIRETDFIKQCNVSFKQGAKFVNWVEDNDEYYHPLMLPKHPEQIDIIQQSLHVNPQFTFADLVTPQGIICEQGLAPKNITTPEFDAIANYAYHLDAGKFSEFLKQHAITQLNVNHIVDDVTKVNSHLNADIASLVTRNNGNISGDLFIDCSGTHSILLGEHYQVPFISCKDVLFNDRAIAVQVPYDEINEPITSHTISTAQTCGWIWDIGLENRRGVGHVFASDYINDEDATEQLKRYLRPRVKDVDALTFRTIPFNPGHRHHFWHRNCVAVGLSAGFLEPLEASALLLVEISASMIAEQLPACREVMDITAKRFNETFLYRWQRIIDFLKLHYILSKRTDSQFWINHRNPDTIPESLQNLMTLWRYQPPSDDDFIHAVEVFPAASYQYILYGMGFYTQESHLGVSKQKQQQTIVGVENNKMLTHKMLSMLPSNRELINQIKQYGLQKI

SEQ ID NO: 86226 - protein, 533 aa, Streptomyces sp.
  REGION 1..533: note = tr|A0A1C4LYS3|A0A1C4LYS3_9ACTN Tryptophan halogenase; OS = Streptomyces sp. SolWspMP-sol7th OX=1839776; GN = GA0115246_106079 PE=4 SV=1
MPETDNRIRKVVILGGGTAGWMTASYLGKALQGTVDIQVLEAPAIPRIGVGEATVPNLHRVLFDYLGIPEEEWMRECNASFKMAVKFVNWRTPGRGEPDSRTRPDGKPDHFYHPFGILPDHDNTPLSHYWFKNKYEGVTDKAFDYSCFREPPVMDAKKSPKWMDGESSTRYAWHFDAALVADFLRRFATDKQGVEHIQDEMVRAEQDERGYVTALHTKSGRVLDADLFVDCSGFRGLLINKALGEPFIDMSDHLMCDRAVATAVPHDDDANGIEPYTSAIAMSSGWAWKIPMLGRFGSGYVYSSRFTTQEEATREFCELWNLDPETTKFNHVRFRVGRNRRAWVNNVVSIGLSSCFLEPLESTGIYFITAAIHQLAKHFPDRTFPQALVDSFNEEIEVMFDDTRDFIQAHFYYAPRDDSEFWRAQKTLKLPENIQRKIAAYKAGLPINSPITDESTYYGNFEAEFRNFWTNGSYYCVFAGLGLEPDAPLPALAHKPESVAGAQPLFTKVAQEQRHLLDTLPSAHDYLRRLHAK

SEQ ID NO: 86227 - protein, 520 aa, unidentified
  source 1..520: note = Cellvibrionaceae bacterium
  REGION 1..520: note = tr|A0A2E2XDW5|A0A2E2XDW5_9GAMM Tryptophan halogenase; OS = Cellvibrionaceae bacterium OX=2026723 GN=CL693_03575; PE = 4 SV=1
MTHAIKKIVIAGGGTAGWITAGLLARHYHPLSNSGISIVVIESAEVPIVGVGEGTWPTMRRTLQKIGIPESDLIRHCHATFKQGSQFHNWKSERQPHQYTHPFNAPLQAQPELSGYWCQDPTSVFADSLDVQRQLGQQGLAPKHGDMPEYAGLLNYGYHLDAGVIAELIKQHCVNKLQVQHRIGTITQVYRSDNGDIDSLELEPALNTETEHAASNSVSGDLFIDCTGFSALLIGKTLGVKLKPQDHTLFADRALAVQVPNPQKDSPISCFTQATAQQAGWIWDIGLSHRRGVGYVYSSNHSNREQAEQALANYVGKQYAQLSVRELNINSGYRKQFWQGNCVAVGLSAGFIEPLEASALMLIELSANMICERLPATRAAMTTVAKQFNQSFNTRWEGIVDFLKLHYVLSERESDFWRDNRQPNSISDRLQELLKLWQHHVPSGYDFDTRNEVFSWASYQYVLYGMDFQTNVIAERLVHRSIYEKTQQARQKKMVTLQQQLPNHRQLLESIVERSHSVDS

SEQ ID NO: 86228 - protein, 502 aa, unidentified
  source 1..502: note = Photorhabdus thracensis
  REGION 1..502: note = tr|A0A0F7LR25|A0A0F7LR25_9GAMM Tryptophan halogenase; OS = Photorhabdus thracensis OX=230089 GN=VY86_05165 PE=4; SV = 1
MTAAYLSKAFAQNVDITVLESKRVKKIGVGEATFSTVRHYFDYLGLDESEWLAKCAGSYKLGIRFENWDGQDNHFYHPFERWETVKGFPISEWWLRKSTTNQGFDYATFLTPHLCEAKRSPRRLDGSLFAQSSDKSLGQSTLAEQRAQFPYAYHFDADEVANFLKRYAMNRGVSHIEDDVTHVEIDENGNIGHLETKIRGKLKADLYIDCTGFKGLLINQALNEPFVSFSDVLKNNRAVALRVSREDTRDIEPYTTARTMSNGWRWTIPLYKRNGYGYVYCDEYQSPEEAEAELRRSIPYENADCAANHIRMRIGRSNRSWVKNCVAIGLSSAFVEPLESTGIFFIQHGIEQLVRFFPRSSSNELLIEEYNTRVNRVVDGVKEFLLLHFSLAQRNDTLYWKEWKNIELPKELLKKIMLAKDHLLDKETIYPFYHGFEEYSWNTMILGLSSGSLTSKPALSLMIPDKADEILLQHHVKAKKMVSGLPTCHEYLQYLHNSEDRN

SEQ ID NO: 86229 - protein, 501 aa, unidentified
  source 1..501: note = Alteromonas mediterranea
  REGION 1..501: note = tr|S5AIS2|S5AIS2_9ALTE Tryptophan halogenase; OS = Alteromonas mediterranea 615 OX=1300253 GN=I633_21345; PE = 4 SV=1
MTALGLDSSNNQTPIKNVVIAGGGTAGWMAATALSRLLGKSVSVTLVESKDIGIVGVGEATIPPIRTFHKLLGIDEKAFMRATQATFKLGIEFENWREVNHSYIHSFGITGRECWAGEFHHFWLRAQDYGFGGDFGDYCPELIAAKQNKFATSDAMPLNFAYHFDAVAYGRFLKSLACDAGVTHREGDIEKVTVCPNTGNIQALHLTNGESIGGDFFIDCTGFKGLLIEQALHTGYDDWSHYLFCDRAVAMQTELTSPPVPYTKSVAHKAGWRWQIPLQERMGNGLVYCSRFMSDQEAIDTLKSQVSSTPINELRVIRFTPGKRRRGWNKNCVALGLSSGFIEPLESTSIHLIMTGLIRLMRLFPFDGITQSAVDEYNNKFDSEMSAILDFIVMHYKVTQREDSPFWQQCQRMDIPDSLKHKLALFAESGRVFLDDGDIFRVDSWTQVLMGQGMKPQQYHRVADEMSEQSLKQFLAGLKQQVDNHIAKLPAHEVFLTQYLG

SEQ ID NO: 86230 - protein, 505 aa, Caulobacter sp.
  REGION 1..505: note = tr|A0A2T9K1E8|A0A2T9K1E8_9CAUL Tryptophan halogenase; OS = Caulobacter sp. 774 OX=2172652 GN=DDF67_11755 PE=4 SV=1
MSRPVRTVVVAGAGAPLWLATLALRKAFGAGGLAVLAVETAPPTPGLSHAGLPAMGNLHQLLGLSEVELSRRCGAVPSLGQRFAGFSGDGSAFLHPYDTHGHAVDYVDFVHHWVLARKRGLKTALEDFSLGAAAAKQGRIVEGDDPGRLSSPGAGLHVDAAAYATLLRQRALVDGVTVEQGALADIERSGERIDAVVLESGARIAGDLFVDVGDGALIGQMPGAAFESWARWLPFDRVLPLAGQRLKTLPAYAHIEAVEGGWIGLYPLQDRTAGLAVYDSRTADAGLMARRAEGVSPLGWRQGEAQALRPGMQTRPWIGNCVALGAAAIALDPSDAAPMHAFQAGLSHLVSLFPADAGGGAEAPEARAYGAALAAQGRGLRDFQAMHYNLNRRAGAPWEAVRESEPPAELAYRLRLFGARGVVPAREDEAFQPANWAACLIGHGLIPQAHDPLAEGVAEAEQIQIFQNILGRIAADVGRMRPLEARLASLASRPAASAPAPLRFT

SEQ ID NO: 86231 - protein, 507 aa, Duganella sp.
  REGION 1..507: note = tr|A0A3E1S644|A0A3E1S644_9BURK Tryptophan 7-halogenase OS=Duganella sp. BJB480 OX=1871181; GN = D0T24_21370 PE=4 SV=1
MVKGRWISKVVILGGGTAGWMTAAALSHTFGRAVEIVLVESDAIGTVGVGEATIPPIRMFHQMIGVNEAEFMRATGATFKLGIEFRGWLKEGSKYFHPFGSYGVERDIGYFFQYWLRLKDKGQVPDFSEFSLCTLAARSNVFAPPSEQPGDPLQHLQSAYHFDAGRYAKYLKGLCLERGVSHKIGDMLTAERDAENGHVTSLKLKSGELLSGDLFIDCSGMRAMLIGQELGVEYEDWSRWLPMNRACAVPCELKSALTPYTISTARPFGWQWRIPLQHRVGNGVVYSSEFGTDEAAERCLLDGLEGTPLAPVNRLKFTAGRRRTPWHKNVVSIGLASGFLEPLESTSIHLIQSSIQRLIRYFPDAGFSPLCAQAFNKDAMREIEDVRDFLILHYHATEREDSELWRYVKAMRIPDSLRERIELFRERGQLNLAAEELFPSTSWHAVLLGQGIRPRTYMPTMALQDDAVLAAAYSKLERNFKQIVSRLSDHAAYIKENKLTSEMETRL

SEQ ID NO: 86232 - protein, 503 aa, Pseudoalteromonas sp.
  REGION 1..503: note = tr|A0A4Q6JG10|A0A4Q6JG10_9GAMM Tryptophan 7-halogenase OS=Pseudoalteromonas sp. MEBiC 03485; OX = 2571103 GN=EVU92_14990 PE=4 SV=1
MIKKIAIVGGGTAGWLAANHLGHALLQSGIEITLIESPNIASIGVGEGTVPSMRNSLQKFGISESDFINECDVTFKQSIKFVNWLDKHKHGANFYHHLFDHPHIFGEQLTQQWLAEGSGNDYAEFVSKQHACCENNLAPKTIATPQYAGVNGYAYHFDAKKFAAFLGSHATQHFAVKHLFAEIKDVTCDEHGFITHLIDSEGTALQFDFIIDCSGFSAAFIGQKLGVGFVDKSDSLLTDTAITLQVPTQSDDEIPPYTIATAHQAGWIWDIALTERRGVGFVYSSKYMSDEQAHEKLHRYLGNKFEHLTPRKIPMKVGHREKMWHKNCVAVGLSQGFVEPLEATAILIADFSAGLLAKRFPRTRDDINLVADDYNQHVNYVWQQTFDFIKMHYCISDRTDSAFWRDNKKTDQLSEKLKSNLARWQRFTPVREDFASKFDLFDLENYLYVLFGMHYVPARQQTKQSDNQQVAEFKQQRIKQLLNELPEHRELLDKIKKFGLQKY

SEQ ID NO: 86233 - protein, 533 aa, Streptomyces sp.
  REGION 1..533: note = tr|A0A429TSB5|A0A429TSB5_9ACTN Tryptophan 7-halogenase OS=Streptomyces sp. WAC04770 OX=2487423; GN = EF908_40985 PE=4 SV=1
MTSTDTRLQKVVILGGGTAGWMTAAYLGKALQGTVDITVLEAPAIPRIGVGEATVPNLQRSFFDYLGIAEDEWMRECNASFKMAVRFVNWRTGGQGEATARELPGGGPDHFYHPFGLLPDYDQTPLSHYWYKRKFEGRTTEPFDYACFREPPVMDAMKAPRWLDGRPATRYAWHFDAQLVADFLRRFATEKQGVNHVQDEMVRVEQDARGHVTTLHTKGGLALDADLFVDCSGFRGLLINKALAEPFIDMSDHLMCDSAVATAVPHDDATHGVEPYTSSIAMSSGWAWKIPMLGRFGTGYVYSSKFTDQDTATAEFANMWGLDPERTQFNHIRFRVGRNRRAWVNNVVSIGLSSCFLEPLESTGIYFITAAIYQLAKHFPDKTFNQGLVDSFNREIELMFDDTRDFIQAHFYYAPRNDTPFWRAQKELVLPENIQQKISAYKAGLPINSPITDESTYYGNFEAEFRNFWTNGSYYCIFAGLGLEPDTPLPTLAHRPDSVAGAEPLFDTVKRQQQNLLETLPSTYDYLRQLHGA

SEQ ID NO: 86234 - protein, 538 aa, Burkholderia sp.
  REGION 1..538: note = tr|A0A228Q3C2|A0A228Q3C2_9BURK Tryptophan halogenase; OS = Burkholderia sp. HI2761 OX=2015360 GN=CFB46_31375 PE=4; SV = 1
MTNPIKNIVIVGGGTAGWMSASYLVRALQQQANITLVESAAIPRIGVGEATIPSLQKVFFDFLGIPEREWMPQVNGAFKSAIRFVNWRKSPDRSRDDHFYHLFGNVPNCDGVPLTHYWLRKREQGFQQPMEYACYPQTEALDGKLAPCLADGTRQMSHAWHFDAHLVADFLKRWATERGVTRVVDEVEQVHLNERGYISSLSTKEGRTLEADLFIDCSGMRGLLINQALKEPFIDMSDYLLCDSAVASSVPADDARVGIEPYTSAIAMNSGWTWKIPMLGRFGSGYVFSSKFTSRDQATADFLRLWGLSDAQPLNQIKFRVGRNRRAWVNNCVAIGLSSCFLEPLESTGIYFIYAALYQLVKHFPDTSFDPRLTDAFNAEIVHMFDDCRDFVQAHYFTASRDDTPFWRANRNDLRLSDAIKEKVERYKAGLPLTTTSFDDSTYYETFDYEFKNFWLNGNYYCIFAGLGLLPDRSLPLLQHRPESIDKAEAMFARIQREAERLRTSLPTNHDYLRSLRERDAGLSRSEPGPTLATPEIL

SEQ ID NO: 86235 - protein, 499 aa, Shewanella baltica
  REGION 1..499: note = tr|A9L0H3|A9L0H3_SHEB9 Tryptophan halogenase; OS = Shewanella baltica (strain OS195) OX=399599; GN = Sbal195_2084 PE=4 SV=1
MNKIKDIVIVGGGSSGWMTAAMLARLFKSTLNITLIESEDIGTVGVGEATIPPLQIFNNVLGISEADFINATQATFKLGIQFENWGKPDEAYMHAFGNIGKDIGFTQFHHYWLSTSPKEVNSFWDYSVNYQAAKHNKFQVLQQIPNSPLAGLTHAYHFDAALYAQFLRRFSEQLGVKRIEGQITAVELTPNGDIESVTLGSGQTVKADFFIDCSGFAALLIEKALKVGFDSYQHWLPCDSAYAVPCEKTPAIVPYTRSIAHDTGWQWRIPLQHRTGNGLVYCSRYISDNAAKQLLLSNLDGKPLAEPKKINFTTGRRIKQWHKNCVAIGLSSGFLEPLESTSLHLVQSAIIRLSKLFPHQGIAQANVDEFNRQSQLEFEQIRDFIILHYHLNQREDAQVNGFWHQCRTMVLPESLQQKIALFRATGTVFRHQDELFTEAAWIQVMLGQGIRPLDFNPLAATIQPQALSEFLLNMRTIIDNTVTKLPTHDQYLAHLSTHK

SEQ ID NO: 86236 - protein, 500 aa, Sphingomonas sp.
  REGION 1..500: note = tr|A0A0Q4FIL0|A0A0Q4FIL0_9SPHN Tryptophan halogenase; OS = Sphingomonas sp. Leaf17 OX=1735683 GN=ASE75_07420 PE=4; SV = 1
MTETANRTIVIVGGGTAGWMAAAMLARFLEAGWTIRLVESDAIGTVGVGEATIPQIRLFNAALGIDEGDFLRATKGTIKLGIEFAGWTTPNARYMHGFGAVGRPLGLIGFHQYWLRANAKAKVQPFGDYAPNITAAYAGRHAPARGPTPLPYAYHFDAGLYAGYLRTLAEARGVKRTEGRVVAVDRDAATGDITAVTLDDQRRVAGDLFVDCTGFRALLLGRTLDVGFDDWSYWLPCDRAMAVPCARVADPVPYTRATARAAGWQWRIPLQHRTGNGLVYASAFLSDDEAAATLLGNLDGAALGDPRPIRFTAGKRRAFWSHNCIAIGLASGFLEPLESTSIHLVQTAIARLLQNLPGPGTNDAARHAYNRQTHREYDRIRDFLILHYHANRRDEPMWRAARAMALPKDLTAKLALWRERAQVSREDDELFTEAGWTQVLIGQDILPDAWHPLADQVASDDLSVFLNTAATMAARVATSLPAHADLLRALAAAPNRSLPA

SEQ ID NO: 86237 - protein, 514 aa, Colwellia sp.
  REGION 1..514: note = tr|A0A396TXL0|A0A396TXL0_9GAMM Tryptophan 7-halogenase OS=Colwellia sp. RSH04 OX=2305464; GN = D1094_14530 PE=4 SV=1
MDKVIKKIVIVGGGSAGWITAGTIAAQYAKQPNSLFEITLIESPQVSSIGVGEGTWPSIRNTLERIGINESAFLQCCDASFKQGSKFIGWNNGRKDDYYYHPFMTPKGYGHVDLYSHWQTYHKEQAFADAINIQSHVCQAGLAPKQLSTPDYAAVTNYGYHLDAKKFAALLKEHCINTLGVKHLYDHIDSIESDNTGDIHKLQTKEHGCIHGDLFVDCTGHLSLLLGKHFEIPLINKENILFNNSALAVQVPYESLNENIASATLSTAQEAGWIWDIGLTSRRGVGYTYSDKYITDEKAEQALRRYLKCSISDELSQSLAVKKISFTPGYREKFWHKNCVAIGMSSGFIEPLEASALAMIELSSSMLGEELPTTRAHMDIIAKRYNKRFTYRWERVIEFLKLHYVLSQRTDSNYWLDNKKDSSIPERLKSLLSLWQYQSPSRYDFIQNEEIFPSASYQYILYGMGFKTQQRVTPSSRQNTPALAKLFDEVKTQQAQYLAALPANRTLLSQLSSK

SEQ ID NO: 86238 - protein, 111 aa, unidentified
  source 1..111: note = Deinococcus metallilatus
  REGION 1..111: note = tr|A0A4Q0W0G8|A0A4Q0W0G8_9DEIO Tryptophan halogenase (Fragment) OS=Deinococcus metallilatus OX=1211322; GN = ERJ73_20095 PE=4 SV=1
HYKATERTDSPFWNYCRTMEIPEPLAHRMRLFESHGRVHREGNELFTKISWLQVMHGQRIRPRSYHPLVDLLPEDEIQEYLEEVERVIATCVDVMPSHAQFIAENCAAGRG

SEQ ID NO: 86239 - protein, 508 aa, Duganella sp.
  REGION 1..508: note = tr|A0A3E1S754|A0A3E1S754_9BURK Tryptophan 7-halogenase OS=Duganella sp. BJB480 OX=1871181; GN = D0T24_22740 PE=4 SV=1
MHPTIRDPNTHRPVRRVVIAGGGTAGWMAAAGIAKVLGKRLDITLIESDEIGTVGVGEATIPTLINFHNLLEINEQEFMAETQATFKLGISFESWRNVREDYIHSFGMTGTDHWTAGFQHFWHKGVERGLAGDYGDYCLELKASLENRFAHLPDNGMNYAYHLDASRYAKYLRRLSEPRGVKRVEGKIVRYTKHEDNGDVRSLVLESGQEIEGDLFIDCTGFRGLLIGEAMQEPMEDWSQWLFCDRAIAVQTESVGDAVPLTRSMAHQAGWQWRIPLQHRVGNGIVYSSRHLDDDAAMKQLLSNVEGKTLVTPRVIKFKPCQRQQTWKGNVVAMGLASGFLEPIESTSIHLIQRAVVRLMQTFPTDGISQADIAEYNQQCNSEIEHIRDFIILHYHVNNRTDSPFWTEAREMSIPASLRHRIDLFRETGRVFRVPNELFAENSWIQVMLGQGIMPRSHHQTADLMGDEELRHFLGGIKSRVDRIVVQLPTHQAYVERYCGRAEASRAA

SEQ ID NO: 86240 - protein, 491 aa, Novosphingobium sp.
  REGION 1..491: note = tr|A0A2T6MCD7|A0A2T6MCD7_9SPHN Tryptophan halogenase; OS = Novosphingobium sp. GV027 OX=2135689 GN=C8K10_101156; PE = 4 SV=1
MSGAPIASIAILGGGTAGWMTAAALSKALAPQGVAIALIESDAIGTIGVGEATIPTIHWFNQLIGLDEAAFMQATGATWKLGIEFRGWQGDGSAYFHPFGTYGLPGDAQMLPHRLIRAWNGGHAVEIEQLSLTTQLARAGVFARSSGDPRSLLSTLGHAYHFDAGLYAAFLRRMAEERGVRRHEGRVTAIDRDGETGFIRALTTERGEHVAADLFIDCSGLTGLLIEGQMAAGFEDWSHWLPCDSAWAAPTAADPAAPLFTTATAAAAGWRWRIPLQHRVGNGYVFSSRFETADAARDSLIAAIGTPTADPRLIRFTPGRRRRAWIGNVVAIGLASGFLEPLESTSIHLIQTGIGKLLSLFPRQDCAPLLAEQYNRVFAHEMEDVRDFLVLHYHFTQGRNEPLWQHCQATALPESLAYKVEQFTSSGRLMLRGEELFRDASWFAVMTGQGLRAGDHNPMLDGMSETENLRHLDAVKAAVAKSAAQLRAGRA

SEQ ID NO: 86241 - protein, 507 aa, Shewanella baltica
  REGION 1..507: note = tr|A9L4W3|A9L4W3_SHEB9 Tryptophan halogenase; OS = Shewanella baltica (strain OS195) OX=399599; GN = Sbal195_1172 PE=4 SV=1
MTIKTIAIVGGGTSGWLAANHIGRVLKDNPELSITLIESPAIPIIGVGEGTVPSIRKSLSSFGISESEFINSCDVTFKQSIKFVNWLDRTKHGNNNFYHHLFDMPSLFGEDLTPYWLINPKEHFADLVSSQHAVCEENKAPKFITTPEYSGVTGYAYHLNAAKFAMLLAKNATERFNVEHVHATVNDVSFGIDGSIHSLLTDKGELTFDFYIDCSGFESIFLAKRFDVPFIDKSQQLFVNTALVTQVPTQNFEKIPPFTIATAHKAGWIWDIALTQRRGTGFVYSNDHMSNAEAEDKFDQYLGGKLAELTPRKIPMKVGYRQQFWVKNCVALGLAQGFLEPIEATSILLTDFSARFLAERFPSDKDDIDYLAKRFNETVSQAWERVVEFAKLHYCLSDRSDSAFWRDNRSDKTIPEGLKQRLKMWRNFIPIAEDFPSKFEVFNRENYLYVLYGMKYFTRPTYSNAEVDKRVVQHLAKMKLLKSKMISELPEHRELLDKIRLYGLQSI

SEQ ID NO: 86242 - protein, 504 aa, unidentified
  source 1..504: note = Brevundimonas abyssalis
  REGION 1..504: note = tr|U3ASV6|U3ASV6_9CAUL Tryptophan halogenase; OS = Brevundimonas abyssalis TAR-001 OX=1391729; GN = MBEBAB_0053 PE=4 SV=1
MTDTTDHRIRKIVIVGGGTAGWMTAAAMAKLLGRDFADITLVESDDIGIVGVGEATIPQIGIYNRMLGLDEDEFVRKTQGSFKLGIQFVDWGRKGHTYFHPFGPFGVDMEGVSFHAYWQRLHLAGDPHRLEDYSLQAVAAAENRFMRAIDAGRSPLSRIAYAFHFDAGLYARFLRGFAEERGVVRREGKIVDVEQRAEDGFIQAVKLESGERIEGELFIDCSGFRGLLIEQTLKTGYEDWTRWLPCDRAAAVPCESVPTFTPYTRSTARDAGWQWRIPLQHRTGNGYVYSSDHISDDQAAETLLANLDGKPLADPRFLRFVTGRRKQAWVKNVVAIGLSSGFIEPLESTSIHLIQSGVAKLMQMFPDKRFEPADRERFNRMTQVETEQVRDFIILHYHLTERDDTPFWDRCRTMDVPDSLKEKYRLFEGYGRIFRENDELFNDTSWMAVMVGQGLKARGYDPVADVLSLDETRARLAEIRRVMRTSADYMPLQTEFIRNNCAAG

SEQ ID NO: 86243 - protein, 503 aa, Massilia sp.
  REGION 1..503: note = tr|A0A350CU70|A0A350CU70_9BURK Tryptophan halogenase; OS = Massilia sp. OX=1882437 GN=DCX52_16040 PE=4 SV=1
MQQANREHVEKRPIRRVVIAGGGTAGWMVAACIGKSLGKRLDIKLVESDEIGTVGVGEATIPTLINFHHLLEINEQEFMAATNATFKLGISFEGWRDRNQDYIHSFGATGSDHWTAGFQHFWHKGRERGLAGDYGDYCLEHRAAQEHRFAHLPKHGMNYAFHLDAGAYARFLRRFSERYGVQRIEAKIVEVAKDEASGDIRAIKLDSGTELEGDLFVDCTGFRALLIGQAMGVEYEDWSHWLFNDSAVALQTASTGPAVPYTRSIARESGWQWRIPLQHRVGNGHVFSSRFIDDAAAIDTLQRNVQGEHLTQPRVIRFKPGQRRQVWAGNCVAIGLSSGFLEPIESTSIHLIQRGVVRLMQMFPTHGISQSDIDEYNRQAANEIAHIRDFIVLHYKVTNRRDTPYWRACAELAVPASLQHRIDLFRATGRVFRAPNELFAENSWIQVMLGQGIMPEQHHQSADLMGDAELKGFLDSISGAIERTVAQLPPHAAYVRQYCGTTR

SEQ ID NO: 86244 - protein, 506 aa, Marinimicrobium sp.
  REGION 1..506: note = tr|A0A2D8WGX3|A0A2D8WGX3_9GAMM Tryptophan halogenase; OS = Marinimicrobium sp. OX=2024837 GN=CMG77_00675 PE=4 SV=1
MTMDNRVRKVMIVGGGTAGWMAAAAMAKVLKNQYCDIQLVESDSIGTVGVGEATIPQIQLFNQMLGLDENEFIRRTQGTFKLGIQFVNWGHIGERYLHAFGEVGKDMEGVQFYHYWLKLFQAGEAPNIDAYTLNCQAVEQGRFMRPVDAGNSPLSRIAYAFHFDAARYAMFLRDYAMERGVRRREGKIERVSLRPGDGFIESITLDDGETLEADLFIDCSGFRGLLIEQALKTGYEEWSRWLPCDRAVAVPCAKVAEPVPYTRSTAHSAGWQWRIPLQHRTGNGHVYCSQFISDDEAADTLLKNLDGEPLADPKFIRFTTGKRLKFWNKNCVALGLASGFMEPLESTSIHLVQSGIAKLMSLFPNRNFDQEDIDEYNRQVDFEYTRIRDFLIAHYHVTQRDDSEFWNYCRTMDVPDTLKQKMNHYRKNGRIFRTNEELFNETSWLEVMHGQGLKAEGYHPIVDTLSKDEIARRLESIRNVINKSVEYMPKHSEFIAKHCAAPANTE

SEQ ID NO: 86245 - protein, 504 aa, Caulobacter sp.
  REGION 1..504: note = tr|A0A2T9JUJ5|A0A2T9JUJ5_9CAUL Tryptophan halogenase; OS = Caulobacter sp. 774 OX=2172652 GN=DDF67_14110 PE=4 SV=1
MVDQRIRKVVVVGGGSAGWMTAAAFSRLLVSDAVSVEVVESEAIGTVGVGEATIPTIRNFNEKLGLDEVEFIRATQASFKLGIDFRDWGRVGHRYFHGFGDFGADHAAVQAHQLWGRLRTLGETGGLEDWSLPTAAAMLNRFIPPSPDPRSPLHDYAYAYHFDAGLYAAFLRRYAEAQGVTRTEGKIVDVAVRGQDGFVEAVVLEDGRRVEGDLFVDCSGFRALLIEGTLKAGFEDWSRWLPCDRALAVPCRTGGDGLTPYTRSTAREAGWQWRIPLQHRTGNGYVYSSAFVDDERAARTLMENLDGEALDDPRPLRFLAGRRRKFWDRNVVAVGLSGGFLEPLESTSIALIQNGIARLLEFFPDRRCDPLLADEFNRVSAQEYERIRDFIILHYCINQRDEPMWRQVREVELPDSLQAKIALYKARGHVAILEGDGFARPSWISIYNGLGVVPEAYDPLADRIPEAELRRLMEHRRALIRHTAQSMPTQAAFIARHCAAAPLG

SEQ ID NO: 86246 - protein, 499 aa, Massilia sp.
  REGION 1..499: note = tr|A0A354IQR4|A0A354IQR4_9BURK Tryptophan halogenase; OS = Massilia sp. OX=1882437 GN=DDZ22_02180 PE=4 SV=1
METHVNNKPVRRVVIAGGGTAGWMVAACLSKSLGKRLDIKLVESDEIGTVGVGEATIPTLQNFHHLLEINEQEFMAATHATFKLGISFENWRDVHQDYIHSFGNTGIDHWTAGFQHFWHKGRERGLAGDYGDYCLEHRAAQLNRFAHLPKQIINYAYHMDAGAYARFLRRFSEHYGVQRVEAKIVDVVKDAQANTIRSIRLDSGTELEGDLFIDCSGFRALLIGGALGVEYEDWSHWLFNDSAAALQTASSGEAVPYTRSIAREAGWQWRIPLQHRVGNGHVFSSRFIDDEAAIATLNRHVTGEPLMQPRVIRFQPGQRKQVWVGNCVAIGLASGFLEPIESTSIHLIQRGIVRLMQMFPSTGIRASDVAEYNRQAADEIAHIRDFIVLHYKVTNRRDTPYWRACAEMDVPASLQHRIDLFRETGRVFRAPNELFAENSWIQVMLGQGIMPDGHHQTADLMGDAELKGFLDNISGTVNRTVAQLPPHETYVRQYCGVAK

SEQ ID NO: 86247 - protein, 509 aa, Caulobacter sp.
  REGION 1..509: note = tr|A0A2T9K1I3|A0A2T9K1I3_9CAUL Tryptophan halogenase; OS = Caulobacter sp. 774 OX=2172652 GN=DDF67_11750 PE=4 SV=1
MSGPIRNIVVVGGGTAGWMTAAALAQTVGTQRYSITLVESEQIGTVGVGEATIPMILLFNKVLGLDEDVFIRETNATFKLGIEFVDWRRLGHRYFHPFGLYGADMDGVGFQHFWLRWARQSGDWDHGAFNAETLAAASGRFMRTPPAPNLPKINYAFQFDAALYAAFLRRYAEARGAVRVEGRIATVERDGESGHVSRLVLDDGRTIAGDFFVDCSGFRGLLIEETLGAGYDDWSRWLPCNRAAAVPCERAGELTPYTRATAREAGWQWRIPLQHRSGNGYVFSDAFIGEDEAVRLLGERLDGAALADAKVLKFTAGRRRRSWIGNVLAIGLSSGFLEPLESTSIHLVQAAIAKLLTLFPKAGLDPWVVDKFNREMALEYEQVRDFIIAHYKVTERDDTEFWRWCQAMVPPDSLNQRLEVFRARGEVLVDQRELFKETNWFAILAGQGLMPNDYHAVADNISPEELSLRLGRIRAAIQERAASLPPHGVYLEKAGLLGLAARAATSASV

SEQ ID NO: 86248 - protein, 501 aa, Caulobacter sp.
  REGION 1..501: note = tr|A0A2T9JSS5|A0A2T9JSS5_9CAUL Tryptophan halogenase; OS = Caulobacter sp. 774 OX=2172652 GN=DDF67_15435 PE=4 SV=1
MDRAIGSIAILGGGTAGWMAAAALAQVLRGTQTTITLVESAEIPTVGVGEATIPPIVDFLRLLEIDQGQFMAATEGSFKLGIRFDDWRAVGERYWHPFGAFGPSVDRRPFHHIWHRLRSAGDDPRVEAYSLAAALGDASRMAFADGRGQGPLGGMRHALHFDAGLVARFLRTYSEERGVRRLERRVEGATLKADGFVEALVLDGGERLAADLFIDCSGFRGVLIEGALKTGYEDWSAFLPCDRAVAGLTVRDANPPPFTQAAARPAGWRWRIPLRHRTGNGYVYSSAHVSDDEALADLEREAGKLLTEPRVLKFTGGRRKAFWSRNVVALGLASGFIEPLESTSIHFVTSGLLKLLDHFPDKDFDGANIADYNAALIAEYEAARDFIVLHYQPTRREEPFWRERAAATLPPDLAERLALYRGTGRIPHRPTELFTELSWFYVLEGMGVRPAAYDPLVDLSNLSQVREGLAGWRRRVAEIVQAAPLHDTALDQIAGRRRPAA

SEQ ID NO: 86249 - protein, 501 aa, Marinimicrobium sp.
  REGION 1..501: note = tr|A0A2D8WIV4|A0A2D8WIV4_9GAMM Tryptophan halogenase; OS = Marinimicrobium sp. OX=2024837 GN=CMG77_04275 PE=4 SV=1
MTDSIKRIVIAGGGTAGWMAAGLLSQTLGKNLDIKLVESDDIPTVGVGEATIPPLMTFHKMLDIDEREFLAEVNGTFKLGISFENWREKDHKYIHSFGYAGKDCWACSFLHFWLAGKAKGIDYPYGDYCAELLASHKNKFAVLPNGRMNYAYHMDAGRYAAFLRRRSEKLGVERVEGKIEKVNLNPDNGEIQSLTLASGKQVDGDFFIDCTGFRGLLIEQSLNAGFEDWSHWLPCDRALAVQTESVGEPIPYTRSIAHDAGWQWRIPLQNRVGNGLVYSSRYMSDEQARETLLGNLEGEPITDPKPIQFRTGTRRKHWVKNCLALGLASGFLEPLESTSIHLIQRSLVRFVQLFPASGQMVQSDIDEFNQQTKLEVERIRDFIILHYKVTERDDTPFWRYCKNMEIPAPLRQRIDLFSDSARVFKIENELFGEESWIQVMMGQGITPKAYHPMAGVMTEKELADFLKKLRQSTEQLVAKLPSHQAFIDYYCKMPMAQAANG

SEQ ID NO: 86250 - protein, 504 aa, Sphingomonas sp.
  REGION 1..504: note = tr|A0A5E7YXS3|A0A5E7YXS3_9SPHN Tryptophan halogenase; OS = Sphingomonas sp. EC-SD391 OX=2038398; GN = SPHINGO391_410065 PE=4 SV=1
MANHPLRIVIAGGGTAGWMAAATFARFLETGYEIDLIESDAIGTVGVGEATIPQIHLFNDALGLDEDAFLRATGGTFKLGIEFVDWFKPGHRYLHAFGDVGRDVGLLPFHQYWLRARSLGLAGDLGAYSLNTHAALANRMQRGPARTARTLPSMPYAYHFDAALYARYLRRYSETRGVNRIEGKIVRVTRDGDSGDVSGLVLENGTTVAADLYIDCTGFRGLLIEEALGTGYEDWTHWLPCDRAIAVPSARGEKFTPYTRSTAHAAGWQWRIPLQHRTGNGVVYSSAHMSEDEATATLLRGLDTPAMADPRTITFRTGRRKRMWNHNVVALGLAAGFMEPLESTSIHLIQSAVARLLKLLPGRVIADADRTEFNRQIDFEYERIRDFIILHYKATTRDDTPFWRQCRDTAVPDTLAAKIDLWRGNGHIVREREELFTEVGWLQVLAGQGIVPDGHHPLADAISTADLSEFMETIDKLNAREANQMQDHAAFVAQHCAAAPSLAA

SEQ ID NO: 86251 - protein, 550 aa, Streptomyces sp.
  REGION 1..550: note = tr|A0A077JCX4|A0A077JCX4_9ACTN Tryptophan 6-halogenase OS=Streptomyces sp. Sp080513GE-23 OX=630397; GN = fmoD PE=4 SV=1
MTEVTMGEPIRNIVILGGGTAGWMAASYLGKALSGQAAISVVEAPAIPRIGVGEATVPNLQRVFFDYLGLPEEEWMSKCNAGFKMAVKFINWRTPGPGEPVSRQDADGSDHFYHPFGLLPSPDGVPLSHYWTRKQLSGATSEPFDYASFVEPPLMDAKRSPRFLDGTRCTNYAWHFDAALVAAFLRDFATVKQGVRHIEGTVSDVRADSRGYIESVTLESGEVIGGDLFVDCSGLRGLLINKTLGEPFIDMSDHLLNNSAVATQVPHDDEANGIEPYTSSIAMPAGWTWKIPMPGRFGTGYVYCDKFADKDEAARDLCGLWGLDPEKVPLNHIKFRVGRNRRAWVGNCVSIGLSSCFVEPLESTGIYFITASLHQLVKHFPERDVDPVLRDRFNREIVDMFDDTRDFLQAHFSLSPRTDTPFWRATKELTLADQIKEKIEMYRSGVPVNPPVTDEGTYYGNFEAEFRNFWTNGSYYSVFAGLGVRPRSSLPILSYRPDSVAAAERAFADVKARQRQLLSELPSAYEYLSSLHQADQPRHAPAETPRRRQV

SEQ ID NO: 86252 - protein, 508 aa, Sphingomonas sp.
  REGION 1..508: note = tr|A0A5E7ZC17|A0A5E7ZC17_9SPHN Tryptophan halogenase; OS = Sphingomonas sp. EC-SD391 OX=2038398; GN = SPHINGO391_440280 PE=4 SV=1
MTDPNPGPIRKVVIVGGGTAGWMAAAAAARYLDDGQRQIILIESDAIGTVGVGEATIPPILGFNALIGVDEREFLRATGATFKLGIEFVGWDTGDDRYMHAFGGHGRDIQGLAFHQLWLKLRDRPGIGGIDAYAPSAVAAYLNRFGLPTGPQTAPLAYAYHFDAGLYAAFLRRRAEAGGVTRIEGRITRVDRDPDTGHVRAVRLDDGRSVDGDLFIDCSGFRSLLLGETMGVPFEDWSHWLPCDRAVAVPTKPSAPLLPYTRATARTAGWQWRIPLQHRTGNGHVYSSAHISDDEATAVLLANLDSRPTAEPRQLRFKAGRRTSMWQGNVVALGLAGGFLEPLESTSIHLIQTGISKLFALFPDRGFSAVERDEYNRLMGDAYTSVRDFIILHYHATRRDGSAFWRHVRTMPIPDSLTRKLALFREKGRVFRYDDELFGISSWVQVLLGQNVIPVGHDPIVDALDADRVADAIRQIRAATIRGAQSLPNHADFVAHHGPFDRKNEFAK

SEQ ID NO: 86253 - protein, 531 aa, Streptomyces sp.
  REGION 1..531: note = tr|A0A4V6RPP6|A0A4V6RPP6_9ACTN Tryptophan 7-halogenase OS=Streptomyces sp. A1499 OX=2563104; GN = E7X58_02185 PE=4 SV=1
MDQRVKEIVILGGGTAGWMSAAYLAKKLGETVRVTVLEAPSIPRIGVGEATVPNLQRVFFDQLGLSEEEWMPECNAAYKVAVKFINWCTPGKGEARAREIDGRPDHFHHPFGLLPEHEGLPLSHYWVYNRKHGVTGKPFDYACFPGVAIMDALKAPRDHAGEPVTRYAWHFDAHLVADFLRRHATEKQNVTHVQDEMVEARRDGRGFVTALRTKSGAVIEGDLFIDCSGFRGLLINQAMEEPFVDMSDHLLCDRAVAYALPNDDEANGVEPYTSAIAMESGWTWKIPMLGRFGTGYVYSDAFAGQDRATTDFCRMWGLDPDEVGDRLNHVRFRVGRNRRAWVKNVVSVGLASCFLEPLESTGIYFITAALHHLAKHFPDQRFDAVLADRFNAEIEAMFDDTRDFIQAHFALSPRTDTPFWKANKDLHLPEGIKEKVAMYRAGLPINQPASTEGAYYDNFDVEFRNFWTNGSYYCVFAGLGLEPDHPLPALMHHPDAAEGAQHLFDRVAEEQRKLADTLPSNHEYLRRLHGA

SEQ ID NO: 86254 - protein, 484 aa, unidentified
  source 1..484: note = Kordiimonadales bacterium
  REGION 1..484: note = tr|A0A5A7N711|A0A5A7N711_9PROT Tryptophan halogenase; OS = Kordiimonadales bacterium JCM 17846 OX=1236968; GN = JCM17846_08320 PE=4 SV=1
MLAKALGQQIRIRLVESDAIGTIGVGEATIPQIRNLNHYLGLDEHEMIRQTKGSFKLGIEFSDWGRIGDRYMHAFGDIGQSLGLSPFHHYWLRATQSGHPHSLWAYSLNQQAAIQNRFGPLERLGDSRLTGLRYAFHLDAGLYAAMLRSYSEARGVERLEGRVVDVKQHSGDGFIQSVLLENGTEIEADLFIDCSGFRGLLIEDALKTGYEDWSHWLPCNRAAAVPSETPTDASGKPLMRPYTQSMARPAGWQWRIPLQHRVGNGHVYCSAHLSDDEACALLLANLEGPALTEPRLLQFKTGRRKKAWNRNCVALGLAGGFMEPLESTSIHMIQTGISRLVSMFPDKNCDPALAAHYNEATRFEYERIRDFLILHYKATQRQDTAFWRACAEMPIPQSLQQKIELFEASARLYREADELFTEIGWLQVLLGQSITPRAYHPLADAISDAQLAEFLDHIRLLINRGVASLPNHHSFISRISANFN

SEQ ID NO: 86255 - protein, 506 aa, Luteimonas sp.
  REGION 1..506: note = tr|A0A5D4XQJ8|A0A5D4XQJ8_9GAMM Tryptophan 7-halogenase OS=Luteimonas sp. XBU10 OX=1132694; GN = FZO89_11480 PE=4 SV=1
MRTTDVDTSDDDRPRTPVRRVVIAGGGTAGWMAAAGISKLLGKTLEIILVESEEIGTVGVGEATIPTLVTFHRALDIAEQEFMSAVQGTIKLGISFENWLERGHRYIHSFGVNGKDHWSAGFQHFWLRGRAGGLASGYEDYCVELQAALQDRFGHLPRNGINYAYHMDASHYARFLRRFSEANGVKRVEGKIVEVGVGDDGDICNLRLEDGTDIRGDFFVDCTGFRALLIGKALNVGYEDWSHWLFNDSALATQTTAVRDAVPYTRAIAGTAGWQWRIPLQHRVGNGIVYASRYITDDEARHEFLSSLEGEIIKDPWPVRFRPGRRMKCWHRNCVALGLAGSFIEPLESTTIHLIQRGIMHLLQLFPQVVTPAAIAQYNAQLAEELVHVRDFVVMHYHLTHRRDTPYWRAIAQMDIPGTLQHRIDLFRETGSVFHVPGELFGANSWIQVMMGQGVMPERYHPTADAMSEDGLGRFLDDIRTNVLSTAGTLPPHMDYMRSYAPAGKP

SEQ ID NO: 86256 - protein, 511 aa, Streptomyces sp.
  REGION 1..511: note = tr|A0A2R3ZQ00|A0A2R3ZQ00_9ACTN Tryptophan halogenase; OS = Streptomyces sp. FXJ1.235 OX=1454112 GN=myeP PE=4 SV=1
MTASYLGKALQGEVDITLLEAPAIPRIGVGEATVPNLHSAFFDFLGIPEHEWMREVNASFKAGIKFVNWRTPGRGVSDPRPLGAETDYFYHHFAHLPEHDGVPLPQYWYLKKRRGDEIGAFDRACFPETAVLDAKKGPWKADGTPAMDYAWHFDAALVADFLRRFATQKQGVRHVQGELAEVIQDERGFVTALRTKDDELLKGDLFVDCSGFRGLLINKAMGEPFVDMGDKLLCDSAVATAVPHDDEANGVEPFTSAIAMSNGWTWKIPMLTRFGTGYVFSSKFTTREDATREFSEMWGLDPENTEFNQVSFRVGRNRRAWVRNVVGIGLSSCFVEPLESTGIYFIYTAIAQLAKHFPDKRFDPTLIKRFNREIESMFDFTVDFIQTHFAFSPRTDTEFWRANKKLPLGDDLREKVELYRAGLPVNPYGSGEQVLHGTSETSNKNFWNNTNYWCMLAGLGHLPEHVLPALRYKPASVAGAEAVFADVPRRAAERLDELPSTYDILRTLHGK

SEQ ID NO: 86257 - protein, 538 aa, Pseudomonas chlororaphis
  REGION 1..538: note = tr|Q9RPG8|Q9RPG8_9PSED Tryptophan halogenase; OS = Pseudomonas chlororaphis subsp. aureofaciens OX=587851; GN = prnA PE=4 SV=1
MNKPIKNIVIVGGGTAGWMAASYLVRALQQQANITLIESEAIPRIGVGEATIPSLQKVFFDFLGIPEREWMPQVNGAFKAAIKFVNWRKSPGSSRDDHFYHLFGNVPNCDGVPLTHYWLRKREQGFQQPMEYACYPQAGALDGKLAPCLPDGTRQMSHAWHFDAHLVADFLKRWAVERGVKRVVDEVVDVHLNERGYISSLFTKEGRTLEADLFIDCSGMRGLLINQALKEPFIDMSDYLLCDSAVASAVPNDDAREGVEPYTSAIAMNSGWTWKIPMLGRFGSGYVFSSKFTSRDQATADFLNLWGLSDNQPLNQIKFRVGRNKRAWVNNCVSIGLSSCFLEPLESTGIYFIYAALYQLVKHFPDTSFDPRLSDAFNAEIVYMFDDCRDFVQAHYFTASREDTPFWLANRHDLRLSDAIKEKVQRYKAGLPLTTTSFDDSTYYETFDYEFKNFWLNGNYYCIFAGLGMLPDRSLPLLQHRPESIEKAEAMFASIRRETERLRTSLPTNYDYLRSLRDGDTGLSHSSSGPNVEAQETL

SEQ ID NO: 86258 - protein, 493 aa, Rheinheimera sp.
  REGION 1..493: note = tr|A0A0M0M9P3|A0A0M0M9P3_9GAMM Tryptophan halogenase; OS = Rheinheimera sp. KL1 OX=1635005 GN=WH43_01570 PE=4 SV=1
MQQVKKVVVAGGGTAGWVAAAALSKRLQGLIEVVLIESEEIGTVGVGESTVPPVQLFHNLLGIDEQEFMKATDATFKLAISFENWGQTGDQYFHPFGVTGKGSFLTDFQHYYLHGLTLGVDAPFGDYCYELQAAKQHKFGKTDKSNINYAYHLDAGRYARFLRKFSEDLGAVRIEGKIAQVQQHVNGDIRSLVLESGQEITGDLFIDCTGFRALLIEQTLNTGYDHWDHWLPCNKAVVVQTEPGPNIHPYTRAIAHDSGWQWKIPLQHRGGNGLVYASDYLSDEKAKQRLLDGLQAPALFEPRVLSYQTGRRKKLWNKNCVAIGLSSGFIEPLESTSIFLFMSGIIRLLRLFPFNGVTPALMDEYNQQSITEVEKIRDFIILHYHQTERSDSPFWDYCRTMPIPDTLAHRIELFKESAHAFQTGDEMFRLESWSHVMLGQRLKPNSYHQLVAALNQGELSRHLHSIRETINAAVDRLPSHRDFLRQYCPSTIS

SEQ ID NO: 86259 - protein, 536 aa, Serratia plymuthica; identical to SEQ ID NO: 85849
  REGION 1..536: note = tr|G0ZGJ1|G0ZGJ1_SERPL PrnA OS=Serratia plymuthica; OX = 82996 GN=prnA PE=4 SV=1

SEQ ID NO: 86260 - protein, 416 aa, Streptomyces iakyrus
  REGION 1..416: note = tr|K8ESR5|K8ESR5_9ACTN Kynureninase OS=Streptomyces iakyrus OX=68219 GN=actG13 PE=3 SV=1
MSRFDGTREEAERYDRADPLGFLRDRFVHAEPDLLYLDGNSLGRLPADTPDFVADVIRDGWGRGLIRSWHDWIDWNRRIGDRLAEHVLGASPGEVVLSDSTTVNLYKLAWAALDHAPGRRALVVDADDFPTNRYVAQGLARQRGLDLRLVHSDPDLGLDPERLRAALDDQVALVVLSYVAYRSGALADMAAVNALAQEAGALVLWDLSHAAGAVPVRLTEDGADLAVGCTYKYLNGGPGSPAFLYKGGPPQPIQGWFGQRDQFAMAADFDPVETVDRFLTGTPPMLSTAALVPALALVEEAGVDRLRAKGRLLGELAVDLAARWLAPLGFRLASPEDPDRRGSHVTLWHPDAWRICRALAEDAGVICDYREPYRLRIGPSPAYTRFTDVWDALDRTRRLVESARHTRLPREKARIT

SEQ ID NO: 86261 - protein, 542 aa, Luteimonas sp.
  REGION 1..542: note = tr|A0A5D4XS90|A0A5D4XS90_9GAMM Tryptophan 7-halogenase OS=Luteimonas sp. XBU10 OX=1132694; GN = FZO89_11515 PE=4 SV=1
MEKNRIRKVVIAGGGTAGWVAACALTHQFRDLLDITLVESEQVGTVGVGESTIPTIRTFHKLLQIDEREFLSAVAGSYKLAISFENWIRPGSHYFHPFGTTGVNTWSADFHQFWLESRRRGLQSELGDYCLETAAARQDRFALFNTGQNAQQWSMRWTQAATMERKDVSYAYHFDAGLYAAFMRIRCEGSGLKRIEGKIAQVRQDPDSGFVQALVLEDGQVIEGDLFIDCTGARAVLSEQALHTGYEDWNHWLPSNRAVALQTEADGPAVPYTRAIAHEAGWHWKISLQHRIGCGIVFSDAHMSDDEATARLLAENPAKPLRDPWIIPFRTGRRRKSWNKNVVALGLASGFIEPLESTSIHLTLSAVTRLVQFFPFEGISQAAVDRYNQVSRQELEHVRDFVVLHYHLNQRDEPLWRQCREMELPPGLAERIQVFRETGYAWQGEDELFRLDSWTHCMLGQGVVPQNHHPLTRALSDADLKRLLDGVRKPIDAAVAAMPSHQQFLDSYCKAPASAWEQMYARARQHERVTGKVAGVGGDLTR

SEQ ID NO: 86262 - protein, 519 aa, Luteimonas sp.
  REGION 1..519: note = tr|A0A5D4XGC8|A0A5D4XGC8_9GAMM Tryptophan 7-halogenase OS=Luteimonas sp. XBU10 OX=1132694; GN = FZO89_15660 PE=4 SV=1
MSASAVRDIVVVGGGTAGWMAAAAFVRVLGESCSVRLVESEAIGTVGVGEATVPHIKAFNNLLQIDEADFVRNTQGTFKLGIQFVDWLREGTTYVHGFGTEIGRNLGLLPFHHYWTKAYQRGRARSIGCYSLNTLAAERGRFMVSADDAPAGSPLSNIAYAYHFDAALYARYLRAYAERRGARRTEGLVREVLLDSGSGHVTALRLESGEEIGGDLFIDCSGFRGLLIGEALGTSYEDFSHWLPCDRAWAVPSGNVGSPTPYTRSTARAAGWQWRIPLQNRTGNGYVYCSRHVSDDEAAATLLANLDGPALGDPRPLRFNTGRRSSCWQRNVIALGLSSGFMEPLESTSIHLIQSGISKLLEMFPREGFNPVLARKYNARLAFEFDRIRDFLVLHYYANRRDEPFWKECRHIAITPELREKLELFQDSGQVYRNGEEMFGDVSWIEVMLGQGVMPAGYHPLVDLVPEADVFRFVEGVGKTISNCVDVMPTHQQFIDRFCLAPADSRTRTGAAGSAAVRP

SEQ ID NO: 86263 - protein, 505 aa, Xanthomonas euvesicatoria; identical to SEQ ID NO: 86142
  REGION 1..505: note = tr|A0A4U0TGL1|A0A4U0TGL1_XANEU Tryptophan halogenase; OS = Xanthomonas euvesicatoria pv. citrumelonis OX=189396; GN = TP41_05510 PE=4 SV=1

SEQ ID NO: 86264 - protein, 502 aa, Sphingomonas sp.
  REGION 1..502: note = tr|A0A5E8AAD2|A0A5E8AAD2_9SPHN Tryptophan halogenase; OS = Sphingomonas sp. EC-SD391 OX=2038398; GN = SPHINGO391_500130 PE=4 SV=1
MKRVQRLVILGGGTAGWMTAAAMSATFGDLVNISILESDAIGTIGVGEATIPTIHWFNQLIGLDEEAFVAATKASFKLGIEFVDWARPGTRYFHPFGRYGVDLGPVPFHQHWLRAKADGLDRPLSVYSLAAQLAAAGRFAKPVDDPRSILSTLGYAYHFDAGLYARHLRQLAEKRGVVRHEGLLRDIERDPETGFVTALTSDRGERLEGDLFIDCSGFRALLIGETMGARFQDWSHWLPCDRAVAVPCARIAATTPFTRSTLRPAGWQWRIPLQHRTGNGYVYASSFVSDDEAVATLLSNLDGEALADPRMLRFTAGFRREAWRGNVVAIGLSSGFLEPLESTSIHLIQSGIAKLITLFPDADCDPVLARQFNTLFARDMDGIRDFLILHYHATQGHDAPLWQHTRHMTPPPTLVDKIAQYTRAGRLMLSADELFREASWLAVLEGQGVGALGHAPLADTLDAATNRRQLNQIETVIARATPTLPLHDAAIAALVAPQVAGR

SEQ ID NO: 86265 - protein, 509 aa, Sphingomonas sp.
  REGION 1..509: note = tr|A0A5E7YXT1|A0A5E7YXT1_9SPHN Tryptophan halogenase; OS = Sphingomonas sp. EC-SD391 OX=2038398; GN = SPHINGO391_410063 PE=4 SV=1
MIDGLGQHIVILGGGTAGWMTACLIAHRWRARGMRVTLVESPEIGIVGVGEGSTPQLKHFFDTLGIAEDVWMPACDATYKLGIGFEGWSDRAGYERYFHPFPTALDGHTASQFFYNARALRTGRDVEAHPDRFLLPARLAAAHCAPQPAASFPFEVSYGYHFDAYKVGAFLATHATETLGVDHLQRRIASVERTPTGQITALIDTDGGRISGDFFVDASGFRSTIFAALDVPFVSYADALFNDRAVVMPTAHAPGAPIPSQTRATALSAGWAWHIPLTRRNGNGYVYSSRHLTEAQAEAELRAHVGAEAGEARHLKMRVGRVRDSWSHNALAVGLAQGFLEPLEATALHLVIATVEAFLDGVDAGGATDAVRSAFNTRIAARYDGVRDYIVAHYRLNQRHDDPTGYWAQARGIEILSDDLKMLMSAWFTGVDMVAAIDHAGLARYYSAISWHCLFAGYGTFPEPARLIPPGADIDPVAMTRIDDFLTRCAMNFGSHASRLRTADLKDFA

SEQ ID NO: 86266 - protein, 506 aa, unidentified
  source 1..506: note = Kordiimonadales bacterium
  REGION 1..506: note = tr|A0A5A7NGN4|A0A5A7NGN4_9PROT Tryptophan halogenase; OS = Kordiimonadales bacterium JCM 17843 OX=1236965; GN = JCM17843_09550 PE=4 SV=1
MTTAQISADPVTRIVIIGGGTAGWMAASVLSKALAGRVSIQLIESDAIGTVGVGEATIPQIRLINHYLGLDENAFLKHCKGTFKLGVQFNNWGRIGDSYMHAFGDLGLPLGPLSFPHYWLRAQQEGVGGDLWNYSLNYQTAMQGRFSRLEKVGTSHLGGIKYAFHFDAGLYARYLRAGCEKRGVSRTEGRIVKTNLRGTDGFIESVTLESGATIAGDLFVDCSGFRGLLIEQALKTGYEDWSHWLPCNRAVTVASEPTGPMRPYTQATARQSGWQWRIPLQHRVGNGHVYSAAHISDDEAAHQLLQNLESPALSDPKTLRFKTGRRQQAWNRNCVALGLAAGFMEPLESTSIHLIQSGISRLVSLFPDRHFDPSLIDHYNRQTQFEYERVRDFLILHFKATQRRDTAFWQTCANMDIPHSLQEKIDLFSTTGRIIREGEELFTEMGWIQVFTGQHIKAQRHHPLADNITQSQLTEFLGNIEKLITHTVPSLPRHADFITHNCRAAA

SEQ ID NO: 86267 - protein, 304 aa, Sphingomonas sp.
  REGION 1..304: note = tr|A0A520GVG1|A0A520GVG1_SPHSX Tryptophan 7-halogenase (Fragment) OS=Sphingomonas sp. OX=28214; GN = EOP68_25725 PE=4 SV=1
MNEHTIRDVVIVGGGTAGWMAAAALSRFLDNGYTRITLVESDEIGTVGVGEATIPPIITFNQMLGINENDFLRETGATFKLGIEFVDWGGLNERYFHPFGFHGRDLQGVHFHQLYLRERQRRVMPDISSWSMSAVAASRGKYGRAAEGAQSPIKELLYAFHFDAGLYAQFLRRYAERRGVRRMEGRVVDVAQRADGHVEAVTLESGETIGGELFIDCSGFRGLLIEETLAAGYDDWREHLPCDRALAVPGERTAPLHPYTRATARAAGWQWRIPLQHRTGNGLVYASSHLSEDEAAATLLATLD

SEQ ID NO: 86268 - protein, 99 aa, Streptomyces sp.
  REGION 1..99: note = tr|A0A4U0SIZ1|A0A4U0SIZ1_9ACTN Tryptophan 7-halogenase OS=Streptomyces sp. NEAU-C40 OX=2571141; GN = FCI23_22275 PE=4 SV=1
MILTGTHRQVTAPSQIQHGRPIPCLRGMVLARRSTFEFVLRERTEARAGVRTVRGARVVGLITAPDDPCRVIGVHTADGRTWTADLVVDASGRRTDLSD

SEQ ID NO: 86269 - protein, 345 aa, Variovorax sp.
  REGION 1..345: note = tr|A0A520FXC8|A0A520FXC8_9BURK Tryptophan 7-halogenase (Fragment) OS=Variovorax sp. OX=1871043; GN = EOP73_31600 PE=4 SV=1
FGLTGKDHWTAGFQHFWLAAQRRGPARVPHGPYGDYCLELCAALNGRFGHLPRQVINYAYHLDASRYAVYLRGLSEGWGVQRIEGRIATVLQHAGGDIRALKLADGSEVEGDLFIDCTGFRSLLLGQALGVGFEDWSHWLPCDSAVAVQTASVGAPVPYTRSIAHPFGWQWRIPLQQRVGNGLVFSSAHLGDDEAKAFLLGHVQGEALTARRVLKFKPGQREVTWRRNVVAIGLASGFLEPLESTSIHLIQRGITRLMQCFPAGGIQQSDIDEYNRQVRDEIEHIRDFIVLHYHATNRRDAPLWRHCAEMAPPPSLAHRLQLFRDTARVFKAPHELFGENSWVQV

SEQ ID NO: 86270 - protein, 649 aa, Sphingomonas sp.
  REGION 1..649: note = tr|A0A5E7YSQ8|A0A5E7YSQ8_9SPHN Tryptophan halogenase (Modular protein) OS=Sphingomonas sp. EC-SD391 OX=2038398; GN = SPHINGO391_390365 PE=4 SV=1
MATDTGPGATNDQPITTIVVVGGGTAGWLAACLIAARADRGVEQPLSVTLIESPDVATIGVGEGTWPTMRRTLERIGISETDFLLACDGAFKQGSRFDGWRTGAANDSYLHPFTAPVDGDPRDIVVAWAEHGGRFADTVGAQGAICHRDLAPRQRAMPDYAGTLNYAYHLDAGKLAAMLMRHATERLGVRHVRDHVVGIDGTADGDIAAVRTRASGAIAGDLFLDCTGHAALLIEGYYGIGTVDRGGTLFNDRALAVQVPVAADSPIASQTNATAHAAGWIWDIGLPMRRGVGCVYSSAHLSDDAAADTLTRYLRATAPDAALPSFRQLTFRSRHRETFWHRNCLAVGLSAGFLEPLEASAIVLIELSLDALLDNFPSHRGAMDIHSMRFNTLFRYRWDRIVEFLKLHYVLSERDEPYWRDHRDPASIPPRLAELLQLWRHQPPSRADFPMVDEIFPAASYQYVLYGMEFPAPTRGPIATPDRARTQTLLAQVDQRRRMLAAGLPTNRAYLDALRHATRHSHNLPCRKLGASGFLRPLQKPVRHSAAVTPLYGHPTHPSNGFLQFQVTFRISARNAAASPFHPACSSCLRRTGFYAALADRLERVCHATGQDVQDRDPASVRLRPRSRPCWSGLQKPRSAVACGTGSLR

SEQ ID NO: 86271 - protein, 501 aa, Rheinheimera sp.
  REGION 1..501: note = tr|A0A0M0M0H7|A0A0M0M0H7_9GAMM Tryptophan halogenase; OS = Rheinheimera sp. KL1 OX=1635005 GN=WH43_18310 PE=4 SV=1
MNTKAVKNVVILGGGTAGWITASLLVKVLGKAINITLVESDDIGIVGVGEATIPPIINFNAALGLDEKAFIRETQGSIKLGIQFENWGKPGDSYMHAFGAIGKEFPFCNFHHFWLKSKQQGMGFDFWDFSLAYQAARQNNFAKLARIEGVNLPGLSYAYHFDAGLYAQFLRRFCEPLGVKRIEGTVKKVHLDPVNGEVIRLTLASGNEVEGDLFVDCTGLHSLLIDKSLNTGFEDWSHWLPADSALAVPCESVQPITPYTKAIAHPKGWQWRIPLQHRIGNGFVYSSKYCSDDEAKQTLLSNLDGKALAEPRKISFRTGRRLKQWNRNVVSIGLSSGFLEPLESTSIHLIQSGVFRLLKCFPHSGITDAARDEFNRQSKVEFEQIRDFIILHYKLNNRGDSQYWKDYQTMDIPESLRRKIDLFSASGLIFREQDELFAEVAWQQVFIGQGIVPTDTHPLVNALKEEQLQDLLSNLKAVMQLTSQRLGSHADFLQSCHLKDM

SEQ ID NO: 86272 - protein, 532 aa, Serratia odorifera
  REGION 1..532: note = tr|I1V4W6|I1V4W6_SEROD Tryptophan halogenase PrnA; OS = Serratia odorifera OX=618 GN=prnA PE=4 SV=1
MSKPIKNIVIVGGGTAGWMSASYLVRALQQQANITLIESEAIPRIGVGEATIPSLQKVFFDFLGIPEREWMPQVNGAFKAGIKFVNWRESPDRSRNDYFYHLFGNVPNCDGVPLTHYWLRKREQGFQQSMAYACYPQPGALDGNLAPCLHDGSRQMSHAWHFDAHLVADFLKRWAVDRGVNRVVDEVVEVKLNELGFISGLLTKEGRQLEADLFIDCSGMRGLLINQALKEPFIDMSDYLLCDSAVATAVPNDDAQVGVEPYTSSIAMNAGWTWKIPMLGRFGSGYVFSSKFTSRDQATTDFLNLWGLSENQPLNQIKFRVGRNKRAWVNNCVSIGLASCFLEPLESTGIYFIYAALYQLVKHFPDTAFDPRLADAFNTEIVYMFDDCRDFVQAHYFTSSREDTAFWLANRHELRLSDAIQEKIERYKAGLPLTTTSFDDATYYDTFDFEFKNFWLNGNYYCIFAGLDMLPDRSLPLLQLRPESIEKAEAMFAHIQREAERLRAGLPTNYDYLRSLHQSNTGQSRPASPETL

SEQ ID NO: 86273 - protein, 505 aa, Xanthomonas translucens
  REGION 1..505: note = tr|A0A5C1X350|A0A5C1X350_XANCT Tryptophan 7-halogenase OS=Xanthomonas translucens pv. undulosa; OX = 487909 GN=F0H33_19720 PE=4 SV=1
MIAAPLRNLVVVGGGTAGWMAAAALARVLGPDYRITLIESEQIGIVGVGEATVPHIKAFNNLLGINEAEFVRQTQGSFKLGIEFVDWQRPGTTYIHGFGTEIGHSLGLLPFQQYWFKQALAGKAKPLGAYTLNTVAARRGKFMTSASDAPPNSPLGNIAYAYHFDASLYAAFLRRFSEQRGVTRREGIVEQVQLHPESGHVLSVRLAPGDTIAGDLFIDCSGFRGLLIEQALHTGYHDFTHWLPCDRALAVPCAKVGPPTPYTRATARAAGWQWRIPLQHRTGNGYVYSSAHISDDEAAATLLANLDGAALADPRPLRFVTGRRKQVWNRNVVALGLASGFMEPLESTSIHLIQSGISKLLELFPREGISPVLVQRYNDRIAFEFDRIRDFLVLHYTATERDDSDFWRQCRAMAITPELQATLDLFGDSGRFYRNGDEMFAEISWVQVMVGQGILPRAYHPLVDQVPAADIERFVASIEQTIGHCVDAMPPHQAFIDRYCAAAPR

SEQ ID NO: 86274 - protein, 512 aa, Colwellia sp.
  REGION 1..512: note = tr|A0A168PG42|A0A168PG42_9GAMM Tryptophan halogenase, putative OS=Colwellia sp. C1 OX=1737566 PE=4; SV = 1
MKTRVIIVGGGTAGWLTAGIIAARHCSKNTSAQDTDVILVESPEVKNLGVGEGTWPTMRDTLRQIGISERTFLSCCDASFKQASKFVGWSNGQNEHYYHPFTAPSGYGAVSMADHWSATNKDIDFESWACAQGAICDKNLAPKLPQMPEYAFSLNYGYHLNAGKFVKILHQHCVEKLGVKYIQGHVEQIIPAENDDISEIVLSNGEHIAGDLFIDCSGFTALLIDKHYQIPFKSKQHILFNDTALALQVEHATDDVPIASCTVATAQESGWIWDISLQNRRGIGHVFSSDFTSVERAEEALLKYVENDPLLASQQLTPRTIKFNPGHRETFWHKNCVAIGVSAGFVEPLEATALVLIEKSAEWISEQLPRDRSAMSILAKRFNTLTLQRWQEIIDFLKLHYILSNRKDSEYWREHQQANSIPESLQEALTLWRTQAPGVYETNQRFELFSSASKQYVLYGMGFNTEQKKSDQLCQKEASLIKRLRNETLHSTEKLLSISPTNRQFLSRMLEK

SEQ ID NO: 86275 - protein, 505 aa, Kutzneria sp.
  REGION 1..505: note = tr|A8CF74|A8CF74_9PSEU KtzR OS=Kutzneria sp. 744; OX = 345341 GN=ktzR PE=4 SV=1
MTAAYLKTAFGDRLSITVVESSRIGTIGVGEATFSDIQHFFQFLNLREQDWMPACNATYKLGIRFENWRHVGHHFYQPFEQIRPVYGFPLTDWWLHDAPTDRFDTDCFVMPNLCEAGRSPRHLDGTLADEDFVEEGDELANRTMSEHQGKSQFPYAYHFEAALLAKFLTGYAVDRGVEHVVDDVLDVRLDQRGWIEHVVTAEHGEIHGDLFVDCTGFRGLLLNKALGVPFVSYQDTLPNDSAVALQVPLDMQRRGIVPNTTATAREAGWIWTIPLFGRVGTGYVYAKDYLSPEEAERTLREFVGPAAADVEANHIRMRIGRSQESWRNNCVAIGLSSGFVEPLESTGIFFIHHAIEQLVKHFPAADWNPKSRDMYNSAVAHVMDGIREFLVIHYRGAARADNQYWRDTKTRPLPDGLAERIECWQTQLPDTETIYPYYHGLPPYSYMCILMGGGAIRTPASAALALTDQGAAQKEFAAVRDRAAQLRDTLPSHYEYLARMRGLDV

SEQ ID NO: 86276 - protein, 535 aa, Jahnella sp.
  REGION 1..535: note = tr|V5UVQ7|V5UVQ7_9DELT Tryptophan halogenase; OS = Jahnella sp. MSr9139 OX=1434086 GN=mscL PE=4 SV=1
MLTTEDYEFDQMKALFAPPGFTRARRTTTVRSVGVIGGGTAGYLTALALKRVFPDLKVTVVASSKIPVIGVGEATTPLLPKLLHSFLGLDVVEFYEKVRPTWKLGIKFVWGKPGDYYFHYPFEPGDLVESLLYEGHINGANFQGRLMDMDKTPVLELPDGTWRSCLHYVPYAYHLENRRFVAYLAEKLPEFGVETLDRTVIDAEVEGEDRIGTLICEDGDRLKYDLYIDCTGFRALLLEKLGAKFESYGTSLVTNTALTARVPHHGHIKPYTTARTMKNGWCWVIPHDDIDHLGYVHSSDFCSLEEAERELQEAFPGMQKHIGLVRFRSGRHDHFWRGNVVAIGNSYAFVEPLESTAIHVITEEINVLLNNFPVTLEERHTPRYVNRRVNHRWDQLRGFLAIHYKFNGRLDTDFWKFCRNEVDLADGQQYVDVFREMAPMGARIHRLWERPECFDDAGYDTLLLGQGVETRLMKPRYTREQWRARYEKGNAILATAKTHAQALDFFAKNPDELRRSVDLRSASGMSFPGLLEDIM

SEQ ID NO: 86277 - protein, 534 aa, Sphingomonas sp.
  REGION 1..534: note = tr|A0A520DQR4|A0A520DQR4_SPHSX Tryptophan 7-halogenase OS=Sphingomonas sp. OX=28214 GN=EOP65_02105; PE = 4 SV=1
MNEHTIRSVVILGGGTAGWMAAAAMARFLNNGVTRVTLIESEEIGTVGVGEATIPPLRTFNSMLGIDEHEFIRETGGTYKLGIEFVGWGDIGERYFHPFGAHGHDLGGVHFHQLYLRERQRRVLPDISAWSMSAVAAQAGKFAPPAPQAQSAVKDLFYAYHFDAVRYAGFLRRFAERNGVQRVEGKVVAVAQRPEDGHVTALRLDDGQVIGGDLFIDCSGFRGVLIEEALETGYEDWRHWLPCDRAVAVPSAYSGDPDPFTRATARGSGWQWRIPLQQRMGNGLVYCSDFLQPDAAERELLANLEGAPLAAPRHLSFTTGRRKLAWNRNVVALGLASGFIEPLESTSIHLVQSGIARLIALFPDRRFDPVERDEYNAQMHELYADVRDFVILHYKATRRGDTPFWDRCRTMDIPDSLARKIELFRGKGRVFRENRELFATTSWVSVCLGQDIVPQDYEPAVDALDEERVAGALEEMRREYLDIAGRLPSHGDFLRHIAGQPSAPATAPAAPAATAGPTFSFASESPFDFSADPL

SEQ ID NO: 86278 - protein, 150 aa, Sphingomonas sp.
  REGION 1..150: note = tr|A0A520JGR4|A0A520JGR4_SPHSX Tryptophan halogenase (Fragment) OS=Sphingomonas sp. OX=28214 GN=EOP67_19490; PE = 4 SV=1
ISKLLALFPDQGFSPVEIDTYNRLAETQFDQVRDFLVLHYHATRRTDSPFWREAGARAIPDSLAEKIALWRRRGRLFRWEDDLFAEASWVAVLLGQGIVPEGWDRLADTVDARDVDARFDRLRVMFADAAARMPHHEDYLARTSPARVRA

SEQ ID NO: 86279 - protein, 464 aa, Sphingomonas sp.
  REGION 1..464: note = tr|A0A520IMI6|A0A520IMI6_SPHSX Tryptophan 7-halogenase (Fragment) OS=Sphingomonas sp. OX=28214; GN = EOP67_47705 PE=4 SV=1
MTACLIAHRWRDRGGRVTLVESPEIGIVGVGEGSTPQLKHFFDTLGIAEAEWMPACDATYKLGIGFEGWSDREGYDQYFHPFPTELDGHTAPQFFYNARARRTGRNVDAHPDQFLLPARLAAQNRAPQPAANFPFEVSYGYHFDAYKVGAFLATHATETLGVVHLQRRIASVETASTGEITALTDTGSEHIAGDFFVDASGFRSTIFSALDVPFVSYADVLFNDRAVVMPTAHTPGAPIPSQTRATALSAGWAWHIPLTSRNGNGYVYSSRHLTEAQAEAELRAHIGVDTGEARHLTMRVGRVRDSWSHNALAVGLAQGFLEPLEATALHLVIATVEAFLDMIDQAGATEATRTAFNTRIAARYDGVRDYIVAHYRLNQRHDDPTGYWAEARGVDALSDDLKMLMSTWFTGADMVAAIDRAGLGRYYSAISWHCLFAGYGTFPDAARLIPPGADIDPIDLPKID

SEQ ID NO: 86280 - protein, 172 aa, Sphingomonas sp.
  REGION 1..172: note = tr|A0A520JJX3|A0A520JJX3_SPHSX Tryptophan halogenase (Fragment) OS=Sphingomonas sp. OX=28214 GN=EOP67_13540; PE = 4 SV=1
MTAAALSRLVPSGVSVTLVESEEIGTVGVGEATIPPLLDFNRMLGIDEDAFVRATGATFKLGIEFRDWARLGDTYLHPFGTHGRDIGGVSFHQLWLRQAALGNPDPGPIGDYCLSAVAARRGRFTRPSANPESVLSTLFYAFHFDAALYAKFLRDMAEQDGVVRVEGRVVAV

SEQ ID NO: 86281 - protein, 140 aa, Sphingomonas sp.
  REGION 1..140: note = tr|A0A520D8C2|A0A520D8C2_SPHSX Tryptophan halogenase (Fragment) OS=Sphingomonas sp. OX=28214 GN=EOP65_12445; PE = 4 SV=1
FPDRDCDPALAARFNTTFARDMDGIKDFLILHYHATGRDEPLWRHCQTMRLPDGLHERIGQYRRSGRLILDADELFREASWLAVLDGQGIRAQSYNPLADAIDPAANRAQVQQIADVIARAAPTLPTHDAVLAQMIGTPS

SEQ ID NO: 86282 - protein, 201 aa, Sphingomonas sp.
  REGION 1..201: note = tr|A0A520I0Y1|A0A520I0Y1_SPHSX Tryptophan halogenase (Fragment) OS=Sphingomonas sp. OX=28214 GN=EOP68_01115; PE = 4 SV=1
MANGERVRRIVVVGGGTAGWLSACLLAARAGDVAGSPIEVTLVESPDVPTIGVGEGTWPTMRRTLAAIGLAEADFLLACDASFKQGSRFDGWRTGEDRYYHPFVPPFAAEPRDLVAAWDGRRPFAAAVSPQGAACDADLAPRQRAMPDYAGALNYAYHLDAGKFAALLARHGVATLGIRHVRDHVVAVAQSDDGDVVAVET

SEQ ID NO: 86283 - protein, 492 aa, Sphingomonas sp.
  REGION 1..492: note = tr|A0A520IWC3|A0A520IWC3_SPHSX Tryptophan 7-halogenase OS=Sphingomonas sp. OX=28214 GN=EOP67_41250; PE = 4 SV=1
MAAQAKRTGSGVTVKLVESDRIPTVGVGEGTWPTMRNTLAKIGISETDFIRSCDASLKQGARFVGWTDGLPGDAYYHPLNPPAGASEIDLAPHWLGRSDGSGASFADCVDYQAALCDAGLAPKTITAPEYAGHANYAYHLDAGKFATMLRDHATASLGVEHVIGDVTRVNQSDSGDLLDVELHVGRRIAGDLFVDCTGFAALLIGGVYGVPFKSCRDVLFADRAIAMQVPYDREDDPIACHTISTAQDAGWIWDIGLWTRRGVGHVYSSAHTSDDAAEAALRRYVGPAADALSVRTINIDGGYRERFWQNNCVAVGLSAGFIEPLEASALMLIETSMDAIADRLPRTRAAMDMVARQFNDTFRHHWLRIVEFLKLHYVITHRTDTDFWRDNAAAASMPDGLQERLDLWRHHSPAPQDFSHAREVFSWPSYQYVLHGMRFASHYPPVGAAASEAAIATGLIARNDRLRADLIARAPRHRDLLRSVREYGLQRV

SEQ ID NO: 86284 - protein, 310 aa, Sphingomonas sp.
  REGION 1..310: note = tr|A0A520JAT2|A0A520JAT2_SPHSX Tryptophan 7-halogenase (Fragment) OS=Sphingomonas sp. OX=28214; GN = EOP67_30555 PE=4 SV=1
METATRQRVVVVGGGTSGWMTAAALAKLLPDRCDVHLIESEAIGIIGVGEATLPHIRAFNERLGIVEADFMATTRATFKLGIEFRDWGRIGDSYIHPFGTFGRGTGDVQFHHYYTRLLHAGIELPPIEAFSMACTLARTNRFAQPSTDARQIASTFGYAYQFDAVAFAPYLRRFAEALGARRSEGRIVDVERDGESGDVNAVVLEDGRRIKGDLFVDCSGFAALLIGKALGEPFQDWSRWLPADRAVALPCRTETAVTPFTSAVAMPSGWRWRIPLQHRTGNGYVFASGFVSEDTAADALTAAVEGTPLA

SEQ ID NO: 86285 - protein, 506 aa, Sphingomonas sp.
  REGION 1..506: note = tr|A0A520JKZ0|A0A520JKZ0_SPHSX Tryptophan 7-halogenase OS=Sphingomonas sp. OX=28214 GN=EOP67_11570; PE = 4 SV=1
MTDPNRGPIRKVVIVGGGTAGWMAAAAAARYLDDGQRQIVLIESDAIGTVGVGEATIPPILGFNALLGIDERDFLRATGATFKLGIEFVGWDTGDDRYMHAFGGHGRDIQGLAFHQLWLKLRDRPGIGALDAYSPSAVAAYLHKFGRPSGQQPLAYAYHFDAGLYAAFLRRHAEAGGVTRIEGRIIGADRDPDTGHVSAVRLDDGRSVDGDLFIDCSGFRSLLLGETMSVPFEDWSHWLPCDRAVAVATEPSAPLLPYTRATARSAGWQWRIPLQHRTGNGHVYASEHMSDDEASALLLANLDSKPTADPRQLRFKAGRRTKMWEGNVVALGLAGGFLEPLESTSIHLIQTGISKLFALFPDRSFSDVERDEYNRLMGDAYTSVRDFIILHYHATRRDDSTFWRRVRTMPIPDSLTRKLALFREKGRIFRYDDELFGIPSWVQVLLGQHVTPVGYDPIVDALDADRVADALREMRAATLRTAKALPDHAEFVARHAPFDRHQGFAK

SEQ ID NO: 86286 - protein, 504 aa, Sphingomonas sp.
  REGION 1..504: note = tr|A0A520DQX9|A0A520DQX9_SPHSX Tryptophan 7-halogenase OS=Sphingomonas sp. OX=28214 GN=EOP65_02115; PE = 4 SV=1
MERAERQRVVVVGGGTSGWMAATALAKLLPSRCTVELVESEAIGIIGVGEATLPHIRAFNERLGIVEAEFMAATRATFKLGIEFRDWGRIGDSYIHPFGTFGRGSGEVQFHHYYTRLLRDGVPLPPIESYSMACSLARANRFGQPARDPQQIASTFGYAYQFDAVAFAPYLRRIAEGLGARRTEGRIVAAERDSQSGDVTALVLEDGRRVEGDLFVDCSGFVALLIGKELAEPFEDWSRWLPADRAVAIPCRTATAVTPYTSAIAMPSGWRWRIPLQHRTGNGYVFASDFLSESAATDALLGAVEGTPLADPRILRFKAGRRARSWVNNVVAVGLASGFLEPLESTSLYLVQQAITALIELFPEKRIAPVDRDEFNRLINMEYDRVRDFLILHYHATERDDSPFWTYVRTMPIPDSLAEKMALFKRRGRVVKYREGAFLDASWVSVYLGQRVVPTGADPRAAAPSTDSLVAGLDRMRGEIAAAVGAMPAHAAFLAGYCPMPAAT

SEQ ID NO: 86287 - protein, 500 aa, Sphingomonas sp.
  REGION 1..500: note = tr|A0A520D577|A0A520D577_SPHSX Tryptophan 7-halogenase OS=Sphingomonas sp. OX=28214 GN=EOP65_15260; PE = 4 SV=1
METRRIRRVVILGGGTAGWMTAAALSHSFGAAVTVTLLESEEIGTVGVGEATIPTIHWFNALIGLDEAEFLRATKATFKLGIAFVDWTAPGHRYFHPFGQYGAALPGVAFHHRWLKAAADGLDLPLGALSLAERLATENRFARPSGDARSILSSLGYAYHFDAGLYAAYLRRVSEARGVVRVEGRLGSVERDADTGFVGALTTARGERLEGDLFIDCSGFRALLIDGVVGEPFEDWSHWLPCDRAVAVPCARVATTTPYTRSTARAAGWQWRIPLQHRTGNGYVYASAQCSDDAAIATLLANLDGEALAEPRLLRFTAGMRRRPWRDNVVAIGLSSGFLEPLESTSIHLIQSGIAKLLTLFPDRDCDPALAARFNTTFARDMDGIKDFLILHYHATGRDEPLWRHCQTMRLPDGLHERIGQYRKSGRLILDADELFREASWLAVLDGQGIRAQGYNPLADAIDPAANRAQVQQIADVIARAAPTLPTHDAVLAQMIGTPS

SEQ ID NO: 86288 - protein, 424 aa, Sphingomonas sp.
  REGION 1..424: note = tr|A0A520DCZ1|A0A520DCZ1_SPHSX Tryptophan 7-halogenase (Fragment) OS=Sphingomonas sp. OX=28214; GN = EOP65_09830 PE=4 SV=1
MTATPIGRVVIVGGGTAGWMAAAAASRFLNDGQRTITLVESDAIGTVGVGEATIPPIRGFNARLGIDEAEFLRATGGTPKLGIEFVNWGASGDRYMHPFGTPGHDIEGLNFHQLWLKLRGEPEIGDFEGYAMAAVAARAGRFAPPSPDPRSPLSGVDYAYHFDAGLYAAFLRRRAEEQGTIRVEGRITGVEQDARGHVTAVRLEGDRRIAGDLFLDCSGFRSLLLGETMGVGFEDWSHWLPCDRAIAVPTERTQPLLPYTRATAHDSGWQWRIPLQHRTGNGHVYASAFTDDDTAERVLLANLDAAPTAAPRRLSFTAGRRRQSWAGNVVALGLAGGFLEPLESTSIHLIQEGISKLFALFPDARFSPVERDEYNRLMGNHYTAVRDFIILHYAATRRDDTPFWRHVRTMDLPETLARKIALFR

SEQ ID NO: 86289 - protein, 198 aa, Streptomyces alboflavus
  REGION 1..198: note = tr|A0A1Z1WKW3|A0A1Z1WKW3_9ACTN Tryptophan 5-halogenase OS=Streptomyces alboflavus OX=67267 GN=prnA; PE = 4 SV=1
MRIGRSERSWVNNCVAIGLSSGFVEPLESTGIFFIQNAIEQLVKHFPAAGDDEGLRAAYNRQVGNVMDGVREFLVLHYYAAERADNQYWKDTKTRPMPDSLAERIEQWKTKLPDSETIFPNYHGFESYSYIAMLLGLGGIKTAPTAALGLFDYTSAKAEFALVKDQAKQEVDRLPSQYEYFAHLRRLTPEERAQPLVA

SEQ ID NO: 86290 - protein, 508 aa, Brevundimonas sp.
  REGION 1..508: note = tr|A0A514BZT0|A0A514BZT0_9CAUL Tryptophan 7-halogenase OS=Brevundimonas sp. M20 OX=2591463; GN = FKQ52_04820 PE=4 SV=1
MGDTDPRITSVLIVGGGTAGWMAAAALSRAFGDLPEPGRPVIRLVESDAIGTVGVGEATIPPIRQFNRSIGLDEADFMASTGATPKLGIAFHDWMGSGSRYFHGFGDHGPDVQGQPYRQHLFRLKAEGRLSSLDPWSVPAVMAESGRFGPPVSDPRSILSAYSYAYHFDAGLFAKRLSALAQTAGVARVEGRISDVEAADGRVQAIRLEDGRRLEADLFIDCSGFRGLLIEGALQAGYEDWSRWLPCDRAIALPTSASRPPDLYTTARAASAGWCWRIPLQHRVGNGYVYSSAFINDDDALDELVNGLEAPAEAEPNRLRFVTGRRRAAWKGNVVALGLASGFLEPLESTSINLIQTGIGRLLELFPDREFDPALIAEYNRRTELEWIGVRDFIIAHYHLAGRTEGALWAHCRETAPPDSLAERLELFRARGEIDPSHYDSFREASWTSVLTGLDVWPRKVAPQVSALDLDVVERQALKISELIARATATLPDRLEFLRGVQMKTEAR

SEQ ID NO: 86291 - protein, 474 aa, Mitsuaria sp.
  REGION 1..474: note = tr|A0A5C6YUC9|A0A5C6YUC9_9BURK Tryptophan 7-halogenase (Fragment) OS=Mitsuaria sp. TWR114 OX=2601731; GN = FUT87_25225 PE=4 SV=1
MVQRIVIVGGGAAGWMTAAALASSRQGRWSVTLVESEEIGIIGVGEATFPSIRAFNERIGIDEAEFLHATHGSYKLGIEFRDWHSIGDRYFHTFGNFGSLLGPYMLWGQYRRAADASLGELGEQCLPTAMAMQGRFVVPDEDGGAPYKYAYHFDAMLYAAFLREWSMRRGARRIEGRIVEVLRREDGDVERLRLADGREVEGDLFIDCSGFASLLLGRALKEPFVDFSHWLPVDGAWACPCERVGEALTPYTRATALEGGWAWRIPLQSRTGHGHVFSSRYIDPDAARAQLMAQLDGKPLAEPRLLRFSTGHRERFWVRNVVALGLSSGFLEPLESTSIFLIQTNLAHLMTLLEAKAPIDEAAIDAFNARGTREFRRIRDFILLHYCLTARRDSALWRDMATMDLPETLAYKIELWRHHGVLHQQQDEGFDETSWLAIHAGMRHWPQRTDPVLEELPLDHARDILRQRREAIAR

SEQ ID NO: 86292 - protein, 515 aa, Streptomyces viridochromogenes
  REGION 1..515: note = tr|L8NY63|L8NY63_STRVR Putative Tryptophan halogenase PrnA OS=Streptomyces viridochromogenes Tue57; OX = 1160705 GN=STVIR_8786 PE=4 SV=1
MENVVIVGGGTAGWMTAAYMTAAFGDRVKITLVESADVGTIGVGEATFSDIRHFFEFLGLAERDWMPACNATYKLAVRFENWREPGHHFYHPFEQLGSVKGFPLTDWWLRHPTTKRFDVDCFVMANLCDAGRSPRYADGRLLEQEFVENEDLPTTIADYQGAQFPYAYHFEAHLLAKFLTKYATQRGVRHIVDNVQDVGLDERGWISHVQTAEHGRLEGDLFVDCTGFRALLLNKALGEPFVSYQDTLPNDSAVALQVPMDMDKDPIRPCTTATAQDAGWIWTIPLISRLGTGYVYSRDYLDPEEAERTLREFVGPAAADVPANHIKMRIGRSRRGWVNNCVAIGLSSGFVEPLESTGIFFIHYAIEQLVKYYPAADWDVSLREQYNNSLMNVMDGVREFLVLHYRGAKRADNQYWRDTNTRKIPDSLAERLEQWESKVPDAGTVYPRYHGLPPYSYNCILLGTGGIDVRPSPALDLIDEKDALAEFQRIKDKARTLVASLPTQNEYFRKMRDGA

SEQ ID NO: 86293 - protein, 419 aa, Actinoplanes sp.
  REGION 1..419: note = tr|G8SM58|G8SM58_ACTS5 Tryptophan halogenase; OS = Actinoplanes sp. (strain ATCC 31044 / CBS 674.73 / SE50/110) OX=134676 GN=ACPL_6152 PE=4 SV=1
MSSQLFGVPDEFDVIVIGGGPAGATTAGLLAQRGHSVLVLDRERFPRYHVGESLIPAFMRPMKELGLTERMDARGFERKYGGTLIWGNEQVPWQFSFIEGGYEYAYHTRRADLDALILDRARELGACVVEDATVRETIDVDGRVTGVRYALRGGDGLVEARARLVVDASGQARVIGRRQTGVKWHDELRNVAVWTYFDNCERLPGDEYTNILIEGLDEGWFWGIPIDKGTISVGYVTRASMAGEGDQKLEQIFREQVERTTKLKKMLAPGRRSAGFRTARDWSYHSDRFYGDGWVLVGDAAAFVDPLFSTGVALATLAGSTLAKIVDQIIEHPEIEEKALDRYATAYSNFFDEIRTFVERFYDRTKYKEFYHSLAQEMVDPEQKNKPSQDFVTLISGMSGKHAMFHIDLSDLIAADDGR

SEQ ID NO: 86294 - protein, 526 aa, Colwellia psychrerythraea
  REGION 1..526: note = tr|A0A099KCC8|A0A099KCC8_COLPS Tryptophan halogenase; OS = Colwellia psychrerythraea OX=28229 GN=ND2E_4230 PE=4; SV = 1
MTDIHKDDLVKEVVIIGGGTAGWLTACHLAKKHGSNTPQGLRVTLIESPNIPTIGVGEGTVPSILESLRYFGISETDIIRECDATFKQSIKFVNWMKPKGNSHNNYYHHPFDYIDSNQFDLTPYWLNGQFEGHSYTDTIGIQSYVSDLHLAPKLMTHEEYAGINGYAYHLDAAKFSQLLTRHAVEKLGVKHVLAEVKDIRLTDCGAIDSVVTDNQGEFFADLFVDCTGFSSLLLGQTLGVNFISKNDVLFADHALAIQVPYTDPNQTIPSYTISTAQEAGWIWDIGLSERRGTGYVYSEKYSSHARAEQVFRDYLRQSIGDKVDELPCRRIEMNVGYREKFWVKNCVAIGLSQGFVEPLEATGLLIFDDTAKMLAEQLPSKMSTMPIIAERFNKIGRYQWDRVIDFIKLHYYLSDRDDAPFWRDNRSQESTPQKLLDNLALWRERPPSDYDFITKQEVFYRTNYLYVLYGMAFNTDISAIAYRYTEQGKAEQKHSLILQQKAKVQGMLLPHRELLQRIKQYGLQKI

SEQ ID NO: 86295 - protein, 492 aa, Colwellia psychrerythraea
  REGION 1..492: note = tr|A0A099KQX6|A0A099KQX6_COLPS Tryptophan halogenase; OS = Colwellia psychrerythraea OX=28229 GN=ND2E_2590 PE=4; SV = 1
MNTDKIKKVVIAGGGTAGWMAAAAISKLLGKNLEITLVESDEIATVGVGEATIPTLQYFHQLLNIKEADFLKATHGTFKLGISFENWRDKNEDYIHAFGTTGKDCWAAGFQHFWLKGQQKGIAGEYGDYCLEKAAASAEKFAQLPNNGLNYAYHIDATLYGQFLRKMSEQHGTKRIEGKIDKVNLHPESGYIDSLTLASGKVIDGDLFLDCTGQRALLIEQALHTGFEDWSHWLPCDSAIAVQTKSVDNPIPYTRSIAHDFGWQWKIPLQHRVGNGIVFSSKFVTDDEAKSTLMNNLVGEAITEPRVIKFRTGTRRQHWNKNCVAVGLSSGFLEPLESTSIHLIQQAIVRLMRMFPHTGIQQSDIDEFNKQTKFDTASIRDFIILHYSVTNRQNSNFWRHCRNMPIPETLANKIKLFKETGRFFRENNELFDDSWMQVMIGQGLLPRNYHPIVDNMSDDELKRFLEHIKANVDGTVNQLPNHATFIEQFCHA

SEQ ID NO: 86296 - protein, 480 aa, unidentified
  source 1..480: note = Planctomycetes bacterium
  REGION 1..480: note = tr|A0A5C5WX11|A0A5C5WX11_9BACT Tryptophan halogenase; OS = Planctomycetes bacterium Pla22 OX=2527999; GN = Pla22_24320 PE=4 SV=1
MNPSHVAIIGSGFSGSLLGWILASQGVQVSLIDAQTHPRFAIGESSTPIADTLLRRLGETYQLKPLVDLSTYGSWKKTHPKITCGKKRGFSYYHHEAGQPFAEDHLGKRSLLVAASQSDSKADTHWYRSEVDEYFFKQAILSGVQPYSATSIVDIASVGDQCRLLCGGNYTGELIADYVIDATGRAAITAKLLGQPNLRDQLKTQTATSFAHYRGVRPWRDYLQAHGFDTSNDPFNPDDAAQHHLLGNTWTWMLRFDNDITSIGFCSPRGQVNDFASTSAYHWMMQDAVQVYPDDQSLIPSGQSLITEPWIQSYHEPIVADRVWMMPTAAITMDPLHSTGIAHGLAGVERLATMLLNPDGNAPARYAEILHQEVSLLDRLISTAYTVANDPARFNAACMVYFAAAITCEEQLKAGQNPSHLYNAGEDAFRTAVRNACGIISDLGEPRFESLVRTEIAPWNTAGLMSSGHQNRYAYTATKG

SEQ ID NO: 86297 - protein, 496 aa, Colwellia psychrerythraea
  REGION 1..496: note = tr|A0A099K9W2|A0A099K9W2_COLPS Tryptophan halogenase; OS = Colwellia psychrerythraea OX=28229 GN=ND2E_0467 PE=4; SV = 1
MNNPIKKVVVLGGGTSGWISAALLKKILGSSIQLELVESDDIGTIGVGEATIPPIRHLNNVLGINEAEFLRETKATIKLGINFEDWKNRGHSYLHSFGAAGKSLAFCHFHHLLKRANQLEDGSHLWQYDLNYLCAKAGKFAQIKSKDPIIELPYAYHFDAGLYAKYLRKFSEKLGVIRTEGLVEHVEQCPTSGHITSLKLKNGQTVNGDLFIDCSGFRGLLIQEKLRTGYEDWSHLLQCDRAIAVPSERLDKTLPYTRSIAHSAGWQWRIPLQHRNGNGLVYSSSHCSDQQAMDTLMGNLDSKAIADPKVIRFQTGRRYQQWNKNVIAIGLSSGFLEPLESTSIHLVQSAVVRLVHLFPHLGINSSLVDEFNKQSATEFEQIRDFLVLHYHATERTDSDFWQDMCQMKIPDSLAHKIEIFKQSGRLFREQNDLFTDSSWLQVMLGQGIIPQDYHPIADTMSDEKLTEMLRKVKEIKQAPIDKLPSHDEFLTMYCRQ

SEQ ID NO: 86298 - protein, 520 aa, Streptomyces sp.
  REGION 1..520: note = tr|A0A429JN96|A0A429JN96_9ACTN Tryptophan halogenase; OS = Streptomyces sp. WAC 06725 OX=2203209 GN=DMH15_07360; PE = 4 SV=1
MLTNVVIVGGGTSGWMSASYLKAAFGDRLSVTVLESKRIKTIGVGEATFSTVRHFFDYLGLPEHVWMPKCNATYKLGIRFENWHRKGSYFYHPFERLRVVDGFPLTDWWLHRKPGNSERFDQDVFLMSAICDAERSPRYMDGTLFEQDFKEQTDPKDRKPERSTLTEQDTQFPYAYQFDASLLADYLCAYSTERGVRHIEDDVVEVARDDRGWIGHLRTREHGDVTADLFIDCTGFKGLLLNEALEEPVISFQDTLPNDRAVALRVPVDMEKRGLRPCTTATAQDAGWIWTIPLFGRIGTGYVYASDYTTPEEAERTLREFVGPDAEDVEANHIRMRIGRSRNAWVNNCVAVGLSSGFVEPLESTGIFFIQQGIEQLVKHFPGADWNPQLRDSYNRAIGNTIDGVREFLVMHYRGAGRNDNQYWKDAKTRALPDGLAERLDMWRSKLPTTETIFPKYHGFEPYSYHSMLLGLGGVDLKAPPALALMDDSAAQAEFKLLRAQSQELAKRLPSQYEYLAQMH

SEQ ID NO: 86299 - protein, 507 aa, Colwellia psychrerythraea
  REGION 1..507: note = tr|A0A099KJ52|A0A099KJ52_COLPS Tryptophan halogenase; OS = Colwellia psychrerythraea OX=28229 GN=GAB14E_3679 PE=4; SV = 1
MKKIVVVGGGTAGWLAANHLGKKFKHNDAITVTLIESPDIAPIGVGEGTVPNIRKTLSSFGISETEFIRECDVTFKQSIKFVNWMDKKKHGSDNFFHHLFDAPSKFGEDLTAHWLKFGQDKIYADMVSPQHSACEHKKAPKSITTPEYEGTLGYAYHLNAAKFAHLLSKNAVARFGVCHIKANVINVELSDSGAIAALNTKELGKLEYDFYLDCTGFESLLSGQALNIPFVDKSKELLVNSALVVQVPTKESDEIPPYTVATAHQAGWIWDIALTNRRGVGFVYSNNHMSDEEASRKLDYYLKGNPTGLSYRKLPMKVGHREKFWHKNCVSLGLAQGFLEPLEATSILLTDFAASFLVDRFPESEEKMAVLEQRFNHVMGYAWNRVVDFIKLHYCISDREDSQFWLDNKKADTIPDTLKARLDLWQQFSPQKEDFFSKFEVFDYDNYLYLLYGMNYKTKLSPLSTQYHDKAKAHAEGIKAISAKLNQQLPNHRELINKIKRYGLQAV

SEQ ID NO: 86300 - protein, 515 aa, Streptomyces sp.
  REGION 1..515: note = tr|A0A2S4ZGF6|A0A2S4ZGF6_9ACTN Tryptophan halogenase; OS = Streptomyces sp. Ru62 OX=2080745 GN=C3492_29755 PE=4; SV = 1
MTQSVVILGGGTAGWMTASYLRAAFADRVDITVVESRRIGTIGVGEATFSTVRHFFDYLGLSEADWMPECNGTYKLAVRLENWRAPGTYFYHPFERMRVVDGVPLTDWWQKVGGTGRFDRDCFLIPWLCDAKASPRYLDHRLFEQDFDEDPDRPLYRTTLAEQNTQFPYAYHFDASLLADYLCRHAVGRGVHRIIDDVVDVRLDERGWIDRLVTREHGDLTADLYVDCSGFRSRLLGDALGEPFISFQDSLPNDRAVALRVPVDTAVRGIRPCTTATAQDAGWIWTIPLYDRVGTGYVYAADYCEPEEAERVLRDFVGPAAADLEANHIRMRIGRSHRAWVNNCVGIGLSAGFVEPLQSTGIFLIQHAIEQLVRYFPGTDRDPVLRDTYNLSTARAIEGVREFLILHYRGAARVDNDYWRDAKKRAVPEDMAVRMEQWQSKLPDNDTTYPYYHAFEPYSYVCMALGLGGIPLRHPPALDLFDTRAARAELARVREQARKLVDTLPSQVEYLSGLR

SEQ ID NO: 86301 - protein, 523 aa, Colwellia psychrerythraea
  REGION 1..523: note = tr|A0A099KRL5|A0A099KRL5_COLPS Tryptophan halogenase; OS = Colwellia psychrerythraea OX=28229 GN=ND2E_2587 PE=4; SV = 1
MNKALKNIVIVGGGTAGWLTAAIIAAQHNSHHPDGVNITLIESPDIKPIGVGEGTWPTMRNSLEKIGISEDDFFRCTDASFKQGSQFIGWNNGQVNDSYYHPFIAPHGFGQTNISANWQQFNSHIPFAHAISFQPYLCDHGCAPKQPQTPEYAGVANYGYHLNAGKFAALLQQHCIAKLGIKHISDNVIKVNGEVKENITSVTTKNNGDISAHLFIDCSGSNALLLGQHYQVPFINKKDILFNDTALAVQVPYSKPDAPIASHTISTAQKAGWIWDIGLPTRRGVGYVYASDYLTDSEAETTLRDYLKQDLPAEAVKEAVIRKISFTPGHRENFWHKNCVAVGMAAGFLEPLEASALALVELSANMIAKELPANMSIIEITAKRFNQRFHYRWQRIIEFLKLHYLLSKRTDSPYWLDNQSATSVPQRLQELIKLWRFQAPSYNDFSEIEEIFPAASYQYILYGMGFITEKRTTSNLYDNTALAEKYAFENRQLCDKYLAGLPKNRQLINHILARGKNKNIHSI

SEQ ID NO: 86302 - protein, 514 aa, Colwellia psychrerythraea
  REGION 1..514: note = tr|A0A099KJG4|A0A099KJG4_COLPS Tryptophan halogenase; OS = Colwellia psychrerythraea OX=28229 GN=GAB14E_3643 PE=4; SV = 1
MQQTNSQSHMQDKIQKVVIVGGGTAGWMTASLLAKTLGKTLEISLVESDKIGIIGVGEATIPPIINFNSAIGINEKAFIKATQGTIKLGIEFNNWHRNGDSYMHAFGKIGKKLPFCDFNHFWLRAQQDKRGNANASSTIDTSSFWDFSLNYQAAKQHKFAPINNIPNTNLPGIAHAYHFDAGLYAKFLRKHATNLGVKRIEGTITKVNQHTDSGFINSLSLENDTNIAGDLFIDCSGLAALLIEKTLSTGYEDYSHWLPCDRAIAVPCEKVEPIEPYTRSTAHNFGWQWRIPLQHRTGNGLVYSSKHMSDDEAKELLLNNLDGKALAEPRVIPFKTGRRRKQWHNNVIAIGLSSGFFEPLESTNIHLIQTAAIRLMKFFPHNGIKQIEVDEFNAQSKVELEGIRDFIILHYKLNNRGDSEFWRACQRMDIPESLVTKIELFKKTGKVFCKPDDLFTEIAWQQVMIGQGNIPEDYHPLVDTLSIEQRTDLMASLKTLINRTVEKLPSHDEFLQSL

SEQ ID NO: 86303 - protein, 523 aa, Colwellia psychrerythraea
  REGION 1..523: note = tr|A0A1Y5EP26|A0A1Y5EP26_COLPS Tryptophan halogenase; OS = Colwellia psychrerythraea OX=28229 GN=A9Q75_02980 PE=4; SV = 1
MALDNNHILIIGGGTAGWLSAAILAKTLNSKNTDGVKVTLVESPTIPILGVGEGTWPNLRATLHKIGISETDFIRECDATFKQGAEFINWSKTPDPKQSHSYYHPLSTVSHSSYDFNLAPYWLQQDKKTRRPYDRAVASQARVCDEGLAPKQIVMAEYSAAQEYAYHLNANKLAEFLKQHCVEKLGVEFISANVTNIALDDENFITHVDTDHESEKQITADFFVDCSGAKGLIIKETYNTAWHSISDVIFNDTALAVQVPYSDKNQKINTHTLATAQEAGWIWDIGLQNRRGVGHVFSSKYISDQKAQQQLVDYLGDDYTEDLTIRKIKLNHGYHKKFWHKNSVAIGMSAGFVEPLEASAIFLFDAAANMLAAQFPRDKAQMKYAEDKFNRQLTMRMQRTVEFIKLHYCISQRRDSQYWIDNCDPITIPDNLKQRLAFWQGQVPTKYDFENAWEPFNLDSYLYVLYGMGFETDVANVAAKYTETTKAKHLFNNIDKASELLIDKLPKQRTLIEKVIKYGFTQV

SEQ ID NO: 86304 - protein, 499 aa, Streptomyces alboflavus
  REGION 1..499: note = tr|A0A1Z1W9I8|A0A1Z1W9I8_9ACTN Tryptophan halogenase; OS = Streptomyces alboflavus OX=67267 GN=prnA PE=4 SV=1
MKKAFGDKISVTLVESGKIGTIGVGEATFSDIRHFFEFLDLKEEEWMPACNATYKLAVRFQDWRRKGHHFYHPFEQMPTVNGFPLTDWWLQDGPTDRFDTDCFVMANLCDAGRSPRFLDGSLIDQGFTEGAKELSGLTMSEHQGKTQFPYAYHFEAALLAKYLTKYSTDRGVHHVIDEVQDVRLDERGWIDHIVTKDHGSLEGDVFVDCTGFRGVLLNKALEVPFISYQDTLPNDSAVALQVPLDMEKRGINPYTQATAQDAGWIWTIPLFGRIGTGYVYAKDYLSPEEAERTLREFVGPEAAEVEANHIRMRIGRSEQSWKNNCVAIGLSSGFVEPLESTGIFFIHHAIEQLVKHFPAADWSPELRKSYNSSIANVMDGVREFLVLHYQGAGRDDTQYWKDTKTRAVPDGLAERLERWKVQLPDSENVFPYYHGLPPYSYMCILLGTGAIPARATPSLGMSDTAAAHKEFAAIRDKARHLIETLPSTYEYFASMRERA

SEQ ID NO: 86305 - protein, 496 aa, Sphingomonas paucimobilis
  REGION 1..496: note = tr|A0A0C9NHY8|A0A0C9NHY8_SPHPI Protein/1, contig: SP636 OS=Sphingomonas paucimobilis NBRC 13935 OX=1219050; GN = SP6_36_00160 PE=4 SV=1
MSDTRPITRVVVAGGGTAGWLAATALVRQLGPLVDVTLIESDDIGTVGVGESTIPTARSFHAFLGVDEAAFMSATQATFKLGIAFENWHQLGARYFHPFGTVGRAVAIADFQHFWLEARVHGFGRDYTDYSREARAAAEGRFARDANETLAYAYHLDATAYARFLRTIAEPAGVTRVEGRIIRVEQDGEGGDIAALHLERGERIAGDLFIDCTGFRALLIEGALETGFEDWSHWLACDRALAVQTEAVREPVPYTRAIAHRAGWRWQIPLQTRVGNGLVYAGDRMSEDEAVATLLGEVEGRPLFDPRPLRFRAGVRRRAWNRNCVALGLAAGFIEPLESTSIHLVMIAVMRLIQSFPFRGGDTGALAARFNAQSAQEWAHIRDFIILHYAQTERDDSPFWQHCASMPLPDSLKERIALFVESAGAWQGQDDLFRIDSWVSVMLGQGLMPRAHHQIARMLSPQALRESLSGLDRQIAEAIAPIPPHATFLRSYCPAA

SEQ ID NO: 86306 - protein, 517 aa, unidentified
  source 1..517: note = Erythrobacteraceae bacterium
  REGION 1..517: note = tr|A0A2D9PBT8|A0A2D9PBT8_9SPHN Tryptophan halogenase; OS = Erythrobacteraceae bacterium OX=2026738 GN=CL952_06290; PE = 4 SV=1
  VARIANT 411: note = Xaa can be any naturally occurring amino acid
MSGEFTNLVIVGGGTAGWLSACILAARRPELAITLIEAPDIPTVGVGEGSWPTLRETLAVIGIDETEFLTECDASFKQGSRFDGWVDGSERDCYYHPFSAPLSGAMPDILTAWKMQNDGQPYAEAVSPQAAICNRDLAPRQRTMPPFAGALNYGYHLDAGKFGALLASHGVKKLGVRHVHGKVTRTERGVDGLFTRLLLDNGSAIEGDFFIDCTGMASKLMGEELGIGWVDRSNVSFNDRALAVQVPVVPDSAIASQTIGTAHRAGWLWDIGLPTRRGVGCVYSSRFLSDDEAQAILMNYVGARIAGAEQAALTPRGLKFSTGYRDKFWAGNCLAIGLSAGFIEPLEASAIVLIELSLKALADGYPQSRTALPRLADRFNSLFRYRWERIVDFLKLHYVLSTRTEPYWQAXRDPATIPSSLAAHLDLWRDHAPSSGDFPQIDEIFSAASHQYVLYGMRFPQPADISSAPSSEVQRQFAKVAERSRALSAALPSNRAYFDALCSSMDKNSARGVPTRQ

SEQ ID NO: 86307 - protein, 294 aa, unidentified
  source 1..294: note = Paraglaciecola psychrophila
  REGION 1..294: note = tr|M4RPI5|M4RPI5_9ALTE Tryptophan halogenase; OS = Paraglaciecola psychrophila 170 OX=1129794 GN=C427_3387; PE = 4 SV=1
MLAKHYSVPFVGKKHILFNDSALAVHVPHQTPDSPISSFTCSTAQTAGWVWDIALPSRRGVGYTYSSAHLSDEKAEQTLRNYITPIIGKSAAQVSSIRKIGFNPGHREKFWHKNCVAVGLAAGFIEPLEATALALIELSAKMISEQLPATRQTMDIVAKQFNIKFLHRWDNIIEFLKLHYVLSKRVDSDYWRDNRDETHFPEGLQEQLILWKTQSPYHYDGDEAGKMFPPASFQYILYGMGFITNSARKKRIDLSKNADRLFNENVKHSRQLLAALPTNRELINKIKQYGLPKI

SEQ ID NO: 86308 - protein, 516 aa, unidentified
  source 1..516: note = Acidobacteria bacterium
  REGION 1..516: note = tr|A0A1Q7Y223|A0A1Q7Y223_9BACT Tryptophan halogenase; OS = Acidobacteria bacterium 13_1_20CM_3_58_11 OX=1803432; GN = AUG46_00740 PE=4 SV=1
MVRPVRSICIVGGGTAGWLTAGIIAARHRTESGGLQITLVESETIGIIGVGEGTWPTMRTSLKKMGVSETDFFRECNASFKQGAKFARWVTGQESDFYYHPLMLPEGFPSLDLAPFWTKYSDEHANAPSFSDAVCFQEAVCELGLAPKLITSPEYAGVANYAYHLDAGRFASFIRQHCVKNLGVRHIIDEVTGVAKTDTGDIDYVETSKSGRLGGDLFIDCSGFRSLLLGETLEVPFVDCSDVLLIDRALAMQVPYDDEQSEIVPHTLSIAQKHGWIWDIGLQTRRGVGYVFSGNHTTADAALAELRAYVGDRHRDLQPREIKIVAGHRQTFWKQNCVAVGLAGGFLEPLEASALVLIELSAEMISAMMPATRETMDIVARRFNETTLYRWGRIIDFLKLHYLLSKRTDSKFWIDNRDPASIPESLKEQLELWRYRAPGDQDFTSNREMFPAASYQYVLFGMGFRMDVGNLPLDRDVGIAQQAFTQNETLKAKWTRTLPKNRDLINKIKEHGLQKI

SEQ ID NO: 86309 - protein, 526 aa, Kordiimonas lacus
  REGION 1..526: note = tr|A0A1G6ZI51|A0A1G6ZI51_9PROT Tryptophan halogenase; OS = Kordiimonas lacus OX=637679 GN=SAMN04488071_1830 PE=4; SV = 1
MAAGGGHDTLIKHVLVVGGGTAGWLAACHLAKALRSADATGVRVTLVESADIPTIGVGEGTVPAIRKSLQHLGIDEADFIRECDATFKQSIKFVDWLHAPNGTSHAYHHVFDYPANNGLDLTPYWLMGGAGNASFVDAVSVQGQVCDAGLGPKVMTNRQYEGLTSYAYHLDAAKLAAFLTGHATSKLGVEHKLANVTDVVLAEDGSIKAVTTDAFGDLEADLFVDCTGFSSLLLGQKMGVGFIDKRDTLFVDHAVAAQVPYTSADAPIPCHTISTAREAGWIWDIGLTERRGTGYVYAADYTDHDRAEAVLRDYLRESIGDAADEVATRRIPMRIGYREKFWEKNCVAIGMSQGFVEPLEATGLLVFDATARMLADQFPPTQAAMPLLAKRFNDRVRNAWDRVIDFIKLHYCLSKRDDTAFWRDNRDEAKLPEGLRENLALWRTQPPTVYDFPNKFDVFGIENYLYVLYGMGFETDMAPLEHRYTDTVLAREDFGYVRQMADQMTGQLLPHRTLIDRIKQYGIQKV

SEQ ID NO: 86310 - protein, 517 aa, unidentified
  source 1..517: note = Erythrobacteraceae bacterium
  REGION 1..517: note = tr|A0A2D6NJG7|A0A2D6NJG7_9SPHN Tryptophan halogenase; OS = Erythrobacteraceae bacterium OX=2026738 GN=CL951_02680; PE = 4 SV=1
  VARIANT 70: note = Xaa can be any naturally occurring amino acid
  VARIANT 275: note = Xaa can be any naturally occurring amino acid
MSGEFTNLVIVGGGTAGWLSACILAARRPELAITLIEAPDIPTVGVGEGSWPTLRETLAVIGIDETEFLXECDASFKQGSRFDGWVDGSERDCYYHPFSAPLSGAMPDILTAWKMQNDGQPYAEAVNPQAAICNRDLAPRQRTMPPFAGALNYGYHLDAGKFGALLASHGIKKLGVRHVHGKVTRTERGVDGLFTRLLLDNGSAIEGDFFIDCTGMASKLMGEELGIGWVDRSNVSFNDRALAVQVPVVPDSAIASQTIGTAHRAGWLWDIGLPXRRGVGCVYSSGFLSDDEAQAILMNYIGSRIAGAEQTALTPRGLKFSTGYRDKFWEGNCLAIGLSAGFIEPLEASAIVLIELSLKALADGYPQSRTALPRLADRFNSLFRYRWERIVDFLKLHYVLSTRTEPYWQAHRDPATIPSSLAAHLDLWRDHAPSSGDFPQIDEIFSAASHQYVLYGMRFPQPADISSAPSSEVQRQFAKVAERSRALSAALPSNRAYFDALCSSMDKNSARGVPTRQ

SEQ ID NO: 86311 - protein, 517 aa, Microbulbifer marinus
  REGION 1..517: note = tr|A0A1H3YCA8|A0A1H3YCA8_9GAMM 2-polyprenyl-6-methoxyphenol hydroxylase OS=Microbulbifer marinus OX=658218 GN=SAMN05216562_1673 PE=4 SV=1
MQQAPLSILILGGGAAGWLTAAVLAAEHGRARGGHCDIVLVESPDIPTIGVGEGTWPSMRETLRRIGLSETRLFAECEASFKQGSLFSAWRTTDCKDQYYHPFSLPHGYFEQDLAPFSQEAYAYAVTPQAAICDAHLAPKQLATPEYAGVLNYGYHFDAVKFGLCLRDHCTRHLGVQHVRANIASVEGGADGSVAALVTDAGERLCADLFVDCSGSAAKIIGEHLQVPWVDRSSILFNDRALAVQIPHASPESPIASVTRATAQANGWIWDIGLPSRRGMGYVYSSQFTDTATVEGEFRRFLARELPTGADSELMFRELKFAPGHRAAMWQGNCVAVGMAAGFIEPLEASALALIEQSAGLIRDFLPARNEQMGLAAKRFNRQILAHWENIIDFLKLHYVLSERTDSDYWLAHRRDESIPESLRENLQLWRHRAPAKQDFPQAQPLFPPPSYRYVLNGMGYDCDWVRAPRKDGDQARAKTLLTEVQKQLASYRQGLPANRQLISQLVARSQPGVTVR

SEQ ID NO: 86312 - protein, 511 aa, unidentified
  source 1..511: note = Gammaproteobacteria bacterium
  REGION 1..511: note = tr|A0A2E4LGF2|A0A2E4LGF2_9GAMM Tryptophan halogenase; OS = Gammaproteobacteria bacterium OX=1913989 GN=CMQ30_01570; PE = 4 SV=1
  VARIANT 8: note = Xaa can be any naturally occurring amino acid
  VARIANT 373: note = Xaa can be any naturally occurring amino acid
  VARIANT 389..390: note = Xaa can be any naturally occurring amino acid
  VARIANT 450: note = Xaa can be any naturally occurring amino acid
  VARIANT 489: note = Xaa can be any naturally occurring amino acid
MKNPNIKXFVIVGGGTAGWMSAAALSRIVGTQECAITLIESERIGTVGVGEATIPPIVEFNNLLGINSDEMLRETNGTFKLGIEFINWGKKGDSYMHPFGSFGRTILNVSFWHYWKKAFDLGISPGLENYSLNWLAAKENRFFRGAQIPNSPLTKIPHAYHFDANLYAKFLRNFSVNLGVNRIEGEVRDVMQNSESGFITGLRLSDESIIQGDFFLDCTGFKGLLIEQCLNTGYEDWSHLLPCDRALAVPSEAINPKHPYTKSIAHSIGWQWRIPLQHRTGNGIVYCSKFSNDQAAADILIDNLPSPALSEPKNLRFKTGKRKKIWSKNCLSIGLASGFMEPLESTSIHLIQSTIMRFFSLFPHKENFETEMXYFNKSIDEEFKSIRDXXILHYKLTTRDDSELWNYCRNMEIPDSLTEKLELYRSGSWLERNNKELFGVDSWLSVLNGXNAKANSYNPLVDTLPESELKKIMQDTREVLAQCSSSIPXHEQFILDNCASRDHQLNPKNIQ

SEQ ID NO: 86313 - protein, 500 aa, unidentified
  source 1..500: note = Gammaproteobacteria bacterium
  REGION 1..500: note = tr|A0A4Q5Q1Z3|A0A4Q5Q1Z3_9GAMM Tryptophan 7-halogenase OS=Gammaproteobacteria bacterium OX=1913989; GN = EOO53_19160 PE=4 SV=1
MAEHTAVNSIRKIVIAGGGTSGWLAAAAISKILGKNLDVTLIESPEIGRIGVGEATIPTLRVFHKLLGINERELMAHVQGTFKLGIEFSNWANKGDKYFHSFGLTGKDCWACQFQHFWLAGKKYGIKVPFGDYCPESKAARLEKCSGEEDGVNYAYHLDATLYADFLKNFSIKHGAKHVEGLIEKVIVSPENGFIKSLLLKDGREIEGDLFLDCTGFRAMLIDGALNTSWEPYGHYLPCDSAIALQTELVRAPRPYTQSIAHDFGWQWRIPLQHRAGNGMVYSSRHVSDDEAMATLMKNLEGRPVTEPRVIKYKTGRRTKAWNKNCIAVGLTASFIEPLESTSIHLAMSAIYRLMRYFPQNEISMSNVDEFNKQSAEETDRARNFVILHYHATQRDDSEFWRYVKNMEIPEALAHRVQLFKDTAAIALEEKELFLNDSWVQVMMGQGIMPGAYHPIADVMGEMELKNFLGYLKDSVGEKVAAMPTHQQFINKYCKAAAPM

SEQ ID NO: 86314 - protein, 496 aa, unidentified
  source 1..496: note = Gammaproteobacteria bacterium
  REGION 1..496: note = tr|A0A2E8WQE8|A0A2E8WQE8_9GAMM Tryptophan halogenase; OS = Gammaproteobacteria bacterium OX=1913989 GN=CMQ23_04755; PE = 4 SV=1
MNIDHPVRKVLIVGGGTAGWMTAAALSKLIGKKLDITLVESDQIGTIGVGEATIPTFIALHQLMKISEAEFLSQVQGTIKLGISFEGWQTPEKNYIHAFGTTGQGCWAAGFHHFWNRADRLGLALDYGRYSPELMAAREGRFGHVREAPLNYAYHLDATAYAKYLRSFAETQGVKRVEGRIDAVHKDAEGAIASVQLSHGAQLEADLFVDCSGFVGLLVNKALETPFEDWSKWLPCDRAVAVQTTSVEDPIPYTRAIAHGAGWQWKIPLQHRVGNGLVFSSEFLSDDEATQLLLSNITGTTITDPRVIQFRTGQRQSHWVKNCVAIGLASGFIEPMESTSIHLIQRGIVRLMQLFPYGGINEGDRAEFNDQMTTEFRHIRDFIIMHYHLTDRTDTEFWRRNSAMDIPEPLAHRLALFQQSGNVFQGQWDVFGENSWTQVMMGQGIKPAHYHPIVDMMSETELDSFIKHQEQKVSRVLQKAPSHLDFLNTYCRAPQP

SEQ ID NO: 86315 - protein, 523 aa, unidentified
  source 1..523: note = Gammaproteobacteria bacterium
  REGION 1..523: note = tr|A0A2D9STE0|A0A2D9STE0_9GAMM Tryptophan halogenase; OS = Gammaproteobacteria bacterium OX=1913989 GN=CMQ11_18120; PE = 4 SV=1
  VARIANT 64: note = Xaa can be any naturally occurring amino acid
  VARIANT 68..69: note = Xaa can be any naturally occurring amino acid
  VARIANT 75..76: note = Xaa can be any naturally occurring amino acid
  VARIANT 79: note = Xaa can be any naturally occurring amino acid
  VARIANT 81: note = Xaa can be any naturally occurring amino acid
  VARIANT 83: note = Xaa can be any naturally occurring amino acid
  VARIANT 85..86: note = Xaa can be any naturally occurring amino acid
  VARIANT 90..92: note = Xaa can be any naturally occurring amino acid
  VARIANT 94: note = Xaa can be any naturally occurring amino acid
  VARIANT 97: note = Xaa can be any naturally occurring amino acid
  VARIANT 180: note = Xaa can be any naturally occurring amino acid
  VARIANT 294: note = Xaa can be any naturally occurring amino acid
  VARIANT 352: note = Xaa can be any naturally occurring amino acid
  VARIANT 488: note = Xaa can be any naturally occurring amino acid
MNDPINRVVVVGGGTAGWLTAGIIAAEHCISKSTNHRPFELTLIESPDISTIGVGEGTWPSMRXTLQXXGISETXXLTXCXAXFXXGTFXXXWXTGXGDTYAHPFTAPYRYADTNLAPHWLARAERPSFSEAVCPQPQLFSKRLAPKQITTPEYAFNVNYGYHLDATNLAAFLKRHCIDXLGVKHIQATVTEINSADNGDIESISTDRAGTIAGGLFIDCTGSKSLLLGKHFGIALQDKSQILFNNSALATQVPYPTDDAPIESCTLSTAQDAGWIWDIGLPSRRGVGHVYSSXHTSEEQASDALIKYVESITTASKSKQVSLRKLTFEPGHREKFWHRNCVAIGMSAGFIXPLEASALVLVELSASMIAEQLPATRSVMDLVAGRFNKRFLFRWERIIEFLKLHYVLNKKTALPYWADNLAPSSVPDSLKESLSLWRHISPWHYDSHHVDDLFPSASFQYVLYGMGFETTSSHTKRKTEEDAANLAXTLFKENIAKAAQLMSALPTNRELINKINTFGLQKI

SEQ ID NO: 86316 - protein, 508 aa, Sphingomonas sp.
  REGION 1..508: note = tr|A0A0Q4CSC3|A0A0Q4CSC3_9SPHN Tryptophan halogenase; OS = Sphingomonas sp. Leaf9 OX=1735674 GN=ASE58_10860 PE=4; SV = 1
MSARADGPLRRIAIVGGGTAGWMAAAALSRVLGPHGPAITLVESEEIGTIGVGEATIPPLQAFNAMLGIDEDDFVRATQGTFKLGIDFHDWGQVGHRYFHPFGVYGIDAGAVPFEAMWRRLRAAGQAGPLADYSICTAAARAGRFQRPQPGNTPLAQIGYAFHFDAGLYARFLRARAEAAGVVRREGRIVEVVCDGASGFIDAVVLADGGRVEADFFIDCSGFRGLLIDEAMGAGFEDWSHWLPNDRAVAVPSANVGPPSPFTRSTARDAGWQWRIPLQHRTGNGYVYSSAHVSDDEAAATLLAGLEGKALADPRPIRFRTGRRDRFWIGNCVALGLSGGFLEPLESTSIHLVQAGIARLLEMLPTRACDLADSARYNRLMAAEFDQVRDFVILHFHASARRDTAYWRDQAARPIPDTLAERLAIYARTGRVYREGDELFTKTSWLAVMDGQGLTAATHDPLADAMPIDAAAARLQRIGAVVAAAAAQMPPHEAFIARHCTAATGQRA

SEQ ID NO: 86317 - protein, 504 aa, Sphingomonas sp.
  REGION 1..504: note = tr|A0A0Q4CT13|A0A0Q4CT13_9SPHN Tryptophan halogenase; OS = Sphingomonas sp. Leaf9 OX=1735674 GN=ASE58_01710 PE=4; SV = 1
MKDGNIRSIIIVGGGTAGWMAAAAFSRILSGSGMAIRVVESEAIGTVGVGEATIPHIQYFNRLLGIDEDEFVRRTCATFKLGIEFVDWGAIGERYIHPFGSYGQEMEGLHFHHFWYRQAQMGGALPLDRYSIGVGAARAGKFQRPDHSRPGSPLGGISYAFQFDAALYARYLRERAEAAGVERIEGRIVDVVLNGGNGHVDHVVLDDGRSVGGDLFIDCSGFRGLLIEGALQAGYDDWREWLPCDRAVARPCSRVADPTPYTRATATSVGWRWRIPLQSRTGNGHVYCSDYADDETALAMLDAGLDGEALAGPNFLRFTAGIRRKAWDRNVVALGLASGFLEPLESTSIHLIQSGIARLLTNFPDRSFNQPDIDYYNRRTRAEYEQIRDFLVLHYKATARDDSPFWRRCRAMAIPDSLAERIAIFRENARLYRHDKELFSETSWLAVLHGQNVVPKRHHPIADLLSDAELDDRMTRIAAAMDSGVRAMPDHMAFIDRHCRSPDQ

SEQ ID NO: 86318 - protein, 499 aa, Sphingomonas ginsenosidimutans
  REGION 1..499: note = tr|A0A2A4I1N1|A0A2A4I1N1_9SPHN Tryptophan halogenase; OS = Sphingomonas ginsenosidimutans OX=862134 GN=COA17_03700; PE = 4 SV=1
MTALPVREVVIVGGGTAGWMAAAALSRFLPRTRTRIRLVESEEIGTVGVGEATIPTIQTFNRMLGIDEDAFVAATGGTFKLGIQFENWRAIGDRYFHPFGQFGHDIDGLAFHQLFLKLAGQRRCADLWHYAPCAVAAAAGRFARIAEGEAPFPLPYAFHFDAGRYARFLRDYAEARGVERIEGRIADVAQHADTGFVQAVRLADGRHVDGELFVDCSGFRGLLIEGALASGYDDWSHWLPCDRAVAVPTARDRAPVPYTRAIAQGAGWQWRIPLQHRTGNGYVYSSAHVDDDAAQAALMGAVEGEVLADPRRLSFVTGRRRRFWNRNVVALGLAGGFLEPLESTSIHLIQTGIAKLLALFPDAGFSTVEAEEYDRLMRSAYDGVRDFIILHYHATQRDDTPFWRHVRTMEVPDTLRRKIELFRVHGRFFRYDDELFSLASWTAVLLGQGIVPAAYDPVADVLDEDRLAETLERMRHAILAQTRAMPSHADFIARHCAAG

SEQ ID NO: 86319 - protein, 510 aa, unidentified; identical to SEQ ID NO: 82364
  source 1..510: note = Gammaproteobacteria bacterium
  REGION 1..510: note = tr|A0A2E1UDH1|A0A2E1UDH1_9GAMM Tryptophan halogenase; OS = Gammaproteobacteria bacterium OX=1913989 GN=CMP97_05430; PE = 4 SV=1
  VARIANT 167: note = Xaa can be any naturally occurring amino acid
  VARIANT 173: note = Xaa can be any naturally occurring amino acid
  VARIANT 175: note = Xaa can be any naturally occurring amino acid
  VARIANT 191: note = Xaa can be any naturally occurring amino acid
  VARIANT 202: note = Xaa can be any naturally occurring amino acid

SEQ ID NO: 86320 - protein, 500 aa, Sphingomonas sp.
  REGION 1..500: note = tr|A0A0Q4CB69|A0A0Q4CB69_9SPHN Tryptophan halogenase; OS = Sphingomonas sp. Leaf9 OX=1735674 GN=ASE58_17210 PE=4; SV = 1
MPHEPVRSIVIVGGGTAGWMAATYLARRLTHLNLSITVIDSAAIGTVGVGEATVPAIRDFLSAIELGEPDVLRETGGTIKYGIRFDGWGGAAHRFFHPFGLYGVGAGGVAFHQYWLKLHAAGRAGPIGDYCLATQLARGGLFLPPADRPANDLGVFNFALHFDAAKFAALLRRLALANRVGHVDGRITQVATDPARGHVTSVTLEDGRSIAGDLWIDASGFRSLLLGEALGVPYVDWRHWLPCDRAVAIPCKAAPGDPVPYTVATARTAGWQWRIPLRHRIGNGSVYCSDFQSDGDAEDALLASLEGEPLADPNRLRFVTGHRARFWSGNVVGLGLASGFLEPLESTSISLIQSGLERFVALFPDRDCDPRLAATYNRQSVLEFERLRDFLFLHYLANGRDEPFWQAIRAVEPPEPLQIKLDAWRSGGEFVRNEWDTFQDPSWLSLYAGFNDLPTRHSPLADAVPVDTLADSFARMRDAIGKTLAHAEPHGRFLNRVAGA

SEQ ID NO: 86321 - protein, 358 aa, unidentified
  source 1..358: note = Gammaproteobacteria bacterium
  REGION 1..358: note = tr|A0A3B8Z8B6|A0A3B8Z8B6_9GAMM Tryptophan halogenase (Fragment) OS=Gammaproteobacteria bacterium OX=1913989; GN = DCF95_11845 PE=4 SV=1
MTANALQKKWQHLGINITLVESPDIGIVGVGEGSTPKLKHFFDSLGIKESEWMPECNATYKNGISFKNWSTVSGYEEYFHPFGCSLDFVTLKFLYDNATLRRKGVDVIAHPNRFSLMASLAEKKLAPIASKNFPFHFQYGYHFDSVLIGKFLQKKAAEVGGINHIQATVKSVELNSNGDITSLKLNNDQILSGDFFVDCSGFASILLEKTLKVPFISFSDNLFNDSAITIPTEIEPNIPSQTVSTALTNGWVWRIPLTNRIGNGYVYSSQYCTQDEAEKELRAHLGVLESDIEARHLKMKVGRAKESWRNNCVAVGLSQGFIEPLEATALQFVISTIEEFATAFEEGGFTHQFKELFN

SEQ ID NO: 86322 - protein, 495 aa, Colwellia psychrerythraea
  REGION 1..495: note = tr|A0A1Y5EQ86|A0A1Y5EQ86_COLPS Tryptophan halogenase; OS = Colwellia psychrerythraea OX=28229 GN=A9Q75_00615 PE=4; SV = 1
MNNLSEVKNVVIAGGGTAGWMAATALAKLIGNKLNITLVESDEISTVGVGEATIPPLLTFHKMLKINEAEFMSSVNATFKLGINFENWKDNDSEYFHSFGTTGRDCWATTFLQFYNRSKKEGYQAKYEEYCLELQAGLNDKFAHLPNSGLKYAYHMDATLYAKFLRKLSEQHGVKRIEGKIERVNIDEKSGFIKSLTLLSGVTIEGDLFIDCTGFRGVLIEQALHTGYDDWSHWLPCDRAVAVQTESTEEPKPYTRSIAHESGWQWKIPLQNRTGNGLVYCSKYLNDENAEKLLLENVEGKLLKKPLFIKFTPGQRRKHWNKNCVALGLSSGFIEPLESTSIHLIQRGIIRLMQMFPKMGITDTVINEYNYQSEEEIRYIRDFIILHYHVTNRNDSTFWRYCSKMDVPSSLSHRIELFKEHGYVFKAPWDLFAENSWIQVMLGQGLSPKDHHPIADMMSTNEQDMFLNSIKNSIEQTVKSLPTHKQYLDQYCKSN

SEQ ID NO: 86323 - protein, 547 aa, unidentified
  source 1..547: note = Kutzneria buriramensis
  REGION 1..547: note = tr|A0A3E0HPX8|A0A3E0HPX8_9PSEU Tryptophan halogenase; OS = Kutzneria buriramensis OX=1045776 GN=BCF44_105333 PE=4; SV = 1
MLFPHGTLATRIARELIAISGMDNRMGEFDMAKKVVIVGGGTAGWMTASYLKAAFADRVDVTLVESGKVGTIGVGEATFSDIRHFFEFLDLREEDWMPACNATYKLAVRFENWREPGHHFYHPFEQVRTVEGFPLTDWWLQNRPSDRFDKDCFVLASLCDAERSPRHLDGSMFENDYVDGSDNLHRMTMSEHQGKTQFPYAYHFEAALLAKFLTGYAVDRGAKHLIDDVRHVALDDRGWVSHVVTAEHGEIHGDLFIDCTGFRAVLLNQALGEPFISFQDTLPNDSAVALQVPQDMFERGIRPCTTATAQEAGWIWTIPLFNRIGTGYVYAKDYCSPEEAERTLREFVGPAGADAEANHIRMRIGRSRNSWVNNCVAIGLSSGFVEPLESTGIFFIHHAIEQLVRHFPDQAWNPVHRDQYNSAVANVQEGIREFLVLHYLSAARSDTRYWRDTKTRRVPDALAERIEQWKVQLPDSESIMPYYHGLPPMSYMCILLGGGAIPLRPSPALGLVDDSLAREEFQLIADKARTLVDKLPNQYEYFASLRR

SEQ ID NO: 86324 - protein, 506 aa, Sphingomonas sp.
  REGION 1..506: note = tr|A0A4R2RX82|A0A4R2RX82_9SPHN Tryptophan halogenase; OS = Sphingomonas sp. PP-CE-1G-424 OX=2135658 GN=C8J43_10347; PE = 4 SV=1
MIVGGGTAGWMAATLLARRLDRQSVTITVVESSDIRTVGVGEATVPGIRDFFREIGVTEQDVMAAAQGTVKLGIEFVDWKREGERFFHPFGLYGMRSRGVAFHHYWRKLNAAGRPTPLSEFCLATALAERNLFMRPTDSPVHDLLFFDWAVHFDAGLFAKFLAKKAGEWGVKHIDATITDVLVDQSTGFISSVDTECGKTIAGDFFIDCSGFRSLLLGDALGVPYEDWTNLLPCDRAVAMPCERAEPLTPYTRSTALTAGWQWRIPLQHRVGNGYVYASRHISDDEAVATLKGRLEGEALAEPNMIRFRTGRRTAFWQGNCVALGLAAGFMEPLESTSITLIQTGLEKLLALLPDRSFDPALADEYNRTTGLEYARIRDFLVLHYFANGRQGEPMWDRCRGTALPEQLERKLKLFKARGHLVRYEWESFQDPSWLSMYAGFGIDAAAHDPLADHFSLSDLEAAFERMKGSIRDAVALAEPHETFLKSFAPASAPPASRSMNFAANG

SEQ ID NO: 86325 - protein, 500 aa, Asticcacaulis sp.
  REGION 1..500: note = tr|V4MZA1|V4MZA1_9CAUL Tryptophan halogenase; OS = Asticcacaulis sp. AC402 OX=1282361 GN=ABAC402_12565; PE = 4 SV=1
MGGGTAGWMAASALAHEFKRLPIAITLVESEEIGTVGVGEATLPHIRNFNTALNIDEVTFMKATEATFKLGIEFCNWGRIGDRYIHPFGDYGEKIDGIPFYQHWLRLQKSGLASRLDDYAFPTSIAEANRFRHPSTDATRIESTYGYAYQFDATRYAAFLRQFAEARGVVRRQGKVVDTRLDAETGHVASLTLDSGEVVAADLYVDCSGFRGLLIEQALKTGYEDWSQWLPCNRALAVPCESRGTLTPYTRATALEAGWQWRIPLQHRTGNGYVYCSSFISDEDASRRLLGNLDAPALADPRQLYFTTGRRKKLWNHNVVAIGLAAGFLEPLESTSIHLIQEGISELLHIFPDKRFLQSDIDEYNRRMGVNFERVRDFLLLHYAATQRDDTEMWRHFRNLKLPDSLDEKIQIWLTRGQLIRYEFGVFLPPSWVAVMLGQNLLPRHYDPRVDRMPHDRLVQSAEGLRRRVNAAASATPDHKDYIRQMGAASDTGPLVAQAG

SEQ ID NO: 86326 - protein, 522 aa, Actinoalloteichus sp.
  REGION 1..522: note = tr|A0A1L7F9E8|A0A1L7F9E8_9PSEU Tryptophan halogenase; OS = Actinoalloteichus sp. GBA129-24 OX=1612551; GN = UA75_17400 PE=4 SV=1
MPRSVVIVGGGTAGWMTASYLKAAFADRIEVTLVESARVGTIGVGEATFSTVRHFFDYLGLDEREWMPACQATYKLAIRFEDWRHKGHHFYHPFERQRMVDGFPITDWWLQQGVTDRFDRDCFLIAALCDAKRSPRHHDGRLFEQDFVESGPERVHRTTLSEQDTQFPYAYHFDASLLADYLSGYAVRRGVRHVVDDVLDVSLDERGWIDHVLTREHGELRGDLFVDCTGFRGLLLNKALEEPFQSYQDTLPNDRAVALRVPVDMAAKGIRPCTTASARDAGWIWTIPLFGRIGTGYVYASEYITPEEAERDLRAFVGPAADDLEANHIRMRIGRSRDSWVRNCVAVGLSSGFVEPLESTGIFFIQHGIEQLVKHFPGDDWNPALRDAYNRSIANCMDGVREFLVLHYRGAARTDNQYWRDAKTRPVPDALAERMEAWQTRLPDTETVFPHYHGFEPYSYACMLLGLGGVPLRSSPALALLSDASAHKEFQIVRDQADELVRTLPSQHEYFARLHPASNGPG

SEQ ID NO: 86327 - protein, 502 aa, Asticcacaulis sp.
  REGION 1..502: note = tr|V4NC07|V4NC07_9CAUL Tryptophan halogenase; OS = Asticcacaulis sp. AC402 OX=1282361 GN=ABAC402_18455; PE = 4 SV=1
MAAIETIVIVGGGTAGWMAAAALSRLRSGRPVNIVLIESEEIGTVGVGEATIPPFLDFNRLLNIDEREMLAAVQGSFKLGIQFVNWGKLGDSYIHPFGNYGYQVDGVSFHHVWHKYKMAGDKRPIQVFNIETMAAQFGRFARTDDYKHEDLPPINYAYHIDAGRYARYLRAYAEKRGAVRLEGKVTDVARNAQSGFVEGLTLNNGETLKGDFFIDCSGFRGVLIEQALKTGYDDWSHFLPCNRAVALPCDRADGSGPLPYTRATAHTAGWQWQVPLQHRNGNGHVYCSEYMGDDEALDILVNNIAGKPGAQPNFLRFVTGRRKKFWNKNVVALGLASGFMEPLESTSIHLINTGINKLVSLISLDGVTQAQEDAFNRLTGKEYERIRDFLILHYKATSRDDSPFWNYCRNMTVPQSLTEKMELFQHNGQIFREDDELFTETSWAAVMMGQGIVMKGHNAMADTLAEAKTREELDGIEKSIQYVVQHMPTHGDYLKKYCPAKM

SEQ ID NO: 86328 - protein, 501 aa, Sphingomonas sp.
  REGION 1..501: note = tr|A0A4R2RVM0|A0A4R2RVM0_9SPHN Tryptophan halogenase; OS = Sphingomonas sp. PP-CE-1G-424 OX=2135658; GN = C8J43_103133 PE=4 SV=1
MVEQRIRKVVIAGGGTAGWLAAAALTRQLGQLLDITLVESEEIGTIGVGEATIPTMRAFHTILGLDEREFMRATQATFKLGISFENWARDGDRYIHSFGDIGKSTWMGDFHHFWLAAKAAGDRSDIGDYCLELQAAKAERFALPSEGQINYAYHLDAGLYARFLRARSEANGLKRIEGRIASVDRDGETGFIRALVLDSGERVEGDLFLDCTGFRGLLIEGTYGAGYEDWSHWLPTNSALAVQSAATGPAHPYTRAIAHDAGWRWRIPLQHRVGNGLVYASDHLSDDEAHARLLGAIGGAPLTPPRLIRFRTGRRRQVWMGNCVALSLASGFVEPLESTSIHLVMTGLMRLMQTFPFGGIAPSLVTRFNDQAQAELERVRDFIILHYHLNQRPEPFWAARRDMPIPDTLVERIALFTEGAQAYQGGEDLFRVASWVQVMLGQRLTPRDHHRLGSIMGGSQLASVLTNIRGTIADAVAGMPTHQQFLDRYLATPTAAASGIR

SEQ ID NO: 86329 - protein, 506 aa, Chondromyces crocatus
  REGION 1..506: note = tr|A0A0K1EKN9|A0A0K1EKN9_CHOCO Tryptophan halogenase; OS = Chondromyces crocatus OX=52 GN=CMC5_053240 PE=4 SV=1
MFDLIVIGGGPGGSTLASFVAMRGHRVLLLEREAFPRHQIGESLLPATVHGICAMLGLTDEMKRAGFPIKRGGTFRWGKEPEPWTFGFTRHPDDPYGFAYQVERARFDDMLLRNSERKGVDVRERHEVIDVLFEGERAVGVRYRNTEGVELMAHARFIVDASGNRTRVSQAVGERVYSRFFQNVALYGYFENGKRLPAPRQGNILSAAFQDGWFWYIPLSDTLTSVGAVVSREAAEAIKDGHEAALLRYIDRCPIIKEYLAPATRVTTGDYGEIRIRKDYSYCNTSFWKNGMALVGDAACFVDPVFSSGVHLATYSALLVARAINTCLAGEMSEQRCFEEFERRYRREYGNFYQFLVAFYDMNQDTDSYFWSARKIINTEERANEAFVRLIAGRSNLDEPVFQSVAKDFFTEREGFGAWFGGLVTSMAKGDGGGLMVGEGATDATESTGFAPENFMQGFTREITELQHLAMFGEDRGPETPLWSGGLVPSRDGLAWAVESGEDAAG

SEQ ID NO: 86330 - protein, 497 aa, Asticcacaulis sp.
  REGION 1..497: note = tr|V4NI04|V4NI04_9CAUL Tryptophan halogenase; OS = Asticcacaulis sp. AC402 OX=1282361 GN=ABAC402_09120; PE = 4 SV=1
MEGHVIKRVVIAGGGTAGWCAAAALSRLLGPLLDITLVESDDIGIVGVGEATIPTVRTFHHLLGIDERDFLRATNGTFKLGIAFENWARPGDRYIHAFGTVGKSSWMAPFHHIWLQARSDGYGGELSDYCLELQAAEAGKFQTSEKSGLNYAYHFDAGLYGQFLRGLSEKHGVKRVEGKISQVEQEPESGFIAALHLESGEVIEGDLFIDCTGFRGLLIEQTLKTGYEDWTHWLPMNRAVAVQTQSLGPLNPYTRAIAHDAGWRWRIPLQNRVGNGLVYSSAYLSDDAAHEQLMGALDAPTLVEPRQIKFVTGRRRKTWNKNCVTLGLSSGFIEPLESTSIHLFQIGVTRLIQMFPFNGISPSLIDHFNTLSAQELEMVRDFVILHYKANQRGESGFWRDRQTMSVPDSLMHRIEVFAAEGIAWQAGGELFRLDSWLQVMMGQRIEPRGWHRLGQLMKRPQAEGVFRDMKASIDRAVAGMMSHEQFVRQYCAMQETA

SEQ ID NO: 86331 - protein, 501 aa, Asticcacaulis sp.
  REGION 1..501: note = tr|V4NKW4|V4NKW4_9CAUL Tryptophan halogenase; OS = Asticcacaulis sp. AC402 OX=1282361 GN=ABAC402_07200; PE = 4 SV=1
MSEHLIKNVVVLGGGTAGWLSAAMLAKTWGRSIKITVVESDDIGTVGVGEATIPPLTKLLIYLGIDENQFLSRVQGTFKLGIEFVDWYEKGQSYMHAFGAPGQALGILPFYQYWLAQRLRGHDINLWDFSLNTLAARQNRFARIKQVPNTSMEGIDYAFQFDAGLMAQFMRIGCENSGVRRIEGKVAGANLRSSDGFIESLTLENGQVVEGEMFIDCSGFRGVLIEDAMKAGYVNWQHWLPCDRAAAMPTTSYGPLKPYTRARAHGCGWQWRIPLQHRTGNGHVFCSTFLSEDDAVKTLRDHVDGEPLAEPRILKFVTGRRKNSWVKNCVALGLASGFMEPLESTSIHLVQSGMTRFLRLFPDKRFNPLEIAEYNRQTAHEYELIRDFLVLHYKSTKRNDTPFWDYCRTMDIPDTLAHKIDYFRLHGRLLIEDEDLFKETNWAQVLIGQGVMPGASAPLTATISEDDLTDFMKNLRIILDRTVSGIPDHAAFVKQNCPAVV

SEQ ID NO: 86332 - protein, 532 aa, unidentified
  source 1..532: note = Streptomyces sviceus
  REGION 1..532: note = tr|B5HTB3|B5HTB3_9ACTN Tryptophan halogenase; OS = Streptomyces sviceus ATCC 29083 OX=463191 GN=SSEG_02830; PE = 4 SV=1
MTDSASEYDVVVIGGGPGGSMTSTLLAQYGKRVILFEAAKFPRYHIGESLLSGTADLLKKIGVLEKLENAGFIKKYGVEWVWGERREPWTVYFKDALAMPYDYGYQVERGPFDQMLLENAREHGVDAREEHRVTDFVIGDDGTVRVDYRDADDKPGSVTARWLVDSSGQGGLVTKRLHQQEWDPYLKNMAMWTYWRGAERPAGLDAGNTFLPTFDEGWWWFIPLRDDITSVGVVVDRQSYLKNKEAGLDNYYRSCLERTPELAERLQGAEQVDKMHAQRDWSYIYDRFSGDGYIAVGDAACFIDPLFSTGVHLSMLSGYLAATAVNTILDKPELGRDTVLDFYESAYRKEFERLRAQVYFLYGGHGGSKESYFWHARSQFDVPGIEPEKAFISLIAGAFQHRSWYRRYLEQLDVPADLRSTIEGVFDGKTVGVNVDWKQPVVPSEEIEVGEDLAVDGGHLRPSPVLRHSSGTSMPLTPALAALRELADGSRSADDLIGLLVDKELEPPDRARALVHEAIAFGLFEPQEPAKD

SEQ ID NO: 86333 - protein, 506 aa, unidentified
  source 1..506: note = Alteromonas mediterranea
  REGION 1..506: note = tr|A0A1J0SFI6|A0A1J0SFI6_9ALTE Tryptophan halogenase; OS = Alteromonas mediterranea OX=314275 GN=BM525_08950 PE=4; SV = 1
MHDPQNKTIKRVVIAGGGTAGWLTAALMKKLLGQAVDITLIESEAIGTVGVGEATIPPIRLVNQVLGIDEAQFLHDTKATIKLAIKFENWKTKGQSYYHTFGAPGKSMAFCHFHHYWLKARQQGHKNDLWVYDLNYQAAEAGRFAQINAKDPALELPFAYHFDASLYAQYLRKISEEMGVVRKEGKIARVARFSDSGYVKALHLESHDVIEGDLFIDCTGFKGLLIEGALGAGYDDWSHLLPCDSALAVPSERHKDTAPYTRSIAHDAGWQWRIPLQHRNGNGHVYSSRYISDDDAHATLMGNLDTKPLGDPKLIKFTTGRRRKQWYKNVVAVGLSSGFLEPLESTSIHLIQSAIVRLIQLFPHKGVTSSLTDEYNKQSELEFEQIRDFLVLHYTVNERTDSAFFNDMRSITLPDSLAHKIELFKENGVLQREQNDLFLESSWLQVLYGQGITPKDYHGLVNSVPDTQLNNMLTRLLEIKKEPISKLPTHDEYINGMVTNYKRSMS

SEQ ID NO: 86334 - protein, 514 aa, Caulobacter segnis
  REGION 1..514: note = tr|D5VGN3|D5VGN3_CAUST Tryptophan halogenase; OS = Caulobacter segnis (strain ATCC 21756 / DSM 7131 / JCM 7823 / NBRC 15250 / LMG 17158 / TK0059) OX=509190; GN = Cseg_2005PE=4 SV=1
MVSPVKNIVIVGGGTAGWLTAGVIAAKHKARQASGFTVTLVESPNTPIIGVGEGTWPTLRTTLAKIGVSETDFFRECDAAFKQGAKFARWTTGAEDDAYYHPLVLPQGFSQVNLAPHWLASGGDVSFCDAVCPQGVLCDEGLAPKTITAAPYQGAANYAYHLDAGKFAPFLQRHCTEKLGVRHVLADVRSVSLAEDGDIRAIVTEQAGEIEGDLFVDCTGFRSLLLGEALGVPFKDCGDVLFCDTALAIQIPYENENSPISTHTISTAQSAGWIWDIGLPTRRGVGHVFSSRHISDDDAERELRAYIGPACRDLPVRKIAIRSGHREIFWKRNCVAVGLAAGFLEPLEASAIVLIELSAKLIAEQMPACREVMDVIAGRFNATTQYRWGRIIDFLKLHYVLSQRSDTAFWRDNRDPDTIPERLADLLRLWRHQPPWLHEEFDRVEEVFPAASYQYVLYGMGFRTEVEREALADEAALAQRALRENALQTERLRATLPRHRDLIRKIVEHGLQPV

SEQ ID NO: 86335 - protein, 514 aa, Sphingomonas paucimobilis
  REGION 1..514: note = tr|A0A411LF49|A0A411LF49_SPHPI Tryptophan 7-halogenase OS=Sphingomonas paucimobilis OX=13689; GN = DRN02_002165 PE=4 SV=1
MVQPVQNIVIVGGGTAGWLTAGVIAARHQGRRPHGFTVTLVESPNVPIIGVGEGTWPTLRTTLRKMGVSETAFFRECDASFKQGARFNRWTTGAADDGYYHPLMLPQSFGQVNLATHWLAASEATSFCDAVTPQGRICDAGLAPKTIATPEYEALANYAYHLDAGKFADFLRRHCCETLGVRHVLADVEEVLLSEQGDIRAVRTAQAGEVTGDLFVDCTGFRSLLLGEAMEVPFKPLGDVLFCDTALAIQVPYDDPEAPIASHTISTAQSSGWIWDIGLPTRRGVGHVFSSSHIGRDEAERELRVYLGEVGRDLPVRELKIRAGHRTRFWERNCVAVGLAAGFLEPLEASAIVLIELSAKLIAEQMPACREVMDTVAKRFNDTTLYRWGRIVDFLKLHYALTQRTDSDFWRDNCRPETMPDRLQELMTLWRYQAPWMHDEFDRVEEVFPSASYQYVLYGMGQRTEIAPGSLEAEAIVAERARRENDVQTGRMLAGLPRHRDLIRKIVERGLPTI

SEQ ID NO: 86336 - protein, 491 aa, unidentified
  source 1..491: note = Planctomycetes bacterium
  REGION 1..491: note = tr|A0A518IWZ7|A0A518IWZ7_9BACT Tryptophan halogenase; OS = Planctomycetes bacterium Mal33 OX=2527992; GN = Mal33_36250 PE=4 SV=1
MNKEVDLLVLGSGFGGSLLSLLLARQGLRVAVIDRAVHPRFAIGESSTPLADATLKELAQRYDLPELMPLTAYGPWRRRHPDLMCGLKRGFSYFGHSRGTEFSPADQLLVAASSNDEHSDTHWLRSDVDAWLFERAADRGAMQFEGASYRLSREDSQWLVAGEASGAAFSLRAPMIIDATGAAGEVLRYLKIASQTHQLKTTSWAVYGHFENVTSVAEMLDRRQIDRRRHPFACDDAAVHLVLDDGWMWQLRFCDDRVSAGFAIGQPADTPKPNADEIWRQRLDRFPFLRQQFAAAKIVAPASGLQTTSRMQRLTSLAAGPGWAALPNTAGFIDPLHSTGLAHTMFGVRRLVEILLQTGTSNQLLAELENYSSTLIDELRLVDQLVEGCYAGLPSFRLWSAWCMLYFAAVTSMEQSPGGGVAAFLHADDPRFRTVVGEARGELQRAIDAGRGPAACERFEAWLRQAIAPWNRVGLLESECDGMYARTAKPV

SEQ ID NO: 86337 - protein, 527 aa, Maricaulis sp.
  REGION 1..527: note = tr|A0A1Q8FP39|A0A1Q8FP39_9RHOB Tryptophan halogenase; OS = Maricaulis sp. W15 OX=1772333 GN=AWH62_06960 PE=4 SV=1
MNQTCNSILILGGGSAGWLTAAYLARRLGSGRPDGPTITLVESPNVPSVGVGEGTLPSLRLTLATLGVDEAAFMRASEATFKQGIHFSGWSQSPDGSPASYFHPFNSPRQMGGIDLVPYWSLGAAGKGDSYTRAITPQHDVYTAMKAPKRLEDAPFSGPLNYAYHLDVHRFGEFLKAYALGLGVKHVSDHITAVERAETGDIAGLDGEASGRLTADLYVDCSGFKARLIGDALGEPLVPVGDSLFCDRAVAIQVPWDRPDAPLPSATISTAHEAGWTWDIGLRQRRGVGYVWSSAHSDADAAETILRRYVGQDADDHPVRHLTMTTGFRRRQWVGNCVAVGLSAGFLEPLESTGILLIEAAAHLIADNLPRRGDFAPAARHFNSAMGQRFTCAVDFLKLHYALSNRRDTAFWRDNADPASWPLSLRDKLDRWQVRLPNAHDLDSAHDSFRHINYAYVLIGMGAAPDLAGDRARYPFLSEATAEFGRIKDATGRAMAALPDHRALVEGLQTHRFGAAAPRTASMGGAR

SEQ ID NO: 86338 - protein, 498 aa, Maricaulis sp.
  REGION 1..498: note = tr|A0A1Q8G0F2|A0A1Q8G0F2_9RHOB Tryptophan halogenase; OS = Maricaulis sp. W15 OX=1772333 GN=AWH62_00025 PE=4 SV=1
MSDNKVDHILIIGGGTAGWMCAAALSHRLRADRVRIELVESEGIGTVGVGESTIPHIRHFNASLGIDEADFMARTHATYKLAIEFRDWGRIGDSYMHPFGAFGVPGAVVDFHHDWLRSGGETALGSIDDYSLPIAMARGQRFARPASDPRDLASTYAYAFQFDAAAYARYLRDFAEARGVIRTEGRVTDVQVDGETGHVRNVSLESGQRIEADLFIDCSGFRGLITEQALATGYEDWSHWLPCDRAIALPSAATGELPPYTRATALEAGWAWRIPLQHRVGNGHVYASAFMDDERAETLLRDQLEGEALAEPNRLRFLAGKRKRQWNRNCVAIGLSSGFLEPLESTSIHLIQSAIGHLLDLFPTGEWDPAEADEFNRVMDQEYARIRDFLILHYKATQRDDTEFWRHCREMDIPDSLAGKIEHFRERGLIADYEHGVFLKPSWQAVFLGQHITPQRLDPRAVNAAAGIRPLAAELTRIATAMPGHAEVLSAHAHATAD

SEQ ID NO: 86339 - protein, 415 aa, Pseudomonas fluorescens
  REGION 1..415: note = tr|J2Y5E7|J2Y5E7_PSEFL Tryptophan halogenase, putative OS=Pseudomonas fluorescens Q2-87 OX=1038922; GN = PflQ2_5241 PE=4 SV=1
MPSVEMESRQVVIIGAGPSGAIAAALLKRKGHDVLVIERQHFPRFSIGESLLSHCLDFVEEAGMLEAVNAAGFQRKNGAAFAWRERYSAFDFGDTFSHGKPTTFQVQRADFDKLLADQAALQGVEIRYGEAIASADFTLAKPQLGVQREDGSEYRVEADFVLDASGYGRVLPRLLDLEAPSNFPVRQAVFTHIEDRIDAPTFDREKILITTHPSKRDVWFWTIPFSGGRCSVGVVAAAEHFASRTDDLDACLRGFIDETPSLAEVLKNAVWDTPARTIGGYSANVKTLHGPGFALLGNAAEFLDPVFSSGVTIAMRSASMAAGVLHRQLQGESVDWQSEFAAPLKRGVDTFRCYVEGWYAGTFQDVIFYTEGSDDIRRMISSILAGYAWDERNPFVSEPKRRLRMLSEICASPAS

SEQ ID NO: 86340 - protein, 516 aa, Sphingomonas paucimobilis
  REGION 1..516: note = tr|A0A411LED4|A0A411LED4_SPHPI Tryptophan 7-halogenase OS=Sphingomonas paucimobilis OX=13689; GN = DRN02_000490 PE=4 SV=1
MARESKGPERGCGVVSDKVRAVVVGGGTAGWMTAAALARLLPGQCNVHLIESEAIGVVGVGEATLPHIRAFNERLGISEADFMARTRATFKLGIEFRDWGRIGDSYIHPFGTFGRGGGAIDFHHYWARLMQGGQDLPPLDQLSYACTLARQGRFDHPGRERDQLSSTFGYAYQFDALLFAPYLRSLAEEMGALRTEGIVIDVERDGESGLIRAVTLGDGQRIEGDLFIDCSGFRSLLLGQTLGEPFEDWSKWLPTDRAVAMPCRTRTAVTPYTSAIAMPAGWRWRIPLQHRTGNGYVYASDFISDDDARDALIEAVEGEPIAEPRLLRFKAGRRQRSWVGNCIAIGLASGFLEPLESTSIYLVQQAITALIEIFPERHPSDADRDEFNRIIDLEYDRIRDFLILHYHATTRDDSPFWNYVRTMPIPDSLAEKMELWRRRARVVKYREGVFLDASWIAVYLGQGIVPQGWDPRADIAATPELTQAVAALRAEIAHDVAARPDHRDFLDRYCPMGAAA

SEQ ID NO: 86341 - protein, 510 aa, unidentified; identical to SEQ ID NO: 82759
  source 1..510: note = Hyphomonadaceae bacterium
  REGION 1..510: note = tr|A0A2E1LTZ6|A0A2E1LTZ6_9RHOB Tryptophan halogenase; OS = Hyphomonadaceae bacterium OX=2026748 GN=CME93_08210; PE = 4 SV=1
  VARIANT 374: note = Xaa can be any naturally occurring amino acid
  VARIANT 449: note = Xaa can be any naturally occurring amino acid
  VARIANT 454: note = Xaa can be any naturally occurring amino acid

SEQ ID NO: 86342 - protein, 508 aa, Litorimonas taeanensis
  REGION 1..508: note = tr|A0A420WJR0|A0A420WJR0_9RHOB Tryptophan halogenase; OS = Litorimonas taeanensis OX=568099 GN=DES40_0473 PE=4 SV=1
MEKIDKIVIAGGGTAGWMAAAALSKILGPHYCEIELVESEAIGTVGVGEATIPQIGTFNRTLGITEDDFVRETNATFKLGIEFVDWGQLGDRYIHPFGGYGLDMGGVSFHAFYLKNHPKHNHQILEDYSLQAKAARKNRFMRPVNAGNSPLSNIAYAFHFDAGLYAKYLRRLAEERGVTRTEGKIVDIEQDPETGFVTSISLDKGIKVKGDLFIDCTGFRGLLIEQTLKTGFTDWSHWLPCDSAVVAPCKRKGEMLPYTRSTASAAGWQWRIPLQHRVGNGHVYASSFMSDEEALTHFIENLESPPLQDPRVIRFKTGMRKKAWNKNVVALGLSGGFLEPLESTSIHIIQHGIAKLMQMFPDKSFNQVDIDRYNRLTDFENEKIRDFIILHYYATQRTDSDFWNYTKTMEIPEYLAEKINLFKSYGRVFRENEELFNDTSWFAVMLGQNIIPNAYDPVADIFDAEETAKRLQNISETIETASNYMPQHEDFIKENCASDTFIKHYAKE

SEQ ID NO: 86343 - protein, 511 aa, Caulobacter segnis
  REGION 1..511: note = tr|D5VNT1|D5VNT1_CAUST Tryptophan halogenase; OS = Caulobacter segnis (strain ATCC 21756 / DSM 7131 / JCM 7823 / NBRC 15250 / LMG 17158 / TK0059) OX=509190; GN = Cseg_3733PE=4 SV=1
MQDKRIRKLVIVGGGTAGWMAAAALRRHFQGGPLEITLVESSEIGTIGVGEATIPTIRGFYQQLGLSDIEVMRATQATCKLGIRFDGWLREGHAFIHPFGLFGQDLRGVPFHHYWRKLAQGGEPTNIQDYSLGASLAAAGKFMAPPRNPANSLSIFDWALHLDAGLFAQLMRRVAEDNGVRRIDARITKVNLRPEDGFVASLDLDTGATVEGDLFIDCSGFRGLLIEEALQTGYESWSDLLFCDRAFAVQSEGVGDPAPYTEVKAQSAGWRWRIPLQHRYGNGYVFSSRHISDEDALAELKAAVPDRLLHAPRLIRFNPGRRKQAWNRNVIALGLSSGFLEPLESTSIALIETGVEKIKALFPDKDFAPELVDEFNDWSRREMERVRDFIILHYWANQRSRGEGSDTAFWRDCNAVTLPDSLRRKVELFRQRGHFVRYRWEMFQPASWMAIYAGFELLPEMVDPALDGIDAQALSAPLAEMRKAIAEVVASAPPHAAFLDQYCRPAPVAAQ

SEQ ID NO: 86344 - protein, 498 aa, unidentified
  source 1..498: note = Hyphomonadaceae bacterium
  REGION 1..498: note = tr|A0A2E3AXQ7|A0A2E3AXQ7_9RHOB Tryptophan halogenase; OS = Hyphomonadaceae bacterium OX=2026748 GN=CME95_14895; PE = 4 SV=1
  VARIANT 459: note = Xaa can be any naturally occurring amino acid
MTEAGKKQRVVIAGGGTAGWMTAAAMGKVLEKVCDVTLVESDSIGTVGVGEATIPTLVTYNRLLGIDEAQLMSALRATFKLGIAFENWTDVGHRYIHSFGITGKDHWTAGFQHFWRRGRELGVAGEFGDYCLELIAAEQERFKHLPDLGLNYAYHLDATAYAGFLREIAEQHGVVRREGKIREVRRAEDGDIGSLFLEDGSEIAGDLFVDCTGFRALLIDGALGVGYEDWSHWLPCDRAIAVQTASVRPPRPYTRSIAHEAGWRWQIPLQHRTGNGTVYCSRYMSDDEARGKLLGDIEGECLSEPRLLRFRTGTRRAHWHRNCIAIGLSSGFIEPLESTSIHMIQRSVMRLMQMFPREGVHQPDIDEFNRQTAYEIEHIRDFIILHYHLTNRTDTPFWRHCRTMDIPDGLRHRMALFQQAGRVFRANDELFAENSWTQVMLGQGLMPQSHHPVADVMTXAEVTRFLSYITENVNKTVAGLPMHQDYLGSYCPATKSDL

SEQ ID NO: 86345 - protein, 531 aa, unidentified
  source 1..531: note = Streptomyces roseochromogenus
  REGION 1..531: note = tr|V6KS34|V6KS34_STRRC Uncharacterized protein; OS = Streptomyces roseochromogenus subsp. oscitans DS 12.976; OX = 1352936 GN=M878_11230 PE=4 SV=1
MSDNRIRKILVLGGGTTGWMSAAYLAKALGSSAEVTVLEAPSVPRIGVGEATIPNLQKVFFDFLGLSEEEWMPECNASFKLGIRYINWRTPGSGEALGREHQGGKDHFDHVFGVLPSHENLPLSHYWTHKKLTGQTDEPFDQACYTQPQIFDRNLSPRYLDGTRWASYAWHFDAQKVADFLGRFSVEKLGVQHIQDKFVGADVDQRGHIVAVKTEEGRRLEADLFIDCSGFRSLLMNGVMKEPFLDMSDHLLNDRAVATQIPHDDENNGVEPFTSAIAMSAGWTWKIPMLGRFGTGYVYSSRFTSQDEATQEFCRMWGIDPETHPLNHVKFRVGRNRRAWVKNCIGLGLANQFVEPLESTGIYFVYAALYQLVKHFPDKSFDPVLVNRFNHEVEEMFDDTRDFIQGHFSFAPRNDTPYWRACKELELAPRFVEKVKEYKSGLGVNLPVTDEAGYYGNFEAEFRNFWSNANYYCILAGLGELPDNPMPLLAHQPESIASAEAVFEEIKKRREELLATLPSTHEYLLKLHGKA

SEQ ID NO: 86346 - protein, 508 aa, Maricaulis sp.
  REGION 1..508: note = tr|A0A1Q8G0G5|A0A1Q8G0G5_9RHOB Tryptophan halogenase; OS = Maricaulis sp. W15 OX=1772333 GN=AWH62_00015 PE=4 SV=1
MINPRTLDQVVIVGGGSAGWMTAAALSRLIGNGHTKITLIESEAIGIVGVGEATIPPIRHFNELLGLDERDFLRATQGTIKTAIEFVDWTRPGHTYLHPFGTYGADMNAVKFHQYWLKLRQLGQAEAFGEYNLCDVAARQNRFGPVARDRQSPVSSLHWAYHFDASLYARHLRRYAEQRGVQRIEGKVVDVHQRPEDGFIASVEMESGDRITGDLFVDCSGFRGLLIEQTLKSGFEDWTHWLPCNRAIAVSSASAGELTPFTRSTARDAGWQWRIPLQHRIGSGFVYSADHLSEDEATSVLLDNLDGEPLNTPKPIRFTTGRRKQAWIKNCVAIGLASGFLEPLESTSIHITQAGISRLMALFPDKDFDPAGITEYNRQAEYLYRHIRDFIVLHYHANERHGVPLWDHCRNMAIPETLQRKLDLFRLKGRLFRYEDELFAESSWHAVLLGQNVMPDGYDPLVDAAPEDRIIDAFRQMHQAVAGAVASMPKHQTFIDQHCRAAMTAPPA

SEQ ID NO: 86347 - protein, 433 aa, Litorimonas taeanensis
  REGION 1..433: note = tr|A0A420WJF9|A0A420WJF9_9RHOB Tryptophan halogenase; OS = Litorimonas taeanensis OX=568099 GN=DES40_0475 PE=4 SV=1
MAHVGSVSSIRIDGDFHGGSICAVFLSWLGKSLGFTVSGSLSEHSSYEKQPPIILGPQALSLFRKIGLDERDMLKACAGTFVVGAEFEHDNLNAPSFAPYLTSVATLDGIAFHQIYGAARSLHIIAPYSDYFAPLYLAKGKRFSHPIETQPVGRANFRYNLILERALFEDYMRRAAKHYGFRSATQNDADLILKADNNPLQADGFTKISPNTTMPSHIKYRVKNSAIIQIVQTQTDCLETLFPVENQSRKTQSDTCQNVWQDNVINLSDCLRSLLPYDHAYMDAIASLLLSLFDLWPDKSDTTINAAEFNRRVESSINRAKDFQSALCVAAGLIDIENTSQPFKVKWQQFLSRGRLVSYDDEPVSDAEWIAYLLALGINPERVDPLTGKFTPTQMTDALNLQKDISQKWGNSQAIQTEYLGRAKALYAHKRSQ

SEQ ID NO: 86348 - protein, 505 aa, Litorimonas taeanensis
  REGION 1..505: note = tr|A0A420WLR3|A0A420WLR3_9RHOB Tryptophan halogenase; OS = Litorimonas taeanensis OX=568099 GN=DES40_1265 PE=4 SV=1
MVVNADNKQVKTIAVVGGGSSGWMTACLLNARLNEDPRRPVTITLIEAPNIPVIGVGEATVPSIRRTLKAIGISEKAFMIGADATFKSLIRFEDWNKGEHFDHPFDRRERPNSDPAVLSWLARNQMGGEGFSNRFSVLSNTSTKGLAPKALGWPEYQSTFPYAYHLDAVKLGKVLTEFGTENGIAHKLAKIVNVEISEAGDIEALVSEDGASYRADLYVDCTGFSAHLAKHIMPETQDYSEHLLCDRAVTMSVPYEVHRPDRILPYTSAKALGAGWLWDINLRSRRSLGYVHSSAHLSSDEAEAELRVIEGRHADNIEVKHIRFKTYKRNKSWHRNCLAIGLADGFVEPLESTGLYMMQFAAQSVADILRFNRHFDAATTNQFNKLMQTLFDEILGYVALHYLTSKRRDTPFWKDATASHRTPAALQNLLKEWKKRPPHDVDLLSNHRLFSLESYEYLLFGMGYMSEGQINAAPVVFDQTDMLNKVYAKFPEHEDWLSSTLGHIK

SEQ ID NO: 86349 - protein, 513 aa, unidentified
  source 1..513: note = Hyphomonadaceae bacterium
  REGION 1..513: note = tr|A0A3D2W017|A0A3D2W017_9RHOB Tryptophan halogenase; OS = Hyphomonadaceae bacterium OX=2026748 GN=DHW63_05215; PE = 4 SV=1
MNTSRISKVVILGGGTAGWMTAAALAKLFALRIKVALVESDDIGTIGVGEATIPTIHWFNELIGLNEAEFMLATKASFKLGIEFIDWTAPNHRYFHPFGQLGIALTGVSFHHRWLKARREGPTRVLSAYSLATQLALAGRFAKPVQDPKSILSTLGYAYHFDAGLYARHLRTLSEAQGVVRHEGKVVRIEQDPETGFVTALSTDRGERLEGELFIDCSGFRALLIEDLFKAGFDDWSHWLPCDRAVAVPCARGDDITPYTRSTARAAGWQWRIPLRHRTGNGYVYSSSFTDDEAAAEMLLANLDGEALADPRFLRFTAGRRRKTWDRNVVAIGLSAGFLEPLESTSIHLIQSGIAKLLALFPNRDCDPGLAAQFNRLFALDMDNIKDFLILHYHATSGKTEPLWEHCRHMMLPDSLIEREAQFRRSGRLLLGTDDLFKEASWLAVLDGQGIEAGDYNPLADLLDSRTNLAQLEQIEQVIARAVPTLPVHEQAIVALTGERADAAAAAGSRPAP

SEQ ID NO: 86350 - protein, 521 aa, unidentified
  source 1..521: note = Xiangella phaseoli
  REGION 1..521: note = tr|A0A1H7CMR8|A0A1H7CMR8_9ACTN Tryptophan halogenase; OS = Xiangella phaseoli OX=1144548 GN=SAMN05443287_11014; PE = 4 SV=1
MMIRDVVIVGGGTAGWMTATYLKTAFQDRISVTLVESAAVGTIGVGEATFSTIRHFFDYLGLDERDWMPQCSGSYKLAIKYDNWRGDGSHFYHPFERLRTSDGFTMAEWNLALGDATESFDRGSFITPYLCEAQRSPRMLDGSLFTTSLDGALGRSTLDEQRAQFPYAYHFDAALMARYLTKLGVELGVRHVVADVVGVGQDERGWLTHVTTRDQGDVTGDLFVDCTGFRGLLINQTLQERFISFTDVLPNNRAVALRVPRDMERQGIDPYTKATAKEAGWIWTIPLYGRIGTGYVYSDEFCDPDEAERTLREFAAPGQDDLAANHIRMRIGRNERSWVNNCVAVGLSSGFVEPLESTGIFFIQHAIEQLVKHFPDNTWDPVLIRGYNEKVARVIDGVKEFLVLHYVASPRQDTAYWRETKVRKIPDGLAERLETAAVRVLDESTIYPYYHGFEVYSWITVLLGMGWAPKSARPALAHIDPTRASAELAAIRADAERLVNTLPNAYEYLSTIQPPTAQGRS

SEQ ID NO: 86351 - protein, 503 aa, unidentified
  source 1..503: note = Hyphomonadaceae bacterium
  REGION 1..503: note = tr|A0A3D2W2G6|A0A3D2W2G6_9RHOB Tryptophan halogenase; OS = Hyphomonadaceae bacterium OX=2026748 GN=DHW63_09740; PE = 4 SV=1
MQDQIKSILIVGGGSAGWMTAALFSHLFQGLYRIQLIESEEIATIGVGEATIPAIKKYNELLKLDEAEFMRTTQGTFKLGIQFNDWLKPGASYIHGFGVIGQDWEWLRCHHYWLKLNQLGEASDLANYSINTAAALHNKFVRAQPNMPESPLSHIAHAFHFDAGLYAQFLRRYSETRGVKRIEGKIVDVTLRPDDGFIESVTMENGAIVDADFFVDCSGFRGLLIEQALKTGYEDWTHWLPCDRALAVPCSRSEDFTPYTRSTARPAGWQWRIPLQHRTGNGHVFSSAFMDEAEAEKLLLANLDGKQLAEPNRIRFTTGKRKKLWNKNCVAVGLASGFLEPLESTSLFMIQSSVVRLIRLFPDGVIDPANVAEFNRQSDFEYERIRDFIILHYKATERDDSPFWRYCRDMEIPATLQRKMDLFRANGRIFREDDELFSEESWIQVFLGQGVTPRGYDPLVDLKSTPQIVQFMGNIESVIAKCVEVMPTHEAFVEKFCDAKAAS

SEQ ID NO: 86352 - protein, 507 aa, Sphingomonas sp.
  REGION 1..507: note = tr|A0A4R2RWT7|A0A4R2RWT7_9SPHN Tryptophan halogenase; OS = Sphingomonas sp. PP-CE-1G-424 OX=2135658; GN = C8J43_103542 PE=4 SV=1
MTGTPAARITKVVIVGGGTAGWMTAAALSRLVATGVAVTLVESEEIGTVGVGEATIPSLRDYNRMLGIDEDALVRATGATFKLGIEFRDWRRLGDSYLHPFGTHGRDIEGVSFHQLWLRQANLGGDPGPIGDYCLSAVAARKGRFTRPASNPQSVLSTLSYAFHFDAALYAKFLRGMAEEAGVVRVEGRVAAVDRDAESGFITGLRLDGDRRIDGELFIDCSGFRSLLLGDALGVPFTSWQHWLPCDRAWAVPSERQGTLTPYTRATAETAGWRWRIPLQHRVGNGHVYASDHLDDDDALRALLAGLDGKPLAEPRQLRFVAGRRERLWEKNCVAIGLSGGFLEPLESTSIHLIQSGITRLMALFPDRGFDDVEIAEYNRVMLREYAQIRDFIILHYHATERSDSTFWNHCRTMTIPDTLQAKLDLWSGKARTFREQGELFTPDGWIAVLLGQGVRPVSTDPLVAALPPEESARFMDHVRDMIGKTADAMPAHEQFIAQHCAATIAP

SEQ ID NO: 86353 - protein, 546 aa, Nostoc sp.
  REGION 1..546: note = tr|A0A2L2NT83|A0A2L2NT83_9NOSO Tryptophan halogenase; OS = Nostoc sp. 'Lobaria pulmonaria (5183) cyanobiont'; OX = 1618022 GN=NLP_3599 PE=4 SV=1
MSQDVQKILIVGGGSAGWMTAAYLSKALDKNINITLVESSNITKIGVGEATFSTIKVFFDFLGLQEYEWMPKCNATYKMAIKFVNWNAKGQHFYHPFQRYEVIDGFDISEWWLKMKKDQEAFDYACFLIPWLCDHQRSPRYLDSKVFDHKVQNEFSQEHIAKKNILDKLKIQYPYAYHFDANLLARFMKDYAMSRGVKQIVDDMVDIKLTEDGSIDSLTTKEHGILSGDLFIDCTGFRGLLINKALGEPFISYSDSLLCDRAIAMQIPTDIKKDGINPYTTSTALSSGWVWNIPLYGRNGTGYVYSSAFISAESAEQEFRQHLGAAANNGQASHIKMRIGRNRNSWVKNCVAIGLSSGFVEPLESTGIFFIQHGIEELVNHFPSKSFNQELIHSYNKVVADCIDGVREFLTLHYYASDRTDTEFWKATKNNIKVPEELQEKLRLWKNRLPSNKTINPKYHGFESYSYSVMLLGLNYMPESSLPILEHIGNHNAEAAFLEIRERANYLTSTLPSQSEYLTHVIKSQEQSEYVSGVSDRSYQIHALIS

SEQ ID NO: 86354 - protein, 501 aa, Streptomyces sp.
  REGION 1..501: note = tr|A0A1Q5IUD0|A0A1Q5IUD0_9ACTN Tryptophan halogenase; OS = Streptomyces sp. CB02261 OX=1703940 GN=AMK29_25860 PE=4; SV = 1
MTASYFKAAFGDRIDITLVESGTVGAVGVGEATFSDIRHFFEFLGLKEKDWMPACNATYKLAVRFENWREPGHYFYHPFEQMRSVNGFPLTDWWLKNGPTDRFDKDCFVMASVIDAGLSPRHQDGTLIDQPFVEGGNEMQGLTMSEHQGKTQFPYAYQFEAALLAKYLTRYSVERGVRHVVDDVTKVELDERGWISAVRTAEHGDITGDLYIDCTGFRGVLLNQALEEPFISYQDTLPNDSAVALQVPMDMERRGIRPCTTATAQDAGWIWTIPLTGRVGTGYVYAKDYLSPEDAERTLREFVGPAAADVEANHIRMRIGRSRNSWVRNCVAIGLSSGFVEPLESTGIFFIHHAIEQLAKNFPGEDWNPVHRDVYNDAVSHVMDGVREFLVLHYVAAKRTDTQYWRDAKTRAIPDSLAERIEKWKVQLPDSESIYPYYHGLPAYSYMCILLGMGGIDLAPSPALALSDGAAARREFELIREKTESLVKVLPRAYDYFTRLG

SEQ ID NO: 86355 - protein, 499 aa, Sphingomonas sp.
  REGION 1..499: note = tr|A0A4V2SX64|A0A4V2SX64_9SPHN Tryptophan halogenase; OS = Sphingomonas sp. PP-CE-1G-424 OX=2135658 GN=C8J43_11418; PE = 4 SV=1
MNDTSEPPRTRVVVAGGGTAGWIAAAAIVRQLGSLVDVTLVESDEIGTVGVGESTIPTARSFHAFLGIDEAAFMRATQATFKLGIAFENWRQVGDRYFHPFGSIGRSVAIADFQHFWLEARARGFGEAYGDYSLEQQAAGAGLFGHDEQHSLAYAYHLDATAYARFLRALAEPWGVRRVEGCIERVERDGEGGYIAALVLASGERISGDLFVDCTGFRALLTEGTLETGFEDWSEWLATDRALAVQTETVGPPVPYTRAIAHGAGWRWQIPLQTRTGNGLVYSSGHMSDDEAHETLIGALDGRTLFEPRPLRFRSGMRQQAWNRNCIALGLAAGFIEPLESTSIHLIMNAVIRLIQLFPFRGDDHGALASRFNAQSRHEWEHVRDFIILHYHVTQRDDSAFWRDCARMTIPDSLAERIALFTKTAGAWQGQDDLFRIDSWVSVMLGQGVVPRAHHRIASIIKGQELRTSFEDLSRGIASTVRLLPRHCDFLARYCPADG

SEQ ID NO: 86356 - protein, 496 aa, Sphingomonas paucimobilis; identical to SEQ ID NO: 86305
  REGION 1..496: note = tr|A0A411LLQ3|A0A411LLQ3_SPHPI Tryptophan 7-halogenase OS=Sphingomonas paucimobilis OX=13689; GN = DRN02_015540 PE=4 SV=1

SEQ ID NO: 86357 - protein, 501 aa, Brevundimonas sp.
  REGION 1..501: note = tr|A0A326L0I2|A0A326L0I2_9CAUL Tryptophan halogenase; OS = Brevundimonas sp. OX=1871086 GN=DI552_00885 PE=4 SV=1
MDDLRIRKIVIVGGGTAGWMTAAALGKLLGPDYAEIVVVESDEIGIVGVGEATIPQIGMFNRMLGLDEDDFVRKTKGSFKLGIQFVDWGRKGQTYFHPFGPFGVDMEGVSFHAFWLRLAQAGAPHPITDYSLQAVAAEDDRFMRAVDAGPKSPLSKIAYAFHFDAGLYARFLRQFAEARGVRRQEGKIVRVDQRATDGFIEAVALESGERIEGELFIDCSGFRGLLIEQTLKAGYEDWSHWLPCDRAVAAPCESAPVLTPYTRSTARDAGWQWRIPLQHRTGNGHVYSSRYISDDEAAGVLLSNLDGRPLADPRFLRFVTGRRKQAWVKNCVALGLASGFIEPLESTSIHLIQSGVAKLLQMFPDRTFPQADIDRFNRATRLEMEQVRDFIILHYNLSERDDTTFWRHCRDMDVPETLKEKYRLFETTGRIFRENDELFNDTSWFAVMIGQGMRPKRFDPVAEVLSLDETQRRLAEVRRVMRTCADQMPPHAEFIRRNCAA

SEQ ID NO: 86358 - protein, 510 aa, Glaciecola nitratireducens
  REGION 1..510: note = tr|G4QLL6|G4QLL6_GLANF Tryptophan halogenase; OS = Glaciecola nitratireducens (strain JCM 12485 / KCTC 12276 / FR1064) OX=1085623 GN=GNIT_2013 PE=4 SV=1
MKKLLILGGGTAGWMAANMLNHYFTESKVINPNQKSWQITLVESPQIGIIGVGEGSTPQLKKFFDLLGIQESEWMPACHATYKNGISFLQWSEHQATNRYFHPFPSPFDRQTASAFLYHCQMRSRGMDVPVNPDDFFLSAKLAQLNRSPKPLLGKPQIPLNYAYHFDSAKLGAFLCQRAVNRGVVHINGKMERAIQDKDKSMRAIKLATGETLDADLFIDATGFNSLLLQGVLEEPFDSFDSNLFNNKAVAIPSTSQKIIPSETKATALSAGWAWQIPLTNRTGNGYVYSDQYLSPEQAEEELRRHINSNIADESETRSEAKHLNMKVGQVQRHWHKNVVAVGLSQGFIEPLEATALHLVQETIQKLAASLTDPSFDSEQERIKLRFNEAIKRRFNGIRDYIVCHYKMNTRTDSQYWVDNRENNNISTQLADVIDTWRSKKDIAAVLEQHQMTHYYPVISWYCLLAGYGSFAPATSPNKLPSSNMKQLAHYIMQNASHFAPHNESLGIST

SEQ ID NO: 86359 - protein, 484 aa, Brevundimonas sp.
  REGION 1..484: note = tr|A0A326L0K2|A0A326L0K2_9CAUL Tryptophan halogenase; OS = Brevundimonas sp. OX=1871086 GN=DI552_00865 PE=4 SV=1
MSAAALAALVAPTGVRVTLVESSEIGTVGVGESTLPHIRDFNQKLGIDEADFMRATQATFKLAIRFDDWGRIGDSYYHPFGDYGALGGAAPFHHYWLHGGGADRVGSIDDYALPIVAAREGRFAPPVDDRRSVLSTYDYAYHFDAGLYAAYLRRFAEARGVTRIDGRIASVAQSPEDGTIRSVTLEDGREIAGDFFIDCSGFRGLLIEQTLKAGYTDWSRWLPCDRAVALPCASDAPKRAYTQAVALEAGWRFRIPLQHRIGNGYVYSSAFLDADNAETRLRGLLEGEALKEANHLRFLAGQRTRNWAANCVSVGLASGFIEPLESTSIYLIQAAITKLTELWPAHARDAPAARAFNRQMDLQYERIRDFIILHYQATQRDDSPLWRAVRETPPPDSLAERIALFREKGVVQDYREGLFQHPSWIAVLLGQHVTPARAHPLVAAEDPVRLRAGLQRMRDAIRRAADSLPTQDAYIARYCAAEAV

SEQ ID NO: 86360 - protein, 507 aa, Cellvibrio japonicus
  REGION 1..507: note = tr|B3PI17|B3PI17_CELJU Tryptophan halogenase; OS = Cellvibrio japonicus (strain Ueda107) OX=498211; GN = CJA_0356 PE=4 SV=1
MPNSELTKMTTMKKPEKILIVGGGTAGWMAANLLVSRWKDIDVCLLESTEIGIIGVGEGSTPHLKFFFDAIDVADSEWMPRCNATYKNGISFANWSSIPGFESYFHPFPAQTDDVFTVPFFFSNIKARMQGNNVNAHPDHYFLETYLTRANLGPIPAESFPFGVAYGYHFDSGLLGQFLAEKAMSRGVKRILGTITEVVLDANGSLAAVRLDDDSLLDASFFIDCSGFKSLLLQGALKATFKSFKENLFNNAAVVMPTAISEIIPPETRSTALSNGWAWKIPLTNRYGNGYVYSTDYITPEQAEIELRQHLNLVDSDVAARHLQMKVGRVEKHWEKNCLAVGLSQGFIEPLEATALALSFNTISLFMAHYEKGLYTNQFEDAFNKEVNAKFDSVRDYIVCHYKVNQRKDTDYWKDNAANTYLSETLNQILYFWQRGGDFAKNMYMNNLVGSYQPKSWACLLAGYGVFPPLTSDAKAAQFKPVQDMEQLADFIRRCGLNFKQHNELLH

SEQ ID NO: 86361 - protein, 494 aa, Sphingomonas sp.
  REGION 1..494: note = tr|A0A2T7VTG4|A0A2T7VTG4_9SPHN Tryptophan halogenase; OS = Sphingomonas sp. TPD3009 OX=2171625 GN=DC425_07115 PE=4; SV = 1
MPDGGGGVTQDRAIRSILVAGGGIVGWLAAAALKRRAPFLTVTLLDGARSPNALADRIACTLPSLAGFHADLGIGDEDAVVRTGAGYRLGTRFVGWGRDDADYVHAYDHYGQAFGATAFHLHWLRAAQEGAVPRFDAFAPAAALGRAGRYAPPTPGTIFARHQPGLTLDLPRYTRMIRAFAAHVGVDVVVGEIADIERHDRGGIAAVALVGGGRLAADLYVDATGPEARLRDTIDSARDDWSAWLPCDRVMLADGPTAEPPLLTPVTAHATGWSWDGGTQRGIVYAADRLADDDAAGLLGSAGVAPMTIRPGTRREPWRANCVAIGDAATAIDPLEWCNLHLALSAIDRLIAMLPDRDMAPVEAADFNRQTLAEAERVRDMLALHYRATARPEPMWRAVARVPPPDSLAHTMLQFEERGRLPFYEEETFTRDGWAAVLIGQGIRPRRIDPLAEAIPLSDAHAAMLGVTDAIAAALPHAPTHAAWLAAQARRLAR

SEQ ID NO: 86362 - protein, 509 aa, unidentified
  source 1..509: note = Lysobacter aestuarii
  REGION 1..509: note = tr|A0A508AYJ0|A0A508AYJ0_9GAMM Tryptophan 7-halogenase OS=Lysobacter aestuarii OX=1706195; GN = FKV25_02820 PE=4 SV=1
MDATDTPKGPVRKVVIAGGGTAGWLAACALSHQFRERLEITLVESEQIGTVGVGESTVPPIRTFHRFLQIDEQEFLRAVAGTFKLSISFENWRRPGERYIHPFGITGQGTWATAFHHFWLDSIRRGMPSELGDFCLETVASRGDRFSLQTKPQVNYAYHFDASLYAKFLRRIAERHGLRRLEGKIREVRQHAHDGSVSALVLEDGTVLEGDLFIDCTGFRGLLIEQTLETGYEDWNEWLPSDRAVAVQTESVGPPVPYTRAIAHEAGWRWHIPLQHRVGCGLVFSSRHMSDDEARAKLLRDVGAPAIREPWLVPFRTGRRLKAWNRNVVALGLASGFIEPLESTSIHLAISAVVRLVQLFPFDGMASSLVDLYNDVSRAEMEHVRDFIILHYHATQREEPMWKACREMALPDSLEIRLRAWRERAHAWQDPDELFRVDSWTHVLLGQGVQPGPAHPLARALGDDGLRSLLASIRRPIDQAVATMPSQQAFIDGYCRASAEVWGARPVPG

SEQ ID NO: 86363 - protein, 516 aa, unidentified
  source 1..516: note = Alteromonadaceae bacterium
  REGION 1..516: note = tr|A0A1Y6C386|A0A1Y6C386_9ALTE Dehydrogenase (Flavoprotein) OS=Alteromonadaceae bacterium Bs31; OX = 1304903 GN=SAMN02745866_02128 PE=4 SV=1
MIKNIVIVGGGAAGWLTAGILAANYAKADNRAVSITLVESPDINTIGVGEGTWPTMRMTLSQIGVSETEFLRCCNASFKQGSKFVNWSHGEGGDAYYHPFTIPQAYNETNFHALWQRHFSNSAYDAVANPQAAICELSCAPKNITVPEYAGVLNYGYHLDAGKFGDLLKRHCTEKLGVRHVSDNVIQVVAAEDESIAYLKTEKSGDIHGDLFVDCSGTHCLLLGEHYNIPFKDCRQYSINDTALATQVPYDNQNSPIASATIATAHSAGWTWDIGLSSRRGVGYVYSSQHISDDDAEKELRAYIGSSVESSVAEQLSVRKIKIRAGHREKFWHRNCVAVGMAAGFIEPLEASALALVELSAKFIRDELPMSSSTIPLVEKRFNTTFSYRWEKIIEFLKLHYLISQRRDTAYWCEVSDPASAPDGLKELLELWKFRPPYHHDLLHTEEIFPSASYQYVLYGMGFETSADMKAPEGNSEQKFLRQVRESIQQAEKLSGSLPSNRALLQTIEKHELQKI

SEQ ID NO: 86364 - protein, 502 aa, Sphingopyxis sp.
  REGION 1..502: note = tr|A0A095AZQ1|A0A095AZQ1_9SPHN Tryptophan halogenase; OS = Sphingopyxis sp. LC81 OX=1502850 GN=FG91_01492 PE=4 SV=1
MGDSRITKVVIVGGGTAGWMAAAALSRTMDNLSIRLVESDEIGTVGVGEATIPAIRLFNALIGIDENEFIRETGGTFKLGIQFHDWGRIGDVYMHAFGQIGRSLGMLPFQQYWLRGRNEGVAGRLGDYSLNESAGRQNRFARLPQIPNTSLDGIAYAFHFDAALYAAYLRKVSEAAGVERTEGKIASVRRNGESGHVEAVVLENGKAIEGELFIDCSGFRALLIEEALETGFEDWTHWLPCDRAIAVPSENAGPARPYTQAIAHTAGWQWRIPLQHRTGNGHVFCSDFISEDEATATLLANIEGRPLADPRTLRFRTGMRKQAWNGNVVALGLASGFLEPLESTSIHLIQNGIAKLLAHFPDRDFDAANIDAYNRRVRFDYERIRDFVILHYHANQRTDAPFWVRCREMGIPETLARKIELFKSQGQIVREGDELFVEIGWFQVLTGQNIMPGSYHPMADQLTHDELAGFFADIETIVARTASHLPTHEDFIAQHCAAGVPA

SEQ ID NO: 86365 - protein, 502 aa, unidentified
  source 1..502: note = Lysobacter aestuarii
  REGION 1..502: note = tr|A0A508A7V2|A0A508A7V2_9GAMM Tryptophan 7-halogenase OS=Lysobacter aestuarii OX=1706195; GN = FKV25_09295 PE=4 SV=1
MTEEARDIRQRRIRRVVIAGGGTAGWMAAAGLARALGKVVDITLVESEEIGTIGVGEATIPTLMTFHRLLQINEQEFMAATQATVKLGIQFENWRKPGHAYFHSFGTTGKDHWMANFVHFWLRGRREGVAGSYDEYCVELLAALEGRFAHLPRNGINYAYHLDAGLYARYLRRFSEALGARRVEGRIAAVETDEASGYITALAMADGSRIEGDLFIDCTGFRALLIGQALNVGFEDWSHWLPNDRAFAVPTASVGDAVPFTRSIAGTAGWQWRIPLQHRVGNGIVYSSRHLDDDDARQALLDGVDGEPLRDPLQIRFRPGKRLKCWHRNCVALGLAAGFVEPLESTTIHMIQRGIVRLLQTFPDVIDPRHVTAYNAQLDDELQHVRDFVILHYHVTERRDTPYWRMLADMEVPASLRERIALFRETGNVFHAPMELFAENSWIQVMMGQGITPRQYHPAAEVMSEADLARFFDDIRRSVRTTVDTLPAHMDYIRQYCPAGPA

SEQ ID NO: 86366 - protein, 503 aa, Oleiphilus messinensis
  REGION 1..503: note = tr|A0A1Y0IBD7|A0A1Y0IBD7_9GAMM Tryptophan-5-halogenase OS=Oleiphilus messinensis; OX = 141451 GN=OLMES_3770 PE=4 SV=1
MKKITDVVVLGGGTAGLISAITLRKHCPELSIKLIRSKAIGVIGVGEGTLGSFNPFFFDYLGLDRGEFYRQVNPSWKLGIKFRWGRRGAFNYAFSPNCDWQWDDLAYPNGFYCQDNFLHTCQYSSLMDVDMAFVKKPNGDPLILNDAVFHLENTRFVDYLESQAEALGIPLIDKKVSSATCSERGVSSFLLEDGNTLEADLFIDASGFKSVLLHQHLNIPFQSFESSLFCDRALIGTWKRTTEAIRPYTTSDTMNAGWSWRIDHESHINRGYVYSSSFLSRDAAETEFRTENPLLGDLHEIKFTPGKYARSWEKNVVAIGNASGFVEPLEATSIGIICAQSKKLVDALKASQGAPNQMIRDLYNHYVDTQWEATRRFLTLHYKLNTLLDNSFWQTCNSETVTGDLISEMLQFYETYGPDNRLMRAFLPESDPFGIDGYLTIMVGMKHPYPTAASVYSHPPLSEADKVRWRTHQHYYREQAEQNALSAQEALAIIKSPDWEWYQ

SEQ ID NO: 86367 - protein, 526 aa, Dyella sp.
  REGION 1..526: note = tr|A0A318DH37|A0A318DH37_9GAMM Tryptophan halogenase; OS = Dyella sp. AtDHG13 OX=1938897 GN=BDW41_11662 PE=4 SV=1
MARLKKVLIVGGGTAGWLAACYLAKAVNARDPQGVQVHLVESPDIGLLGVGEATFPSIRGTLAAIGLDERRFLVGATATYKQGIHYRHWVRPPGTPGADHFFHPFNAPSQRPGGPELLPYWLLGAAPEGMPFADAVSMQTALVDHGRGPKRFKDPDYQGPMNHAFHFDAACFARVLAEHGQEALGVKRHVATVERTELDEHGAIARVVTRELGELTADLYVDCTGLRGLLIGNVMQSPFKSRADVLFADRAVAMQVPYEKADTPIPSYTISTAQEAGWIWDIGLQKRRGVGYVYSSRHTSDERAEQVFRGYLGAAAEGLKAMHIKFETGYRPEHWRRNCVAVGLAGGFVEPLESTGIALIELATYLLTHLLPSDTDEMERAARHFNEMMIARYDRIIDFIKMHYCLSQRRDSAFWIDNTDAASIPATLQDKLAQWKHRPPHRLDFISDLEMFLVSSWQYVLYGMEFKTDISAMRSAYPRMEEARQEFRNIQLAASQALQDLPDHRALVERMCQEYRERAGRQNAVA

SEQ ID NO: 86368 - protein, 532 aa, Nonomuraea sp.
  REGION 1..532: note = tr|A0A4R4NS68|A0A4R4NS68_9ACTN Tryptophan 7-halogenase OS=Nonomuraea sp. KC201 OX=1848320; GN = E1267_05415 PE=4 SV=1
MSHDNRVRNIVILGGGTAGWMTASYLSKALQRTVKITVLEAPTIPRIGVGEATVPNLQRAFFDYLGIPEDEWMRECNASFKVAVKFINWRTPGPSSPTPQPLGGRTDQFFHPFGLLPSADQIPLSHYWVAKTLKGETDEPFDYACFKETAIMDANRAPRALDGTPATYYAWHFDAQKVANFLRTFAVEKQGAEHVEDQMTEVLRDERGFITALRTAGGRLLEGDLFIDCSGFRGLLINQAMEEPFIDMNDHLLCDSAVATAVPHDDAEHGVEPYTSAIAMSSGWTWRIPMLGRFGTGYVYSSQFATKDEAAEELCRLWGLDPENAPLNHIRFRVGRNRRAWVRNCVSIGLASCFLEPLESTGIYFVYAAIHQLAKHFPDRTFDPVLIDSFNREIEEMFDDTRDFIQAHFSLSPRTDTPFWRANKELELADGIKQKIAMYKAGLPINLPITDERGYYGNFEAEFRNFWTNGSYYCVFSGMGLRPDKPLPSLTYKPEAIEAAETLFANVKRHQKELATSLPSNYEFLRHLHGDS

SEQ ID NO: 86369 - protein, 529 aa, Catenovulum sp.
  REGION 1..529: note = tr|A0A2S0VV16|A0A2S0VV16_9ALTE Tryptophan 7-halogenase OS=Catenovulum sp. CCB-QB4 OX=2172099; GN = C2869_17255 PE=4 SV=1
MRSILICGGGTAGWMTAVYLSHLYNRFEQTVSIELIESSDLPPVGVGEATVHSIRHFFDMVGINEAEFFTATDATFKLGIEFINWKQAQKGKTHSYWHPFDMQTAEIAGDNLAQCWLDNLAHTKHDYAHSVSISPYLSAAHKAPKTIDMPAYQAPIPYAYHFDAGKLATFLKSIALKRGVKHTIGAIDKVIQHNGIIQAIQTNIANKQADFYFDCTGFRGLLINQLSANNWLSLEDELPCNRALAIQTPYPDQQQPATHTQAIAMQHGWRWRIGLQNRVGNGYVFSDKYCSESQAEQELRQDLLQNNTKLGRDAEFKLLKMRIGHRQQTWINNCCAIGLSSGFIEPLESTGIYLIEAGLRLWGEYTRFHDFSQLSKATSLLPNQYNQILRDIYQDLKRFIVLHYVLSDRQDSEFWRSWQQVLNQDEVLQQQLAVWRYKPVEASDFFAAKSQLFNEINYRFVLYGMGHLPTQTVTQTTKQSASQVPATRGSSHQQNQLNLLKQLNQFCLKQTQKHPDQMAVLNSFKSIKS

SEQ ID NO: 86370 - protein, 471 aa, Catenovulum sp.
  REGION 1..471: note = tr|A0A2S0VN87|A0A2S0VN87_9ALTE Tryptophan 7-halogenase OS=Catenovulum sp. CCB-QB4 OX=2172099; GN = C2869_04135 PE=4 SV=1
MTASLLAKQWPQADITLIESPNIPTVGVGEGSTPYIRHLFKTLDISEAQWMSKCNATFKNGITFKHWSIRKGFESYFHPFLSQYDDDVTPLFAQHTRLRRHGYPITCHPDNYYLTKELTNQRKSCQLQDSSNPVETLYAYHFDAEKLGLLLKEKSLALGVNHLLGNISQVKQAENGDIASVVSDEQGELSADIFVDCTGFKALLMQKTLNTPFVSYSDNLFNDSAVAIASPKIDNYSPQTVSTALSNGWAWHIPLQNRVGNGYVYSAKYQTADSAEQELRHFIGQDRVKDVEARHIKMRVGRSEKHWNKNCLAVGLSQGFIEPLEATALHLVQDTIESFIAAIEEGKGTTAKQDYFNDKINYAFERVRDYIVTHYISNSRNDTPYWQDCRKIPVSDSLQRILYAWFNGMDVAEELDLQQISQYYPSASWHALLAGVGTFPEPDPSKTETFANEIQQIQHRRDELAKLFKNL

SEQ ID NO: 86371 - protein, 274 aa, Streptomyces albogriseolus
  REGION 1..274: note = tr|A0A1B1V581|A0A1B1V581_STRAO Putative dehydrogenase/reductase OS=Streptomyces albogriseolus; OX = 1887 GN=thdE PE=4 SV=1
MTAATPRTVAIVAGGSRGIGAEISRHLAAAGMDVVIGFAHDTVAAEKLVGEISGAGATGGPGAGAGAGDGPGAGAGAGAGAGQAKAVLADIAEPDGAARLFDEAEQAFGGVDIVVTCAGAHAARRGPLAATDDDDFRRVVDVNFRGTFHMLRAAATRVRTGGRIITFSSSALALGAPGQAVYNASKAAVEVLTRQLAKELAGRDITVNAIAPGPTGTELFLSGRPPEAIEALAGQIPLGRIGRPDDIAAVVDFLLGEQGGWINGQVLHANGGIV

SEQ ID NO: 86372 - protein, 497 aa, Phenylobacterium sp.
  REGION 1..497: note = tr|A0A521PKE5|A0A521PKE5_9CAUL Tryptophan 7-halogenase OS=Phenylobacterium sp. OX=1871053; GN = EPO51_17155 PE=4 SV=1
MQGQVVKKVVVAGGGSAGWMAAAALSTQLGGLLDITLVESDAIGTVGVGESTIPTARTFVHLLGLDEREFMRETGATFKLGILFENWGQLGDRYIHSFGQVGKSTLMAHFHHLWLQARAQGFGGDLGDYCLELRASEEGKFFTSDAAPVNYAYHIDATRFGRYLRRRCENKGVRRVEGKIQQVQQQPETGHITALVLESGERVEGDLFIDCTGFRGVLIDQTLKAGFEDWGQWLPNDRAVAVQTRTTHPAMPLTRAIAHTAGWQWGIPLQHREGNGWVYCSDFMSDDEASASLLGQLKGERLTDPWQLRFRPGRRRKAWDKNCVAIGLAAGFIEPLEATSLHMIMIAVTRLLQLFPFTGVNDALVTRFNFLADQEILRIRDFIILHYNATQRTDTPYWDRCRTMEIPQSLAERIELFRETAQVYHVPGELFLVDSWLQVMLGQRIVPKSHHLMGALMPPERLRRALDDLRGNIARAVGRMPSHQDFVDQYAGLQPAD

SEQ ID NO: 86373 - protein, 420 aa, Streptomyces albogriseolus
  REGION 1..420: note = tr|A0A1B1V588|A0A1B1V588_STRAO Putative Na+/H+ antiporter OS=Streptomyces albogriseolus OX=1887 GN=thdA; PE = 4 SV=1
MTGNAVSDFFLALTLAITAAKLLGAALQRIGQPAVVGEILAGILVSPMVLSATVSEKIFPESVQPVFSGLANVGLATFMFLVGYEMDGALLRGRKRIPLSIAVGSVVLPLAGGVALAIPLASTYAPGSHTGFVLFVGVAMSVTAFPVLARILSDRELNRTATGAIVLVAAAIGDIVAWICLAGVIAFTGATGEWRFVLLPLYVLALAFLVRPALKKAVHYAEHHDKQATVLFPVLIAGLLVSSAATEWLGIHFIFGAFAFGAIMPRAMSESLRVLVVNQMQQTGYLLLPLYFVVAGMKVDLAGFGGGVLLTLVLVIAVAVVTKTLGVYAAGRLAGADHGQALTASVLMNTRGLTEIVIVSVGLEMALIDQKFYSIMVVMAVVTTVLTGPLLKRIGAHRLVGANPPEGASAAAREKQNAPG

SEQ ID NO: 86374 - protein, 501 aa, Streptomyces sp.
  REGION 1..501: note = tr|A0A2D3E318|A0A2D3E318_9ACTN Tryptophan halogenase; OS = Streptomyces sp. KCB13F003 OX=2052824 GN=ulm24 PE=4 SV=1
MTAAYLRAALGESINVTVVESKRIKTIGVGEATFSTVRHFFDYLGLPENEWMPKCNATYKLGIRFENWRAKGHYFYHPFERLRVVDGFPLTEWWLNKKPSDRFDQDVFMMSEICDNLRSPRYLDGTLFEQDFIERGGSMDLERTTLAEQATQFPYAYQFDASLLADFLTEYATTRGARHIEDDVVEVVRDERGWISHLRTREHGELAGDLFIDCTGFAGLLLNKTLGEPFLSYQNSLPNDSAVALRVPHDAERTRLRPCTTATAQEAGWIWTIPLFERIGTGYVYASDYTTPEEAERTLREFVGPQAADVEANHIRMRVGRSRNSWVNNCVAIGLASGFVEPLESTGIFFIQQGIEELVKHFPNADWDPQLRTSYNRTVANAMDGVREFLVLHYRGAARNDNAYWRDAKTREIPDGLAARMEAWQSKLPTEETVFPHYHGFEPYSYHAMLLGLGGIDLKPAPVLAHMDDSRAAQEIQRLKDQARDIAKRLPSQYEYLAQMH

SEQ ID NO: 86375 - protein, 502 aa, Erythrobacter sp.
  REGION 1..502: note = tr|A0A5E7YIK5|A0A5E7YIK5_9SPHN Tryptophan halogenase; OS = Erythrobacter sp. EC-HK427 OX=2038396 GN=ERY430_41407; PE = 4 SV=1
MAIEHIVIVGGGTAGWMAAAALSRLRKNRELAITLVESEEIGTVGVGEATIPPFVDFQTLLEIDESEMLAAVQGSFKLGIQFVNWGNVGESYIHPFGNYGYQMGGLSFHHIWHHAKSRGDNRPIQVFNAETMAAYFGKFAKTDDMKRDDLPPINYAYHINATAYAAFLRKYAEARGVVRTEGKVADVRLDAETGFVTSIALENGPEIAADFFVDCTGFRGLLIEQALETGYEEWTHWLPCNRAVALPCNRDDGAPPPPFTKATAHKAGWQWQVPLQHRNGNGHVYCDAYMSADEATDILIANIAGKPTADPNHLRFITGRRKKFWNKNVVALGLAAGFMEPLESTSIHLINTGINKLIALLSLDGVNEAQQASFNRLTAKEYEKIRDFLILHYNATRRDDSDFWNYCRTMSVPDSLTEKVELFKMNGQIFREDDELFTETSWAAVMMGQGISMNGHNAMAATLDQAETHKELDEIEKSIRFLVQHMPAHGDYLARYCPAKAA

SEQ ID NO: 86376 - protein, 536 aa, unidentified
  source 1..536: note = Betaproteobacteria bacterium
  REGION 1..536: note = tr|A0A536XDX7|A0A536XDX7_9PROT Tryptophan 7-halogenase OS=Betaproteobacteria bacterium OX=1891241; GN = E6H58_06885 PE=4 SV=1
MTTTATLFNYSFSLTQPNPRAHLPPAIRKIVIVGGGSAGWMTAMTLAAALLPKGIEIEVLESPIVGIIGVGEGSTPWLRGFFDALGIEESEWMPACHATYKCGITFDGWSTKPGFESYFHPFASMLDNLTMTQFVYNSHGRLNGVNLHAHPNRFFIASTLAEQHLAPKPQRNFPFDVWYGYHFDAVLLGQFLQKKAIERGVKYKSCHVKEVKLNERGDIASVQTDGDETIAADFFVDCTGFAGLMIQQALKTPFVSFSSNLFNDAAVAMPTPIGDDIPSQTVSTAMKNGWAWKIPLTARYGNGYVYSSSFCSADEAERELREHLGLLDSPTPARHLKMKIGRVTKHWNRNCLAVGLAQGFIEPLEATALLFIQQTASAFVEALEAGDVSEAAHERFNERVNQHFEGTRDYIVTHYKTNSRSDTEYWRANASNENLSEPLKQLFGFWMAGKPIAGDVGRQTIGKGYPVFSWYCIMSGMGIFPDAHTLRAPTPSEARYKMSEIDNLLQRSALNFVKQRDLLADIPPKRREDALQIYFW

SEQ ID NO: 86377 - protein, 521 aa, Xanthomonas campestris
  REGION 1..521: note = tr|A0A2H1T0L8|A0A2H1T0L8_XANCH Tryptophan halogenase; OS = Xanthomonas campestris pv. phaseoli OX=317013 GN=prnA; PE = 4 SV=1
MPDTTPSDPHQRPVRRVVIAGGGTAGWMAAAALSKLLGRHLHITLVESDEIGTVGVGEATIPSLVTFHRLLEIDEAAFMAATQATIKLGIAFEHWRDVDQHYIHSFGHAGTDHWSAGFQHFWLKGRQRGVARDFGDYCLELRAAQEGRFAHLPNGGMNYAYHLDAGLYARFLRRFSEGFGVTRVEGRIGQVETDAQSGFLTALTLQDGMRVEGDLFLDCTGFAGLLIGKTLGVGSDDWSRWLFADSALAVQTESVGPPVTYTRSRADQAGWMWRIPLQHRVGNGIVYSSRYMDQDGARAVLERNLTGRALTEPRPLRFTPNQRHRVWEKNCVALGLASGFLEPLESTNIHLIQRGIIRLLQTFPQVINAVDIAEYNRQAAQEITHIRDFVILHYHATDRRDTPFWRDCAAMDIPDSLRHRVELFRQSGRVFHQANELFAENSWVQVMLGQGVVPQQHHPVADLMGDAELSRFLETIRTRVEAALVRLPAHADFLQRYCPAPPLPEPAARVPAPPVMATPAG

SEQ ID NO: 86378 - protein, 357 aa, Burkholderia cepacia
  REGION 1..357: note = tr|K7XQI5|K7XQI5_BURCE Tryptophan halogenase (Fragment) OS=Burkholderia cepacia OX=292 GN=prnA PE=4 SV=1
SHPIKNIVIVGGGTAGWMSASYLVRALQQQANITLIESEAIPRIGVGEATIPNLQKVFFDFLGIPEREWMPQVNGAFKSAIKFVNWRKSPDRSRDDHFYHLFGSVPNCDGVPLTHYWLRKREQGFQQPMEYACYPQPEALDARLAPCLLDGTRQMPHAWHFDAHLVADFLKRWAVGRGVTRVVDEVVEVHLNERGDIASLSTKEGRTLEADLFIDCSGMRGLLINQALKEPFIDMSDYLCDSAVASAVPNDDARVGIEPYTSAIAMNSGWTWKIPMLGRFGSGYVFSSKFTSRDQATADFLNLWGLSDKQPLNQIKFRVGRNGRAWVNNCVAIGLSSCFLEPLESTGIYFIYAALYQ

SEQ ID NO: 86379 - protein, 505 aa, Xanthomonas campestris; identical to SEQ ID NO: 84637
  REGION 1..505: note = tr|A0A2H1T5U9|A0A2H1T5U9_XANCH Tryptophan halogenase; OS = Xanthomonas campestris pv. phaseoli OX=317013 GN=prnA; PE = 4 SV=1

SEQ ID NO: 86380 - protein, 506 aa, Xanthomonas campestris; identical to SEQ ID NO: 84626
  REGION 1..506: note = tr|A0A2H1T176|A0A2H1T176_XANCH Tryptophan halogenase; OS = Xanthomonas campestris pv. phaseoli OX=317013 GN=prnA; PE = 4 SV=1

SEQ ID NO: 86381 - protein, 510 aa, Rubrivivax sp.
  REGION 1..510: note = tr|A0A519IGS6|A0A519IGS6_9BURK Tryptophan 7-halogenase OS=Rubrivivax sp. OX=50259 GN=EOP39_07450; PE = 4 SV=1
MNDQAIRRIVIVGGGTAGWMSAAPLSQVFGTQPGGGAPNPVGVEIVLVESPEIGTVGVGEATLPSIRYFNDTLELDNAEFMRKTQASFKLGIEFKDWGQLGNRFFHGFGGFGPPVVNRSPVMHYLRLNAQGGMPSYEEWSTATVMARRNRFALPEQGPPSAANSYSYAFHFDAGLYAAYLRDYAMARGVRREEGTIVDVSLRPTDGFVTAVTLSDGRRIEGDLFIDCSGFRALLIEGACKAGYHDWTHWLPCDSAQAVPCDKVLPMTPYTTSTARSAGWQWRIPLQHRTGNGHVYCSGYTSDEEAGRVLMANLDGAAQDSPRQLRFKTGLRKRIWDRNVVAVGLSSGFLEPLESTSLSLIIHGISALVELFPDRHCEPHLVDEYNRKMTRQYESIRDFIILHYKQTDRDDSEFWRYCKSMSIPDTLAHQMDVFRRNGRVTILDRDSFGEDSWWSLYLGLGMKPEELPPLLAQVGEQPLREHFSRVRMAVSKTVDGMPDHAAYLSRLVGAG

SEQ ID NO: 86382 - protein, 519 aa, Rubrivivax sp.
  REGION 1..519: note = tr|A0A520C4V2|A0A520C4V2_9BURK Tryptophan 7-halogenase (Fragment) OS=Rubrivivax sp. OX=50259; GN = EOP35_01245 PE=4 SV=1
MTTAPQPIRRVVIAGGGTAGWMVAAGLSKCLGKQVDIRLVESEEIGTVGVGEATIPTLHILHEILDLDEVEFVKATQATFKLGISFENWRNVGEDYFHSFGKTGKGHWTAGFHHFWLEARKRGLASSYDDYCLELRAARDNRFATLPDNGINYAYHFDATLYGQYLRRLSAAQGVQRIEGKIAKVHTDAASGNITGLQLDGGALIEGDLFIDCTGMRSLLLGETLGVPYESWSQWLPCDSALAVQTMSVGEPVPYTRSIAHPWGWQWRIPLQHRVGNGIVFSSRHVSEDEAKATLLANVQGEVLRQPRLIKFTPGQRAQAWKKNVVAIGLSGGFLEPLESTSIHLIQKGLTRLVELFPSDGIRQSDIDEYNAQSRDAMEVARDFIILHYHVTNRDDSQFWRDCRDMDVPPLLKHRIQHFRDTARIMLRQGELFAENSWVQVMMGQGILPASHHPITRNMDNRSMADFLGEIRKDVVRTVMKLPTHQQFISHNCPAPKLDVAPGKPLGGASLRINPQARL

SEQ ID NO: 86383 - protein, 219 aa, Streptomyces griseus
  REGION 1..219: note = tr|V9XLX4|V9XLX4_STRGR Tryptophan 6-halogenase (Fragment) OS=Streptomyces griseus subsp. griseus OX=67263; PE = 4 SV=1
GGGTAGWMTASYLGKALQDTVEITVLEAPTIPRIGVGEATVPNLQRSFFDYLGIPEEEWMRECNASFKMAVRFINWRTEGRGEPNPRTLPGDGPDHFYHPFGLLPDHDQTPLSHYWFQRKHQGETTEPFDYACFREPPLMDAMKAPRHTDGTAATRYAWHFDAHLVADFLRRFATEKQGVRHVQDEMVRVEQDERGYVTALHTKGGQALDADLFIDCSG

SEQ ID NO: 86384 - protein, 399 aa, unidentified
  source 1..399: note = Gammaproteobacteria bacterium
  REGION 1..399: note = tr|A0A534C4F4|A0A534C4F4_9GAMM Tryptophan 7-halogenase OS=Gammaproteobacteria bacterium OX=1913989; GN = E6K42_12100 PE=4 SV=1
MPTARRPAGTRIPRRSRCVASKCGIRFDGWSTKPGFGSYFHPFASMLDNLTMKQFVHNVEARINGADLEAHPDRFFIAARLAAKRRAPKASESFPFDIWHGYHFDAVLLGQFLHRKAVDRGVRYKSCHVTHANLDADGNLASVGTEEGETIAADLFVDCSGFAGLLIDKALHTPFVSFSSNLFNDAAVAIPSPMEGSIPSETVSTAMKHGWAWKIPLTTRFGNGYVYSSRFCSADEAETELRGHLGLLDADVPVRHLKMKIGRVTRHWNRNCLAVGLSQGFIEPLEATALLFIQQTAATFVEFVERGDLGEAAHQRFNDMMNTHFEGIRDYSWYSIMAGMGIFPDPQDLRPPTAQEARFSVAEIDNLLERSSANYPDHRAALESIPPRRTEPALQVYFW

SEQ ID NO: 86385 - protein, 197 aa, unidentified
  source 1..197: note = Gammaproteobacteria bacterium
  REGION 1..197: note = tr|A0A534GYJ1|A0A534GYJ1_9GAMM Tryptophan 7-halogenase (Fragment) OS=Gammaproteobacteria bacterium; OX = 1913989 GN=E6K24_18055 PE=4 SV=1
EAHPDRYFIAARLAAKRRAPKASESFPFDIWHGYHFDAVLLGQFLHRKAVDRGVRYKSCHVTHANLDADGNLASVGTEEGETIAADLFVDCSGFAGLLIDKALHTPFVSFSSNLFNDAAVAIPSPMEGSIPSETVSTAMKHGWAWKIPLTSRFGNGYVYSSRFCSADEAETELRRHLGLLDADVPARHLKMKIGRVT

SEQ ID NO: 86386 - protein, 498 aa, Brevundimonas sp.
  REGION 1..498: note = tr|A0A519KTC2|A0A519KTC2_9CAUL Tryptophan 7-halogenase OS=Brevundimonas sp. OX=1871086; GN = EON86_12745 PE=4 SV=1
MRDIVIVGGGTAGWMTASALAKVAGTQSLSITLIESDEIGIVGVGEATIPPILLFNKLLGIDENEFIRETQATFKLGIQFVDWGKLGHTYAHPFGLFGADMNGINFSHYWLRAVQAGADADNHRFVAEAEAMRLNRFARTPAGGSGEMPRVNYAFQFDAGLYAAWLRKYAEKRGVVGREGEIVGAARDGESGTIRSVTLADGREVKGDLFIDCSGFRGLLIEQEMQAGYEDWTQWLPANRAVAVPCDRVEDPVPYTRSTARESGWQWRIPLQHRTGNGYVFSDAFISEDQATADLMSRLDGAPQAEPRVLRFVTGRRRKGWVGNVVAIGLSSGFLEPLESTSIHLIQTAISKLLALFPRARRDDAMADQFNREMDQQYEGVRDFIIAHYKVTTRDDTPFWRHCRDMAVPDSLAAKLELFRARGEVMVENHELFRETNWFPVLYGQGLTPEGYHPLADVLSDDDLRLRLSQIRAAIRARVDSLPSHDSYLRQCVAGTAR

SEQ ID NO: 86387 - protein, 102 aa, unidentified
  source 1..102: note = Gammaproteobacteria bacterium
  REGION 1..102: note = tr|A0A534I4H6|A0A534I4H6_9GAMM Tryptophan 7-halogenase (Fragment) OS=Gammaproteobacteria bacterium; OX = 1913989 GN=E6K21_13105 PE=4 SV=1
MQDRRLRSILIVGGGTAGWMAAAALAKVLGPDYAIRLIESEEIGTIGVGEATVPHLKLFNSVLEIDEVEFIREVRGTFKLGIQFVDWGRAGDRYIHGFGTIG

SEQ ID NO: 86388 - protein, 511 aa, unidentified
  source 1..511: note = Gammaproteobacteria bacterium
  REGION 1..511: note = tr|A0A534JD93|A0A534JD93_9GAMM Tryptophan 7-halogenase OS=Gammaproteobacteria bacterium OX=1913989; GN = E6K20_05085 PE=4 SV=1
MNGARTPGPIISVVILGGGTAGWMTAASLLQRLSRLGISVTVVESSQIGTIGVGEATVPAILRYFDSLGLDVYEVLRATNGTIKLGIEFDGWKHEGHRFIHPFSRYGIQAGPVAFHHLWNRLRAAGETAPVDDYSLGVQMARAGRVFLPPKQPRAEFEIFDWAVHFDAGRFAQFLRRFSEARGVRRIDARLTEAVRDPQSGHIIRLRLDNGETVDGQLFIDCSGFHRLLIERALESGYEDWRHWLMCDRAVALPCAAADPAQLAPYTRSRALAAGWTWRIPLQNRVGNGYVYSSDHISDEDAVASLRRELEGEALAEPNFVRFRAGHVRRFWVGNCIAIGLSGGFLEPLESTSISLIQMGIDKLIHLWPDTRMAPELASEYNRLSVQEFARVRDFIILHYAANGRTDGDLWRYCREMPLPDTLEHKIALYRAGGQIVQYQSESFFDSSWVCMYANFGIEARNWDPLAELIDLDELKNLTRRLRPDIAALACEGSPHREFLRLKGALAETRT

SEQ ID NO: 86389 - protein, 389 aa, unidentified
  source 1..389: note = Gammaproteobacteria bacterium
  REGION 1..389: note = tr|A0A534DMX6|A0A534DMX6_9GAMM Tryptophan 7-halogenase (Fragment) OS=Gammaproteobacteria bacterium; OX = 1913989 GN=E6K38_13075 PE=4 SV=1
MDKRVEDIVIVGGGTAGWMTAAFFSKLLKSGVRIRLIESDEIATIGVGEATIPAIKHYNAALELDENEFLARTQGTFKLGIEFVDWAKLGDFYIHGFGRIGQDLGILKCYQYWLKMRARGLVPGLEHYSINTVAPRQSKFMRSVPEMKQSPLGDIANAFHFDARLYALFLRAYAEARGVRRTEGKIVGTELRAGDGYIDAVRMESGERIPADLFFDCSGIRGLLIEQALHTGFESWNHWLPCDRAVAVPCESVDPLLPYTRATAHKAGWQWRIPLQHRIGNGYVYSSQYISDDEATAVLLARLDGKPSGPPRYIKFLPGKRRKLWNKNCVAVGLSSGFLEPLESTSIHLIQTTIVRLARFFPSRGFNPIDVEEFNRRADFEYERIRDFI

SEQ ID NO: 86390 - protein, 499 aa, Sphingopyxis sp.
  REGION 1..499: note = tr|A0A1Y5PTU2|A0A1Y5PTU2_9SPHN Tryptophan halogenase; OS = uncultured Sphingopyxis sp. OX=310581 GN=SPPYR_2280; PE = 4 SV=1
MSNKKAVQRVVIAGGGTAGWMMAAAIARTMGHTVDLTLVESEQIGTIGVGESTIPPLVNFNRILGIPETEFMRAAQATFKLGILFDNWKHDGDSYFHSFGLSGKDHWSAGFQHFWLNARERGHEQPYADYCLELVAGMQGKFAHLPEERMNYAYHVDATLYGRYLRKLAEADGCKRVEGKIARVELDGESGDIAALHLDGERRVEGDMFVDCTGFRGLLIDGALHAGFEDWGHWLPNDSAIAVQSKHLRKPPPYTQAIAHDAGWQWRIPLQHRMGAGIVYSSGYLSRDAAYDRLMSSVGEPLIEPFDIKFRGGVRRKQWFRNCVAVGLAGGFVEPLEATTVHLIQRAILRFIRLMPNGRVSERDAMEFNEQQRLDIEQIRDFVILHYKATNRRDSAFWRHVAAMPIPDSLQQKIELFRETGRVFRKNEELFAENSWVQVMMGQGIEPQTYHPIAAKLRDDEVERLFQTLRDNIAQTVATLPEHHAYVERYCGAEEPTAA

SEQ ID NO: 86391 - protein, 135 aa, Brevundimonas sp.
  REGION 1..135: note = tr|A0A519PIU4|A0A519PIU4_9CAUL Tryptophan halogenase (Fragment) OS=Brevundimonas sp. OX=1871086 GN=EON88_25845; PE = 4 SV=1
MTQRKKTRVVIAGGGTAGWLAAALLTRQLGALLDVTLVESEQIGTVGVGESTIPTVTRFHALIGVEERAFMTATGATFKLGISFEGWGRTGDRYIHSFGDVGKSTWMGDFQHFWLEARDRGVAGALGDYCFEHQA

SEQ ID NO: 86392 - protein, 40 aa, unidentified
  source 1..40: note = Gammaproteobacteria bacterium
  REGION 1..40: note = tr|A0A534ENW5|A0A534ENW5_9GAMM Tryptophan 7-halogenase (Fragment) OS=Gammaproteobacteria bacterium; OX = 1913989 GN=E6K39_12775 PE=4 SV=1
MADSRIRSIVIVGGGSAGWMAAAALAKTLGRECAIRLIES

SEQ ID NO: 86393 - protein, 510 aa, unidentified; identical to SEQ ID NO: 84044
  source 1..510: note = Unknown
  REGION 1..510: note = tr|A0A4S0RDK8|A0A4S0RDK8_9BACT Tryptophan 7-halogenase OS=bacterium M00.F.Ca.ET.177.01.1.1; OX = 2563908 GN=EN820_02130 PE=4 SV=1

SEQ ID NO: 86394 - protein, 352 aa, Brevundimonas sp.
  REGION 1..352: note = tr|A0A519Q4F6|A0A519Q4F6_9CAUL Tryptophan 7-halogenase (Fragment) OS=Brevundimonas sp. OX=1871086; GN = EON88_15710 PE=4 SV=1
GLYAAFLRRFAEGLGVVRVEGRIADVRMTDDGAVAGVTLADGRALDAEFFIDCSGFRGLLIEQALKAGYEDWSHWLPCDRAVAVPCESSGPPTPYTRSTAREAGWQWRIPLQHRIGNGYVHSSRFISEEDATATLMANLDGRPLADPRVLRFTTGRRKASWVKNVVAMGLASGFLEPLESTSIHMIQSAIARLMTLFPDRRFDPAVTAEYNRQTRIEAEQIRDFIILHYHATARTDSPLWEHVRTMAPPESLARKIDLFRSSGRFFRDGDELFSETSWIAVMFGQNIMPERWDPLADTLDADVMAGKLARMRMPTSSRAIAARRMSPSRPDREAANVHANEGWGINVGHGRS

SEQ ID NO: 86395 - protein, 505 aa, Xanthomonas campestris
  REGION 1..505: note = tr|A0A3S9RI46|A0A3S9RI46_XANCA Tryptophan 7-halogenase OS=Xanthomonas campestris pv. arecae; OX = 487849 GN=NX80_008970 PE=4 SV=1
MTQAQIRKVVIAGGGTAGWIAACALSHQFRDLLDITLVESEQIGTVGVGESTVPPIRTFHRFLQIDEQEFLRAVAGTFKLSISFENWLRQGDRYIHPFGITGQSTLVCAFHHLWLESQRRGMPGSFGDYCLETVASRVDRFALHGEPAVNYAYHLDAALYAKFLRARSEACGVKRIEGKIQQVTVQPHSGDVASLVLEDGQVIEGDLFIDCSGFRGLLIEQTLHTGYEDWSHWLPCDRAVAVQTEAVGPPVPYTRAIAHEAGWRWHIPLQHRVGNGLVFSSKHLSDDEAHTKLLHDVAAPAVKDPWMVPFRTGRRLKAWNKNVVSLGLASGFIEPLESTSIHLTISAVVRLLALFPAEGIAPSQVQLFNDVSRAEMEHVRDFVTLHYHATQRDEPLWQQCREMELPESLALRLRAWRERAHAWQGADELFRVDSWTHVLMGQGIAPEQHHPLTRAFADHDLRRLLDGIAQPIQHAVQQMPSQQAFIERYCKAGAQVWGMRSPMPA

SEQ ID NO: 86396 - protein, 498 aa, Sphingomonas sp.
  REGION 1..498: note = tr|A0A4U1L7T5|A0A4U1L7T5_9SPHN Tryptophan 7-halogenase OS=Sphingomonas sp. L-1-4w-11 OX=2572576; GN = FBR43_14475 PE=4 SV=1
MRSIVIAGGGTAGWMAAAAFARFLPREAWRVVLVESEAIGTVGVGEATIPQIQLFNHHLGLDEDEFLAATQGSIKLGIEFRDWVRPGHAYMHGFGQVGRGLGLAEFHHYWLRAHEAGTAAPFGAYSLNNMAAAAGRFARFEAQGPVPPMPYAFHFDAGLYAAYLRRHAEAGDVVRHEGRIVAVEPGEGGIAALLLDGERRIAGDLFIDCTGFRGLLIGEALGVGYHDWRHWLPCDRALAVPSARVGDPAPYTRATARRAGWQWRIPLQHRTGNGYVYASAHVSDDGAAATLLANLDGEPLGDPRPLAFTTGKREAFWAGNCIALGLSSGFLEPLESTSIHLIQTAVARILAFLPADRPTEADRAEYNRLTHVEYDRIRDFLILHYHANQRVGEPLWDAMRALELPEELARKLDLWRASARLSRRDDELFAEPGWTQVLIGQEILPERHHPLADAPGDRDLAAFLSTVADVARRTAAALPPHGDFLRGLSRAPQMKVSA

SEQ ID NO: 86397 - protein, 506 aa, unidentified
  source 1..506: note = Proteobacteria bacterium
  REGION 1..506: note = tr|A0A523NUN0|A0A523NUN0_9PROT Tryptophan 7-halogenase OS=Proteobacteria bacterium OX=1977087; GN = E2O36_05680 PE=4 SV=1
MNNQLNGPGKILIVGGGTAGWMTAMLLAKAWPGTPSEICLLESSDIGIIGVGEGSTPKMRRFFDGLDIPESQWMPACNATYKCGIRFPQWSTRKGYKSYYHPFFSIHDDSTVRAFANSVAHRRANIDVPAHPDAFFVSNHLANDELAPKPDPELEYQSEYAYHFEAGLIGRFLQERAIASGVTHLIDTVTAVKQHDNGDIARVETKDRGSIAADFFVDCTGFASVLTSKTLGVPFLSYKDTLFNDRAVALPTPLDGRSLPSQTISTALKYGWAWKIPLSNRFGNGYVYASDYIDADGAERELREHIGLNDDSVTARHLKMRVGRVESSWNGNCLAVGLSQGFIEPLEATALMIVQDTVENFITRFTEGHFTDKYRAEFNVKINLIFDSIKDYIFMHYKLNSRNDTNYWVDNRENTHVSDSLRQILDVWDSGGDMLGELRRQGPRLAYSPTSWFCILAGMGRFPRKPKKAKRNTQVSDPDELRRYCEKIVRHFPGHRDTIDAMRAAS

SEQ ID NO: 86398 - protein, 518 aa, Sphingomonas sp.
  REGION 1..518: note = tr|A0A4U1L7R3|A0A4U1L7R3_9SPHN Tryptophan 7-halogenase OS=Sphingomonas sp. L-1-4w-11 OX=2572576; GN = FBR43_00035 PE=4 SV=1
MADRVTSVVIVGGGTAGWLAACRIAAAADPHADTPLRVTLIESPDIPTIGVGEGTWPTMRRTLAAIGIAEADFLVACDASFKQGSRFVGWRDGAPDDAYLHPFTPPVEGDARAILAGWQARGALPFAAAVSPQPHVCARDLAPRQPAMPDYAGALNYGYHLDAGRFAALLRRHGVERLGVRHLRDHVDRVVLAQNGDIAAVETRAGGAVAGDLFIDCTGHAALLIGERYGVPFVDRSDVLFNDRALAVQVPVAPGSPIASQTDATAHAAGWIWDIGLPGRRGIGCVYSSAHLGDDEAADTLAAYVRRTMPDADAAALAPRRLAFRSGHRARFWERNCLAIGLSAGFLEPLEASAIVLIELSLDALVGDFPVTRGGMAHHAARFNARFAYRWDRIVEFLKLHYVPSVRSEPYWRDHRAAASIPGRLADLLAMWREAPPSARDFGAEDEIFPAASHQYVLYGMGALPPPAGAMRVADRAGVAQRMAQAAERARALAASLPTNRAYLDALHAQAPALEGMR

SEQ ID NO: 86399 - protein, 505 aa, Xanthomonas translucens
  REGION 1..505: note = tr|A0A5C1WSI6|A0A5C1WSI6_XANCT Tryptophan 7-halogenase OS=Xanthomonas translucens pv. undulosa; OX = 487909 GN=F0H33_00480 PE=4 SV=1
MAQIRKVVIAGGGTAGWIAACALAHQFRDLLDITLIESEQIGTVGVGESTVPPIRSFHRFLQIDEQEFLRAVAGTFKLSISFENWRRPGERYIHPFGLTGQSTLVCAFHHFWLEAQRRGMLSELGDYCLETVASRLDRFALQQSPPVNYAYHLDAGLYARLLRGHAERHGLKRVEGKIQQVRQHAESGCVEALLLEDGTLVEGDLFIDCTGFRGLLIEQTLHTGYEDWKQWLPCDRAVAVQTEAVAAPVPYTRAIAHAAGWRWHIPLQHRVGCGLVFSSAHLSDDEARAKLLHDAAAPPIKEPWLVPFRTGRRRKAWNKNVVALGLASGFIEPLESTSIHLTIAAVMRLLTLFPTDGIAPSMVDLYNEVSCIEMEHVRDFIILHYHANQRDEPMWQACREMALPDSLQQRLRAWHERAHAWQGADELFRVDSWIHVLLGQGIVPAQHHPLARALPDQQLQQFLDAIRQPIDRAVAQMPSQQDFIACYCKAGREVWAGRAPVAAPA

SEQ ID NO: 86400 - protein, 495 aa, Colwellia sp.
  REGION 1..495: note = tr|A0A161IA17|A0A161IA17_9GAMM Tryptophan halogenase; OS = Colwellia sp. C1 OX=1737566 PE=4 SV=1
MMDSKTKVVIAGGGTSGWLSAYSLISRLGTVLDITLVESDQIGTVGVGEATIPTIRSFHSLIGIDEQEFMSATQATFKLGIQFDNWGKEKGSYFHSFGEIGQRSWMAEFHEFWMEAKAQGFGGSLEDYCLELKAAKANKFATRAGKKPVSFAYHFDATAYADYLRTKSETAGVKRREGLIEHVQKDGTGNITSITLANGETILGDVFIDCTGFRGLLIGEHLDVGYEDWSHFLAADSAIAVQTKAVEEPRPYTQSIAHPAGWQWRIPLQSRVGNGIVYSSKFLSDDEARSTLMGNLTGEPITEPRQLRFTTGRREKAWHKNCIAIGLSSGFLEPLESTSIHLVTTALMRLMKLFPFGGKINLLAEQYNREAQLEAETIRDFIILHYHLTERDDSPFWDHYRTMEIPESLAHRMAIFKENGYAWPDDFGLFRVDSWVQVMMGQGITPEKHHKGSCVIPTEGLKEQMAALRKMIANSVEQLPTHNDFIKKYCPAKNR

SEQ ID NO: 86401 - protein, 491 aa, Sphingopyxis sp.
  REGION 1..491: note = tr|A0A1Y5Q3F5|A0A1Y5Q3F5_9SPHN Tryptophan halogenase; OS = uncultured Sphingopyxis sp. OX=310581 GN=SPPYR_2884; PE = 4 SV=1
MTGPRDITLVGRDAPLWLAAAALRRALAPAGVAVRVVELPAETGAADLYPTLPAIEALHNQIGINEAALLRTTRGAFTLGQNFVDASDAGRPSFLHGYGAHGTAIDGGDFFPHWVKARHHGLDVGLDDFSLTASAARGGRLFFPDADSEIYGRSDYGYHLPAAAYAKSLKAIARHLGVELFETATVAVERGDAGVAALLLDDGRRIESALFADLTRERLLSGGAFEAWDTPGDRVLSALAPRPAALPAYAEIRAGAGGWTGLFPGLTHIHVQHVFSRAATTDQEARAAAEAACGLPLDAVTVRPFAAGVAAEPWAGNVIALGDAACVLDPAHGFALHGLQLGIVHLLAAYPADGAGYAARRVEYNRVLRSHLARVADFQAAHHVLQNYSGAFWDAARALPLSEELGHRIDLFAARGELAPLEDESLPPDSWRALFVGHGIMPESWRPAADRVPPDEVKAHFRKMLGFVREAVLRQPTHDACLARIMQSAHG

SEQ ID NO: 86402 - protein, 523 aa, Streptomyces vinaceus
  REGION 1..523: note = tr|A0A5J6JC95|A0A5J6JC95_STRVI Tryptophan 7-halogenase OS=Streptomyces vinaceus OX=1960; GN = CP980_28410 PE=4 SV=1
MNTKNPDKVVIVGGGTAGWMTASYLKKAFGDRLSVTLVESGKIGTVGVGEATFSDIRHFFEFLDLKEEDWMPACNATYKLAVRFQDWQRPGHHFYHPFEQMRSVDGFSMTDWWLQDGPTDRFDRDCFVMASLCDAGRSPRYLNGSLLRQEFDERAEEPAGLTMSEHQGRTQFPYAYHFEAALLAKFLTGYSTDRGVQHIIDEVQEVKLDEHGWISHIVTKGHGDISGDLYIDCTGFRGVLLNQALGVPFISYQGTLPNDSAVALQVPLDMKTRGIPPYTQATAQEAGWIWTIPLFGRIGTGYVYAKDYCSPEEAERTLREFVGPEAADVEANHIRMRIGRSEQSWKNNCVAIGLSSGFVEPLESTGIFFIHHAIEQLVKHFPGADWHPQLRAGYNSAVSNVMDGVREFLVLHYKGAGRNDTQYWKDTKTRAIPDALADRIERWQVQLPDSENVFPYYHGLPPYSYMAILLGTGAIELRPSPALGLADSTAAQKEFAAIRDKAQFLVDTLPSQYEYFAAMQKLP

SEQ ID NO: 86403 - protein, 510 aa, unidentified; identical to SEQ ID NO: 84044
  source 1..510: note = Unknown
  REGION 1..510: note = tr|A0A4S0Z8Z7|A0A4S0Z8Z7_9BACT Tryptophan 7-halogenase OS=bacterium M00.F.Ca.ET.163.01.1.1; OX = 2563906 GN=EN806_02130 PE=4 SV=1

SEQ ID NO: 86404 - protein, 496 aa, Sphingopyxis sp.
  REGION 1..496: note = tr|A0A1Y5PQ37|A0A1Y5PQ37_9SPHN FAD dependent oxidoreductase family protein OS=uncultured Sphingopyxis sp. OX=310581 GN=SPPYR_0960 PE=4 SV=1
MSARARAVRRIVIVGGGTAGWMTAAALGRALAGHSHDITLVESEAIGTIGVGEATVPPIHEFNRYLRLDPADFLRATHGTIKLGIAFEGWGGADRRYFHPFGYLGIEMSGIHFHHYWLRHLAAGGDSDHGPYNLETMAAREGRFAPATRHGPVHHAVQFDAAAYARLLRSYAEDKGVTRIEGKVADVRLDPEDGFITALALDDGRVIDGDFFIDCSGFRGLLIEGALHTGYTEWSHWLPCDSAVAMPCESTGDPSPFTSSTAREAGWQWRIPLQHRTGNGYVYSSAHLGHDEAEALLRSRLPGAPLADANRLRFAAGHRKAIWNRNCVAIGLAGGFIEPLESTSIHLIQTTIIRLLSLLPRDAVDPNVVRRFNRDALHEYEVIRDFVIAHYALANRDDTPFWRDVAAAGMPDSLAERIEAFRATGNILFEPGDLFGPTNWYAVLTGQGVRPQSWHPIADGLSGEELASRLATLRGRVAEQLAELPPHAEFLRRLNS

SEQ ID NO: 86405 - protein, 518 aa, unidentified
  source 1..518: note = Kordiimonadales bacterium
  REGION 1..518: note = tr|A0A5A7NA20|A0A5A7NA20_9PROT Tryptophan halogenase; OS = Kordiimonadales bacterium JCM 17846 OX=1236968; GN = JCM17846_24590 PE=4 SV=1
MSKAIRSIVIVGGGSAGWLTAGLIAAEHRAYEKDGLSVTLVESPTVPTIGVGEGTWPTMRATLIKLGISETDFFKECDASFKQGAKFQRWVTGRDDDFYYHPLMLPQSFQSFDLAPYWKKIVSSTKQKISFSDAVCFQEAMCERNLAPKLITTPEYEAVANYAYHLDAGKFGAFLQSHCTQKLGVRHILDDVKGVVAADTGDIAGLETAASGRIEGDLFIDCTGFSSLLLGRHYDVPFKPCDDVLFIDRALAVQVPYAQDDDPIVPHTLSTAQSAGWVWDIGLPSRRGVGYVYSSRYQSEEAATETLRAYVGPAFDRLSVRQIPIRSGHRETFWRHNCVAVGLSAGFLEPLEASALVLIELSADMIAKNMPACRDVMDLAAKRFNETTAYRWDRIIDFLKLHYMLSQRTDSAFWIDNRDPATIPESLRQQLEIWRYQAPGNADFTSNNEVFPAASYQYVLYGMGFETDFSYQAHRLHREKDAMTLFGKNAKQKDQVLRALPKNRDLIEKIRRTGLQAI

SEQ ID NO: 86406 - protein, 512 aa, unidentified
  source 1..512: note = Kordiimonadales bacterium
  REGION 1..512: note = tr|A0A5A7N7I0|A0A5A7N7I0_9PROT Tryptophan halogenase; OS = Kordiimonadales bacterium JCM 17846 OX=1236968; GN = JCM17846_19640 PE=4 SV=1
MPQRPIRNIIIVGGGTAGWLSACLLASHCKTEQGRGGTVTLIESPSIPTIGVGEGTWPTMRQSLKRIGLTETDFLRATTAGLKQGSRFIGWADGSADDHYDHPFSPPLDAHGFDPFALWCAMGAEQRPAFADFHHVQARLCAAGFGPKTPLQADYEGHLNYGYHLDAGAFASLLCQHGTTNLGIRHLRDDVLDVGLDEDGAIGHLICQQSGRVDGDFFVDCTGFSARLIGTALGVPFRDCNHILFADRAIAVQKPHATADAPLSCQTHATAQKAGWIWDIALKERRGLGHVYASDFLSDDEAQKILLEHAGMKEAEATPRLLKIKSGYRQSLWQKNCVAIGLSAGFFEPLEASALMLAELSAQALCALLPLDHGDLAIASRRYNQRFAHFWPAILKFLKLHYILSRRTEPFWLANRDAQSWPDDLAELLALWRDQPPLPDHLGAENEVFSYLSYRYVLYGMGFAAPRNPPRGQGAPARWQQMLDGLMGRMESTLPRHRDLINHVHRHGFQAI

SEQ ID NO: 86407 - protein, 507 aa, Luteimonas sp.
  REGION 1..507: note = tr|A0A5D4XG66|A0A5D4XG66_9GAMM Tryptophan 7-halogenase OS=Luteimonas sp. XBU10 OX=1132694; GN = FZO89_15585 PE=4 SV=1
MTDHDARIRRIVVVGGGSAGWMAAATLATYLGRGSSVRLVESEEIGIVGVGEASVPHLKTFNGEVLGIEEAEFLKASQGTFKLGIEFRDWGRIGDTYLHGFGRIGRSMGPLPFHQFWLKRFLAGHAPDIGAYTLQTVAAPQGRFMVGGSDAPAGSPLADFAYAYHFDAGRYARFLRELAERRGATRTEGRIVDVVRRAGDGFVEAVVLESGERIEGDLFIDCSGFRALLIGQALEVDYVDWRQWLPCDRAMAVPSANAGPPTPYTRATARAAGWQWRIPLQHRTGNGYVYASEHLSDDEAAATLLAHLDGVALAEPRALRFTTGMRREFWHANVVALGLASGFMEPLESTSIYLVQSGLQRLLGLFPDLGFEPQLVRRYNAETTFEYERIRDFLVLHYHATTRDDSPFWTHCRTMPVPDALRETITMFQRDGRYFRHGDDFFALPSWVQVMLGQGIVPAGYHPVVDEMPESHLDAFLSRVREDIARAAAAMPTHQQFIDRYCKAPPA

SEQ ID NO: 86408 - protein, 484 aa, unidentified
  source 1..484: note = Gammaproteobacteria bacterium
  REGION 1..484: note = tr|A0A534I2G9|A0A534I2G9_9GAMM Tryptophan 7-halogenase OS=Gammaproteobacteria bacterium OX=1913989; GN = E6K32_01505 PE=4 SV=1
MTAAALTKSFGKLLQVTLVESEEIGIIGVGESTVPHLRDFNRLLEIDEADFVRRTKGTFKLGIQFRDWRRLGDSYVHGFGTIGRSLGLLDFHQYWLKARKLGLAKDIGHYSINTLAAPQGRFLVPPSDAPPNTPLADIVYAYQFDAGLYARYLRDYAEGRGARRIEGKIVEVKQNGESGFVESVRLESGATVAGDLFIDCSGFRALLIGGTLRSGFQDWTHWLPLDRAIAVPCEKVEPPTPYTRVTAREAGWQWRIPLQHRTGNGYVYSSRFVSDDEAMAVLLKNLDGKPLADATKPIRFAAGKRDKLWHKNVVAIGLAGGFLEPLESTAIFLIQSGIFRLVQLFPRRDFDPTLEQTYNAQAQFEYERIRDFLILHYCATEREDSELWRYCRSMKIPDSLREYIRLFADAGRFFRNGTELFAVTSWVQVMLGQGIRPRSYHPAADWVTDSDLRSFVESVEKLIARCVSIMPSHEDFIARHCAAV

SEQ ID NO: 86409 - protein, 521 aa, Xanthomonas axonopodis
  REGION 1..521: note = tr|A0A3S0CVI4|A0A3S0CVI4_9XANT Tryptophan 7-halogenase OS=Xanthomonas axonopodis pv. eucalyptorum; OX = 2497685 GN=EI541_10490 PE=4 SV=1
MPDTTPSDPHQRPVRRVVIAGGGTAGWMAAAALSKLLGRHLHITLVESDEIGTVGVGEATIPSLVTFHRLLEIDEAAFMAATQATIKLGIAFEHWRDVDQHYIHSFGHAGTDHWSAGFQHFWLKGRQRGVARDFGDYCLELRAAQEGRFAHLPNGGMNYAYHLDAGLYARFLRRFSEGFGVTRVEGRIGQVETDAQSGFLTALTLQDGMRVEGDLFLDCTGFAGLLIGKTLGVGSDDWSRWLFADSALAVQTESVGPPVTYTRSRADQAGWMWRIPLQHRVGNGIVYSSRYMDQDGARAVLERHLTGRALTEPRPLRFTPNQRHRVWEKNCVALGLASGFLEPLESTNIHLIQRGIIRLLQTFPQVINAVDIAEYNRQAAQEITHIRDFVILHYHATDRRDTPFWRDCAAMDIPDSLRHRVELFRQSGRVFHQANELFAENSWVQVMLGQGVVPQQHHPVADLMGDAELSRFLETIRTRVEAALVRLPAHADFLQRYCPAPPLPEPAARVPAPPVMATPAG

SEQ ID NO: 86410 - protein, 484 aa, Sphingomonas sp.
  REGION 1..484: note = tr|A0A4U1L7I1|A0A4U1L7I1_9SPHN Tryptophan 7-halogenase OS=Sphingomonas sp. L-1-4w-11 OX=2572576; GN = FBR43_14445 PE=4 SV=1
MTACLMAERWLRPGARPVEILLVESPDIGIVGVGEGSTPQLKALFDRLGIAEAEWMPRADATYKLGIGFERWSSDPAHQRYFHAFPGPVDLHTQPAFVARARMRRQGYAVAAQPDDWYLAAHLAERRLGPHPAASFPFAPSYGYHFDAYRVGEVLRDAAVRRSVIHRQARVERVELAENGDVRALVVEGGEAIAGDFFIDCSGFRSVIAQQALGARFVSFADNLFNDAAVVMPTPSEPTTAIATRATALSAGWAWAIPLTTRIGNGYVYASAHVGADAAEAELRAHLGVGDDVPARHLKMKVGRVADSWTRNCLAAGLAQGFLEPLEATALHIVQATADEFVAAFDAGGFTPQHRDRFNARIARRYEGVRDYIVAHYRMNLRTDTDYWRANAANEHLSDDLKAMMTAWFTGADLEAAIAERDIGGYYASISWHALFAGYGVFPPADRLKPLPPGHAAPEIGDLLARSAINFASHDEQLAQLRER

SEQ ID NO: 86411 - protein, 505 aa, Xanthomonas axonopodis
  REGION 1..505: note = tr|A0A3S0CU92|A0A3S0CU92_9XANT Tryptophan 7-halogenase OS=Xanthomonas axonopodis pv. eucalyptorum; OX = 2497685 GN=EI541_04850 PE=4 SV=1
MTQAQIRKVVIAGGGTAGWIAACALSHQFRNLLDITLVESEQIGTVGVGESTVPPIRTFHRFLQIDEQEFLRAVAGTFKLSISFEHWRRQGERYIHPFGITGQSTLVCAFHHLWLESQRRGMPGSFGDYCLETVASRVDRFALHGEPAVNYAYHLDAALYARFLRARSEACGVKRVEGRIQQVTVQPHSGDVASLVLEDGQTIEGDLFIDCSGFRGLLIEQTLHTGYEDWSHWLPCDRAVAVQTEALGPPVPYTRAIAHEAGWRWHIPLQHRVGNGLVFSSKHLSDDEAHAKLLRDVAAPAVKEPWMVPFRTGRRLKAWNKNVVSLGLASGFIEPLESTSIHLTISAVVRLLALFPAGGIAPSQVQLFNDVGRAEMEHVRDFVILHYHATQREEPLWQQCRQMELPESLALRLRAWRERAHAWQGADELFRVDSWTHVLMGQGIAPEQHHPLTRAFSDHDLRRLLDGIAQPIQHAVQQMPSQQDFIERYCKAGEQVWGMRSPVPA

SEQ ID NO: 86412 - protein, 503 aa, Sphingomonas sp.
  REGION 1..503: note = tr|A0A4U1L773|A0A4U1L773_9SPHN Tryptophan 7-halogenase OS=Sphingomonas sp. L-1-4w-11 OX=2572576; GN = FBR43_00020 PE=4 SV=1
MSGGVCKRIVVAGGGTAGWMAAAAIARSMGPAASVTLVESDAIGTVGVGESTIPPLVTYNRLLGINEADFMRATNATFKLGILFDGWKNGRDRYFHSFGSTGNDHWAAGFQHYWLNGRTRGHDAPYDDYCLELVAALEGKFAHLPDNALNYAYQLDSTAYARFLRSMAEGDGTQRIEGRIAEVALDPERGDIAALVLDDGRRIEGDLFLDCTGFRALLIEGALHAGFEDWTHWLPCDSAIAVQTANAGPPVPYTRAMAHDAGWQWRIPLQHRTGNGLVWCSRYLSRDAALDRLMGNLEGTVLTEPNHLKFTTGARRRQWHRNCIAIGLSGGFMEPLESTSIHLIQRAILRLIRMLPLGAVNPSDVAEFNDQQLQDMEQIRDFLILHYKATERRDSPFWRQCAAMDVPDTLAQKMALFAETGRVFRRNEELFAENSWVQVMLGQGIVPRSWHPIAARLSDDELARLLGGIRERVTRTVAGLPGHAAYVARYCGATAAAATGKAA

SEQ ID NO: 86413 - protein, 502 aa, Sphingopyxis sp.
  REGION 1..502: note = tr|A0A1Y5PSD6|A0A1Y5PSD6_9SPHN Tryptophan halogenase; OS = uncultured Sphingopyxis sp. OX=310581 GN=SPPYR_0415; PE = 4 SV=1
MGDSRITKVVIVGGGTAGWMAAAALSRTMDHLSIRLVESEEIGTVGVGEATIPSIRLFNALVGIDEDEFVRETRGTFKLGIEFRDWGRIGDSYMHAFGQIGRSLGMLQFPQYWLRGRAEGVAGRIGDYSLNETAARAGRFGRLPQIPNTGLDGIAYAFHFDAALYAAYLRKIAESAGVVRTEGKIDSVRRNGENGHIEAVVLEGGEEISGELFIDCSGFRALLIEGALGTGFDDWAHWLPCDRAIAVPSEDAGPARPYTQAIAHQSGWQWRIPLQHRTGNGHVFCSDFIGEDEAAATLLANIEGRPLAEPRTLRFRTGMRRRAWNANVVALGLASGFLEPLESTSIHLVQNGIAKLIAHFPGRNFDAANIDTYNERVRFDYERIRDFIILHYHANQRSDSPFWTRCREMAIPATLAGKIELFRSQGQIVREADELFVEIGWFQVLTGQNIAPRGYHPMADQLTREELAGFFADIETIVARTASRLPTHDDFIAQHCAAGVPA

SEQ ID NO: 86414 - protein, 493 aa, Sphingopyxis sp.
  REGION 1..493: note = tr|A0A1Y5PPZ5|A0A1Y5PPZ5_9SPHN Putative Tryptophan halogenase OS=uncultured Sphingopyxis sp. OX=310581; GN = SPPYR_0959 PE=4 SV=1
MPGARAVTHSVQRVVVFGGGVAAAMAALAVSRAYARLGTDIVWVDTGEAPAPHAALVAPPDLATFHRLLGIDEAALARHAAATVNMGQQFAGWSGGDDAFLHAYGDAGSAFASLPFVQHWTRARAAGLRVALEDFCLAAAAAKQGRTGAPRETATRQAVKAGWHLDAAGYAKLLRAACEQADIRIVPGAGAVPHKGGSRLDRIDLADGEQLGADLFIDTDGALVAALDGGAEARPGFCDRIIRASAPAFDPLPLYSRVAAHPAGWLTLIPLANRTAIEFAYDSASLSDAGAPAALAAALGRPADAAPPAALGAAARPRPWIGNVVAVGPGAGDAPPLDGAELLLLQLGIAQLVLLWPIDRAEMPEAAIYNEELAGTRARVADFTAQHFRLNARIGEPYWDAARAAPVSVELAAKIDLFAARGMFAHYNHEAHVEDSWALVMAGHGVTPRSFDPQALLTEDQALMAEFQRQLRAVASDVHAMESHADALRRMRE

SEQ ID NO: 86415 - protein, 504 aa, unidentified
  source 1..504: note = Gammaproteobacteria bacterium
  REGION 1..504: note = tr|A0A534J624|A0A534J624_9GAMM Tryptophan 7-halogenase OS=Gammaproteobacteria bacterium OX=1913989; GN = E6K20_12965 PE=4 SV=1
MADARLRSIVIVGGGSAGWMAAAALAKTLGRECAIRLVESEEIGTVGVGESTVPHLEAFNRALEIDEAVFVRQVRGTFKLGIQFVDWGRVGARYFHTFGPIGHDYGFLPFHQYWLKLFLAGKADDIGAYSLHSVAALRGKFMTGATDAPQGSPLHYVAHAYHFDAGLYALYLRHYAEARGVRRTEGKVVDVVLRGTDGFIEAVVLQGGEKIAGDLFIDCSGFRGLLIEQALHTGYEDWTHWLPCDRAIAVPCEKVGPATPYTRSTARAAGWQWRIPLQHRIGNGHVYSSAYISDDEAHRTLMSDLDGRALAEPRILKFTTGRRRKFWNKNCVAVGLASGFMEPLEATSIYLIQSGVGRLINLMPDRNFSPVLIERYNQQAAFEFERIRDFLILHYYATERRDSPFWQYCGNMQIPEQLADNIRLFQDSGRFFREGDEMFAIASWVQVMMGQHFVPHGYHPAVDLIPEQEVIELVASVRNVIAHCVEVMPTHEQFIARFCPAEAA

SEQ ID NO: 86416 - protein, 495 aa, Actinoplanes deccanensis
  REGION 1..495: note = tr|A0A3G5BRW9|A0A3G5BRW9_9ACTN Tryptophan halogenase; OS = Actinoplanes deccanensis OX=113561 GN=fadM PE=4 SV=1
MADAMPKVIVIGGGPGGSTAAGLLAKGGAEVKLLERAEFPRYHIGESITTSCRAIIDYVGALDKVNACGFTSKTGVLMRWGQERDWVIDWTAQFGADTRSWQVDRDVFDKVLLDNAADSGAEVVQKAHVKRVLFDGDRAVGVEWQPAGGESRIETADYVVDASGRAGLISAQHYNNRRPHEIFRNVAIWGYWENAELLPESPAGGINVISSPDGWYWLIPLRDNRFSVGFVTHKTNFVEKRRGFDSQEAMLTAMIDQSDTMKQVLANATQLPDVRVEQDFSYAADKFCGDGYFLVGDSACFLDPLLSTGVHLAMYSGMLSAASILSLTRGEVNEPEAQAFFESLYRNAYHRLFTLVISFYQQHAGKDRYFALADTLSRAAQGNGAKSADLAFGEIIAGLTDLREAADQTGAAAEPITETIDAAATGGAKPVQELLGAAEQARLRAEEAAPNQRVTIAPMYIDANDLYDAASGLYLVTEPRLGISRVSSEATVAAG

SEQ ID NO: 86417 - protein, 505 aa, Xanthomonas translucens
  REGION 1..505: note = tr|A0A5C1ZIL8|A0A5C1ZIL8_XANCT Tryptophan 7-halogenase OS=Xanthomonas translucens pv. undulosa; OX = 487909 GN=F0H32_20020 PE=4 SV=1
MIAAPLRNLVVVGGGTAGWMAAAALARVLGPDYRITLIESEQIGIVGVGEATVPHIKAFNNLLGINEAEFVRQTQGSFKLGIEFVDWQRPGTTYIHGFGTEIGHSLGLLPFQQYWFKQALAGKAKPLGAYTLNTVAARRGKFMTSASDAPPNSPLGNIAYAYHFDASLYAAFLRRFSEQRGVTRREGIVEQVQLHPESGHVLSVRLASGDTIAGDLFIDCSGFRGLLIEQALHTGYHDFTHWLPCDRALAVPCAKVGPPTPYTRATARAAGWQWRIPLQHRTGNGYVYSSAHISDDEAAATLLANLDGAALADPRPLRFVTGRREQVWNRNVVALGLASGFMEPLESTSIHLIQSGISKLLELFPREGISPVLVQRYNDRIAFEFDRIRDFLVLHYTATERDDSDFWRQCRAMAITPELQATLDLFGDSGRFYRNGDEMFAEISWVQVMVGQGILPRAYHPLVDQVPAADIERFVASIEQTIGHCVDAMPPHQAFIDRYCAAAPR

SEQ ID NO: 86418 - protein, 514 aa, unidentified; identical to SEQ ID NO: 85147
  source 1..514: note = Proteobacteria bacterium
  REGION 1..514: note = tr|A0A520PSP6|A0A520PSP6_9PROT Tryptophan 7-halogenase OS=Proteobacteria bacterium OX=1977087; GN = EVA80_01230 PE=4 SV=1

SEQ ID NO: 86419 - protein, 506 aa, Xanthomonas campestris
  REGION 1..506: note = tr|A0A3S9RNN0|A0A3S9RNN0_XANCA Tryptophan 7-halogenase OS=Xanthomonas campestris pv. arecae; OX = 487849 GN=NX80_022285 PE=4 SV=1
MIPAPLRNIVIVGGGTAGWMAAAAFARVLGPTFNVQLIESEQLGTVGVGEATVPHIKAFNNLLGIDEAEFVRQTQGSFKLGIEFVDWQRRGSAYMHGFGTQIGHPLGLLPFHQYWIKQHARGKAQPLGAYTLNTVAAARGKFMTSAGDVPANSPLANIAYAYHFDATQYAHFLRRYSEQRGVTRIEGLVEQVQLHPESGHVQSLQLASGQTVHGDLFIDCSGFRGLLIEEALHTGYHDFTHWLPCDRAFAVACEKVGPPTPYTRSTARAAGWQWRIPLQHRTGNGYVYCSAHISDDEAAATLLANLDGKPLADPRPLHFTTGRRKQFWNRNVVALGLASGFLEPLESTSIHLIQSGISKLLELFPREGISPVLVQRYNDRSAFEFDRIRDFLLLHYHATERDDSAFWRHCRSMPITPELQTTLDLFRDSGRFYRNAEEMFAEISWVQVMVGQGILPQGYHPLVDQVPDRDAEGFLASVAQTIAHCVDVMPTHQQFIERYCKAAVPA

SEQ ID NO: 86420 - protein, 512 aa, Sphingopyxis sp.
  REGION 1..512: note = tr|A0A1Y5PTQ7|A0A1Y5PTQ7_9SPHN Tryptophan halogenase; OS = uncultured Sphingopyxis sp. OX=310581 GN=SPPYR_2283; PE = 4 SV=1
MNEAIERVVIVGGGTAGWLTAARLASSSRARAGKLSVTLIEAPDIPTIGVGEGTWPTMRATLAAIGIGEGEFLAACDASFKQGSRFDGWVTGAADDRYLHPFTSPPAAPAAELLAAWRSGAPDLPFAAAMTPQAQVCDLDLAPRQRAMPDYQGAANYAYHLDAGKFAALLARHAVQRLGVRHVADHVTGVDRDGAGGIASVATRGNGAIAGDLFVDCTGHASLLIGGHLGVEWVDRGDTLFNDRALAAQVPVPPGSPIASQTVSTAHEAGWIWDIGLPDRRGIGCVYASRFMDDDAAEAVLRAYIARVLPGAPEVPARRLSFPTGHRARFWEGNCIAIGLSAGFIEPLEASAIVMIELSLNALIDNFPARRAALPIHAARFNELFRYRWDRIVEFLKLHYVLSRRDEPYWRAQREAAHVPPGLTGMLALWRDQPPSAWDFPRVDEIFSAESHQYILYGMGFSVPADLPTTGGRAEGLLADTRQRARSLAAALPANRDYLDALRSGTPAAAAL

SEQ ID NO: 86421 - protein, 506 aa, Xanthomonas axonopodis
  REGION 1..506: note = tr|A0A430K9R6|A0A430K9R6_9XANT Tryptophan 7-halogenase OS=Xanthomonas axonopodis pv. eucalyptorum; OX = 2497685 GN=EI541_22250 PE=4 SV=1
MIPAPLRNIVIVGGGTAGWMAAAAFARVLGPTFKVQLIESEQLGTVGVGEATVPHIKAFNNLLGIDEAEFVRQTQGSFKLGIEFVDWQRPGSTYMHGFGTQIGHPLGLLPFHQYWIKQHARGKAQPLGAYTLNTVAATRGKFMTSAGDVPANSPLANIAYAYHFDATQYAHFLRRYSQQRGVSRIEGLVEQVQLHPESGHVQSLQLASGQVVHGDLFIDCSGFGGLLIEQALHTGYHDFTHWLPCDRALAVPCEKVGPPTPYTRSTARAAGWQWRIPLQHRTGNGYVYCSAHISDDEAAATLLANLDGKPLADPRPLRFTTGRRKQCWNRNVVALGLASGFLEPLESTSIHLIQSGISKLLELFPREGISPVLVQRYNDRLAFEFDRIRDFLLLHYHATERDDSAFWRHCRHMPITPELQATLDLFRDSGRFYRNAEEMFAEISWVQVLVGQGILPQGYHPLVDQVPDRDVEGFLASVAQTISHCVDVMPSHQQFIDRYCKAATLP

SEQ ID NO: 86422 - protein, 506 aa, unidentified
  source 1..506: note = Proteobacteria bacterium
  REGION 1..506: note = tr|A0A523PIM9|A0A523PIM9_9PROT Tryptophan 7-halogenase OS=Proteobacteria bacterium OX=1977087; GN = E2O35_00245 PE=4 SV=1
MNNQLNGPGKILIVGGGTAGWMTAMLLAKAWPGTPSEICLLESSDIGIIGVGEGSTPKMRRFFDGLDIPESQWMPACNATYKCGIRFPQWSTRKGYKSYYHPFFSIHDDSTVRAFANSVAHRRANIDVLAHPDAFFVSNHLANDELAPKPDPEFEYQSEYAYHFEAGLIGRFLQERAIASGVTHLIDTVTAVKQHDNGDIARVETKDRGSIAADFFVDCTGFASVLTSKTLGVPFLSYKDTLFNDRAVALPTPLDGRSLPSQTISTALKYGWAWKIPLSNRFGNGYVYASDYIDADGAERELREHIGLNDDSVTARHLKMRVGRVESSWNGNCLAVGLSQGFIEPLEATALMIVQDTVENFITRFTEGHFTDKYRAEFNVKINLIFDSIKDYIFMHYKLNSRNDTNYWVDNRENTHVSDSLRQILDVWDSGGDMLGELRRQGPRLAYSPTSWFCILAGMGRFPRKPKKAKRNTQVSDPDELRRYCEKIVRHFPGHRDTIDAMRAAS

SEQ ID NO: 86423 - protein, 345 aa, unidentified
  source 1..345: note = Gammaproteobacteria bacterium
  REGION 1..345: note = tr|A0A534FLU9|A0A534FLU9_9GAMM Tryptophan 7-halogenase (Fragment) OS=Gammaproteobacteria bacterium; OX = 1913989 GN=E6K34_10860 PE=4 SV=1
RRYAEARGVRRTEGKVVDVSLRGTDGFIEAVTLEDGERVSADLYIDCSGFRGLLIEQALHTGYEDWTHWLPCDRAMAVPCENVGPPTPYTRSTARSAGWQWRIPLQHRTGNGYVYSSAYIKDEAVADTLMSNLDGRALAEPRILKFTTGMRRKFWNRNCVAVGLASGFMEPLESTSIYLIQSGIARLINLLPDRSFSPVLIERYNKQAAFEFERIRDFLILHYFATERRDSPFWQYCSSMDIPPQLADTIRLFRDSGRFFRDAEEMFAITSWVQVMLGQHILPRNYHPAVDLIPEAELNELVGGVRNVISTCVAAMPMHEQFLARYGQAAAKQAAERPATTRQAR

SEQ ID NO: 86424 - protein, 535 aa, unidentified
  source 1..535: note = Gammaproteobacteria bacterium
  REGION 1..535: note = tr|A0A534FKM8|A0A534FKM8_9GAMM Tryptophan 7-halogenase OS=Gammaproteobacteria bacterium OX=1913989; GN = E6K26_12790 PE=4 SV=1
MTTATLFNYSYSPTSGRNPHPAPVPVRRIVIVGGGTAGWMTALILARSLIERGVEITLLESPTVGIIGVGEGSTPWLRGFFDSLGLEESEWMPACHATYKCGIRFDGWSTKPGFGSYFHPFASMLDNLTMKQFVHNVEARINGADLEAHPDRYFIAARLAAKRRAPKASESFPFDIWHGYHFDAVLLGQFLHRKAVDRGVRYKSCHVTHANLDADGNIASVGTEEGETIAADLFVDCSGFAGLLIDKALHTPYVSFSSNLFNDAAVAIPAPMEGSIPSETVSTAMKHGWAWKIPLTTRFGNGYVYSSRFCSADEAETELRGHLGLLDADVPARHLKMKIGRVTRHWNRNCLAVGLSQGFIEPLEATALLFIQQTAATFVESVERGDLSEAAHERFNDMMNTHFEGIRDYIVTHYKTNTRTDTEYWRANAANLNLSDDLKKLYSLWMAGKSIAPAVGQQVLGKGYPVFSWYSIMAGMGIFPDPQDLRPPTAQEARFSEAEIDNLLERSSANYPDHRAALESIPPRRTEPALQVYFW

SEQ ID NO: 86425 - protein, 505 aa, Xanthomonas translucens
  REGION 1..505: note = tr|A0A5C1Z9A2|A0A5C1Z9A2_XANCT Tryptophan 7-halogenase OS=Xanthomonas translucens pv. undulosa; OX = 487909 GN=F0H32_00460 PE=4 SV=1
MAQIRKVVIAGGGTAGWIAACALAHQFRDLLDITLIESEQIGTVGVGESTVPPIRSFHRFLQIDEQEFLRAVAGTFKLSISFENWRRPGERYIHPFGLTGQSTLVCAFHHFWLEAQRRGMLSELGDYCLETVASRLDRFALQQSPPVNYAYHLDAGLYARLLRGHAERHGLKRVEGKIQQVRQHAESGCVEALLLEDGTLVEGDLFIDCTGFRGLLIEQTLHTGYEDWKQWLPCDRAVAVQTEAVAAPVPYTRAIAHAAGWRWHIPLQHRVGCGLVFSSAHLSDDEARAKLLHDAAAPPIKEPWLVPFRTGRRRKAWNKNVVALGLASGFIEPLESTSIHLTIAAVMRLLTLFPTDGIAPSMVDLYNEVSCTEMEHVRDFIILHYHANQRDEPMWQACREMALPDSLQQRLRAWHERAHAWQGADELFRVDSWIHVLLGQGIVPAQHHPLARALPDQQLQQFLDAIRQPIDRAVAQMPSQQDFIACYCKAGREVWAGRAPVAAPA

SEQ ID NO: 86426 - protein, 514 aa, Sphingopyxis sp.
  REGION 1..514: note = tr|A0A1Y5PZK5|A0A1Y5PZK5_9SPHN Tryptophan halogenase; OS = uncultured Sphingopyxis sp. OX=310581 GN=SPPYR_2885; PE = 4 SV=1
MTSEGPYRIVILGGGTAGWMCAAGLAGLLAAIDYDITLIESDEIGTVGVGEATLPHIKSFNDMLGIDEAEFMRATRGTIKLGIEFVDWLRPGARYIHPFGTFGDRWASADFQHHWARARLAGTDGRSLQDYSFAVAAARANSFEHPNTDPKSIRSTYSYAYHFDAGLYAVFLRTWATARGIRRMEGKVVDVARHAQNGEVERLILASGAEVAGDLFIDCSGFRSLLLGQTMGVPWLDWSAWLPCDRALAVPCESARPLTPYTRATAQRGGWTWRIPLQHRIGNGHVFSSAFCGEEEARRTLLGGLDGEALDEPRLLRFQTGRRAAGWKSNVVALGLASGFLEPLESTSIFLIQAATTDLAGLVPRRGAGVDPRMIREFNRLFEIHHDRIRDFLVLHYSANERVGEPLWDHVRTMPLPDSLAHKLALFRESAVAPDYKLGLFSRDSWLSALEGQGVLPSAASPLTHRLPAADLQARLDDLAMRIAVNAADMTPHAEFIAGYCAAGSAVRPAASAA

SEQ ID NO: 86427 - protein, 540 aa, Myxococcus fulvus
  REGION 1..540: note = tr|Q9RPF9|Q9RPF9_MYXFU Tryptophan halogenase; OS = Myxococcus fulvus OX=33 GN=prnA PE=4 SV=1
MDQSSVENDNRVRKIIIVGGGSSGWMAAAYLSKALNFNADITLIESPTIPRIGVGEATIPTIKEELFDFLEIPEEEWMSECKATYKLGIRFQNWKKPASQGGDHYYHNFGEMPQVKGVPLSHLWMYKHQLQGFAEPMAYSCYPTSPICDAQKSPRYMDGTKAVHYAYHFDALLVANFLKKWSIERGLTFISDDIVDTQLDDGGSIKHLRGASGRSYAADLYIDCTGFAGLLIEQALGEPKVTFHDSLLTDRAVAINIPSDPATEGIRPYTTASAFSSGWTWEIPLYGRAGNGYVYSSAFQTPEDAEREVRAWFGKKADALDVRHIKFVSGRRRRSWVKNCVSIGLASSFLEPLESTGLYFVYAALYQLVACFPSKHIEPVLRDKFNERVSYMVDDVRDFIVLHFCTSPRTDTPYWKANQNELKLPDTLKEVLELQRAGIPIRRSYHTNDALYSSFEAGFDRFWTNSNFQSIFAGVGYLPRQPMPLLHSRPDILAEAERTFDDLRQKTAQMMSRLPSQYDYLTSLYARGSRAREEERQRAG

SEQ ID NO: 86428 - protein, 218 aa, unidentified
  source 1..218: note = Micromonospora narashino
  REGION 1..218: note = tr|V9XSP9|V9XSP9_9ACTN Tryptophan 6-halogenase (Fragment) OS=Micromonospora narashino OX=47870 PE=4 SV=1
GGGTAGWMSASYLGRALGPHVRITVVEAPSIPSIGVGEATVPNLHKTFFDFLGLAEEDWMRECNASFKMGIKFVNWRTPGAGSPKPRQLNGYSDHFYHLFGILPNSENLPLSHYWAAKRFAGETDEPFDYACYRESPVLDANLAPRFADGTKWTNYAWHFDASLVAAFLRRFATEKQGAIQIEDEMVDAEVDQRGHITSLRLKSGRTVDGDLFIDCSG

SEQ ID NO: 86429 - protein, 506 aa, Sphingomonas sp.
  REGION 1..506: note = tr|A0A5E7XTK1|A0A5E7XTK1_9SPHN Tryptophan halogenase; OS = Sphingomonas sp. EC-HK361 OX=2038397; GN = SPHINGO361_100066 PE=4 SV=1
MQRVRRVVILGGGTAGWMTAAALGATLGQTVSISLLESDAIGTVGVGEATIPTIHWFNQLIGLDEADFVRETKASFKLGIEFVDWTRPGHRYFHPFGRYGVDLGAVPFHQRWLRARADGHDRPLSAYSLAAQLAEAGGFARPSNDPGSILSTLGYAYHFDAGLYARYLRSLAEARGVTRYEGRLEQVEHDANSGVITALTTERGERLSGDLFIDCSGFRALLIGDEMGSPFEDWSHWLPCDRAVAVPCARVAETTPFTRSTLRPAGWQWRIPLQHRTGNGYVYASRFVSDDEAAATLLANLDGEALAEPRMLRFQAGFRREAWRGNVVAIGLSSGFLEPLESTSIHLIQSAIAKLITLFPDADCDPALARQFNALFGRDMDGIRDFLILHYHATTGHHHPLWQHTRTMALPDTLIEKEAHYARSGRVMLSSDELFREASWLAVLNGQGIVAAGPAPIADTLDGAANRRQLDQIEAVIARAVPTLPRHDDAIAALLGESGARASVHG

SEQ ID NO: 86430 - protein, 521 aa, Xanthomonas campestris
  REGION 1..521: note = tr|A0A3S9RNT9|A0A3S9RNT9_XANCA Tryptophan 7-halogenase OS=Xanthomonas campestris pv. arecae; OX = 487849 GN=NX80_021210 PE=4 SV=1
MPHTMPSDPQQRPVRRIVIAGGGTAGWMAAAAMSKLLGRHLQITLVESDEIGTVGVGEATIPSLVTFHRLLEIDEAAFMAATQATIKLGIAFEHWRDVDRHYIHSFGHAGTDHWSAGFQHFWLKGQQRGVARDFGDYCLELRAAQEGRFAHLPNGGMNYAYHLDAGLYARFLRRFSEGFGVTRIEGRIGQVETNAESGFLTALTLQDGTQVEGDLFLDCTGFAGLLIGKTLGVGSDDWSRWLFADSALAVQTESVGPPVTYTRSRADQAGWMWRIPLQHRVGNGIVYSSRHMDQDSARVVLERNLTGRALTAPRPLRFTPNQRHRVWEKNCVALGLASGFLEPLESTNIHLIQRGIIRLLQTFPQVINAVDIAEYNRQAADEITHIRDFVILHYHATDRRDTPFWRDCAAMDIPDSLRHRVELFRQSGRVFHQANELFAENSWVQVMLGQGIVPQQHHPVADLMGDAELSRFLETIRTRVEGALVRLPAHADFLQRYCPAPPPPEPAARVPAPTVMATPAG

SEQ ID NO: 86431 - protein, 514 aa, Sphingopyxis sp.
  REGION 1..514: note = tr|A0A1Y5PUK8|A0A1Y5PUK8_9SPHN Tryptophan halogenase; OS = uncultured Sphingopyxis sp. OX=310581 GN=SPPYR_2572; PE = 4 SV=1
MATRSILIVGGGTAGWLTAAYLARFFDLPRNPRLSITLLASDEIGSIGVGEGAFPTIRDTLRFIGIDESAFVRATSATFKQGIRFDDWVRTPKAGRSSHFLHPFEPPFHGDGHSLVAYWLLQEEKTRRPFAEAMTIQNRVAEAQRAPKRPGEGEFSGPLNYAYHFDAARLAGILSAQASAMGVAHLGGTLTGVALDPESGAIDHVVTAEHGPLAADLYIDCSGFRAELIGGALQSPFRRVKHQLFTDRALACKLPYDRPDVPIESYTIAAAHEAGWIWDIGLAGARGLGCVYSSDHLSDDRAAEILANYTGRRSDDVAVRSIPFEAGYRPAAWVGNCVAVGLSGGFLEPLESTGLVMIETAAAMIAEMFPLNGPVAAPARRFNELMAARYDNIINFLKLHYCLSQRREAFWRDNGDPASIPDRLAQLLEEWRYRPPSRFDFILDLESFAPFNYQYILYGMEFRTDLSPVREDFPDVAEAERIFARIRSFGDRAANELPAHRAMIDQINAGAATA

SEQ ID NO: 86432 - protein, 506 aa, unidentified
  source 1..506: note = Kordiimonadales bacterium
  REGION 1..506: note = tr|A0A5A7MW59|A0A5A7MW59_9PROT Tryptophan halogenase; OS = Kordiimonadales bacterium JCM 17845 OX=1236967; GN = JCM17845_06900 PE=4 SV=1
MTTAQISADPVTRIVIIGGGTAGWMAASVLSKALVGRVSIQLIESDAIGTVGVGEATIPQIRLINHYLGLDENAFLKHCKGTFKLGVQFNNWGRIGDSYMHAFGDLGLPLGPLSFPHYWLRAQQEGVGGDLWNYSLNYQTAMQGRFSRLEKVGTSHLGGIKYAFHFDAGLYARYLRAGCEKRGVNRTEGRIVKTNLRGTDGFIESVILESGATIAGDLFVDCSGFRGLLIEQALKTGYEDWSHWLPCNRAVTVASEPTGPVRPYTQATAQQSGWQWRIPLQHRVGNGHVYSAAHISDDEATHQLLQNLESPALSDPKALRFKTGRRQQAWNRNCVALGLAAGFMEPLESTSIHLIQSGISRLVSLFPDRHFDPSLIDLYNRQTQFEYERVRDFLILHFKATQRRDTAFWQACAHMDIPHSLQEKIDLFSATGRIVREGEELFTEMGWIQVFTGQHIKARCHHPLADNITQSQLTEFLDNIEKLITHTVPSLPHHADFITHNCRAAA

SEQ ID NO: 86433 - protein, 512 aa, Sphingomonas sp.
  REGION 1..512: note = tr|A0A5E7Y0W3|A0A5E7Y0W3_9SPHN Tryptophan halogenase; OS = Sphingomonas sp. EC-HK361 OX=2038397; GN = SPHINGO361_100448 PE=4 SV=1
MIVGGGTAGWLAACRIAAAADPAAERPVSVTLVESPDIATIGVGEGTWPTMRRTMARIGIDEAELLIACDASFKQGSRFDGWVTGEAGDSYHHPFTPPIAGDPREAARLRPGDAFADRLCAQPQICALDLAPRQRSMPGYAGALNYAYHLDAAKLAALLKRHATGRLGVRHVRDHVLDVEAAEGGDIASVRTRDNGAIAGDLFIDCTGHAALLIGEHCGIDVVDRSDELFNDRALAVQVPVAPGSAIAAQTNATAHAGGWIWDIGLPTRRGVGCVYASTFMDDAAAEATLKAYLRRTTPDCDADALNIRLLTFRSAHRERFWAGNCLAIGQSAGFLEPLEASAIVMIELALDALIDDFPANRAVMAVQAERFNAQFRYRWDRIVEFLKLHYVLSRRTEPYWRAHRDAGSIPSRLAQSLELWRHRAPAAIDFPAKDEVFPGASYQFVLYGMGFLLPSGVAVAEREGGDMAAAIRQVEQRGRALAASLPTNRAYLDALRAEHAGTDPILERYAE

SEQ ID NO: 86434 - protein, 535 aa, unidentified
  source 1..535: note = Gammaproteobacteria bacterium
  REGION 1..535: note = tr|A0A534F5S8|A0A534F5S8_9GAMM Tryptophan 7-halogenase OS=Gammaproteobacteria bacterium OX=1913989; GN = E6K39_01735 PE=4 SV=1
MTTATLFNYSYSPTSGRNPHPAPVPVRRIVIVGGGTAGWMTALILARSLIERGVEITLLESPTVGIIGVGEGSTPWLRGFFDSLGLEESEWMPACHATYKCGIRFDGWSTKPGFGSYFHPFASMLDNLTMKQFVHNVEARINGADLEAHPDRYFIAARLAAKRRAPKASESFPFDIWHGYHFDAVLLGQFLHRKAVDRGVRYKSCHVTHANLDADGNIASVGTEEGETIAADLFVDCSGFAGLLIDKALHTPYVSFSSNLFNDAAVAIPAPMEGSIPSETVSTAMKHGWAWKIPLTTRFGNGYVYSSRFCSADEAETELRGHLGLLDADVPARHLKMKIGRVTRHWNRNCLAVGLSQGFIEPLEATALLFIQQTAATFVEFVERGDLSEAAHERFNDMMNTHFEGIRDYIVTHYKTNTRTDTEYWRANAANLNLSDDLKKLYSLWMAGKSIAPAVGQQVLGKGYPVFSWYSIMAGMGIFPDPQDLRPPTAQEARFSEAEIDNLLERSSANYPDHRAALESIPPRRTEPALQVYFW

SEQ ID NO: 86435 - protein, 534 aa, unidentified
  source 1..534: note = Gammaproteobacteria bacterium
  REGION 1..534: note = tr|A0A523LLE1|A0A523LLE1_9GAMM Tryptophan 7-halogenase OS=Gammaproteobacteria bacterium OX=1913989; GN = E2O53_08230 PE=4 SV=1
MNPKRVLIVGGGSSGWMTAAYLDAVLNRDGRKRAEISLIESPDVPRIGVGEATIPSINHILAAIGIDEFEFLKRVDGTYKQAIQYVNWLDGQGESYYHAFGRYRGGPVDSTSLDWLMSNRSLPFSETISAQPVMCDACLAPKMMGPWDFGTQLTYAFHMNALKFADYLCEIATSRGVQHHVDHVVAIEMADNGDIAAVKTKSGARIEADIFIDCTGFAGLLIEKKLGVEWVDCSQWLLCDRALAIQVPYEHNYPGYVRPNTIATAVSAGWIWEIPLQNRRAWGYVHAGDYISKDDAEKELRAHIGSLADDFEARYVPFKVGYRSKSWVRNCIAIGLSAGFIEPLESTGLYLSDLAAVMLTEHFPDRGDRDALAFRYNRIISNRFHEILDFINLHYCLTRRKDNEFWLEVGKPERMTDRLRVKLEFWRNKPPSPTDFEDQWFPGQAGTSLPSAGLSGDHRSPIDTGGVFSLSSYEAILYGMDFLKDECDQWFGTNRPASQVPKRIADRLKIAPQKLLPHDVWLRRVIGMPDYKTG

SEQ ID NO: 86436 - protein, 532 aa, unidentified
  source 1..532: note = Streptomyces rugosporus
  REGION 1..532: note = tr|K7QVV7|K7QVV7_9ACTN PyrH OS=Streptomyces rugosporus OX=295838 GN=pyrH PE=4 SV=1
MERRKRERLGSLGRPTKKELRMIRSVVIVGGGTAGWMTASYLKAAFDDRIDVTLVESGNVRRIGVGEATFSTVRHFFDYLGLDEREWLPRCAGGYKLGIRFENWSEPGEYFYHPFERLRVVDGFNMAEWWLAVGDRRTSFSEACYLTHRLCEAKRAPRMLDGSLFASQVDESLGRSTLAEQRAQFPYAYHFDADEVARYLSEYAIARGVRHVVDDVQHVGQDERGWISGVHTKQHGEISGDLFVDCTGFRGLLINQTLGGRFQSFSDVLPNNRAVALRVPRENDEDMRPYTTATAMSAGWMWTIPLFKRDGNGYVYSDEFISPEEAERELRSTVAPGRDDLEANHIQMRIGRNERTWINNCVAVGLSAAFVEPLESTGIFFIQHAIEQLVKHFPGERWDPVLISAYNERMAHMVDGVKEFLVLHYKGAQREDTPYWKAAKTRAMPDGLARKLELSASHLLDEQTIYPYYHGFETYSWITMNLGLGIVPERPRPALLHMDPAPALAEFERLRREGDELIAALPSCYEYLASIQ

SEQ ID NO: 86437 - protein, 496 aa, Sphingomonas sp.
  REGION 1..496: note = tr|A0A5E7ZTK4|A0A5E7ZTK4_9SPHN Tryptophan halogenase; OS = Sphingomonas sp. EC-HK361 OX=2038397; GN = SPHINGO361_50015 PE=4 SV=1
MADARPRTRVVILGGGTAGWMTAAALANDLAPIADIRLVESADIGIVGVGEATLPHIRQFVQHLGIDEGAFMAATHATFKLGIAFEGFGAIGDRYIHPFGTFGRDLAGVAFHHYWLRAGGRVPIGQWSVAVAAAEANRFAHPNPADPELAGSYGYAYQFDATRFGPFLRDYAVARGVARTEATVRSVERDGTTGDIAALHLDTGERIAGDLFVDCSGFRNLLLGGELDEAWEDWSGWLPCDSAAAMPCASPEGAIEPYTRAVAMPAGWRWRIPLRHRVGNGYVFASDHVSEDEACEALIAAVEGEPLTEPRVLRFRAGRRRRSWVRNVVGVGLASGFLEPLESTSIYLVQAAITRLIELFPAGGIADADRNAFNRLVDMEYDRIRDFLILHYHATRRDDSTFWDHVRTMAVPDSLAEKLALWRATGRVARYGEGLFLEPSWVAVLIGQGILPDAYDPRAAIPDDAAMDRAMQDLRARVGATAIAMPEHRASLAAMR

SEQ ID NO: 86438 - protein, 514 aa, Sphingomonas sp.
  REGION 1..514: note = tr|A0A5E7ZWB9|A0A5E7ZWB9_9SPHN Tryptophan 7-halogenase OS=Sphingomonas sp. EC-HK361 OX=2038397; GN = SPHINGO361_150195 PE=4 SV=1
MTQGQQGGDRRVRRITIVGGGTAGWMTAAMLSQLLKGFDIRLIESDQIGTIGVGEATIPAIRNYAAIAGIDQAEMLRASQATFKLGIEFVDWKAKGNSYIHGFGKIGQDLMWLHPHHIWLKLAAEGRAKHFDHYALNTLAARRNRFAFPDPRNPGSPMAGIDYAYHFDASLFAKFLRAQSEARGVTRIEGRIVEVARHGEDGHVTHVVLDDGRQIEGDLFIDCSGMRGLLIGEAMGVGYESWSEWLLCDRAQAVPCESVSPLTPYTRSTARDAGWQWRIPLQHRIGNGHVYASALTRDEAAAEVLLANLDSKPLADPRPVAFAPGKRHRAWEKNVVAIGLSGGFLEPLESTSIHLIQTGILRLIALFPASGIEAVDVAEYNRQTDFEYRDVRDFIIAHYKVTDREDTPFWRHVKHMAVPDSLAERLELFRTSGRFFMHRQAELFREESWVQVLIGQGHPMRYDPVIDTLPPQQISDFLKDIEEVIDDTANRMPDHAAFVARNFAAPAPPPAVAA

SEQ ID NO: 86439 - protein, 510 aa, Stenotrophomonas maltophilia
  REGION 1..510: note = tr|A0A0M1F6X2|A0A0M1F6X2_STEMA Tryptophan halogenase; OS = Stenotrophomonas maltophilia OX=40324 GN=ABW45_00325; PE = 4 SV=1
MVDTESTPAGRIRKVVIAGGGTAGWLAGCALAHQFRDQLEITLVESEQIGTVGVGESTVPPIRTFHRFLQIDEQEFLRAVAGTFKLSISFENWRLPGDRFFHPFGTIGHGTWAAPFHHFWLDSLRRGMPSDLGDFCLESLASRGDRFSLQTQPQASYAYHFDAGLYARFLRRRAEGHGLRRIEGRIAQVRQHAHDGSVQALVLEDGEVIEGDLFIDCTGFRGLLIEQTLGTGYEDWHEWLPCDRAVAVQTEAIASPVPYTRAIAHEAGWRWHIALQHRVGCGLVYSSRHLSDDEATAKLLRDVGAPPLRDPWQVPFRSGRRLKAWNRNVVALGLASGFIEPLESTSIHLTISAVVRLIQLFPFDGIRASLVQLYNDVSRQEMEHVRDFIILHYHATQRTEPMWKACREMRVPESLQQRLQAWRERAHAWQDPGELFRVESWTSVLLGQGIPPGPPHPLARAVSDADLRTLLKGIQQPVQHAAAQMPTQAEFIAQYCRSGADVWRSMATPA

SEQ ID NO: 86440 - protein, 529 aa, Saccharopolyspora erythraea
  REGION 1..529: note = tr|A4FJG0|A4FJG0_SACEN Tryptophan halogenase; OS = Saccharopolyspora erythraea (strain ATCC 11635 / DSM 40517 / JCM 4748 / NBRC 13426 / NCIMB 8594 / NRRL 2338); OX = 40594 8 GN=prnA PE=4 SV=1
MEHKVQKVVILGGGTAGWMTASYLAKAFGKDVGVTVLEAPTIPRIGVGEATVPNLQRVFFDFLGLEEKDWMPECNASFKTAVKFINWCTPGPGQPDPRPTPTGSDHFYHPFGLLPECDRLPLSHYWVRDRLAGTSTQPFDYACFPQTAVMDAYRAPCWPDGKPAVTYAWHFDAHLVADFLRRFSTETLGVVHAEGVMSRVQKDANGYITALLTEAGEEISGDLFIDCSGFRGLLINESMGEPFIDMSDQLLCDSAVAASVPDEGTAVEPYTSAIAMPSGWTWKIPLLNRFGSGYVYSSSFVDQDQATEEFSRLWGLDPASSFNHVRFRVGRNQRAWVKNCVSIGLSSCFLEPLESSGIYFITASIYQLAKHFPDKSFHSSLVNAFNREIEAMFEDSKDFIQAHYYFSPRTDTPFWKANKDLVLSRDILEKVETYRAGLPVNAPVVDGGTYYSNFEAEFRNFWTNGSYYCILAGLGVLPDAPLPSLAHRDGSAESKALFEQVREEGRYLAEHLPSTAEYLETIHPTVSAR

SEQ ID NO: 86441 - protein, 538 aa, Burkholderia cenocepacia
  REGION 1..538: note = tr|A0A3N8XD85|A0A3N8XD85_9BURK Tryptophan 7-halogenase OS=Burkholderia cenocepacia OX=95486; GN = DF152_32520 PE=4 SV=1
MTHPIKNIVIVGGGTAGWMSASYLVRALQHHANITLVESAAIPRIGVGEATIPSLQKVFFDFLGIPEREWMPQVNGAFKSAIRFVNWRKSADGSRGDHFYHLFGNVPNCDGVPLTHYWLRKREQGFQQPMEYACYPQTEALDGKLAPCLADGTRQMSHAWHFDAHLVADFLKRWATERGVKRVVDEVEQVHLNDRGYIASLSTKEGRTLEADLFIDCSGMRGLLINQALKEPFIDMSDYLLCDSAVASAVPADDARDGIEPYTSAIAMNAGWTWKIPMLGRFGSGYVFSSKFTSRDQATADFLDLWGLSDKQPLNQIKFRVGRNRRAWVNNCVAIGLSSCFLEPLESTGIYFIYAALYQLVKHFPDTSFDPRLADAFNAEIVYMFDDCRDFVQAHYFTTSRDDTAFWRANRHDLRLSDAIKEKVERYKAGLPLTTTSFDDSTYYDTFDYEFKNFWLNGNYYCIFAGLGLLPDQSLPLLRHRPESIDKAEAMFARIRREAERLRATLPTNYDYLRSLREGDAGLSRSQPGPTLATPEIL

SEQ ID NO: 86442 - protein, 256 aa, unidentified
  source 1..256: note = Kitasatospora aureofaciens
  REGION 1..256: note = tr|S4S398|S4S398_KITAU CtcD OS=Kitasatospora aureofaciens OX=1894 GN=ctcD PE=4 SV=1
MRLIDLSSTIDANAWEVDGIRHEVLTPADGARHMAEGMLRDHGLEFDVADLPDGELLSLDTLTLTTHTGTHVDAPSHYGSRAAYGVPRHIDELPLEWFIGPGVRLDLTDCGVGTVGVDRLRRAFDEIDHRPSAGEIVLLHTGAERLAGTPEYFTRFAGLDGAATNLLLDLGVRLIGTDAFGLDAPFTHMLAEFQRTRDRSVLWPAHFAGRQREYCQIERLSNLGALPAPTGFTVQAFPVKIAGAGAGWTRAVALLD

SEQ ID NO: 86443 - protein, 505 aa, unidentified
  source 1..505: note = Caulobacter flavus
  REGION 1..505: note = tr|A0A2N5CUU0|A0A2N5CUU0_9CAUL Tryptophan halogenase; OS = Caulobacter flavus OX=1679497 GN=C1707_01450 PE=4 SV=1
MSDQRVRSVVVVGGGTAGWMTAAALAKTLSAQRLKITLVESEAIGTVGVGEATIPPILTFNAMLGIDERAFMRATKASFKLGIEFVDWGAVGETYHHPFGTFGLDLEGLKFHQVWRKFSELAGPIGDYNLTEAAARRWRFSLPDPDPSKVMSSLRYAYHFDAGLYARFLRGFSEQRGVVRIEGRIGQVDQNGETGFVEAVVLEDGRRIEGDFFVDCTGFRGLVIGQALKVPYQDWGRWLPNNRAVAIGCELGGDGLTPFTRATAREGGWQWRIPLQHRIGNGYVYSSHHVDDDRALDTLLANLDGAPTDEPNFLRFTPGRRERAWEKNVCSIGLSAGFIEPLESTSIHMIQAGITKLLALFPGNGVDPLEVDEYNRLTAEQVDRIRDFVILHFHATRRDDTDYWRYLSSMIVPDSLARRMELFAHRGRWFPSEYDLFHEPNWLAVLLGQGIVPEEWDPLVDSLPDNQVRQRLSQLSDLIARTAEAMPGHAEFVARYCGAQQGVAA

SEQ ID NO: 86444 - protein, 503 aa, unidentified
  source 1..503: note = Caulobacter flavus
  REGION 1..503: note = tr|A0A2N5CVQ5|A0A2N5CVQ5_9CAUL Tryptophan halogenase; OS = Caulobacter flavus OX=1679497 GN=C1707_12315 PE=4 SV=1
MDQRIRKVVVVGGGTAGWMAAAAFSRLLVSDAVAVEVVESEAIGTVGVGEATIPTIRNFNQTLGLDEVEFIRATQASFKLGIDFRDWGRVGHRYFHGFGDFGADHEAVQAHQLWRRLKALGDPSGLEDWSLPTAAAALNRFIPPSPDPRSPLHDYAYAYHFDAGLYAAFLRRYAQARGVTRTEGKIVDVALRGQDGFVEAVVLDDGRRIEGDLFVDCSGFRALLIEGTLKAGFEDWSRWLPCDRALAVPCRLGGDGLTPYTRSTARAAGWQWRIPLQHRIGNGYVYSSAFVDDERAARTLMDNLDGEALDDPRPLRFLAGRRRKFWDRNVVAVGLSGGFLEPLESTSISLIQNGISRLLEFFPDRRCDPLLADEFNRVSALEYERIRDFIILHYCINQRDEPMWRQVREVALPDSLQAKIALYRARGHVAIHEGDGFGRPSWIAIYNGLGVVPEAYDPLADRIPEAELRGLMDHRRALIRHTAQTMPTQEAFIARHCAAPPLG

SEQ ID NO: 86445 - protein, 506 aa, Xanthomonas euvesicatoria; identical to SEQ ID NO: 86133
  REGION 1..506: note = tr|A0A2S7E8N1|A0A2S7E8N1_XANEU Tryptophan 7-halogenase OS=Xanthomonas euvesicatoria pv. citrumelonis; OX = 189396 GN=TN51_02955 PE=4 SV=1

SEQ ID NO: 86446 - protein, 491 aa, Glaciecola sp.
  REGION 1..491: note = tr|A0A348MT15|A0A348MT15_9ALTE Tryptophan halogenase; OS = Glaciecola sp. OX=1905676 GN=DCR37_00020 PE=4 SV=1
MNPQRIVILGGGTAGWMAANLLAHRWREHPIHITVVESPDIGIIGVGEGSTPSLKRFFADLNIPESDWMERCKATYKVNIEFAGWSPNSQNASYSHPFISQLDTFSERPFQVNCYTRRLGLDVETTPEKFLFNGWLAKHNKHPIAPDHFPFNVEYGYHFDSGLLGQFLADHAQQLGVEHKQRTIEHVQQHPDDSIAALVCDNGEVIPADLFFDCTGFRSVLLQQTLGVKFNTFKDNLYNDAAVVFPTAVDQNQPVETQATALSNGWAWRIPLTHRTGNGYVFSQDFISADHAETEFRAHLGLLDSDIEARHLQMNVGQVSQHWYKNCVGLGLSQGFIEPLEATALHLVQTSVERFIEEYEAGHFSNKRQDNYNNIINENFERVRDYIVAHYKLNTRDDSEYWRANRNNEHISKPLLELLDVWFRRGDLTQHLKENGHASHFSATSWHCLLSGYGAYPPLSVNQPGTGDLYSDNQLDAFFKGCLMNFKSSRV

SEQ ID NO: 86447 - protein, 505 aa, Xanthomonas euvesicatoria
  REGION 1..505: note = tr|A0A2S7EGK8|A0A2S7EGK8_XANEU Tryptophan 7-halogenase OS=Xanthomonas euvesicatoria pv. citrumelonis; OX = 189396 GN=TN51_01590 PE=4 SV=1
MTQAQIRKVVIAGGGTAGWIAACALSHQFRNLLDITLVESEQIGTVGVGESTVPPIRTFHRFLQIDEQEFLRAVAGTFKLSISFEHWRRQGERYIHPFGITGQSTLVCAFHHLWLESQRRGMPGSFGDYCLETVASRVDRFALHGEPAVNYAYHLDAALYAKFLRARSEACGVKRVEGRIQQVTVQPHSGDVASLVLEDGHVIEGDLFIDCSGFRGLLIEQTLHTGYEDWSHWLPCDRAVAVQTEALGPPVPYTRAIAHEAGWRWHIPLQHRVGNGLVFSSKHLSDDEAHAKLLRDVAAPAVKEPWMVPFRTGRRLKAWNKNVVSLGLASGFIEPLESTSIHLTISAVVRLLALFPAEGIAPSQVQLFNDVSRAEMEHVRDFVTLHYHATQRDEPLWQQCRQMELPESLALRLRAWRERAHTWQGADELFRVDSWTHVLMGQGIAPEQHHPLTRAFSDHDLRRLLDGIAQPIQHAVQQMPSQQDFIERYCKAGEQVWGMRSPVPA

SEQ ID NO: 86448 - protein, 525 aa, Mesorhizobium sp.
  REGION 1..525: note = tr|A0A441XLL0|A0A441XLL0_9RHIZ Tryptophan 7-halogenase OS=Mesorhizobium sp. OX=1871066; GN = EOQ62_23750 PE=4 SV=1
MTKSVLIVGGGTAGWMTASYLAKVFPKLRITVLESDIIPTIGVGEATFSTIKVFFDFLGLPESEWMPHCNATYKLAIKFANWGPEPGHFYHPFQRYATIDGFNAGEWWLRLKPGQQFDRSCFVTPALCEAKLSPCFLDGRVFDEKVQDLFADPRRKASVLSEHKEQYPYGYHFDAALFAKYLRDYATKLGVKQILDDVINVELADDGSIDHVIGKISERVSADLFVDCTGFRGLLLNEALQEPFISFKDSLLNDRAVALRVPSTPDTDEIEPFTTATTMSAGWTWNIPLYNRIGTGYVYSSQFITPEMAESELRNHVGSRAENCSANHIKMRIGRSRNSWVKNCIGIGLTSGFVEPLESTGIFFIQHNIEELVAHFPGENIDPDVVASFNRIVGSCIDGVRDFLVLHFKGSGRNDTPFWKAVKQTPLPDHLEERFQLWRKRLPNAKSIDSRYHGFEYYSYSVMMLGLGSAPTEYLPTLAQRDPTNAIISFNQVNEQSQKLVSTLPSHREYIMQLYSTAPHSERHK

SEQ ID NO: 86449 - protein, 521 aa, Xanthomonas euvesicatoria
  REGION 1..521: note = tr|A0A2S7EIG9|A0A2S7EIG9_XANEU Tryptophan 7-halogenase OS=Xanthomonas euvesicatoria pv. citrumelonis; OX = 189396 GN=TN51_14335 PE=4 SV=1
MPDTTPSDPQQRPVRRVVIAGGGTAGWMAAAALSKLLGRHLQITLVESDEIGTVGVGEATIPSLVTFHRLLEIDEAAFMAATQATIKLGIAFEHWRDVDQHYIHSFGHAGTDHWSAGFQHFWLKGRQRGVAREFGDYCLELRAAQEGRFAHLPNGGMNYAYHLDAGLYARFLRRFSEGFGVTRIEGRIGQVETDAQSGFLTALTLQDGTRVEGDLFLDCTGFAGLLIGKTLGVGSDDWSRWLFADSALAVQTESVGPPVTYTRSRADQAGWMWRIPLQHRVGNGIVYSSRYMDQDGARAVLERNLTGRALTEPRPLRFTPNQRHRVWEKNCVALGLASGFLEPLESTNIHLIQRGIIRLLQTFPQVINVADIAEYNRQAAQEITHIRDFVILHYHATDRRDTPFWRDCAAMDIPDSLRHRVELFRQSGRVFHQANELFAENSWVQVMLGQGVVPQQHHPVADLMGDAELGRFLETIRARVEAALVRLPAHADFLQRYCPAPPLPEPAARVPAPPVMATPAV

SEQ ID NO: 86450 - protein, 517 aa, Glaciecola sp.
  REGION 1..517: note = tr|A0A3D1S1P6|A0A3D1S1P6_9ALTE Tryptophan halogenase; OS = Glaciecola sp. OX=1905676 GN=DER52_04605 PE=4 SV=1
MFYPYLGTETMNNQIITVVGGGSAGWMTANLLHNQLHQHGFTIRVIESPSIGIIGVGEGSTPQLKVFFDMLGIAEQTWMPRCDATFKHGIRFNGWTDLVHPQYDHYFHPFPSNQDHNSGRYFLQQVHTMLAGYPAMPHPDLYFLTATLAQQNKTPAHEHPELQTNYGYHFDSAKLGQFLKTHGTQQGIQVITTTIDSIQHQANTIVSVTDEQGQIFNSDWFFDCTGFGGKLIQEALGTDFIHYTDNLFNDRAVAIPTRREEQELPQTTATALPCGWAWRIPLTSRIGNGYVYSSQYCTADEAEHVLRQHLNIDDKIPARHLSMKVGRLAQHWVGNTIAVGLAQGFIEPLEATALHLVQETVTQFIGAFTAGRFTTIYQEQFNDNINARFEGIRDYIVAHYACNQLTHARMSQKYASSNSRFHFDGKAVTIDTPRYWEDCREKVVTSENLQAVLACWERGGDLHQLLVDRKMQTYYPTLSWYTLLAGYRRFTHQQYQDNLQTQQIQAKLVELTQHFTC

SEQ ID NO: 86451 - protein, 516 aa, Sphingomonas sp.
  REGION 1..516: note = tr|A0A3M0EJZ5|A0A3M0EJZ5_9SPHN Tryptophan halogenase; OS = Sphingomonas sp. PP-F2F-G114-C0414 OX=2135662; GN = C8J47_1123 PE=4 SV=1
MRKQILIVGGGTAGWLTAGYLAKRLGADLAGGVSITLVESRDIGILGVGEGTFPTIRRTLATIGIDEAELVRRCGATFKQGAKFVHWRHEPGQGRTDHYLHPFQIADASDGLDLLPYWLLGYGGPDNWDEVSNPQKKAADQMRAPKLATNPDYVGPLNYAFHFDAVALAGLLREQGVKNGVRHLTDTVTEVLLDADGAIGGLRTEQNGLLDADLYIDCTGFRAELIGKAMKIPYRSCRDVLFCNRAITAQLPYARRDEPIASYTISTAQEAGWIWDIGLDRRRGIGHVYSSDHSDDETAERVLRGYLGAGGGEAEVRHFKFDAGYREVNWYKNCVAVGLSSGFFEPLEATGIAFAEVSAGMIANLFPWGGDYETSARQFNANMLRRYERALDFIKLHYCISERRDTAFWRDNVADASVPDSLLELLDRWRFRPPNELDIDGQVDIFTDASWQYVLYGMGWKTDLSAKAGALRYPEDARRAFAEVQRQAQYAIANLPSNRALVDYAQTHRFGARAPA

SEQ ID NO: 86452 - protein, 502 aa, Sphingomonas sp.
  REGION 1..502: note = tr|A0A0Q4GCD5|A0A0Q4GCD5_9SPHN Tryptophan halogenase; OS = Sphingomonas sp. Leaf20 OX=1735685 GN=ASE72_15300 PE=4; SV = 1
MDTPAKTRVVIAGGGTAGWLAAALFMRQLRPLVDVVLVESEEIGTVGVGEATIPTVQAFHALIGVDEREFMAATGATFKLGIAFEGWARTDDRYIHSFGDVGRATWMGDFQHFWLEAQANGDAGPFSDYCLELQAAEAGRFATGQTGRRLNHAYHFDAGRYAKYLRARCEAAGLTRREGRIARVDRDPGTGHITALALDDGSRVEGDIFLDCTGFRGLLIGDALGVGYEDWGHWLPADRALAVQTTSVEPARPYTRAIAHDAGWQWRIPLQHRVGNGIVYDSDFLSDDAARERLLGSVEGTPLTEPKLIRFTTGRRQRAWEGNCIALSLASGFVEPLESTSIHLVMVALTRLLQVFPFDGINPSVVARYNDQSRRELEGVRDFIILHYHLNQRSEPFWKRCATMPIPDTLAQRIALFVEGGQAFQSGDDLFRVSSWSQVMLGQRLTPKNWHRLARLMPADRLAQSLAELKAGIAAEVAKLPQHQAFLAGYCPETTARPAAAA

SEQ ID NO: 86453 - protein, 446 aa, unidentified
  source 1..446: note = Caballeronia catudaia
  REGION 1..446: note = tr|A0A158BMS5|A0A158BMS5_9BURK Tryptophan halogenase; OS = Caballeronia catudaia OX=1777136 GN=AWB75_03723 PE=4; SV = 1
MSEATQTQQQTWDVVVIGGGPAGSTAATLLADRGYRVRVLEKARHPRFHIGESLLPANLRLFERLGVADEVRAIGMVKLAAEFVSPQHDNRMQRFMFADAWDKSMPSAYQVRRSELDEILLRNAAKHGAHVSEGCRARDVAFAPDHSSATISAEHDDGRIEAVRARFIVDASGRDTLLANQFRTKRRNARHNSSALYGHFRNARRNAGQNEGNITVFWFEHGWFWFIPLADGATSIGAVVWPAYLKRRPKGTSVEAYFRETIALCAPLAERLSDAELISEVHATGNYAYTGDMTHGRNFLLLGDAFAFIDPVFSSGVMLAMQSAFAGAEAIDGALSNPAGAPAALAKFDRDVRHGPREFSWFIYRMTSPTMRNLFMGPRNPLRMKEALLSLLAGDIFGTTPIWRSLRAFKGIYYVTAALDWRNSLRAYRMRKRNLSDAERAELSAN

SEQ ID NO: 86454 - protein, 493 aa, unidentified
  source 1..493: note = Acinetobacter populi
  REGION 1..493: note = tr|A0A1Z9YYG3|A0A1Z9YYG3_9GAMM Tryptophan halogenase; OS = Acinetobacter populi OX=1582270 GN=CAP51_11100 PE=4 SV=1
MLDLRHAKNITIIGGGTAGWFAALTLKRMFSDHVKVQVIESPSIGIVGVGEGGLINLVSALNSLNIPTSEFMRETGAAFKWGFCYEGWRTGEKEDEFYHLFINPKHEPFNHEAAAFLPLISALITQNIPLASAVKDFDVIRQRISQKDAIDVLQNDSGFATSFHFDSHKVASFLCKKAVERGVIHTQTKVHDIVFNAEGYAQQILTEQGPLKTDFIIDASGFSRLVIGKKLKSSWSSFKDYLWLDRAIPFHVSHHGKNPELVTRATAMKAGWMWQIPLVERIGAGYVFSSEFTTEDQAIDEIQQYFGFEIEPQKTLSFKPGHYKKVWQKNVMALGLASGFVEPLEATSIGQMLEQLRMFERVVTHSGWVVSDLSIEQYNQANTASWHGIRDFLRMHYDCPRQDTPFWQKVANTPYPESYAALKEVFMQRSPRMEDIKGYAQYGWNGIFHVVNWIFVAQALNLISKTGCAQELQILPIEQKKQIIAYIEVLSNF

SEQ ID NO: 86455 - protein, 391 aa, Glaciecola sp.
  REGION 1..391: note = tr|A0A3B8T3R5|A0A3B8T3R5_9ALTE Tryptophan halogenase (Fragment) OS=Glaciecola sp. OX=1905676 GN=DCE62_04155; PE = 4 SV=1
MFYPYLGTETMNNQIITVVGGGSAGWMTANLLHNQLHQHGFTIRVIESPSIGIIGVGEGSTPQLKVFFDMLGIAEQTWMPRCDATFKHGIRFNGWTDLVHPQYDHYFHPFPSNQDHNSGRYFLQQVHTMLAGYPAMPHPDLYFLTATLAQQNKTPAHEHPELQTNYGYHFDSAKLGQFLKTHGTQQGIQIITTTIDSIQHQANTIVSVTDEQGQIFNSDWFFDCTGFGGKLIQEALGTDFIHYTDNLFNDRAVAIPTRREEQELPQTTATALPCGWAWRIPLTSRIGNGYVYSSQYCTADEAEHVLRQHLNIDDKIPARHLSMKVGRLAQHWVGNTIAVGLAQGFIEPLEATALHLVQETVTQFIGAFTAGRFTTIYQEQFNDNINARFEG

SEQ ID NO: 86456 - protein, 510 aa, Paucibacter sp.
  REGION 1..510: note = tr|A0A0U3EW67|A0A0U3EW67_9BURK Tryptophan halogenase; OS = Paucibacter sp. KCTC 42545 OX=1768242 GN=AT984_06420; PE = 4 SV=1
MNVQAFPTESARSSASAVRRVVIAGGGTAGWMVAALMGKLMGKQLEIRLVESDEIGTVGVGEATIPALHMFHELLGIKEAEFMAATQATFKLGIKFEGWKAPGEDYIHSFGLTGQDHWSAGFQHFWLKGRQRGLAQRYGDYCLELRAAEENRFAHLPQNGMNYAYHLDATRYARYLRGIAEAHGVQRIEGKITEVLRVTPDGDLSALRLGDGALVAGDLFIDCTGFRALLLGETLGVPYEDWTHWLPCDRAVAVQTASVREAPPYTRSIAHPFGWQWRIPLQHRVGNGLVYSSRELSDADAPEVLTRHVEGELLMKPRLLRFIPGQRREVWNRNCIAVGLSSGFIEPLESTSIHLIQRAAIRLMRLFPAGGVREVDRVEFNRQTQDDLEHIRDFIILHYHVTERDDSDLWRHVRTMAVPETLRHRIELFTETARVFRPLDELFAENSWIQVMLGQGISPRHHHPVADLMGDAELQQFLEHIRRQVSQRLATLPPHAAYVERLCAPYRAAA

SEQ ID NO: 86457 - protein, 554 aa, Nostoc sp.
  REGION 1..554: note = tr|A0A252CZ80|A0A252CZ80_9NOSO Tryptophan halogenase; OS = Nostoc sp. RF31YmG OX=1932668 GN=BV378_29105 PE=4 SV=1
MSQYVQNIVIVGGGSAGWMTAAYLSKALKKNVHITLVESSNITKVGVGEATFSSIKSFFDFLGLQEYEWMPKCNATYKMGIKFVDWNSDRRHFYHPFERFDFIDGFSISEWWLKLKSFNEPFDYSCFMAPTLCDHQRSPRYLNGKIFDDRVEHLFSEKHFSEKNLITLADAEGQYPYAYHFDANLIARFLKDYSRQRGVKQIVDDVVDVNLTEDGSIDSLNTKEHGIVSGDLFIDCTGFRGLLINKALGEPFISYSESLLCDRAIAMQIPSDIQKNGINPYTTATALSSGWVWDIPLYGRNGTGYVYSSAFISAEEAEQEFRHHLGNVAHNCKASHIHMRIGRNRNSWVKNCVAIGLSSGFVEPLESTGIFFIQHGIEELVNHFPGKSFNEELICNYNKAVANCIDGVRDFLVLHYFASDRADTKFWQATKQEIKVPAELQEKFKLWRRRLPNKKNINPYFHGFETYSYSVMLLGLNHKPEGSLPLLEHLDNEKALAKFTAIKEKAKYLSTNLPSQYEYLTYVIKSQEHSEYLSENQLPASFVSDSAHQIPIAS

SEQ ID NO: 86458 - protein, 499 aa, Sphingomonas sp.
  REGION 1..499: note = tr|A0A0Q4G6G7|A0A0Q4G6G7_9SPHN Tryptophan halogenase; OS = Sphingomonas sp. Leaf20 OX=1735685 GN=ASE72_04105 PE=4; SV = 1
MTETSERPRTRVVVAGGGTAGWIAAAAIVRQLGSLVDVTLVESDEIGTVGVGESTIPTARSFHAFLGIDEAAFMRATQATFKLGIAFENWRRLGDRYFHPFGSVGRSVAIADFQHFWLEARARGFGGAYGDYSLEQQAAGAGLFGHDEQHSLAYAYHLDATAYARFLRTLAEPWGVRRVEGRIDRVERDGEGGDIAALVLASGEQIAGDLFIDCTGFRALLTEGTLGTGYEDWSEWLATDRALAVQTETVASPVPYTRAIAHTAGWRWQIPLQTRTGNGLVYSSRHMSDDEAHATLIGALDGRPLFEPRPLRFRSGMRRQAWNRNCIALGLAAGFIEPLESTSIHLIMNAVIRLIQLFPFRGDDHAALAARFNAQSRHEWEHVRDFIILHYHVTERRDSPFWRDCARMTVPDSLAERISLFTTTAGAWQGQDDLFRIDSWVSVMLGQGVVPRAHHRIASIIKGQELQNSFADLSRGIARTVRTLPRHGEFLARYCPAHG

SEQ ID NO: 86459 - protein, 514 aa, Paucibacter sp.
  REGION 1..514: note = tr|A0A0U3EDA6|A0A0U3EDA6_9BURK Uncharacterized protein OS=Paucibacter sp. KCTC 42545 OX=1768242; GN = AT984_13175 PE=4 SV=1
MTPPAAIAHIIIVGGGTAGWMSANLLMQQWGGLGCRVTLIESSEIATIGVGEGSTPYLREFFRRLGLAESEWMPACNATYKCGIEFPQWTTQPGFESYVHPFFNQDDLSLGTRFFTQACLRRRGSAADANPQDFFIAAELARQRKAPFYLPRADGRTSPPTDYAYHFDAGLLGQFLKSHALKLGVTHRIGTVAEVLRQENGDISGLRLNGSDEVLTGSLFIDCSGFQGLLINQALGVPFESFADNLFNDRAIAMPTALDESQDIPSQTRSTALSHGWAWQIPLTNRFGNGYVYASAFVSAEEAEQELREHLGPAAHDSEARHLKMRVGQVSEHWRHNCLAIGLSQGFIEPLEATALMLIQFSLDHFIAALEHAHFGRAGQAGFNARIRQMFEGVRDYVVGHYQLNSRDDTEYWRANLANRNISARLGSILEVWDCGADFEAELTRHGEALMYIRPSWYCLLAGMGRFPGGLQPAPPSGLISSAQARSALAAKAGEFWGHRAYLQQHAAADTQPR

SEQ ID NO: 86460 - protein, 415 aa, Chitinophaga pinensis
  REGION 1..415: note = tr|C7PAY7|C7PAY7_CHIPD Tryptophan halogenase; OS = Chitinophaga pinensis (strain ATCC 43595 / DSM 2588 / NCIB 11800 / UQM 2034) OX=485918 GN=Cpin_1863 PE=4 SV=1
MTTEKVDVLVIGAGPAGSVAASIIHQAGYSVKIVEKLKFPRFVIGESLLPRSMEALEEAKFIDAIKAKGFQEKFGAKFVKGDKVCDFTFKEQHTEGWNWTWQVTRADFDKTLADTVASMGVPVSYETTVTDIQFNGSDSVTTVEDIKGNKSQIEARFIVDGSGYGRVIPRLFNLEKNSVLQPRKALFAHTVDERRSMADEPNRITAVVHQPGTWIWIIPFSTGVTSVGFVGDPSFFDSFPGTQEEKYRAMLESEPFTRERFRDVEFVFEPRVLESWSATTDKFYGDGFVLTGNVTEFLDPIFSSGVTLACVSSQTAAKLVIRKLKGEVVDWEKEYMEPTMQGVNTFRSYVMAWYDGTLDKIFFSAEKRPDVKNQICSVLAGYVWDMSNPYVQNHDTALKRLARTIELTEILKQDK

SEQ ID NO: 86461 - protein, 494 aa, Psychrosphaera saromensis
  REGION 1..494: note = tr|A0A2S7UV27|A0A2S7UV27_9GAMM Tryptophan halogenase; OS = Psychrosphaera saromensis OX=716813 GN=BTO11_07850 PE=4; SV = 1
MNNKNIVKVVIAGGGTAGWMAAASLSKLLGKAFDITLVESDEIGTVGVGEAAIPTLAAFHRLLGINEQDFMKATHSTFKLGINFENWRNGNDEYMHGFGRVGKDCWAGEFQHFWLHGKKNNIDYNFDNYCFEIQAAKARKFALSKGGLNYSYHLDATLYAKYLRTFSESHGVKRIEGKISTVSKNKDTGDITSIQLENGASIEGQLFIDCTGFAGVLIEKSLHTGYEDWSHWLPCDSAVAVQTKTVSEPLPYTRSIAHKSGWQWRIPLQHRVGNGLVFCSKYLSDEDAKNLLLKNIESEPLKHPKVIKFKTGRRRKGWNKNCVALGLSSGFLEPLESTSIHLIMSGILRLIRLFPFQGITPSAVNEYNKQFTSELEHIRDFIILHYHCTERDDSPFWQYCKNMEIPGTLKQRLNLFKETGRVFTTESELFRVDSWSQVMLGQGAYPKQYHQIAAIMKQHELESFLTQIRETIDNAVDKLPSHQTFLDQYCRSTP

SEQ ID NO: 86462 - protein, 513 aa, Paucibacter sp.
  REGION 1..513: note = tr|A0A0U3DDB9|A0A0U3DDB9_9BURK Tryptophan halogenase; OS = Paucibacter sp. KCTC 42545 OX=1768242 GN=AT984_21730; PE = 4 SV=1
MTVKSIAIIGGGTAGWLAANHLAVELRAETGISITVIESPEIGIIGVGEGTVPQIRKSLQKFGISEAELLATCDATFKDGIKFVDWLAPTSAPGANAYYHPFASPYPSGIDVTSHYLKHADWMAFESVCEVPALADAMKSPKRVSSPPFEGPLNYAYHFNAVKFGQLLAKNARDKLGVLHKQATIVDARLNAQGEVDVLITQDGERLQYDFYVDCSGFHSLILGKLLKVPFVDKSAHILTDSALAVQIPTADDAPIPPYTLAKAHSAGWLWDIPLTNRRGVGFVYASQHLSEAAALQGLAAYLGVGEDKLSPRKIPMRIGYREKFWCKNAVALGLAQGFVEPLEATSIFVTDFAAELFARNFVPDKAQMSAAADYCNKVVSYTWERVMDFVQLHYCISDRRDSDFWRRATLEAPRSEVLSERLALWQQHAPKKSDFFSRFDLFDVDNYLFVLYGMRFKTRPKRMTAFEEQVFAHEFDKVRQHTLQLGAELMPQREWLDGFLAAYRASAGSAGR

SEQ ID NO: 86463 - protein, 535 aa, Nonomuraea jiangxiensis
  REGION 1..535: note = tr|A0A1G8RXY4|A0A1G8RXY4_9ACTN Tryptophan halogenase; OS = Nonomuraea jiangxiensis OX=633440; GN = SAMN05421869_109209 PE=4 SV=1
MDSRIRNIVILGGGTAGWMAAAYLGKALQGTARITVLEAPDIPKLGVGEATIPNLQTAFFDFLGIAEDEWMREVNASYKIAIKFINWRTGGEGSARPRSAGGRSDQFYHIFGLLPFHEGIPLSHYWVRKKHLGRTAQEFDHACYREPLLLDANKAPRWMDGTRAANYAWHFDAHLVADYLRRFSTGKLDVEHVQDRMEDVTFDANGYLTSLRTATGRVLTADLFVDCSGFRGLLINKALNEPFVDMSDHLLNDSAVATAVPNDDATTGVEPFTSAIAMKSGWTWKIPMLGRFGTGYVYSSQFAGQDEAVKEFCDLWELDPDRTDLNLIRFRVGRNRRAWVKNCVSIGTSSCFVEPLESTGIYFIYAALYQLVKHFPDKSFDPVLIDRFNREIETMFDDTRDFIQAHFHFAPRDDTPFWRANKELKLGDGMQDKMDMYRAGLPINNPPSDDASHYYANFEEEFRNFWNNGNYYCVLAGLDHLPPRPLPLLAHMPESVASAEALFTRVSEEQRRLVESLPTNYEFLRSLHGHTEQRH

SEQ ID NO: 86464 - protein, 496 aa, Glaciecola sp.
  REGION 1..496: note = tr|A0A348MT14|A0A348MT14_9ALTE Tryptophan halogenase; OS = Glaciecola sp. OX=1905676 GN=DCR37_00015 PE=4 SV=1
MQQPIKKVVIAGGGTAGWMTAALMQKVLQGQIEIELVESEDIGIVGVGEATIPPIQVFNQFLGVDEKEFLRETNGTIKLAIQFENWRVKGESYLHTFGAPGTNLGFCNFQHYWLRAYKAGLQKSIWEYDLNYLCSVDGSFNKINTQNPMFDMPYAYHFDSSLYGKYLRKIAEKGGVIRTEGIIEHVQQDPIYGNITGLQLKSGKQIQGDLFIDCTGSRAILSQQTLGVKYEDWSHWLAADSALAVQTNRFEKTLPYTRSIAHDKGWQWRIPLTNRNGNGIVFSSKYMTDEEAHDRLINNLGSDPINDVRKISFRTGRTKEQWHKNVISIGLASGFLEPLESTSIHLIQSAIVRLLKLFPHNGIQQSAVDLYNAESKTEYETIRDFIILHYHVNERTDSDFWQDMRNLPLPDRLAQKIQVFSDVGEIFNDQHDIFRDASWLQVMLGQGIMPKDYHPAANQMSEAQLTDTLDKVFAAKRQPLVKMLPHDDFLAHYLKV

SEQ ID NO: 86465 - protein, 517 aa, Pseudoxanthomonas sp.
  REGION 1..517: note = tr|A0A1H0ZY74|A0A1H0ZY74_9GAMM Tryptophan halogenase; OS = Pseudoxanthomonas sp. CF385 OX=1881042; GN = SAMN05428982_0649 PE=4 SV=1
MDLPVRHVVILGGGSAGWLTAAVLAAEHQTALAGGLRITLIESPDVATVGVGEGTWPTMRDTLRRTGVSETDFIRQCDAAFKQGSKFVRWREEVDGDYYHHPFVLPPGFLETHLATGWMAHRDVPFSMLTCYQAHLCEAGKSPKQMSTPEWASVANYAYHLDAAKLGVFLRTHCVGKLGVRHIADHMVGVETHENGDIAALRTREHGAIEGDLFVDCSGMRALLIGQHYGVEIESQKDVLFNDRAIATRVPYADPHVEIACQTISTAQEAGWIWDIGLQSRRGIGHVYSSTHTSDDAAEAALRRYIVATGGREQDIDTLPKIMIRPGFRRGAWHRNCVAIGLSSGFMEPLEASSLVMVELAAGMLADQMPATRAAVDIVAKRYNDTFSYRWDRIVDFLKLHYVLSKRDDSEYWRDNRRPETIPERLRDLLEFWRHQPPSRYDLNRVEEVFPSASYQFILYGMGFVPDARPTTRRMDDVRRAEEYFGQSADIARKMLSALPGHREMLDHVMTRGMPRI

SEQ ID NO: 86466 - protein, 498 aa, Pseudoxanthomonas sp.
  REGION 1..498: note = tr|A0A1H0ZYI1|A0A1H0ZYI1_9GAMM Tryptophan halogenase; OS = Pseudoxanthomonas sp. CF385 OX=1881042; GN = SAMN05428982_0652 PE=4 SV=1
MPDIHHQPIRRVIIAGGGTAGWMAAAALSKVLGEVLDITLVESEEIGTVGVGEATIPTLLSFHRMIDIGEQEFMAAVQGTIKLGISFENWLDVGHRYIHSFGFSGKDRGATGFQHFWLRGRKEGYASGYEDYCLELKAALQDRFAHLPRSGTNYAYHMDASLYAKFLRRFSERHGAKRVEGKIAEVLTDAASGHITALKMESGDSLEADFFIDCTGFRALLIGKTLGVGFTDWSHWLFNDSALATQTTAVRDAVPYTRAIAGKAGWQWRIPLQHRVGNGIVYSSRHVGDDEAREEFLGSLEGEVIKQPWPIRFRPGQRQQCWAKNCVALGLAGSFIEPLESTTIHLIQRGIVHLLQNFPQVVTPPAIDEYNARLDEELQHVRDFVVMHYALSNRRDSPYWREIAEMALPSTLRHRIELFRETGTVFHVPGELFGENSWIQVMMGQGIMPKRYHPTADAVPPAELQRFLDDIRASVLGNVERMPAHMDYLRSYCPAPKP

SEQ ID NO: 86467 - protein, 497 aa, unidentified; identical to SEQ ID NO: 82350
  source 1..497: note = Mycobacteroides sp.
  REGION 1..497: note = tr|A0A0R3F6T8|A0A0R3F6T8_9MYCO Tryptophan halogenase; OS = Mycobacteroides sp. H072 OX=1720568 GN=AOT86_09930 PE=4; SV = 1

SEQ ID NO: 86468 - protein, 497 aa, unidentified
  source 1..497: note = Paraglaciecola agarilytica
  REGION 1..497: note = tr|K6XFT8|K6XFT8_9ALTE FADH2 O2-dependent halogenase I OS=Paraglaciecola agarilytica NO2 OX=1125747 GN=prnA; PE = 4 SV=1
MNKKPIKRVVIAGGGTAGWMAAAALAKLLGKNLSVSLIESDDIPTVGVGEATIPTLHIFHRLLGINEQEFMAATNATFKLGIKFENWKAQNDDYIHSFGFLGQGCWAAGFQHFWLKGKEKGMVTQIGDYVPEHLACREGRFAVLANQEQNHAYHLDAGLYAQFLRKIAEQHGCKRVEGKIQTVTLNEDSGDISSLTLASGETVEGDLFIDCTGFRALLIEQALHTGFEDWSHWLPCDSAVAVQTTAKPNPVPYTRSIARDAGWQWRIPLQNRTGNGLVFCSKYVSDEQAKAALLANIEGETLNEPRVIKYKTGTRRKHWNKNCIAVGLSSGFIEPLESTGIHLFQRAIVRLMLMFPSNGIEQADVDEFNAQSRADVEDIKDFIILHYHQTERTDTPFWRYCKNMPIPDTLAHRMDLFAGTGKVFKKAEELFGETSWIQVMLGQGIMPKQYHPIVDMMSDDELQRFLNNIKANVKRKVANWPDVNDFIRHYCQSQAAQ

SEQ ID NO: 86469 - protein, 502 aa, unidentified
  source 1..502: note = Massilia psychrophila
  REGION 1..502: note = tr|A0A2G8T086|A0A2G8T086_9BURK Tryptophan halogenase; OS = Massilia psychrophila OX=1603353 GN=CR103_12615 PE=4; SV = 1
MSLPHIRNIVIVGGGTAGWMTAAGLAKVLTGNWTIRLVESEEIGTVGVGEATIPLINIYNKALGIDEDEFMRATNGTFKLGIEFCNWGKLGGSYMHGFGNLGPDIGITKFHQYWLKAQQEGYAMDIENYSICSLAARHAKFMRARPELGNSPLSEIAHAFHFDANLYAAFLRKYAEQRGVIRIEGKVSGATTRPADGFIEAIVMDNGERIEGDLFIDCSGFRGLLIEQTLHAGYDDWSHWLPCDRAWAVPCESVAPLLPYTRSTARDAGWQWRIPLQSRIGNGHVYSSKFTDDASAVDILMNNLDGQALAEPRQLKFVTGKRKKFWDKNCVAIGLSSGFMEPLESTSIHLIQSTIARLTTFFPDQGFDQCNIDEFNRQANFEVEKIRDFLILHYKATSRTDTEFWNYCRNMDIPDSLRNKMALYESNGRVFREASEMFSEISWFEVMHGQGLKPRSYHPLVDALAEGKIRTFLENVSSTTLRCVEAMPTHADFVRDNCAART

SEQ ID NO: 86470 - protein, 517 aa, unidentified
  source 1..517: note = Comamonadaceae bacterium
  REGION 1..517: note = tr|A0A257G454|A0A257G454_9BURK Tryptophan halogenase; OS = Comamonadaceae bacterium PBBC2 OX=2015581; GN = CFE39_03740 PE=4 SV=1
MNEAVKHIVIVGGGSAGWLAAGVIAAEHCSASDAGLRVTLLESPDVAPIGVGEGTWPTMRDTLHKIGVSETDFFRECDASFKQGSRFNGWVNGRADDHYFHPFVLPQGYGETDLVSGWLQQYAQLPFADLVSFQPHLCVHGKAPKQKGTPEYAAVANYGYHLDASKFGQFLRKHCTEKLGVRHVLDHMTGIHTHENGDIASLQTQANGALEGDLFIDCTGMQSLLLGKHYQIPFLSQKHVLFNDTAMALQIPYADENTPIASQTISTAQDSGWIWDIGLPTRRGTGYVYSSAHTTDEAAQQALHSYTVQTGGPINPGTPRKLTFKPGYHSKFWHKNCVAIGLSAGFIEPLEASALALVELSASMLSDEMPATRSGMELAAKRFNDAFIYRWERVIDFLKLHYVLTQRTDSDYWRDNCQPEGIPERLQELLVLWQHQSPSRYDLARIDEVFPSASYQYVLYGMGFRPKQRPTVRRTDDTAAAMTYFQEAASLTRKMLAALPDNRELITHIQRNGMLKI

SEQ ID NO: 86471 - protein, 509 aa, Pseudoalteromonas luteoviolacea
  REGION 1..509: note = tr|A0A161ZT76|A0A161ZT76_9GAMM Uncharacterized protein OS=Pseudoalteromonas luteoviolacea DSM 6061; OX = 1365250 GN=N475_04440 PE=4 SV=1
MASITIVGGGTAGWMTAVLLNQAYNKFGNTVSIQLVESPDVDIVGVGEATVPAIKDFLQAVGIDEAEFIKSTNATIKNGILFKNWCAPTEEGEVHQYMHPFDQERVEKRLDVATSWLLSSRNKSYDDSVSIAKALSDKNLTPKVQQSKSFQSIVPYSYHLDARLFGQFLRKHAIARGVTRVEAHVNNVVAKEGKIVSLSTDKGEITSDLFIDCTGFRALLLSKLEEQENWHSYSDVLLCDKAVTIQTENDTSYAPNPYTISHALSAGWSWKIDLQNRSGNGYVYSSRHISPEQAELEFRKHLGLDEQTKFNHIDMHVGRRRQQWIGNCVAVGLSSGFIEPLESTGLHLIYLAARQFVLHNNFSKTQQSTRDNYNKTMNDTYDELKDFIVLHYVLSDRTDSEFWRDIPKTLDGCELLKSRLSVWKHKVCEYFDVSNSTSHMFSDVSYRYILYGMNYFPELDIPFVEGEFDDVFAYIENRQQQACHHTLSHKEYLNATVHGQSGFVSVSMK

SEQ ID NO: 86472 - protein, 509 aa, Pseudoxanthomonas sp.
  REGION 1..509: note = tr|A0A543DMX4|A0A543DMX4_9GAMM Tryptophan halogenase; OS = Pseudoxanthomonas sp. 3HH-4 OX=1690214 GN=FB548_2901; PE = 4 SV=1
MDSPNTPAAQIRKVVIAGGGTAGWLAACALSNQFRDRLDITLVESEQIGTVGVGESTVPPIRTFHRFLQIDEQEFLRAVAGTFKLSISFENWRRPGERYIHPFGITGQGTWAAAFHHFWLDSLRRGMPSELGDFCLETLASRGDQFSLQSQPQVNYAYHFDAGLYAKYLRRIAEGYGLRRVEGKIREVRQRADDGAVQALVLEDGQVIEGDLFIDCTGFRGLLIEQTLGTGYEDWNEWLPSDRAVAVQTESVGPPVPYTRAIAHEAGWRWHIPLQHRVGCGLVFSSRHMSDDEARAKLLRDVGAPAIRDPWLVPFRTGRRLKAWNKNVVALGLASGFIEPLESTSIHLAISAVVRLVQLFPFDGIASSLVELYNEVSRAEMEHVRDFIILHYHATQRDEPMWKACREMPLPDSLEIRLRAWRERAHAWQDPDELFRVDSWTHVMLGQGIQPGPPHPLARALADDDLRKLLDSIRQPIERAVAGMPSQQAFIDRYCKAGPEVWGNRPVPR

SEQ ID NO: 86473 - protein, 500 aa, Novosphingobium sp.
  REGION 1..500: note = tr|A0A1E4N6E8|A0A1E4N6E8_9SPHN Tryptophan halogenase; OS = Novosphingobium sp. SCN 63-17 OX=1660120 GN=ABT10_04050; PE = 4 SV=1
MSLRIAIIGGGTAGWMTANLLAHRWGGQGAQITLVEAPEIATIGVGEGSTPTLKRFFEVLGIAEDEWMPACCATYKASIRFRGWSPASGVAQYSHPFLTQLDLHTEEAFTLNCGNRRLGLDVPTAPDDFLLGGVLAAQGKAPLAPAHFPFRMEYGYHFDAGLLGRFLRDCATARGVTHHQAQVQDIIRDDRGAIAAVMTDRAGRIEADYFVDCSGFAALLMRGALDVPFVSFRSNLFNDAAVVLPTPSAALIPVETTATALSHGWAWSIPLTNRNGNGYVFSRDFLSADAAEQELRAALGMLDSPVEARHLSFHTGQLARHWEQNCLAVGLAQGFVEPLEATALHLVLNTVDLFMDHLERGSFTPQYRDVFNAVITDRVERVRDYIVAHYKLNTRDDSDYWRANRNNDDLSDPLLQILDTWFRRGDLAALLARQPGLSHFNSASWHCLLAGYGAFPPLAEVQREDVDFYRSRDLARFLDGCSLNFPSHGDALAQMKKVAA

SEQ ID NO: 86474 - protein, 507 aa, Pseudoalteromonas sp.
  REGION 1..507: note = tr|A0A3A3D5X1|A0A3A3D5X1_9GAMM Uncharacterized protein OS=Pseudoalteromonas sp. MSK9-3 OX=1897633; GN = BGP78_09860 PE=4 SV=1
MTRIVIIGGGSAGWLTAGVIAAHHGEQVHVTLIESANIKTIGVGEGTWPTMRDTLQKIGITETDFMRSCDASFKQGSQFINWGSSQMPDNYYHPFSLPAGYIQGHSAHVPRSSDLSFAHMLCPQATWCDAKLAPKLGSDKEFTGQGNYGYHLDADKFAKLLKKHCTEQLHVAHIVDEVIEVIGQCTDNIEAVITTTHGNVAGDLFIDCSGGAALLIDKHYKVPWLSQQQVLKNDSAVAVQVPHKSSECDINSCTLSTAQTEGWIWDIALPTRRGIGYTFASEFTGEHIAKAALLNYIKKQGLSKPNAEAIRTIKFNPGYRQTLWYKNCVAVGMSAGFLEPLEASALVMIELSAAYIAENLPQNPVHMETVAARFNREFSHHWQSAVAFLKLHYVLSNRADSEYWQTMRSQGIPKNLSELLALWRYQVPKHQDLPHSNDIFSVASYQYILYGMGFDTAITQPILSMQSETLFKDIQLSVNRFAEQGKQTLPTNRALLLNIKNHGIPKI

SEQ ID NO: 86475 - protein, 525 aa, unidentified
  source 1..525: note = Paraglaciecola agarilytica
  REGION 1..525: note = tr|K6XRX7|K6XRX7_9ALTE Tryptophan halogenase; OS = Paraglaciecola agarilytica NO2 OX=1125747 GN=GAGA_4353; PE = 4 SV=1
MQLNSQVKDIVIVGGGTAGWLTAGLLASRLSSRVQSGELNITLCESPDVPTIGVGEGSWPTLRSTLQTIGVTETDFIRQCNVSFKQGSRFVNWQHDRPSQYDHPFDVPQQASQGAEAQHWLSTQSQVPFSQAYCLQTELANNNLAPKLITTPEFTGFANYGYHLDAALFAEFLREHCIQHLQVKHVLANVKQVEQDENGDITCLHLAPPSQNNSNHPDYINGDLFVDCTGFRALLLGDTLGVCNTQVDDVLFANNAIATQLPYVEQNSPIASFTESTAQDNGWIWDIGLPNRRGIGYVYSDRYCDEQDAHRTLVKFLQKTQQNTDTLSYKQIHFTPGYKQQFWKNNCVAIGLSAGFIEPLEASALVLVEMSANMLAEQLPNTRSCMDVIAKRFNQTFTYRWQRIIDFLKLHYVLSRRSSAFWQDNRAQSSVPDSLKELLALWQHKVPDMNDFPARDEVFQAASYQFVLYGAGFKSQLLSTPDKNLLEAAEQQFLSIQGYTSQLTNKTISNRDLLSKIYRYGLQKR

SEQ ID NO: 86476 - protein, 530 aa, Sphingomonas sp.
  REGION 1..530: note = tr|A0A0Q4JSJ0|A0A0Q4JSJ0_9SPHN Tryptophan halogenase; OS = Sphingomonas sp. Leaf30 OX=1736213 GN=ASE89_19235 PE=4; SV = 1
MTGRTPGPASARGPLRSIVIVGGGTAGWMAATLLARRLERQPVKITVIDSSAIGTVGVGEATVPGIRDFFREIGVTEQEVMAATQGTVKLGIEFVDWKREGERFFHPFGLYGMRSRGVAFHHYWRKMNAAGHASPLADFCLATALAERNLFMPPTDRPVHDLLFFDWAVHFDAGLFARFLAQKAIAWGVEHIDATITDVRVDGRTGFISGVDTSCGKAIDGDLFIDCSGFRSLLLGGALGVPYEDWTNLLPCDRAVAMPCTRSGPLTPYTRSTALEAGWQWRIPLQHRVGNGYVYSSRHISDDEAVATLKGRLEGEALGEPNMIRFRTGRRTAFWQGNCVALGLAAGFMEPLESTSITLIQTGIEKLLALLPDRGFDPALAEEYNRTTGLEYERIRDFLLLHYFANVRRGEPMWDRCRDTALPNALAHKLRLFKARGHLVRYEWESFQDPSWLSMYAGFGIDAAAHDPGADHFSVQDLESAFARMKESIAQAVALAQPHDAFLGLSARHPARAQAAEPGGAPDRLMMPAR

SEQ ID NO: 86477 - protein, 530 aa, Xanthomonas translucens
  REGION 1..530: note = tr|A0A0K2ZM60|A0A0K2ZM60_XANCT Tryptophan halogenase; OS = Xanthomonas translucens pv. arrhenatheri LMG 727; OX = 1195923 GN=XTALMG727_1829 PE=4 SV=1
MGRAAATAARERRDAHASTLCRAAPPVATQVNAGEPLRHIAIVGGGTAGWMAAAALVRVLGAGATRITLVESEAIGTVGVGEATIPPIALFNALLGIDENAFLRATQGSFKLGIEFVDWLQPGQRYFHPFGTYGADFGTVPFDGLWQRMHRAGRAAPLAAYSLNTLAAMRGRFMRPQQGDALLSRLGYAFHFDAALYARLLREYAEGRGVTRLEGKVEQVLRRSPDAAIASIVLACGMRIDADFFIDCSGFRGLLIEDAPGAGFVDWSHWLFNDRAVAVPSARASAFTPYTRSTAREAGWQWRIPLQHRTGNGYVYSSAHLSDDAAAATLLANLDEEALAEPRTLRFRAGRRGLFWSGNCLALGLAAGFLEPLESTSIHLIQAGIARFLEMLPDRAGNPADIRRYNRLMAQEFDSIRDFIILHFHATARPGAYWERARTMPIPDSLAERLQIFAHSGRVFREADELFSKTSWLAVMQGQGLSARGFDPLAAAMPDAEAAARLQRVAAAMAMAVERMPAHADFIRAHCAAT

SEQ ID NO: 86478 - protein, 489 aa, Sphingomonas sp.
  REGION 1..489: note = tr|A0A0Q4KE57|A0A0Q4KE57_9SPHN Tryptophan halogenase; OS = Sphingomonas sp. Leaf30 OX=1736213 GN=ASE89_18325 PE=4; SV = 1
MAAAALAAKLAGLPISITLVESDEIGTVGVGEATLPHIRAFNLALGIDEAEMMRATEATYKLGIEFCDWGRRGDRYIHPFGDFGPTTNDVPFYQYWLKLRQSGDRSRIDEYSYPVIAAEQGRFRRPSGDLDAVESTFGYAYQFDAGLYAKFLRGFAEKRGVSRIEGKVVRVVQDGETGFVRDVVLTNGTTLSADLFIDCSGFRGLLIETALQSGYDDWSAWLPCNRAIAVPTESNGALRPFTRATARTAGWQWRIPLQHRVGNGHVYCSSFISDDEAHDQLVAGLDAPMQAEPRRLSFTTGRRREFWKKNVVAIGLAGGFLEPLESTSINLIQDGITELLAVFPDKGFAARDIAEYNRRIGLHYERIRDFLLLHYVATQRADSEMWRHFRNLRLPDSLSERIDAWRARGHLIQYEFGLFLSPSWVAVFLGQNIVPDRHDPRVENMSVDALTARAMDVRAKVDAAVRRTPEHTAFIRESGGAARLAVAGA

SEQ ID NO: 86479 - protein, 487 aa, Sphingomonas sp.
  REGION 1..487: note = tr|A0A0Q4KCE9|A0A0Q4KCE9_9SPHN Tryptophan halogenase; OS = Sphingomonas sp. Leaf30 OX=1736213 GN=ASE89_04045 PE=4; SV = 1
MTAATLGLTTGTPSAARLADITLVESEEIGTVGVGEATVPHIRFFNQRLGIDEADFVRRTKATFKLGIEFCDWGRIGDSYIHPFGDFGHDIDGLPFHQHWLHATRDKPDETPALAACSLPIVAARAGRFTPPLDDPRSVGSTYSYAYQFDAGLYAAYLRDYAEARGVTRIEGRVEHVERGPSGIAALRLADGQRIEGDLFVDCSGFRALLIEGALKAGHEDWAHWLPCDAAWAVPTANTGPLVPYTRATARDAGWQWRIPLQHRTGNGHVFSTRFTDPDRARAVLLDNLEGEPLAEPRMLRFRTGRRHRQWIDNCVAIGLSAGFLEPLESTSIHLIQLAIGKLIELFPNDPVLDPADAAEFNRAMALEYDRVRDFLVLHYCATERDDTPFWRHMRTMELPPSLAGKIAAFRDRGIVEQYREGMFLPASWLAVYYGQRIMPERIHPLVAALPVADARARVAAVVDACRRTAEGMPTHADYLARIGAAA

SEQ ID NO: 86480 - protein, 517 aa, Duganella sp.
  REGION 1..517: note = tr|A0A1H8L5X6|A0A1H8L5X6_9BURK Tryptophan halogenase; OS = Duganella sp. CF517 OX=1881038 GN=SAMN05428959_104141; PE = 4 SV=1
MGSTDTHGGAIRRIVIVGGGTAGWMAAAPLAQRLARHPTEPCEVTLVESPEIGTIGVGEATLPTIRAYNEALGLDGADFVAKTQASFKLGIEFKDWGHVGNRFFHAFGDFGPVLAGVGAHQHWLRLAQAFNSMPDIENWSVPSVMARHGKFSPPKDDQPGVTDAYSYGFHFDASLYAKYLRDYAVARGARRLEGMIVEVEQHPQSGFVTAVKLQDGRRIEGDLFIDCSGFRGLLIEGALKAGYEDWSAYLPCNSAQAVPCASVAQLTPYTRSTAKQAGWLWRIPLQHRTGNGHVYSDGFTSDEQARRVLLDGLDGAALDEPRQLRFTTGRRRKSWVKNVVAIGLSAGFVEPLESTSINLIEMAVGKLLELFPDRDCAPALADEFNRFMGIRYESVRDFIILHYKLTKRDDSEFWRYCADMAIPDALRHQIELFRETGRVAIVDRGGFAEPSFVAMMMGLGVMPKRYDPLADRVDLRAVHGHFAGLRDLIAQTVARMPDHGAYVAGQAKSGAASRVAA

SEQ ID NO: 86481 - protein, 232 aa, unidentified
  source 1..232: note = Burkholderiales bacterium
  REGION 1..232: note = tr|A0A4Q3UBK5|A0A4Q3UBK5_9BURK Tryptophan 7-halogenase (Fragment) OS=Burkholderiales bacterium; OX = 1891238 GN=EON93_24470 PE=4 SV=1
MHLPHGFPERLVILGGGTAGWMSAAFLDRNYNTPQRRQLEIVLVEAPAIGRIGVGEATLLTMRDFCDFLGIPEELLMQRTNATLKHGLSLEGWNGPDSRYFHAFEALDPSVANNAGPSWLARKARGTARAFHEEMGIQSRVAYAGCSPKPMMDSGGYRSRLPYAYHFDAEAFADLLKEIALARGVVHVEGEVTEIGQTENGDVSQLRLADGRVVEGDFFIDCSGFAALLNQK

SEQ ID NO: 86482 - protein, 513 aa, Sphingomonas sp.
  REGION 1..513: note = tr|A0A0Q4K2R9|A0A0Q4K2R9_9SPHN Tryptophan halogenase; OS = Sphingomonas sp. Leaf30 OX=1736213 GN=ASE89_07415 PE=4; SV = 1
MREIKHIVIVGGGTAGWLTAGVIAAKHQARRAHGFTVTLVESPNIPIIGVGEGTWPTLRNTLRRMGISETELFRQCDASFKQGARFNRWTTGAPDDGYYHPLMLPQNFGQVNLAPHWLETPDATSFCDAVTPQGRVCDAGLGPKTIATPEYEAVANYAYHLDAGKFSGFLQRHCCDVLGVRHVLADVTEAVVTETGDIAMVRTEQAGDIPGDLFVDCTGFAALLIGRTLGVPFKSCADTLFCDTALAIQVPYPDDETPIASHTISTAQSAGWTWDIGLPTRRGVGHVFSSSHISVDEAERELRAYIGDAAADLPVRKLSIKAGHREIFWKNNTVAVGLAAGFLEPLEASAIVLIELSAKLIADQLPACREVMDVVARRFNETTLYRWGRIIDFLKLHYALTQRTDNDFWRDNVRPESIPDRLQGLMDLWRYHAPWMLDEFDRAEEVFPAASYQYVLYGMGHRTHVPPGVAEADVRAADRAIRENQTQTERLMAGLPLHRGLIRKIVEYGLPTI

SEQ ID NO: 86483 - protein, 505 aa, Altererythrobacter namhicola
  REGION 1..505: note = tr|A0A1C7D6S8|A0A1C7D6S8_9SPHN Flavin-dependent tryptophan halogenase RebH OS=Altererythrobacter namhicola; OX = 645517 GN=rebH_2 PE=4 SV=1
MSAKGKPSIVIAGGGTAGWMAAAALARFASATHDITLVESEAIGTVGVGEATIPQIHNFNHALGLDEAAFVSATQASFKLGIEFAGWSGDGSAYMHAFGPVGRAHGPLPFQHYWLRAADEGDAGSLAEYSLNEQAARAGKFRRGPSRSGGAAMPYAYHFDAALYAAHLREYAEARGVTRVEGRIDSVAKHGESGHIRALHLDGGTQVVGDFFIDCTGFRALLIGEAMGTDFDAWDALLPCDRAIAAPCAKAGAITPYTRATARPAGWQWRIPLQHRTGNGHVFCSQHMGEDEATQLLLDNLDGEPTADPRTIRFQTGKRREHWRGNCLALGLAAGFMEPLESTSIHLVQSAIARFLPLLPGAVPAQAAIDRFNADADTEWLAIRDFLVLHYRANAREGEPFWDAMRGLALPDTLTSKIALWQQTGTIHRAGDELFAEVGWLQVLAGQGVMARAHNPIADAMPKEDLARFLAQQKQAIAADLATMPTHEAAIADLTARHNPSGVAA

SEQ ID NO: 86484 - protein, 497 aa, Pseudoalteromonas sp.
  REGION 1..497: note = tr|A0A3A3D2E2|A0A3A3D2E2_9GAMM Tryptophan halogenase; OS = Pseudoalteromonas sp. MSK9-3 OX=1897633 GN=BGP78_16415; PE = 4 SV=1
MAEQRIKNLTIVGGGTAGWLTASLFAKVMGKQLNITLIESDDIATVGVGEATIPPILPFNGALGIDEKAFIKATSATIKLGIQFEGWSKDVPSYMHAFGAIGKDFPFCEFYHHWLAAKSQGDQSNFWDFSLNYQAAKQHKFAKLHTIPNTQLKGLSYAYHFDAQQYAVFLSQHAQTLGVKRIAGTVSSVRVNEESGFIEQLDLADGQQVSGDLFIDCTGMHGLLIEKALNCGFEDWSHWLPCDRAIAIQSNPLSNDIVPFTRSIAHPAGWQWEIPLQHRVGNGIVYSSKHMSDEEAQAILLAGISGDTLGKPKHLRFRTGRRLTPWCKNVVAIGLSSGFLEPLESTSIHLIQTAAVRLLKLFPQNDITQQSRDIFNRETQQELEQIRDFVILHYKLNDRADSAFWRLCHTMPIPESLKRKIALFKETGVIHSEVTDLFSSVAWQQVMLGQGVIPQQQHPLVDTLTAEQREELLSSLRLLIDKTASALPKHVAFLASL

SEQ ID NO: 86485 - protein, 509 aa, Xanthomonas oryzae
  REGION 1..509: note = tr|Q5H6B8|Q5H6B8_XANOR Tryptophan halogenase; OS = Xanthomonas oryzae pv. oryzae (strain KACC10331 / KXO85) OX=291331 GN=prnA PE=4 SV=1
MIPAPLRNIVIVGGGTAGWMAAAAFARVLGPTFTVQLIESEQLGTVGVGEATVPHIKAFNNLLGIDEAEFVRQTQGSFKLGIEFVDWQRPGTAYMHGFGTQIGHPLGLLPFHQYWIKQHARGKAQPLGAYTLNTVAAARGKFMTSAGDVPANSPLANIAYAYHFDATQYAHFLRRYSQQRGVTRIEGLVEQVQLHPESGHVQSLQLASGQTVHGEVFIDCSGFRGLLIEEALHTGYHDFTHWLPCDRALAVPCEKVGPPTPYTRSTARAAGWQWRIPLQHRTGNGYIYCSAHISDDEAAATLLANLDGKPLADPRPLRFTTGRRKQFWNRNVVALGLASGFLEPLESTSIHLIQSGISKLLELFPREGISPVLVQRYNDRSAFEFDRIRDFLLLHYHATEREDSAFWRHCRSMPITPELQTTLDLFRDSGRFYRNAEEMFAEISWVQVMVGQGILPQGYHPLVDQVPDRDAEGFLASVAHTIAHCVDVMPPHQQFIDRYCKAAALPCGG

SEQ ID NO: 86486 - protein, 502 aa, Sphingomonas sp.
  REGION 1..502: note = tr|A0A0Q4KHG9|A0A0Q4KHG9_9SPHN Tryptophan halogenase; OS = Sphingomonas sp. Leaf30 OX=1736213 GN=ASE89_18310 PE=4; SV = 1
MDELAIRRIVVVGGGTAGWMAAAALSRVLGRAVEIELIESEAIGTVGVGEATIPHLQYFNRLLGIDEDDFVRRTAATFKLGIEFVDWGRIGDRYFHPFGTYGQEMEGLHFHHFWLRQAQLGGALDLDRFSIGADAARAQRFQRPDHSRAGSPLGTISYAFQFDASLYARYLRERAEAGGVRRTEGRIVDVTLDSGNGHVQAVTLEDGSRVAGDLFIDCSGFRGLLISEALGAGFENWSHWLPCDRAVARACRRTTDPLPYTRATAKAAGWQWRIPLQSRTGNGYVYCSDHLSDDEALAGLNAALDGDPLSEPNFIRFKAGVRHKAWDRNVVALGLANGFLEPLESTSIHLIQSAIARLLTNFPDRRFNQHDIDYYNRRTRVEYEQVRDFIILHYATTTRDDSPLWRYCRSMALPTSLGERIAIFRENGRLYRHDNELFSETSWLAVMHGQGLVPRRYHPLADLLPEGELDKRMAHIANAMRLAVDRMPSHQQFLDQIGHPAV

SEQ ID NO: 86487 - protein, 505 aa, Novosphingobium nitrogenifigens
  REGION 1..505: note = tr|F1Z4S1|F1Z4S1_9SPHN Tryptophan halogenase, putative OS=Novosphingobium nitrogenifigens DSM 19370; OX = 983920 GN=Y88_0040 PE=4 SV=1
MGGGTAGWLAAGLLAARLGLAARDDLQITVVESPRVPILGVGEGTWPTFRQSLKAMGIGEADFLAACDATFKQGSQFVGWNQSPVPGGHSYIHPFTPPHRFGELDLASAWLAEPTTGFDEAVCFQTVLCRAGLAPKLRNSPDYEGIGNYAYHFDAGKVAAFLKDHCIAHLGVKHVADDVLDCVTDRGDDGEGDGAITALRTARHGDLPGDLFIDCSGQHGVLMDRVYKARMVDCRDILLVDTALAIPVPYPQADSPIASVTLATAQSAGWIWDIGLKTRRGTGYVYSSRHVSHDEARHTLDRYVRTISGKPMQDEPRRIAINSGYRERFWIANCVAIGVSAGFIEPLEASSIAMIEISANHLAEHLTFDRKVMAIEAGRFNRKMDQLWHDVIDFLKLHYVLSDRTEPFWLDNRAPCSIPSSLRDNLRIWQNRPPIEGDFVHTCQLFGPASYQYILYGMHRAGAVKGDASCKPRNERANNHIGEVRALTAKLSRVLGPNRDFAVGI

SEQ ID NO: 86488 - protein, 517 aa, Sphingomonas sp.
  REGION 1..517: note = tr|A0A0Q4K928|A0A0Q4K928_9SPHN Tryptophan halogenase; OS = Sphingomonas sp. Leaf30 OX=1736213 GN=ASE89_15735 PE=4; SV = 1
MDRAITSIVIVGGGTAGWLAACLIAARADRDAERPLQVTLIESPDVATIGVGEGTWPTMRRTLERIGISETEFLLACDAAFKQGSRFDGWRTGAPDDRYLHPFTTPAEAAPRDLASAWSDSGLAFAEALCAQHAVCRQDLAPRQRAMPDFAGTLNYAYHLDAGKFAALLARHATERLGVRHLRDHVVGVDGAADGDIAAVRTRASGRIDGDLFLDCTGHTGLLIGEHYGVGTIDRGRELCNDRALAVQLPVAADSVIASQTNATAHAAGWIWDIGLPARRGIGCVYSSAHLDDDAAADTLTRYLRATAPDAPLPDFRPLRFQSRHRDRFWHRNCLAIGLSAGFLEPLEASAIVLVELSVEALLDNFPATRRTMDLHAARFNTLFRYRWDRIVEFLKLHYVLSQRDEPYWRDHRDPGSIPPRLAELLQLWADQPPSHGDFPMVDEIFPAASYQYVLYGMGFPAPRRTPVRTGARGAADMLVQQVDRHGRMLAAALPTNRAYLDALRHAMTGATMETRA

SEQ ID NO: 86489 - protein, 489 aa, Sphingomonas sp.
  REGION 1..489: note = tr|A0A0Q4KKN2|A0A0Q4KKN2_9SPHN Tryptophan halogenase; OS = Sphingomonas sp. Leaf30 OX=1736213 GN=ASE89_04870 PE=4; SV = 1
MTAAAMARLVESGVAVTLVESEEIGTVGVGEATIPSLLDYHRMLGIDEDDFVRATGATFKLGIEFRDWGRLGDAYFHPFGTHGRDVEGVAFHQLWLRQAGLAQPGMPGPIGDYCLSTVAARNGRFTRPSANPQSVLSTLSYAFHFDAALYAQYLRNLAEAAGVVRIEGRVAAVDRHAGTGFIEAVRLADGRAINGDLFIDCSGFRSLLLSDAMDVGFTSWQHWLPCDRAWAVPSAPRDAPAPHTRATAEAAGWRWRIPLQHRVGNGHVYASDHVDDDTALHVLLGGLDGPPLADPRQLRFVAGRRDRLWERNCVAIGLAGGFLEPLESTSIHLIQSGIARLMSLFPDTGFSAVEIAEYNRQMLREYDQVRDFIILHYHATTRTDSAFWRHCQSMTLPPSLQAKLDLWAGRARIFREQGELFTPDSWIAVLLGQGIWPASVDPLTAGLPVAESAMFLDHVREMVAKTAEAMPRHADFIARHCAAPLRTAA

SEQ ID NO: 86490 - protein, 512 aa, Novosphingobium sp.
  REGION 1..512: note = tr|A0A1E4N6I3|A0A1E4N6I3_9SPHN Tryptophan halogenase; OS = Novosphingobium sp. SCN 63-17 OX=1660120 GN=ABT10_04045; PE = 4 SV=1
MTKTQEDANVTRPIRKVVILGGGTAGWMTAALLAKVLGATTQERKIAIELVESDDIGIIGVGEATIPPIQQVNAVLGIDEAEFLRETKATIKLAIRFENWGAIGESYYHTFGAAGRNLPFCSFHHFWTRARQLGIEGSYWDFDLNYLCARGGKFAPTTGNDPIWDMPYAYHFDSGLYGQFLRRYSEKLGVVRTEGKVRDVQRAAGVGDIMALVLADGRQVAGDLFIDCSGGRGVLIQQQLGTGYEDWSHWLPCDRAMAVPSQRHAQTAPFTRSIAHGAGWQWQIPLQHRNGNGLVYSSRFCSDDEAAQVLLGHLETPALDEPRIIHFRTGRARRQWNRNVVAIGLSSGFLEPLESTSIYLIQSAITRLLHLFPHDGITADLIGEYNRQSQIEMELIRDFIILHYHANQRRDSAFWRDLRQMEVPERLARKIALFSANGTLVQDQYDIFMEPSWVQVLMGQGILPADYHPLADGPSEEQLRRQLAQLAQLKARPLDQLPSHDDYLQRCLGQPA

SEQ ID NO: 86491 - protein, 510 aa, unidentified
  source 1..510: note = Burkholderiales bacterium
  REGION 1..510: note = tr|A0A3S0FDX6|A0A3S0FDX6_9BURK Tryptophan 7-halogenase OS=Burkholderiales bacterium OX=1891238; GN = EKK53_00045 PE=4 SV=1
MNASDPSLRKIVIVGGGTAGWMTAAPLAQRFQHAGPNGCEVVLVESPDIGTIGVGEATLPPIRAYNRTLGLDGADFVRRTQGSFKLGIEFRDWGRVGHRFFHGFGDFGPAIENRSPWQHWLRLSRIVNGLPHYEDWSTATVMARGHRFTPPVDGPPSAANAYSFAYHFDAGLYAAYLREYAQARGAQRVEGLIVNVELRPDDGFVQAIQLADGRRIEGDLFIDCSGFRALLIDGAMHSPFEDWRALLPCNSAQAVPSERIEPLTPYTTSTAKAAGWQWRIPLQHRTGNGHVYCSDFISDDEASATLLAGLDGRALDTPRQLRFTTGRRRAMWVKNVVAIGLAGGFLEPLESTSIQLIMDGVGRLLQFFPDRTFQPHLAAEFNRRMNVQYESIRDFIVLHYKLTERRDSELWRYCAAMPIPDTLAHQIELFREAGRVAILDPDGFAEPSWVSLFLGLGLVPQRYDPFVDHIDPEALLQHFARLRQAIVQTAGDMPLHADYIRRHCPAPPMA

SEQ ID NO: 86492 - protein, 518 aa, Thalassomonas sp.
  REGION 1..518: note = tr|A0A553FEK8|A0A553FEK8_9GAMM Tryptophan 7-halogenase OS=Thalassomonas sp. M1454 OX=2594477; GN = FNN08_08545 PE=4 SV=1
MKKKNVNSITIVGGGSSGWMTALYLNKLYNHTQANIDITVIESKDIGILGVGEATVHSIRFFFAAMGLDENELLKETNATLKTGIMFRNWMKPVNQQTHQYFHPFEHQSLGNILDISSAWILSSRHLFERYDQGVSLSSHLMVDNLSPKMPASAPYQGIVPYGYHLDATLMARFLRKKATQAGVTHIEATVDKVNVSDNKIVSINTDKGEFSADIFIDSTGFKGLLIDAIKQDNWQSFEQELPCNKAVAMQVEYKEQQVPRSYTTATALSNGWAWEIDLTSRRGTGYVYDGSRLTKEQAEEELKQHLGADANVLKTLHLNMKIGCRKEFWVGNCIAIGLAGGFIEPLESTGLHLINVGVKLLSTHISSNQIQQASRDSYNRLMNGVYDDLKRFIVLHYCLTDRNDTEFWQQAQESVKYCPELQSQLAVWQHKTCEFMDLSGGYATTFTDENYRYILYGMGHIPELHMPYEESSCKKIFDRFSFMAEKAKSVSLSHKKYLETLHSAQSGSNVSIMMNKA

SEQ ID NO: 86493 - protein, 536 aa, unidentified
  source 1..536: note = Burkholderiales bacterium
  REGION 1..536: note = tr|A0A431J7L8|A0A431J7L8_9BURK Tryptophan 7-halogenase OS=Burkholderiales bacterium OX=1891238; GN = EKK52_20210 PE=4 SV=1
MTDTATVFNQHVAARPASGTSLAPPPIQHVCVVGGGTAGWMTALMLATSAYGPRLKVSVLESPQVGIIGVGEGSTPWLRGFFDGLGIEESEWMPACNATYKAGITFEGWSTRPGFERYFHPFASMLDNMTMHPFVDNVHARLDGADVYAHPDRFFVAAALARQGRGPRARADFPFDVWYGYHFDATLLGQFLARKAVERGVRHLQRHVHRVQLNEAGDIASLLLDDGQALSADFFIDCTGFSSLLIGEALGTPFIPFAENLFNDAAIAMPTPLDGPIPSQTVSTALRHGWAWKIPLTTRCGNGYVYSSAHCSADEAETELRRHLGLLDADVPARHLKMRVGRMTQIWNRNCVAVGLSQGFIEPLEATALLFVQRTAAAFVNALEQGNLGPAARQRFNDEMATRFENTRDYIVAHYKTNSRTDTEYWRANADNMQLSDSLEGVLMTWLSRKPLAAGLKAGRFGAGYPIVSWYALLAGMGIFPDASEMRPPTPHEARHRLDAVDDFVARSARNFPDHRDLLAHIPPRVGDKTLQIYLW

SEQ ID NO: 86494 - protein, 498 aa, unidentified
  source 1..498: note = Burkholderiales bacterium
  REGION 1..498: note = tr|A0A431LJ33|A0A431LJ33_9BURK Tryptophan 7-halogenase OS=Burkholderiales bacterium OX=1891238; GN = EKK53_07790 PE=4 SV=1
MSSHTPPPRRIVILGGGSAGWMSAAALATALQGTSIALVESEDIGIIGVGEATFPSIRNFNQVLGIDEAEFLAATRGSYKLGIQFCDWRRPGEHYFHTFGDFGALDGPMALWGQYLRLQAHCEGGLGDFCLPTVMARQGRFRPPDPDDGIGARYTYAYHFDATLYGRFLRRLAEGRGARRVEGRVVDVARRPDGGVRALRLDDGREVEGDLFIDCSGFASVLMGQTLGAGFVDYSHWLPVDRAWAVPAERTPGPLLPYTRATAMEAGWCWRIPLQDRTGHGHVFSSRHVSEERAREQLLAQLEGQPLAEPRLLRFKTGHRERFWQHNVVAVGLAAGFLEPLESTAIFLVHNAIGRLIPLLQQPVDAADAADTFTAQQTRQYQRIRDFIILHYCLSERRGSAFWQHLTGMALPPTLAFKLHAWRETGMLHNYDDEAFDETSWLAIHAGMGHWPRHRSPWMDDVPPPMAAHYLSQRHGAIAQLAASMPPHDAYLRTRTGG

SEQ ID NO: 86495 - protein, 505 aa, Pseudoalteromonas sp.
  REGION 1..505: note = tr|A0A3A3D4J3|A0A3A3D4J3_9GAMM Uncharacterized protein OS=Pseudoalteromonas sp. MSK9-3 OX=1897633; GN = BGP78_16180 PE=4 SV=1
MLNSILIVGGGTAGWLAANHLGKKFKNSGTTVTLIESPNIPTIGVGEGTVPMMRQTLSYFGIDEGVFFQQCDAAFKQGIRFENWMKSNSDKPHFYYHPFDYFADDDRFLKYWLNGSQGNSFAEFVGIQSHLCESSKAPKKVTQPQFESVSSYAYHLDAGKFSELLKKNAIEHFGVNFILAEMKSIETNVEGNISNIATDQGALKAELFIDCTGFNSLILGDKLKVKFVDKSNVLFTDKALAVQVPHSSDRISPYTCSTAQSAGWIWDIPLFSRKGVGHVFSSSHTTSDDAYQALESYVGRNLDEFTVRKIDMKIGYREKAWFKNCVALGLSQGFVEPLEATGLLVFDVTAKMLADILPNSINGFSASASQFNAVVTNMWLKVIDFIKLHYCISDRTDSDFWLDNRVQNSIPDTLQEKLARWQHVPPNQYDFSGKLDVFNLDNYLYVLYGMSFKTDKASCVLSDRNKHAFASHLSSYDKYKQNVLMSVPDHKVLLEQIRIFGMAKI

SEQ ID NO: 86496 - protein, 505 aa, Sphingomonas sp.
  REGION 1..505: note = tr|A0A0Q4KJ35|A0A0Q4KJ35_9SPHN Tryptophan halogenase; OS = Sphingomonas sp. Leaf30 OX=1736213 GN=ASE89_15750 PE=4; SV = 1
MTTPPIHRVVIAGGGTAGWMAAAAIARTMGRTVAVTLVESEAIGTVGVGESTIPPIVTFNRLLGINEAEFMRETQATFKLGILFDNWKDRGDTYFHSFGTTGKDHWSAGFQHFWLHGLTRGHHQPFDDYCLELRAALQGKFAHLPDGRMNYAYQLDSGLYARFLRKMAEADGTTRIEGRIAQVELNGESGDIAALTLDSGARIEGDLFLDCTGFRALLIEQALHAGFDDWTHFLPCDSAIAVQTESVRPALPYTRAIAHDAGWQWRIPLQHRTGNGIVYCSRYLDHDAALERLLGTVEGPTLTEPNKIRFVTGARRQQWHRNCVAIGLAGGFMEPLESTSIHLIQRAILRLLRMFPSAGISPRDVAEFNEQQHTDMLQIRDFLILHYKATDRRDSAFWRQCASMPVPDSLAHKIALFRETGRVFRKNDELFAENSWVQVMLGQGIVPESYHPIATKMRDDELVRLLGGLRDTTNATVDALPDHAAYVAHYCSTAPSASAGSPHLG

SEQ ID NO: 86497 - protein, 77 aa, Pseudomonas sp.
  REGION 1..77: note = tr|A0A2N8B2Q7|A0A2N8B2Q7_9PSED Tryptophan halogenase (Fragment) OS=Pseudomonas sp. FW305-25 OX=2070636; GN = C1Y31_32165 PE=4 SV=1
ITREHEELFTEVGWLQVFAGQGVLPTGHHPLADAIPASDLAEFMDTIAKLNAREVAQMPSHADFIARHCAAPQPVTA

SEQ ID NO: 86498 - protein, 521 aa, Xanthomonas arboricola
  REGION 1..521: note = tr|W4SCU4|W4SCU4_9XANT Uncharacterized protein; OS = Xanthomonas arboricola pv. pruni MAFF 301420 OX=1418095; GN = XPR_0847 PE=4 SV=1
MTDTAPSDPQQRPVRRVVIAGGGTAGWMAAAALSKVLGRHLQIVLVESDEIGTVGVGEATIPSLVTFHRLLEIDEAAFMAATQATIKLGIGFEHWRDVDRHYIHSFGHTGTDHWSAGFQHFWLKGRQRGLARDFGDYCLELRAAQEGRFAHLPNGGMNYAYHLDAGLYARFLRRFSEGFGVQRIEGRIGNVETHAHSGYLTALTLDNGTRVEGDLFLDCTGFAGLLIGKTLGVGTDDWSQWLFADSALAVQTESVGAPVPYTRSRADQAGWMWRIPLQHRVGNGIVYSSRYMDQDSAAQVLQRNLSGRALTQPRALRFTPNQRHRVWEKNCVALGLASGFLEPLESTNIHLIQRGIIRLMQTFPQVINDVDIAEYNRQAAAEITHIRDFVILHYHATDCRDTPFWRDCAAMDIPDTLRHRVELFRQSGRVFHQANELFAENSWVQVMLGQGITPKQHHPVADLMGDAELRHFLETIRTRVDAALARLPAHADFLRRYCPAPPLPEPATRLPADATLATGAR

SEQ ID NO: 86499 - protein, 508 aa, unidentified
  source 1..508: note = Paraglaciecola agarilytica
  REGION 1..508: note = tr|K6XWB3|K6XWB3_9ALTE Tryptophan halogenase; OS = Paraglaciecola agarilytica NO2 OX=1125747 GN=GAGA_0320; PE = 4 SV=1
MSKAVNKIVIVGGGTAGWLTAAIIAAQHKTDDNQGLQILLVESSDIPTVGVGEGTWPTMKNTLQQIGLKESDVFARCHAGFKQGGKFVDWVHGNGDFYYHPFTVPLGYGRIDLAPYVDNIENYAVESNFQHHVCEAGLAPRSMAEGEYKGQCNYAYHLDAGEFAEVLKEHCKNNLNVSQIIGTVASVNLTPEGAIGSILLSNQQQIDGDLFVDCTGFSSLLLGQALEVPFISADKVLFNDSALALHMPYESGTSPIASHTIATGQNAGWIWDIGLTHRRGVGHVYSSQYLSDDEAEANLRRYLGPTSDDIPVRKIGFKSGHRAQVWKQNCVAVGMSAGFVEPLEATAIMLVEISARFIADNIPPDASLTPIIAKRFNQQMAYRWSRIIDFLKLHYMLTKRPEPYWQAHTDPDSIPDSLKEDLALWKFRGPISADFDAAIELFPAASYQYVLYGMGFKPDFSRQAHLYNQQQNAQKVMLRNQQLTQQLLETLPPHREYIERWLSTQSMR

SEQ ID NO: 86500 - protein, 495 aa, unidentified
  source 1..495: note = Burkholderiales bacterium
  REGION 1..495: note = tr|A0A431JBF2|A0A431JBF2_9BURK Tryptophan 7-halogenase OS=Burkholderiales bacterium OX=1891238; GN = EKK52_17745 PE=4 SV=1
MTPPQQILIVGGGTAGWMAACLLRQRWAARGVAVTLVESPEIGTVGVGEGSTPYLRGFFATLGIAERDWMPACDATYKCGIRFPGWSTVPGYESYVHPFFNEADRELGNQFFTNACLRRRGQAADANPQDFFLAAELARQRRAPHDLTEGPATDYAYHFDASKLGAFLHTHAVGRGVRHVEGTVARVEQHENGDIAAVHLANGERLAADLFVDCSGFKGLLINETLGEPFLPFADNLFNDRAVAMPTALVESEDIPSETVSTALRHGWAWQIPLTSRYGNGYVYSSAFVSDDEAECELRAHLGAAAEGVEARRLRMRVGRVARHWSHNCVAIGLAQGFIEPLEATALMLIQLSVEQFIGALEAGDFGPRHREAYNRRVNEMFEGVRDYVVAHYRLNTRHDTDYWRANRAHPNVSDRLASLLDVWDRGGDFEAELERHGPALMYLRPSWYALFAGMGRFPAELRPAPGAVTAAQARGRLGRMAAAFFSHRGALMGR

SEQ ID NO: 86501 - protein, 520 aa, Novosphingobium sp.
  REGION 1..520: note = tr|A0A1E4N5A6|A0A1E4N5A6_9SPHN Tryptophan halogenase; OS = Novosphingobium sp. SCN 63-17 OX=1660120 GN=ABT10_07290; PE = 4 SV=1
MPDFDQQNASPGAIRSVVVAGGGTAGWMAATYLAARFEGRGIGITLVESHEIGTIGVGEATVPAIRDFFRMIGLHDFDVLRATGGTPKLGIDFAGWAGEGTRFFHPFGLYGLSSRGVPFHQYWLKLAQAGLGRDLGDYSLCTEMARNGAFMLPVDNPVNDLAVFDWAVHFDASRFAAMLRDLGQRRGVRLIDDVITRTVTDGETGHITSLETRGGLSIAGDLFIDCTGFRALLLGEVMGSSWVDWTDLLPCDRAVAMPCAASGGFDRPYTTSTARKAGWQWRIPLQHRVGNGYVYASAHISDDEAAATLRAHLEGEALAEPNLIRFGAGHRREFWRGNCIGVGLAAGFLEPLESTSITLIQTALEKLVDLFPDRACDPALADEFNRATTLEYERIRDFLILHYHANRRHGEPLWDQMRAAPLPEKLAHKLSLWRARGKLVRYEWEAFFDPSWLSMYAGFGIMPAAHDPMADYFTDAQVVEALDHMREAIRAAAAHARPARDFLARLAPEASRAAAPVGVG

SEQ ID NO: 86502 - protein, 513 aa, unidentified
  source 1..513: note = Burkholderiales bacterium
  REGION 1..513: note = tr|A0A3S0D0R7|A0A3S0D0R7_9BURK Tryptophan 7-halogenase OS=Burkholderiales bacterium OX=1891238; GN = EKK53_00175 PE=4 SV=1
MNTTKPFNRVVIAGGGTAGWMMAALMSKLLGKQLDIKLVESEEIGTVGVGEATIPALHTFHNLLGINEAEFMAATNATFKLGINFEGWKDIGQDYFHSFGSTGNDHWSAGFQHFWLKGRAQGIARTYTDYNPERVAAFANRFAHVQRGGLNYAYHLDAGRYAKFLRAMSEAHGVQRIEGKIGAVLMDGPQGRDGDITALQMQDGSRIDGDLFIDCTGFRSMLLGEALGVGYEDWSYWLPCDRAVAVQTASVREAWPYTRSIAHPFGWQWRIPLQHRVGNGLVYSSKEMSDADAPDVLKKNVEGELLTQPRVIKFLPGQRDKVWHRNCVAVGLASGFVEPLESTSIHLIQRAAIRLMQTFPSGGIQQADVDEFNAQSKRELEHIRDFIVLHYHVNERTDSALWKHVREMDILPSLRHRIELFRETARVFRPSDELFAENSWVQVMMGQGILPGRYHPVADLMGTPELTSFLGDIHTKVSRIVAGLPGHQAYVEQLCAPYRQASVKQLAAVPQGA

SEQ ID NO: 86503 - protein, 538 aa, Pseudomonas sp.
  REGION 1..538: note = tr|A0A2N8BHH7|A0A2N8BHH7_9PSED NAD(P)H-quinone dehydrogenase OS=Pseudomonas sp. FW305-25 OX=2070636; GN = C1Y31_06230 PE=4 SV=1
MNKPIKNIVIVGGGTAGWMAASYLVRALQQQANITLIESEAIPRIGVGEATIPSLQKVFFDFLGIPEREWMPQVNGAFKAAIKFVNWRKSPDSSRDDHFYHLFGNVPNCDGVPLTHYWLRKREQGFQQPMEYVCYPQAAALDGKLAPCLPDGTRQMSHAWHFDAHLVADFLKRWAVERGVKRVVDEVVDVHLNERGYISSLFTKEGRTLEADLFIDCSGMRGLLINQALKEPFIDMSDYLLCDSAVASAVPNDDAREGVEPYTSAIAMNSGWTWKIPMLGRFGSGYVFSSKFTSRDQATADFLNLWGLSDNQPLNQIKFRVGRNKRAWVNNCVSIGLSSCFLEPLESTGIYFIYAALYQLVKHFPDTSFDPRLSDAFNAEIVYMFDDCRDFVQAHYFTTSREDTPFWLANRHDLRLSDAIKEKVQRYKAGLPLTTTSFDDSTYYETFDYEFKNFWLNGNYYCIFAGLGMLPDRSLPLLQHRPESIEKAEAMFASIRREAERLRTSLPTNYDYLRSLRDGDAGRSRGQRGPTLAAQEIL

SEQ ID NO: 86504 - protein, 498 aa, Thalassomonas sp.
  REGION 1..498: note = tr|A0A553FLF1|A0A553FLF1_9GAMM Tryptophan 7-halogenase OS=Thalassomonas sp. M1454 OX=2594477; GN = FNN08_01380 PE=4 SV=1
MNTNAVKNVVIVGGGTAGWVSAALLNRVLGKVLNITLVESEEIGTVGVGEATIPPIITINNALGIAEKDFLQATQGTIKLGIEFENWKKQGDSYMHAFGGIGKNFPFCDFYHYWLKAKDLGETSDFWDFSLNYQAAKQNKFSKAPKIAGTNMPGLTYAYHFDASLYAQFLRKLSESSGVTRIEGMVNSVEVNDENGFIKSITLKDGNTIAGDLFIDCTGMAGLLIEKTLNTGFEDWSHWLPCNKAMAVPCEATKPISPFTRSIAHSAGWQWRIPLQHRTGNGIVYSSKHMSDEQAKAVLLNNLDGKPLGEPKVIPFRTGRRRKQWHKNVVSIGLSSGFLEPLESTSIHLIQTAAIRLIKLFPHQGINDIEVDEFNNQAKIEIERIRDFIILHYKVNERDDSKFWKECQRMDIPETLQHKIDLFKATGKLFREQDDLFTEIAWQQVLIGQGVIPEDQHALADSLSKEQLFELMKNLKILIDRSVEQMPSHADFLTQVSR

SEQ ID NO: 86505 - protein, 418 aa, unidentified
  source 1..418: note = Pedosphaera parvula
  REGION 1..418: note = tr|B9XGA7|B9XGA7_PEDPL Tryptophan halogenase; OS = Pedosphaera parvula (strain Ellin514) OX=320771; GN = Cflav_PD3986 PE=4 SV=1
METATYDALIIGGGPGGSAAATYLAKAGKRVLVLEKEHFPRFHIGESLLPYNQQIFREMGVSPALEAAGFVKKYGAQFHIGNGSKSIGFVFRQGKMTREPEAMQVERAAFDHLLMKHARSSGAEIREGWTVAKYSSDCCGVSIDARDQSGQSQIFKAKFLIDASGRGNVTGNQDGQRQFHPKLKKVAVFGHFTGVKVDPGERGGDTVIVRLENKWFWLIPISREKTSVGCVMDQEEFAAAKQSPAEIFNRIVQSSQPMVQRMSDAKSAGNFQTTTDFSYTNKSFTGQRLIRIGDAAGFMDPIFSAGVYLAMFSGKLAAQLVIKSLEGHHDGSRLMKAYEKRVRSSMRFYWEMVENFYTKPFMDIFFEPREKFNLVAAVNAALAGELEGGWKMQWRMRLFFFIVRLQAKYPLVPRITWA

SEQ ID NO: 86506 - protein, 576 aa, Pseudomonas sp.
  REGION 1..576: note = tr|A0A2N8BHG3|A0A2N8BHG3_9PSED N-methyl-L-tryptophan oxidase OS=Pseudomonas sp. FW305-25 OX=2070636; GN = C1Y31_06240 PE=4 SV=1
MTQKSPANGHDSNHFDVIILGSGMSGTQMGAILAKQQFRVLIIEESSHPRFTIGESSIPETSLMNRIIADRYGIPELDHITSFYSTQRYVASSTGIKRNFGFVFHKPGQEHNPKEFTQCVIPELPWGPESHYYRQDVDAYLLQAAIKYGCTVRQKTSVTEYHADKDGVAVTTAQGDRFTGRYMIDCGGPRAPLATKFGLREEPCRFKTHSRSLYTHMLGVKPFDDIFKVKGQRWRWHEGTLHHMFTGGWLWVIPFNNHPRSTNNLVSVGLQLDPRVYPKTDICAQQEFDEFLARFPSIAAQFRDAVPVRDWVKTDRLQFSSNACVGDRYCLMLHANGFIDPLFSRGLENTAVTIHALAARLIKALRDDDFSPERFEYIERLQQKLLDHNDDFVSCCYTAFSDFRLWDAFHRLWAVGTILGQFRLVQAHARFRASRDEGDLDHLDNDPPYLGYLCADMEEYYQLFNDAKAEVEAVSAGRKPAEEAAARIHALIDERDFAKPMFGFGYCITGDKPQLNNSKYSLVPAMKLMHWTQTSAPAEVKKYFDYNPMFALLKAYITTRIGLALKSSRPTTTEKR

SEQ ID NO: 86507 - protein, 500 aa, Pseudoalteromonas luteoviolacea
  REGION 1..500: note = tr|A0A166UJP9|A0A166UJP9_9GAMM Tryptophan halogenase; OS = Pseudoalteromonas luteoviolacea DSM 6061 OX=1365250; GN = N475_04975 PE=4 SV=1
MSSRKIVILGGGTAGWMAANLIAKSWCDKDIHVGVVESPDIGIIGVGEGSTPQFKAFMDFIEVPESQWMPKCNATYKNGIRFVNWSTRAGFEQYSHPFPAQPDDYSAPAFFHNSFVRRKGIDLEGHPDPFFLATYLAEHAKAPIAAESFPFEINYGYHFDSGKLGMLLAEKAREFGVEHIQACVQDVRKNTDGTIAALICDKSREVCGDIFIDCSGFSSLLMQQHLQVGFESFENNLFNDSAVVLPTEQGESIASETVSVARKYGWSWHIPLTNRIGNGYVYSSKYCNKDQAETELRAALGLLDSEVEARHLSMKVGQVKEHWHKNCVAIGLSQGFIEPLEATALHIVQETVQSFIECYQEGEFTCQKQGKHNQMMSQRYQAIRDYIVAHYRVNSRTDTNYWRDNANNNSISRSLFNVLNVWVQGKNLSDELDRQDIDKYYPSVSWHCLLAGYGIYPEQHQLVAGNESANVHDINKIREYIRRCGLNFPDHSVQLARSSV

SEQ ID NO: 86508 - protein, 516 aa, Thalassomonas sp.
  REGION 1..516: note = tr|A0A553F999|A0A553F999_9GAMM Tryptophan 7-halogenase OS=Thalassomonas sp. M1454 OX=2594477; GN = FNN08_12800 PE=4 SV=1
MDRPIKKIVIVGGGSAGWLSAGIIAAEHQTEGEHGIEITLIESPDVATIGVGEGSWPSMRQTLKAIGISETEFLLQCDATFKQASKFDNWISGANDSYFHPFSLPNGFFEANIAEFWQAHSQQVTFADATTAQSHLCKQGLAPKQITSPEYAFACNYGYHLDAGKFSQFLQKHCCEKLGVNHVLDHVVNINNHENGDIASVSTKQNGDIAGDLFIDCTGFKSLLLGEHYNIDFISQKHVLFNDTALAVHVPYPEENSPIASHTISTAQTSGWIWDIGLPSRRGVGHVYSSSHISDDEAEQQLRSYIAPTMCSDHNLTEIRKISINPGYRSKFWHKNCVAIGMSSGFIEPLEASALAMIELSAKMVAEQLPANRQVMDITAKRYNEKFSYRWQRIIEFLKLHYVLSNRTEPYWQDNKHSESIPEHLAELLTLWKYQTPYSYDTHHTEELFPAASFQYILYGMGFKTQLPERAKREDKSLIANKIFNDNIAHTHKLINALSTNRELLNKIKQYGLSKV

SEQ ID NO: 86509 - protein, 507 aa, Pseudoalteromonas luteoviolacea
  REGION 1..507: note = tr|A0A166V4N0|A0A166V4N0_9GAMM Uncharacterized protein OS=Pseudoalteromonas luteoviolacea DSM 6061; OX = 1365250 GN=N475_04445 PE=4 SV=1
MLVNDYVVVGGGTAGWLSACLLASATSEHAAKTVTLIESPDIPIIGVGEGTVPSIRDTLKRIGISESDLFNHCDGSFKQSIKFVNWMDKKKHGENNFYHHLFDYPFPFGDNLCQYWHNQSTSSFAEIVSIQQYLAESMKAPKGICDPEFAGVSDYAYHFDAHKFAQLLKRHAIEKLGVTYVSDTVVDVTHSHDGSIDQLVLKEQGSMGFDFYIDCSGFSSYLLGGKLDVPFVDKQDVIFSNKALTVQVPELEASIPPYTISTAHQAGWIWDIALSNRRGVGFVYCDAYLDKDTAFHKLQTYVGRDLNDFNVRDLDMKIGFRERAWEKNCIAIGLSQGFVEPLEATAILLSDFSANLFCNKLPETTADIAVLSKRFNQRVSYAWQSVIDFVKLHYCISDRQDSEFWQDNRASNSIPDSLKERLELWSQTYPTKDDFFSKFEVFDIENYLYVLCGMNFDFNRYGLTEKKTKEFAAQHQQVFATAEQYKRQLLEQRALLEKVKVNNFSKS

SEQ ID NO: 86510 - protein, 510 aa, unidentified
  source 1..510: note = Burkholderiales bacterium
  REGION 1..510: note = tr|A0A431KZH9|A0A431KZH9_9BURK Tryptophan 7-halogenase OS=Burkholderiales bacterium OX=1891238; GN = EKK53_21370 PE=4 SV=1
MKHICVVGGGSAGWMTALMLATTAYGARLKVTLVESPHVPIIGVGEGSTPWLRNFFDVLGIEESEWMPACNATYKSGITFEGWSTKPGFERYFHPFVSMLDNLTMNAFVDNVHARLEGADVPAHPDRFFVSAALARQARGPRAREDFPFDVWYGYHFDATLLGQFLGRKAVERGVQHLQRHVGEVLRTPQGDIAGLRLDGDEVLEADFFVDCSGFASLLIGQTLQTPFIPYAENLFNDAAIAMPTPLAGPIESQTVSTALRHGWAWKIPLTQRYGNGYVYSSAHCSADEAETELRRHLGLLDADVPARHLKMRVGRMSKIWNRNCVAVGLSQGFIEPLEATALLFVQRTAAMLVEALEQGQLNEAAQAQFNETMRVRFENTRDYIVAHYKTNSRTDTDYWRQNAENMHLSESLQGVLMTWLSRKPLSAALRAGRFGQGYPTVSWYALLAGMGIFPDPQDLEPPSAAQGRHDLASIDDFVQRSARNFPDHRELLAHIPPRAGDKTLQTYLW

SEQ ID NO: 86511 - protein, 494 aa, unidentified
  source 1..494: note = Paraglaciecola agarilytica
  REGION 1..494: note = tr|K6Y684|K6Y684_9ALTE FADH2 O2-dependent halogenase I OS=Paraglaciecola agarilytica NO2 OX=1125747 GN=prnA; PE = 4 SV=1
MNSEKVKNVVIAGGGTAGWMAAASLSKLLGKSLNITLVESDEIGTVGVGEATIPPIRTLHKLLNIDEQAFMRATNSTFKLGIEFSHWGQKNDSYIHSFGVTGKECWAGEFHHFWLRGKELGINVPFGDYCYELQASKQGKFAFSANSPMNFAYHLDATLYAQFLRDFCADVVTRIEGKIATVNKHTNNGFIRSLTLESGQEVEGDFFIDCTGFKGLLIEGALHTGYEDWSHWLPCDSAVAVQTQSTSDPLPYTRATAHDFGWQWRIPLQNRVGNGMVFCSRYASDEQAKQALLANLEGDPITEPRVIKFKTGRRRKGWNKNCVALGLASGFVEPLESTSIHLIMTGIVRLMRLFPFDGVRQSGIDEYNEKLTSELHSIRDFIVLHYKVTQRDDSDFWRHCQSMEVPDTLAHKIHLFKETGRVFLDDGDIFRVDSWTQVMLGQGLEPKQYHRIVNEMSEEELTRFLAGLRSAIEQRVNQLPSHQQFITRYCNASA

SEQ ID NO: 86512 - protein, 528 aa, unidentified
  source 1..528: note = Chitinophaga flava
  REGION 1..528: note = tr|A0A365XXE1|A0A365XXE1_9BACT Tryptophan halogenase; OS = Chitinophaga flava OX=2259036 GN=DF182_28220 PE=4 SV=1
MNNNSINNIVIVGGGTSGWMTAAYLNEVFGESIKITVVESPIIGTIGVGEATFSTIKLFFDFLKLDERDWMPHCSGSYKLAIKFVDWNAERKDFYHPFQRHEIADGFHIGEWWMKHQGDLDAYDRACFTTAALCDNKRSPRYFDGTVYDRKVENYFKNNVAFQKNKLSDLRIQFPYGYHFNANQLAVFLRDMATKKGVVHIGDDVTEVKQKEDGSILSVITKENGEIEGDLFIDCTGFKGLLINKTLKEPFIPFAESLLCDSAVAIQVPRDIVRDGMNPYTTATALKSGWVWNIPLYGRDGTGYVYSSAFISSEAAEKEFREHLGPAADNCSALHIKMRIGRNRNAWVKNCVAIGLSNAFVEPLESTGIFFIQHGIEELVSAFPDKSFNPALMKQYNQAVGDCVDGVRDFLVLHYFASSRYDTPFWKATKHDLKLPGDLEERIKQWKSQLPNSRNINQKYHGFESYSYAVMLQGLGYQPEYCLPVIQHMDSTNALAVFREIKDRSELLCNTLPSLYEYLTSWQEQALM

SEQ ID NO: 86513 - protein, 602 aa, Microcystis sp.
  REGION 1..602: note = tr|A0A551YN16|A0A551YN16_9CHRO Tryptophan halogenase; OS = Microcystis sp. M_QC_C_20170808_M3Col OX=2486216; GN = EWV84_22695 PE=4 SV=1
MNPTATKSLEYDVIIMGAGFAGLCQARHLMLNIPGIRVAMIDPRPMERTDKDLKIGESLIEVAALFLCKELGLHDYLIENHTPKSGLNFHWPKDTSKTASLDDYYHVWANRQTPVGSFHLQRAKFEQDLLAMNCQMGADFYNGRVKDVDLTQGDDLKTVYAKVGEENITLQAKHVIDAAGRNFIIGRKTDNVLSGPENLLGVNNGSAWLRVKNIDRTIFHSGYHPEGASTSHYYATNHYFGQGHWLWMIPIDKKSMELSIGIIHHHDVIPAKSINNLEKFSSFLNANHTILSRLIDSGEVVDFHYWPKIAHKSKVLFSSDNWYIIGDAAHIFDAFYSYGTTMIAFEVESVTEIIRAKLAGEAAAEQKRSAYNDFNLAYARTVNCLYRDHAYQLGHASVMSWRIYFEYMWWFGVHIPTYIGKWHLDLNFIPRYVKIANGNVDGIFADLCKEFHQLVEEGANIGLMDAYRADQLWGNYGTLKHFDDFLENTKFEPRRCNVFASMKAVYFYIAIWYALFQWKAFGLAGWLTPRHWYYFGRMLSLSVQATIAEVIYKWKTRGIPDNTQMEKMREEFKSYHYQPQDKYSFPVEEVANKAVKIESFAS

SEQ ID NO: 86514 - protein, 506 aa, Novosphingobium sp.
  REGION 1..506: note = tr|A0A1E4MYR7|A0A1E4MYR7_9SPHN Tryptophan halogenase; OS = Novosphingobium sp. SCN 63-17 OX=1660120 GN=ABT10_17970; PE = 4 SV=1
MSQRPQQRIVIVGGGTAGWMTAAALGHFLDDGFTVELVESDAIGTIGVGEATIPHINVFNKALGIDEKAFMRATQATYKLGIAFDGWLHPEHSYIHAFGDVGRDVGLCAFQHFWSRAKRLGFAKETGAYTLNTIAARAGRMHDGAPLTAQTVPAMPHAFHFDAGLYAAFLRDHAEARGVKRTEGMIADVRRHGLTGDVTVLRLADGREIAGDLFIDCSGQRGLLIGDALGGTYEDWRRWLPCDRAMAVQSPRLADLVPYTRAIAHPVGWQWRIPLQHRTGNGRVYCSDFITDDAVHDELVSSLEGGAITAPRPIRFTTGRRREAWKANVIAIGLSSGFLEPLESTSIHLIQTGIARLLKFLPGGPVAQVTRDAFNAQFAFEMQRIRDFIILHYWANRREEPFWQACRAVDLPDSLRAKIDLFAASGQIFREGEELFSEVGWFQVMAAQGIIPAASHAMAEAIPEADLRDYLELISALYTREVGQYPSHADYIARHCAAPMAQKVMA

SEQ ID NO: 86515 - protein, 231 aa, unidentified
  source 1..231: note = Burkholderiales bacterium
  REGION 1..231: note = tr|A0A4Q3UEJ8|A0A4Q3UEJ8_9BURK Tryptophan 7-halogenase (Fragment) OS=Burkholderiales bacterium; OX = 1891238 GN=EON93_22915 PE=4 SV=1
MGTGYVYSSAFQSEESAEMELRRALACAGDPPARHLKFRVGRPETAWNRNVVAVGLAGGFIEPLESTSIHMIELALKALVRYFPLSGINPAARDRFNNGMNERYSELRDFIVMHYCLSTRRDTPFWREVTQASHVPESLKARLELWRDRHPSAEDFAAERYLFSQESWQAILYGMEAADPRAIANADHWLGDVDGLVQQVDNAVEAAKLDLPSHMIWLQGLRSIAVNHPGW

SEQ ID NO: 86516 - protein, 505 aa, Xanthomonas oryzae; identical to SEQ ID NO: 82966
  REGION 1..505: note = tr|Q5H3F4|Q5H3F4_XANOR Tryptophan halogenase; OS = Xanthomonas oryzae pv. oryzae (strain KACC10331 / KXO85) OX=291331 GN=prnA PE=4 SV=1

SEQ ID NO: 86517 - protein, 505 aa, Xanthomonas translucens
  REGION 1..505: note = tr|A0A0K2ZWF2|A0A0K2ZWF2_XANCT Tryptophan halogenase; OS = Xanthomonas translucens pv. arrhenatheri LMG 727; OX = 1195923 GN=XTALMG727_2691 PE=4 SV=1
MIAAPLRNLVIVGGGTAGWMAAAALARVLGPDYRITLIESEQIGIVGVGEATVPHIKAFNNLLGINEAEFVRQTQGSFKLGIEFVDWHRQGTSYIHGFGTEIGHSLGLLPFQQYWFKQALAGKAKPLGAYTLNTVAARRGKFMTSASDAPPNSPLGNIAYAYHFDASLYAAFLRRFSEQRGVTRREGIVEQVQLHPESGDVLSVRLASGDTIAGDLFIDCSGFRGLLIEQALHTGYHDFTHWLPCDRALAVPCAKVGPPTPYTRATARAAGWQWRIPLQHRTGNGYVYSSAHISDDEAAATLLANLDGAALADPRPLRFVTGRRKQVWNRNVVALGLASGFMEPLESTSIHLIQSGISKLLELFPREGISPVLVQRYNDRIAFEFDRIRDFLVLHYTATERDDSDFWRQCRAMAITPELQATLDLFGDSGRFYRNGDEMFAEISWVQVMAGQGILPRAYHPLVDQVPAADIERFVASIEQTIGHCVDAMPPHQAFIDRYCAAAPR

SEQ ID NO: 86518 - protein, 514 aa, Novosphingobium sp.
  REGION 1..514: note = tr|A0A1E4N4W6|A0A1E4N4W6_9SPHN Tryptophan halogenase; OS = Novosphingobium sp. SCN 63-17 OX=1660120 GN=ABT10_06620; PE = 4 SV=1
MVHAVRNVVIVGGGTAGWLTAAIIAARHQGRMPRDFTVTLVESPDVPIIGVGEGTWPTMRQTLKKVGVSETDFFRECDAAFKQGALFAKWTTGAPDDAYYHPLVLPQRFGQMNLVPHWLAAESNESFCDAVCPQGQVCDHGLAPKTVSTAEYEALTNYAYHLDAGKFAPFMQRHCTEKLGVRYVPADVHDVIQHENGDIKSIVTMQAGEIEGDLFIDCTGTHGLLLDRTLGVGFRDCSHILFCDTALAVQVPYPAPDTPIATHTISTAQSAGWIWDIGLPTRRGVGHVFSSRHISDDEAEAELRAYLGPSAKDLPARKIRIRAGHRETFWKRNCVAVGMAAGFLEPLEASAIMLIELSAKLIAEQMPANREVMDIVADRFNEKTHYRWGRIIDFLKLHYVLSQRRDTAFWRDNMDPAGIPQRLQDLLHLWRYQPPWFHDEFDRVDEVFPPASYQYVLYGMGFRSEVERDHLRPEAQEAQRALRENREMAQKLISRLPRHRDLIEKIAQYGLQPV

SEQ ID NO: 86519 - protein, 504 aa, unidentified
  source 1..504: note = Comamonadaceae bacterium
  REGION 1..504: note = tr|A0A257G1S4|A0A257G1S4_9BURK Tryptophan halogenase; OS = Comamonadaceae bacterium PBBC2 OX=2015581; GN = CFE39_03755 PE=4 SV=1
MNNTEQTDGDRKPVRRIVIAGGGTAGWMVAALMSKTLGKSLDIKLVESDEIGTVGVGEATIPTLLTFHELLEVNEQEFMVATQATFKLGISFENWRNVNEDYVHSFGTTGTDHWTAGFQHFWRKGRERNLAGDYGDYCLELKAALANRFAHLPRNGMNYAFHLDATLYAKFLRKYSEGFGVKRIEGKIVEVKTDASSGNIQSIKLDSGANIEGDLFIDCTGFRGLLIGETLKVEYQDWSHWLFNDSAAAVQTESVGAALPYTRSIAHTAGWQWRIPLQHRVGNGLVYSSRYMDDEQAKQTLMGNLQGQALMQPRVLKFRPGQREKTWHKNCVAIGLSSGFIEPLESTSIHLIQRGIIRLMRLFPVRGICQADVNEYNQQTLDEIEHIRDFVVLHYKVTNRADSPYWNACRTMEVPASLQHRIDLFRETGRVFRIASELFAENSWIQVMLGQGIMPKEHHQSADLMGDAELSRFLGGIKSTVDRTVAQLPSHQTYVQQYCGAAKV

SEQ ID NO: 86520 - protein, 530 aa, unidentified
  source 1..530: note = Chitinophaga flava
  REGION 1..530: note = tr|A0A365XW80|A0A365XW80_9BACT Tryptophan halogenase; OS = Chitinophaga flava OX=2259036 GN=DF182_26180 PE=4 SV=1
MSNKVSNITIVGGGTAGWMTASYLNKVFGQNVDITLVESPNISTVGVGEATFSTIKLFFDFLELEEHDWMPHCNGSYKMAIKFVDWNAEKKHFYHPFQRYEIVDGFHIGEWWLKHKDQLDAFDYSSFMVSALCDNKRAPRFLDGRVFDTKVQDLFTPDRAFKKNMLADLKIQYPYAYHFNAALLANFLRELAIGKGVRHIADDVVGVSQAENGFISGITTKEHGEIEGDLFIDCTGFKGMLINKVLNEQFIPFAESLLCDTALAMQVPRDIEKDGMNPFTSATALSSGWVWNIPLYGRDGTGYVFSSAFITPEEAEKEFRKHVGKASDNCNASLIKMRIGRNHNAWVKNCVAIGLANAFVEPLESTGIFFIQQGIEELVANFPDKQCSPELQKRYNKTIGECIDGVRDFLTLHYCASSRYDTPFWKATKHDLKLSDDLKERQAEWKVRLPNPRNINPNYHGFESYSYAVMLQGLGYSPENCLPVLQHMDSTRALEAFRRIRERTNELIRTLPSQYEYLTSVRVGQNAGVM

SEQ ID NO: 86521 - protein, 521 aa, Xanthomonas vesicatoria
  REGION 1..521: note = tr|A0A1L5QT13|A0A1L5QT13_9XANT Tryptophan halogenase; OS = Xanthomonas vesicatoria OX=56460 GN=BI313_13935 PE=4; SV = 1
MPDTTPSNPQQRPVRRVVIAGGGTAGWMAAAALSKLLGRQLQITLVESDEIGTVGVGEATIPSLVTFHRLLEIDEAAFMAATQATFKLGIGFEHWRDVDKHYIHSFGHTGTDHWSAGFHHFWLKGRQRGVARDFGDYCLELRAAQEGRFAHLPNGGMNYAYHLDAGLYARFLRRFGEGFGVQRLEGRIGEVQTDPDSGYLTALTLQDGTRVEGDLFIDCTGFAGLLIGKTLGVGSEDWSHWLFADSALAVQTESVGPPVTYTRARADQSGWMWRIPLQHRVGNGIVYSSRYTDQDSARAVLERNLQGRALTEPRALRFTPNQRHRVWEKNCVALGLASGFLEPIESTNIHLIQRGIVRLLQTFPQVINAVDIAEYNRQAADEIAHIRDFVILHYHATDRRDTPFWRDCAAMDIPDSLRHRMELFRQSGRVFHQGNELFAENSWVQVMLGQGITPQQHHPVADLMGDAELAHFLDSIRQRVDATVATLPPHANFLRHHCPAPPPPAPASRVPFDAALATPAG

SEQ ID NO: 86522 - protein, 490 aa, Sphingomonas aurantiaca
  REGION 1..490: note = tr|A0A2T5GIH8|A0A2T5GIH8_9SPHN Tryptophan halogenase; OS = Sphingomonas aurantiaca OX=185949 GN=C8J26_3452 PE=4; SV = 1
MTARPPIRSIAVLGAGIVGLSAAIAFARVLPGLAVTVIETPDDPAALTDHLAGTLPSIAEFHDRIGLRERDLLAAGATHRLGTRLSDWRADGVPLVLAHGERGGAIAPGTFHQHWLNARRAGKTAAFDAFSVPATLAAADRFVHPSDDPRSPISGFGYAWRLDPPRYRDLLRALARHIGIIPVPGVYAGVERGSDGHVATLLLADGRCVAADLYLDCSGPAAPLRSALDTQWDDWRRWLPVDRLLLGAAPARVATPTDDRIAVPAGWRFVQPLRDRTLVGLGYAADQTSDSSARRVLPAGDTVVPLALGVRAEPWRHNVLALGDAAVVLDPLADANLHLAQSAILRAIDLLPGRDCAPTELAEYNQRSHRQAARVRDFQAAHYLPTGRTRGPFWKSIARLPRPDSLAHTLEQFAHRGRLPFYEDESFDKDDWHGLLLGLGMIPRIADPIASASPPELIAATLKQLADATAALPARLPPYPAYLAQLERGR

SEQ ID NO: 86523 - protein, 497 aa, Pseudoalteromonas sp.
  REGION 1..497: note = tr|A0A3Q8WXF8|A0A3Q8WXF8_9GAMM Tryptophan 7-halogenase OS=Pseudoalteromonas sp. Xi13 OX=2490635; GN = EJ103_07200 PE=4 SV=1
MKPIEHVVIAGGGTAGWITAALLNKVLGKVIKITLIESSTIGTIGVGEATIPPIIQLNNALGINEQDFINATNASIKLGIEFENWKTPSHSYMHAFGSFGKDFPFCDFYNFWVKGHISGAEESLWDFSLNYQAAKQHKFAPLNTLPNTQLPGLSYAYHFDATLYAEFLKNLATSRGVEHIDAKIEQVEQCPLSGDIKSLILDNTQQINGDLFIDATGQRALLIEQTLNTGFVDWSHYLPCDSAVAVQSQGTSELKPYTRSIAHSAGWQWQIPLQSRIGNGLVYCSRYLTDDAATQLLIDNLPAEPMTEPRVIKFKTGRRLKQWHKNVVSVGLASGFLEPLESTSIHLIQSAVTRLIKLFPHNGISDALVTEFNKQSVIEIEHIRDFIILHYTLTAREDSPFWRQCKQMDIPDSLAHKLKLFKQTGKVVRENDELFAEVAWQQVFIGQGLIPEDYNSIVDSLSSEQLNDLFSTLKTLITSTVDQLPTHKDFLAKIKKA

SEQ ID NO: 86524 - protein, 498 aa, Xanthomonas vesicatoria
  REGION 1..498: note = tr|A0A1L5QQQ3|A0A1L5QQQ3_9XANT Tryptophan halogenase; OS = Xanthomonas vesicatoria OX=56460 GN=BI313_08475 PE=4; SV = 1
MNQARIRKVVIAGGGTAGWIAACALSHQFRDLLDITLVESDQIATVGVGESTVPPIRTFHRFLNIDEQEFLRAAAGTFKLSISFEHWRRQGERYIHPFGITGQSTLVCAFHHLWLESQRRGMPGAFADYCLETVASRADRFALPREPAVNYAYHLDAALYARFLRTRSEAHGVKRVEGKIQQVTLQPDSGDVAALVLEDGQVLEGDLFIDCTGFRGLLIEQTLHTGYEDWSHWLPCDRAVAVQTEAVGPPVPYTRAIAHEAGWRWHIPLQHRVGNGLVFSSQHMSDDEAHAKLLRDTGATPVKDPWLVPFRTGRRRKAWNKNVVSLGLASGFIEPLESTSIHLTIAAVVRLITLFPANGIAPSQVDIFNDISRTEMEHVRDFVTLHYHATQRDEPLWQQCRDMELPESLRLRLRAWRERAHAWQGTDELFRVDSWTHVLLGQGIVPQQHHPLAAALSDADLRRLLDGIAQPLQRAVEQMPSQQEFISAYCKMDARAWG

SEQ ID NO: 86525 - protein, 509 aa, Sphingomonas aurantiaca
  REGION 1..509: note = tr|A0A2T5GK34|A0A2T5GK34_9SPHN Tryptophan halogenase; OS = Sphingomonas aurantiaca OX=185949 GN=C8J26_2521 PE=4; SV = 1
MIDGLGQHIVILGGGTAGWMTACLIAHRWRARGMRVTLVESPEIGIVGVGEGSTPQLEHFFDTLGIAEDAWMPACDATYKLGIGFEGWSDRAGYERYFHPFPTALDGHTAPQFFYNARARRTGRDVEAHPDRFLLPARLAAAHCAPQPAESFPFEVSYGYHFDAYKVGAFLAGHATGTLGVDHLQRRIANVERIPTGQITALIDTDGGRISGDFFVDASGFRSTIFAALDVPFVSYADALFNDRAVVMPTAHAPGAPIPSQTRATALSAGWAWHIPLTSRNGNGYVYSSRHLTETQAEAELRAHVGTEAGEARHLKMRVGRVRDSWSHNALAVGLAQGFLEPLEATALHFVIATVEAFLDGVDAGGATDAVRNAFNARIAARYDGVRDYIVAHYRLNQRHDDPTGYWAQARGIEVLSDDLKMLMSAWFTGADMVAAIDRAGLARYYSAISWHCLFAGYGTFPEPARLIPPGADIDPVDMTRIDDFLTRCAMNFGSHASRLRAADLKDIA

SEQ ID NO: 86526 - protein, 520 aa, Xanthomonas campestris; identical to SEQ ID NO: 85115
  REGION 1..520: note = tr|A0A0H2XDT9|A0A0H2XDT9_XANC8 Tryptophan halogenase; OS = Xanthomonas campestris pv. campestris (strain 8004); OX = 314565 GN=XC_4056 PE=4 SV=1

SEQ ID NO: 86527 - protein, 515 aa, unidentified
  source 1..515: note = Burkholderiales bacterium
  REGION 1..515: note = tr|A0A3S0C0G3|A0A3S0C0G3_9BURK Tryptophan 7-halogenase OS=Burkholderiales bacterium OX=1891238; GN = EKK52_03900 PE=4 SV=1
MDDRIRDVVVLGGGSAGWLVAGLLAAEHGDSLRITLVESTDVPTIGVGEGTWPSMRDTLRRIGLSEPEFIRRCQVSFKQGSRFDGWARGAAGDAGDRYYHPFMLPAGWGEADLVPAWLATQPDRPFADVVSPSVQVCEAGCAPKQVQTPAYGAVANYAYHFDAGLFGEMLREHAVRQLGVRHVVDHVDAVLSHDHGERAGDLAALRTRAHGDLAADLFIDCSGLRARLIGEHFGVPLKSEREVLFNDAALAVQVPYARPDAPLATCTIATAWAQGWCWDIGLPHRRGVGCVFSRAHASEDEAQAALQAYLDATGAPAERPTPRLIRYDPGYRRQFWVRNCLAIGLSSGFIEPLEASALALVELAAQRLCDELPMTPASMAAVARRYNDDFAYRWARVIDFLKLHYALTQRDDSAYWRAHRDPTTWPQRLRELLPQWRLRPPARHDFGRIDEVFPAASYQYVLYGMGFRPDTQPLPDAKLAAARACFDDAARQARRFVPGLPGHRALIDHIQRAAS

SEQ ID NO: 86528 - protein, 496 aa, unidentified
  source 1..496: note = Limnobaculum parvum
  REGION 1..496: note = tr|A0A2Y9TXM5|A0A2Y9TXM5_9ENTR Tryptophan 7-halogenase OS=Limnobaculum parvum OX=2172103; GN = HYN51_07845 PE=4 SV=1
MLNLRTPKRIVILGGGTAGWFAALTLRRIFSANVEVRVIESSQIGIVGVGEGGLLNIHDALLRNQIDIKEFMAETDATFKWGFSYEGWRTGKADDKFYHLFTSARGEGAQWVEGGFLPYYSALINQGVPLESWIRGFQLIKNNASMEEAIKAVDEDRTDLVTSFHFDSYKIAKYMKKVALSRGVVHEDVLVKDFVRNEEGLVTKLITEKGEVELDFLIDSSGLTRQVMAKMPGARWQTFKDYLLMDSAIPFYMPHPNKNPMLITRAITMDAGWMWQIPLSTRVGAGYVFSSKHKSEADAIDEIQKYLGFEIEPHKTIRFDPGCYEQVWIKNVMSLGLSSGFVEPLEATSIGQMIEQLRNFERVLVSSQGIISENSIREYNEANLASWHGIRDFLRMHYDCTRNDTPLWQEVNKSPMTDRYAEFRKCIQERTPHLIDVENYAINGWGGIFHPVNWMSVAVPLGLVPVSAAGMDLLWLSKDKQQKALDFVKKVQEKGW

SEQ ID NO: 86529 - protein, 535 aa, unidentified
  source 1..535: note = Gammaproteobacteria bacterium
  REGION 1..535: note = tr|A0A1G0GVT6|A0A1G0GVT6_9GAMM Uncharacterized protein OS=Gammaproteobacteria bacterium RIFCSPHIGHO2_12_FULL_40_19 OX=1798281 GN=A3F13_08800 PE=4; SV = 1
MQNTQTNIKEIVIIGGGTAGWMAATYIAQSLNFKVKITVIESADHGPIGVGEATIPTIKTEFFDRLGIPEEEWMPKLGGTYKLGIKYANWRKAAENGGEHYYHVFGEIPLIDEVPLSSVWIKNYLEGKTKKPFAESCFSSSVAFENYLSPRLMDGTKVQHYAYHFDALMLAKFLKEWAIARGIHHVVDKLTTAEQDEHGQVTCVVGESGKKYHADLFIDCSGFSGFLIDKLYQEPIVSFSDCLLTDRAIAINLPENPERDGIRSYTTATALKAGWVWEIPLYSRSGNGYVYSSQFTTDQAAQDELRKHFGKRADHMDMRSIKFQSRRHQRSWIKNCVSIGLASSFLEPLESSTIYFIYASLYQLIKCFPQKNIDPVLRDKFNHKINFMVDDNKDFIAMHFKTAQREDTDFWKVNKYETKTPDSLDLILRKHKSGLPIKRPTVDNQNIYPTFKSLFQNFWTETNYQCILCGVGYLPNNPYPILNYRDDIMAAGDVLFKNIEKRANELKKLLPTHYQYLKQQVESAKKESEATGIVA

SEQ ID NO: 86530 - protein, 472 aa, unidentified
  source 1..472: note = Planctomycetes bacterium
  REGION 1..472: note = tr|A0A5C6FG19|A0A5C6FG19_9BACT Tryptophan halogenase; OS = Planctomycetes bacterium Poly51 OX=2528015; GN = Poly51_06530 PE=4 SV=1
MNRIDVAVIGSGFAGSIMARVLASRGLTVAMIDPHLHPRFAVGESSTPIADSILRRLGTTYGLDDLVSLSTWGGWIWDHPDLTCGRKRGFSYFAHEKGMPFSEASLGEQSLLAAASPSDDVADTHWYRADVDLHLCQQATSEGVALAAGFSVVGIERDGNGWKLELQSSDETGERLSMRVDWVIDASGRAAVLAKAFAARDMADRMRTRTHSTFAHLHGVSRWADALDSLGIDGKDPFDCDDAAQHHLLGNGWLWMLRFGNGVTSVGYTAPLESSLDWTGHPSIDAMMKAAWLVHPGIGWHQTERLQRWYDPLCAERAIMLPTAALTMDPMHSTGIAHALAGIERAACVILDGHSADDYAANFHRETMLLDRMISTAYHVMDDFPRFAAACMVYFAGAIACEERLQAGETPAAMWSADDSAFVSAVEVACAAIENREIADFESRVREAIAPWNTAGLMDASVNNRYAYTATK

SEQ ID NO: 86531 - protein, 508 aa, unidentified
  source 1..508: note = Verrucomicrobiae bacterium
  REGION 1..508: note = tr|A0A2A2QFW7|A0A2A2QFW7_9BACT Uncharacterized protein OS=Verrucomicrobiae bacterium Tous-C4TDCM; OX = 1982332 GN=B9S38_09275 PE=4 SV=1
MVSFTENDAGAAVPEVRRVLILGGGSAGLLAALTLKRLHPALDVQMVRSSEIGVIGVGEGTTAVFPAHLFQTLGISKEEFYREAQPTWKQGIRFLWGPREEFLYDFEFQYDRQFPGMPKPTGYYATGDCTDLSQATALMNRQKAFTTGPLGKPLIKGQYAFHIENHRLVECLEAIATRSGVIITDDTLDHAEMADGQVAALHFKSGERRTADLYVDASGFRAELIGKALDEPFESFSDALFCDRAVIGGWERTDEPILPYTTAETMNHGWCWQIEHETFINRGYVYSSSFVSDDDALAEFFEKNPKVTTKPRVVKFRSGRYRRNWVGNVVAVGNASGFVEPLEATALAQTIYECRWLAESLRVTGCRPDETNVGFYNRIIGIAWDEIRDFLAFHYKFNTRLDTPFWKHCREATSLGNYEAVYQLYREVGPNPVLLFHALPERPNIYGVEGFLAMLVGMQVPYERPHDAAPQERELFDRQRAQIASAAKGGVTVKQALDAIRKPSWQWT

SEQ ID NO: 86532 - protein, 388 aa, Corallococcus sp.
  REGION 1..388: note = tr|A0A3A8ICK8|A0A3A8ICK8_9DELT Tryptophan halogenase; OS = Corallococcus sp. AB043A OX=2316736 GN=D7W79_06115 PE=4; SV = 1
MDGTRYDVAVLGGGPAGAGLALALRRSTDLRVALFERSTSERFHLGETLPPDSRRLLAQLGVWDAFARQGHLRSMGSCSRWGTSSLAYNDHLRSPWGTGWHLDRARFDGMLADEALRQGADVRTGTAVTGWQPLEGGGYRLFLPVEGDAPRAFVDARFVVDATGRSAVFATSRGARRHTMDRTHGVCGTLPLQPGRGVDALSLVEACEDGWWYSARMPGDQVVFGLMGDRDSLHGLTPKDPEAWRARMAHAPETRQRLEACDFSGASLRAVSANVACLDRLHGEDWLAVGDAACTFDPLSSQGTSQALRSAHQSADAVSRSLQGDTAALRLHEVRVRHQFQEHLRIREGYYRLERRWSGAPYWRNRQQSPAPLPFAAAPNPLSVEKDA

SEQ ID NO: 86533 - protein, 511 aa, unidentified
  source 1..511: note = Burkholderiales bacterium
  REGION 1..511: note = tr|A0A431LJI9|A0A431LJI9_9BURK Tryptophan 7-halogenase OS=Burkholderiales bacterium OX=1891238; GN = EKK53_07785 PE=4 SV=1
MQDPTKPLKTVVIVGGGAAGWMSAAALSAVLKPPYQIRLIESEEIGIIGVGEATIPLIRMFNDLARIDEAQFLKATQGTFKLGIEFVNWGREGERYFHGFGRVGKEPLWPVDFTQYWLRMRALGRALPPEAYVMSAMAAKANRFMLPRPEMQNSPLADLTYAYHFDASLYARNLRMLSEQRGVRRTEGKVVRVLLDESPGATQGHVRAVQLESGEQVQGDLFLDCTGFAGLLTDKALGVGFEDWSHWLPCDRAVAVPSQSTAPLLPYTRATAHRAGWQWRIPLQHRVGNGHVYSSRHMSDDEAAGVLLRHLDGPALAEPRLIRFRTGMRQQAWHRNVVAIGMSAGFVEPLESTALHLIQMGVAGLIEAFPHCGFDPVEIAEYNRRSRERYESVRDFIVLHYHLNQRQDGGFWQACAEMAVPEKLRWRMDLYAASGRLVYVDTDLFREPSWFEVMEGQNLRPRGWLPLTELQGVAETANYLQGVSDTIAHCVSVMPEHAEFIRHYCAAAPVR

SEQ ID NO: 86534 - protein, 510 aa, unidentified
  source 1..510: note = Burkholderiales bacterium
  REGION 1..510: note = tr|A0A431LSI1|A0A431LSI1_9BURK Tryptophan 7-halogenase OS=Burkholderiales bacterium OX=1891238; GN = EKK53_00190 PE=4 SV=1
MSERVRDVVVLGGGSAGWLVAGLLAAEHADLRLTLIESTDVPTIGVGEGTWPSMRDTLRRIGLDEAEFVRRCNVSFKQGSRFDGWARGASGADGDRYYHPFMLPVGYGDVDLVQAWLATAPERPFADVVSPSVQVCEAGRAPKQVQTPGFGAVANYAYHFDAGLFAQMLREHAIQRLGVSHVVDHVDAVLTAEHGDITALQTRSHGPLAGDLFIDCSGLTARLIGEHFGIGLKSEREVLFNDAALPVQVPYAQPDAPLATCTIATAWAKGWIWDIGLPTRRGVGCVYSRAHASEDEAQAALQAYLDATGAPRERPAPRSIRYDPGYREQFWVRNCVAIGLSSGFIEPLEASALAMVELSAQRLCDELPMTRATMDAVARRFNDDFRYRWARVIDFLKLHYILTQRDDSTYWRAHRDPATWPERLRELLPMWRLRAPARHDFGRIDEVFPSASYQYILYGMGFEPDRHPLPPAQLQAAQACFDEAARQARRFVPGLPGHRSLIDHLQHIAR

SEQ ID NO: 86535 - protein, 487 aa, unidentified
  source 1..487: note = Alteromonadaceae bacterium
  REGION 1..487: note = tr|A0A559QW93|A0A559QW93_9ALTE Tryptophan halogenase; OS = Alteromonadaceae bacterium 2753L.S.0a.02 OX=1403320; GN = P886_1414 PE=4 SV=1
MSISLAVVGDSVEAWLLAYGFALKLQPQNKKSEKSPITVLQKPLPDVATLHLSPDDLLLFEELGVSERDLIRECNGQFSLGYNYVLNDDKRYGNFFCWGSYGFKHGSLSFHQLWAKARIAGRAESFCDYCFAAHCAAEHRFVHPQTDPRSVLSQLQHSIVIDTSLLKKLLIARCISIGVKTIQPTGEITVRRDKNRVEALDCGGATEVSADFFLDFTGELFTASKSLAGHTQLPFNSVASVRMSCNDPLSYSRLQPLDGGWLRHDCLGDEQVISYLYDRGARSVQSVEDLLLQYCDTAKHIDIVNYPAEVAMAHWQGNVVYSGSYATGPSGFVHSSAHALHRQWQTLLQLLPRDDTDNQEWDVLCAEYNDFSQVLVARLAELHWLHAERSPLNDVKLQGVLQHLIALFQCRGSVMHLRENLMGDETWAKLLIALELFPDDYDPLLDGVEFDAIVDKMAMGKAALRKAAAQLPPLKVYRQHYINKHSV

SEQ ID NO: 86536 - protein, 499 aa, unidentified
  source 1..499: note = Lysobacter tolerans
  REGION 1..499: note = tr|A0A1N6VY30|A0A1N6VY30_9GAMM Tryptophan halogenase; OS = Lysobacter tolerans OX=1604334 GN=SAMN05421546_1908; PE = 4 SV=1
MSLLPIQNITIVGGGTAGWMATAALSKVLPPHCRIRLVESDEIGTVGVGEATIPMIKLYNSALELDEAEFMRETQGSFKLGIEFVDWGGLGESYIHGFGTIGQDLGLVPFHHYWLKQRQAGKAAELDAYSINTWAARHDRFMHATTDRPNSPLAQIAYAYHFDANLYARFLRKYAEARGVQRIEGKIVDVGLDPESGHVTHVTTDRGDMVEGQLFIDCSGFRGLLIEQALQTGYEDWTHWLPCDRAVAVPCVGSGEITPYTRSTARSAGWQWRIPLQHRIGNGHVFCSQFISEDEATATLLANLDGEALAEPRVLRFVTGKRRQVWNRNVIAVGLASGFMEPLESTSIHMIQTAIARLTAFFPHAGIQQPDVDTFNRHVNEEFLSIRDFLIAHYHVTQRDDTPFWNHCRTMDVPVSLQRKLDLFASNGRVFRENNELFAEASWIQVLYGQGIRPSGYHGLVDALPEEKLAEFLGNVRGVIDNCMKAMPGHRAYIERLLS

SEQ ID NO: 86537 - protein, 504 aa, unidentified
  source 1..504: note = Luteimonas terrae
  REGION 1..504: note = tr|A0A4V6PLW8|A0A4V6PLW8_9GAMM Tryptophan 7-halogenase OS=Luteimonas terrae OX=1530191; GN = E2F49_08205 PE=4 SV=1
MDHLQRIVIVGGGTAGWMTAAALSRVLGPAYDIALVESEQIGTVGVGEATVPHIKAFNQLLRIDEADFVRSTQGSFKLGIEFVDWLDVGERYIHGFGTEIGHPLGLLPFHQYWLKARAQGRAGPLGDYTLNTLAAQRGRFMVSATDVPAGSPLSNIAYAYHFDAGLYARYLRRYAEQRGVRRHEGMIDHVAQHPESGFVSAVRLQDGTMLEGDLFVDCSGFRGLLIEQTLQTGYHDFTQWLPCDRALAVPTANVGPPAPFTRATARPAGWQWRIPLQHRTGNGYVYSSAHISDDEAAATLLANLKGEALGDPRPLRFVTGRRKQCWNRNVVAIGLSSGFLEPLESTSIHLIQSGISKLLELLPREGFNPVLAERYNAQLAFEFDRIRDFIVLHYNATRRDDTPFWRHCRTMEIPAELRTAIDLFRDSGRFFRNASEMFDTISWVQVMIGQGIVPQGWHPLVDNLPDEEIARFVDSVGRTLNACVDAMPPHQAFIDRHCKASPPA

SEQ ID NO: 86538 - protein, 589 aa, Microcystis sp.
  REGION 1..589: note = tr|A0A551YMQ8|A0A551YMQ8_9CHRO Tryptophan halogenase; OS = Microcystis sp. M_QC_C_20170808_M3Col OX=2486216; GN = EWV84_22690 PE=4 SV=1
MQMTQDKEYDVVIMGAGFAGLCQARHLKLKIPNIKVALVDPRPEQRTDKDLKIGESTIEIAALFLAKELGLHDYLIENHAPKQGLNFHWPKNPAKTETIDDYYHAGSNRQVPIPSFQINRAKFEQDLLKMDKAMGITFYNGQVVDVELTPGDAIKTVKIKVGDERIDLQAKHVIDAAGRKFIIGRKTDNLLFGPENLMGLNTGSAWVRVKNVDRTIFHSGYDPLNASTSHYYSTNHYFGEGHWLWMIPIDTQTMELSIGVIHHHDVIDSTQVNSREKFHNFLRNNHQILANIIDSGEAVDFHYWPRISHSSKTLFSPDNWYVLGDAAYIFDAFYSYGTTTIALAIEGITEIVRAKLAGEADAEAKRTAYNEFNLAYSRSVNCLYRGHDKQLGHASVMSWRIYFEYMWWFGVQIPMYVGKWHLDLTYIPIFLKTLNSNIDGLFADLNQQFTELADKDVNIGLMDCYRGDQLFKGYHTLKHFDDFLENTKFEPRRCNVFAGLKATCFYAALWYALFQWKAFGLRGCLNPRHIYHFFRLLGLSGQATIGELIYKFKTKGLPANSEIEAMRQEFKTYQYQPTLQPWLTEASHS

SEQ ID NO: 86539 - protein, 504 aa, Novosphingobium sp.
  REGION 1..504: note = tr|A0A1E4N2C5|A0A1E4N2C5_9SPHN Tryptophan halogenase; OS = Novosphingobium sp. SCN 63-17 OX=1660120 GN=ABT10_12335; PE = 4 SV=1
MGDSDRKIRRILVVGGGSAGWMAAAMLANALRQNCAITLIESEEIGTIGVGEATIPPIRIFNETLGIDEREFMAATKGSFKLGIEFVGWGREDSRYFHPFGPHGRNFDMVPLHQYWLKARMAGDDTPLDDYSMAWHIARAGRFSHPSPDQRSVLSTFEYAYHFDAGLYARFLRAYAEKRGVTRIEGKIADVGLNGETGYVRDVTMADGRVIEADLFIDCSGFRGLLIEGALKTGYEDWSHWLPCDRAVAMPCAHPKADPNPTPYTRSTAREAGWQWRIPLQHRIGNGYVYCSDFMEDDRAAELLSQRLDGEALGDPRHVRFTAGRRRQHWNKNVIAVGLSSGFLEPLESTSIHLIQANISKILALFPDKDFDPATRDEFNRIAHGEMERIRDFIILHYKLTQRQDSELWRYVSAMDIPDTLALKIEHFRRHGRLIARELDLFAPPSWLAVHVGQGNIPEGLDPLIDYRGIDARDWLGKLRGAMAAEAARMPMHGAVLAQHCAMS

SEQ ID NO: 86540 - protein, 498 aa, Xanthomonas campestris; identical to SEQ ID NO: 83595
  REGION 1..498: note = tr|A0A0H2X771|A0A0H2X771_XANC8 Tryptophan halogenase; OS = Xanthomonas campestris pv. campestris (strain 8004); OX = 314565 GN=XC_1287 PE=4 SV=1

SEQ ID NO: 86541 - protein, 497 aa, Sphingomonas aurantiaca
  REGION 1..497: note = tr|A0A2T5GSK7|A0A2T5GSK7_9SPHN Tryptophan halogenase; OS = Sphingomonas aurantiaca OX=185949 GN=C8J26_0570 PE=4; SV = 1
MTEQRVKKVVIAGGGTAGWLAAAALSRQLGQLLDITLVESEEIGTIGVGEATIPTMRSFHAILGLDEREFMRATQATFKLGISFENWARDGDRYIHSFGDLGKSTWMGDFHHFWLAAKAAGDASEIGDYCLELQAAKAERFALPSEGEINYAYHLDAGLYARFLRARSEANGLKRIEGRIASVDRDGETGFIRALVLDSGERVEGDLFIDCTGFRGLLIESTYAAGYEDWSHWLPTNSALAVQSAATGPAHPYTRAIAHDAGWRWRIPLQHRVGNGLVYASEHLSDDEAHARLLGTIDGAPLTEPRLIRFRTGRRRQVWMGNCVALSLASGFVEPLESTSIHLVMTGVTRLMQAFPFGGVAPAAVTRFNEQAQAELERVRDFIILHYHLNERPEPFWAARRDMPIPDTLVERIALFAEAAQAYQGGEDLFRVASWVQVMLGQRLMPRDHHRLGTIMGGPQLAGVLAKMRGDISDVVAAMPTHQKFLDRHLLRPPRAA

SEQ ID NO: 86542 - protein, 517 aa, Sphingobium sp.; identical to SEQ ID NO: 84574
  REGION 1..517: note = tr|A0A2K0Y6N5|A0A2K0Y6N5_9SPHN Tryptophan halogenase; OS = Sphingobium sp. SA916 OX=1851207 GN=A8G00_13440 PE=4; SV = 1

SEQ ID NO: 86543 - protein, 510 aa, unidentified
  source 1..510: note = Burkholderiales bacterium
  REGION 1..510: note = tr|A0A3S0FU10|A0A3S0FU10_9BURK Tryptophan 7-halogenase OS=Burkholderiales bacterium OX=1891238; GN = EKK53_12450 PE=4 SV=1
MTPKRRILIVGGGTAGWLTAAYLAKALKLAERPHLEVTLLESPDIVSVGVGEGTFPTIRTTLQVLGIDEAAFIRATSATLKQGIRFVDWAHAPVAGQHHSYFHPFEAPYFAEDLNLVPYWLLQDPAARAPFAEAMTLQARVAAAHRAPKRAGEAPYTAPLNYAYHFDAIKLARLLAERAVQLGVRHAEGTVAQVALDDQGAIARLDTDRQQRFEADLFIDCSGFRAELIGRALGSPFTSARGQLFADRALACKVPLGDESVMESCTIATAHEAGWLWEIGLNGMRGVGCVYSSSHIGDDRAAEILRRYCGAGDEDLAARSVPFAPGYREQQWVKNCVAVGLSAGFLEPLEATGLVLIEAAIGMIAEMLPHSGPMHAPARRFNELMRARFENIINFLKLHYCLSQRTEPFWRDNTDPATVPYRLTGLLEEWRLRPPGRFDFVLDTETFAFFNYQYILYGMGFATDLSAGRDDFPRVDEAARVFAKIQRFADRAVADLPSHRALIQQINAGR

SEQ ID NO: 86544 - protein, 503 aa, Duganella sp.
  REGION 1..503: note = tr|A0A1H8LVS7|A0A1H8LVS7_9BURK Tryptophan halogenase; OS = Duganella sp. CF517 OX=1881038 GN=SAMN05428959_104611; PE = 4 SV=1
MTQKNITKVVIVGGGTAGWMTAAALAKVLEGKVRIKLIESDEISSVGVGESTIPMIRRFNQVLGIDEDEFIRATQGTFKLGIEFRDWGKLGDNYMHGFGIFGQDLATLPFYQYWLRLHQAGQAPDLERYSINRMAARQNKFMRADRSHANSPLGDIVHAFHFDAGLYAAYLRRYSEARGVERIEGKVVDSVLRAADGHVEAVRMASGERVGGELFIDCSGFRALLIEQALHTGFDDWRHWLPCDRAWAVPSGAGPELLPYTRATARPAGWQWRIGLQHRTGNGHVYASAFMDDDAAARLLMDNLDGPALAEPKQLRFTAGKRKQVWNKNVVAVGLSSGFLEPLESTSIHLIQSTIARLIAFFPDRGFSAPDIAEFNRQSDFEVERIRDFIILHYHATTRADTPFWDYCRTMPVPDTLRAKIELYRARGRIVRIDNELFSEVGWLQVLHGQGIEAGGHHPLADLLDEGEVAEYLGDVAGVIGQCVARMPSQDAFIAEHCAAPRP

SEQ ID NO: 86545 - protein, 520 aa, unidentified
  source 1..520: note = Paraglaciecola agarilytica
  REGION 1..520: note = tr|K6X4U8|K6X4U8_9ALTE Tryptophan halogenase; OS = Paraglaciecola agarilytica NO2 OX=1125747 GN=GAGA_3908; PE = 4 SV=1
MSHRSIKNILVVGGGSAGWLTAGIIAAEHQCNKQNSKIKVTLVESPEVNIVGVGEGTWPSMRNSLQRMGLSETDFIRHCGAAFKQGSKFVGWKNGADNDFYYHPFVIPNGYGQANQYSAWKTHGQGHAFADVVCAQSQICQAGLAPKQNATPEYAGVLNYGYHLDAGKFSQMLQQHCVQNLGVTYIQDHVEGVVSHDNGDIKALQTRANGELNADLFVDCSGARSLLLGQHFNVPFIDKKSVLFNDSAMALHVPYSTPDEPIASATISTAQEAGWVWDIGLQDRRGVGYTYSRKHTDDQQALRTLKAYVAQSVGGEVADSLSARKISFEPGHRSHFWHKNCVAVGLSAGFLEPLEASALALVELSATAIAENLPVTAQHMQITRDNFNRRFLLHWENIVEFLKLHYVLSERTEPYWQQMRAPDSVSPRLNDLLTQWRYQPPNRSDFVQNEIMFPSASYQYVLYGMGFETLNDVSSREFDAPQSAIKHLQENQQRLHKLMGGLKSNRQLLKHVVQYGFQKV

SEQ ID NO: 86546 - protein, 517 aa, unidentified
  source 1..517: note = Paraglaciecola agarilytica
  REGION 1..517: note = tr|K6XK53|K6XK53_9ALTE Uncharacterized protein; OS = Paraglaciecola agarilytica NO2 OX=1125747 GN=GAGA_1883; PE = 4 SV=1
MDQAIKSIVIVGGGTAGWITAGTLAAKLQNEHADGFKITLVESPDVKPIGVGEGTWPTMRRTLKAMGIRETDFIRECNVSFKQGAKFAQWVTGAEDDFYYHPLVLPQDFDSTNLARHWMAHPFEQSFSQAVSPQEAVCETGLAPKTIATAEFTSIINYAYHLDAGRFSAFLQRHCIEKLNVHHILDNVSKINAAENGDIASVSTKANGDIAGDLFIDCTGFKSLLLGEHFKVRFKSCKDVLFVDQALAIHVPYDTDDAPIASHTISTGQSAGWVWDIGLQNRRGVGHVYSSAHTTEQRASEELLNYIAQTGGKVNEADIRSIGLNPGHRETFWRQNCVAVGLSAGFLEPLEASSLLLVEISAAMIADQFPATRDAMDIVAKRFNHTFLYRWERIIDFLKLHYMLSKRNDSAFWIDNRDTTTIPQSLQEQLTLWQFQPPWHNDFEHAVEVFPAASYQYVLYGMGFYTKPNELGMSQAYQQKASALRQKNSQQVQQMLKNLPDNRGLINKIHQFGMQRV

SEQ ID NO: 86547 - protein, 516 aa, Sphingomonas sp.
  REGION 1..516: note = tr|A0A0Q4K576|A0A0Q4K576_9SPHN Tryptophan halogenase; OS = Sphingomonas sp. Leaf30 OX=1736213 GN=ASE89_04865 PE=4; SV = 1
MRKRILIVGGGTAGWLTAGYLAKRLGADLAGGVSITLVESQDIGILGVGEGTFPTIRRTLATIGIDEAELIRRCGATFKQGAKFVHWRHAPGQGRPDHYSHPFQVADASDGLDLLPYWLLGHGGAENWDEVSNPQKKAADAMRAPKLATNPDYVGPLNYAFHFDAVALAGLLREHAVRNGVRHLTDTVSEVLLAEDGAIGGVRTERNGMLDADLYIDCTGFRAELIGKAMKVPFRSCRDVLFCNRAIAAQLPYAKPGDPIASYTISTAQESGWIWDIGLDRRRGIGHVYSSDHSDDETAERVLRGYLGAGGDKAEVRHFKFDAGYREVNWVKNCVAVGLSSGFFEPLEATGIAFAEVSAGMIANLFPWGGDYETSARQFNANMLRRYERALDFIKLHYCISERRDTAFWRDNVADASIPDSLLELLDRWRFRPPNELDIDGQVDIFTDASWQYVLYGMGWKTDLSAKAGALRYADDARRAFAEVRRQADYAIRNLPSNRDLVTYAQHHHFGARAAA

SEQ ID NO: 86548 - protein, 484 aa, unidentified
  source 1..484: note = Ruegeria marisrubri
  REGION 1..484: note = tr|A0A0X3TCF5|A0A0X3TCF5_9RHOB Tryptophan halogenase; OS = Ruegeria marisrubri OX=1685379 GN=AVO45_15420 PE=4 SV=1
MPPRVCEAEICVVGGGPAGAATALRLAQLGHDVCLLERHAFPRPHVGESLPPSVLPLLQSLGLRERVEHSGVLLSHGAILYWGGAFERRGTQGGPPGLLVDRGRFDALLLQAAAQAGVRVLQPVRAHRPRRTAQGWDIPLRGETDIPCLRAQVLIDAAGRQAGLGRRFRRCSEPLLALYAYWQAPRGFGPETRIEAGETHWYWGALLPDGTVNAMVLVDPSECTGLSPAGRRDLYLNLLAQSTLLSPCLEGRRIGPVRRCDATSHMETTPPARDLLRVGEASFSLDPLSSQGVQSALGQAMQAAAVAHTVLTQPENGDLALAFHSERQGERVRAHANLAAEYYARQARHRPTGFWTGRAAPPAWLAQDTPDPRREKLPGDVPLHLSPRAALCVSGVQTGPLITPGHVLTHPHLGRPVALLDGVPIAPLLEQMHRATPADQILQGWSASLGPARAGKILNWLWQNRILVPASGQPIPVSSAARMA

SEQ ID NO: 86549 - protein, 515 aa, Duganella sp.
  REGION 1..515: note = tr|A0A1H8QH77|A0A1H8QH77_9BURK Tryptophan halogenase; OS = Duganella sp. CF517 OX=1881038 GN=SAMN05428959_109141; PE = 4 SV=1
MANELIRRIVIVGGGSAGWLSAGLIAAEHRASSPGGLQVTLIESPDVAPIGVGEGTWPSMRDTLRRIGVSESDFFRECDAAFKQGSRFNRWCTGADDDYYFHPFVLPQGYGEANMPEHWLAQHPDVPFADLVSYQPHLCARGKAPKQAATPEFAAVANYGYHLDAGKFGLFLRKHCLEHLGVRYVPDHVTGINSAANGDIASLQTQRHGALEGDLFIDCTGMQSLLLGKHYDIDFVSQKHVLYNDSALAVQIPYPDDNYPIASQTSSTAQSAGWIWDIGLPTRRGVGHVYSGAHIGDDQAEAELRAYIVATGGPADIPAPRKLRFDPGYRAKFWHRNCVAIGLSAGFIEPLEASALALVEMSAAMVSDDMPATRAEMDIVAKRFNEHFTYRWERVIDFLKLHYVLSKRRDSAYWRDNTEADHVPERLGELLTLWRHRAPSRSDFNRIEEVFPSASYQYILYGMGRTTEFTKQHPHEAAMADGYFREAANLTQKMLDALPTNRELIEHIKRHGLRT

SEQ ID NO: 86550 - protein, 506 aa, unidentified
  source 1..506: note = Burkholderiales bacterium
  REGION 1..506: note = tr|A0A4Q3TNA7|A0A4Q3TNA7_9BURK Tryptophan 7-halogenase OS=Burkholderiales bacterium OX=1891238; GN = EON92_02740 PE=4 SV=1
MNPSHIQDIVVVGGGTAGWMAAAAMAKVLGPAYRIRLVESDQIGIVGVGEATVPHIKAFNNLLRIDEADFVRQTQGTFKLGIEFVDWRKRGESYIHGFGTEIGHPLGLLPFHQYWIKARQAGQAQDLGAYTLNTVASRQNKFMVSATDVPAGSPLSNIAYAYHFDASLYARYLRAYSEKLGVRRSEGIVDKVQLHPESGYVESITLQSGEVISGDLFIDCSGFRGLLIEDALHTGYVDFTHWLPCDRALAVPCENAGPPTPYTRATAREAGWQWRIPLQHRTGNGYVYSSAHISDDEAAAKLLANLDGKALAEPRPLRFTTGRRKKCWNRNVVALGLASGFMEPLESTSIHLIQSGISKLLELFPSQGISEVLVDRYNDQLAFEFDRIRDFLVLHYNTTERDDTPFWKQCRDMSIPSELQANIDLFRDSGRFFRNANEMFAEISWIQVMVGQGIMPQGYHPLVDLVPEQEVGRFVASVGRTIAACVDVMPSHQAFIDRYCAAQVPA

SEQ ID NO: 86551 - protein, 516 aa, unidentified
  source 1..516: note = Burkholderiales bacterium
  REGION 1..516: note = tr|A0A3S0E062|A0A3S0E062_9BURK Tryptophan 7-halogenase OS=Burkholderiales bacterium OX=1891238; GN = EKK52_03915 PE=4 SV=1
MNTTQPFKRVLIAGGGTAGWMMAALMSKLLGKQLDIKLVESEEIGTVGVGEATIPALHTFHNLLGINEAEFMAATNATFKLGINFEGWKDVGQNYFHSFGTTGTDHWSAGFQHFWLKGRTLGLAKTYTDYNPETVAAFANRFAHLPRNGLNYAYHLDAGRYAKYLRAMSEACGVQRIEGKIARVLKHGREAGAAREGDLAALQMQDGSRLEADFFIDCTGFRSLLLGEALGVGYEDWSYWLPCDSAVAVQTASVREAWPYTRSIAHPFGWQWRIPLQHRVGNGLVYSSKELSDADAPEMLKRNVEGELLTQPRIIKFLPGQRDKVWARNCVAVGLASGFVEPLESTSIHLIQRAAIRLMQLFPAGGIQQGDVDEFNLQSKRELEHIRDFIVLHYHVNARIDSALWKHVREMDILPSLRHRIELFREAGRVFRPSDELFAENSWVQVMMGQGITPERYHPVADLMGRQELGNFLGDIHLKVARTVAGLPGHQAYVEQLCAPYRSATTAQLAATPLRA

SEQ ID NO: 86552 - protein, 500 aa, unidentified
  source 1..500: note = Paraglaciecola agarilytica
  REGION 1..500: note = tr|K6X3X9|K6X3X9_9ALTE Tryptophan halogenase; OS = Paraglaciecola agarilytica NO2 OX=1125747 GN=GAGA_3583; PE = 4 SV=1
MLPIPQNITIVGLNVHGLLTALLLRKTYKPAVTGITLVGLKEEDSPPKAYIAGKALNTLLEHFGYSEANWMRQTQATFKLSNRYVGFSEQEFSVANASEVDILHQPLMLELSKLKRQAYQLDLSLDDFFFAAALAKRNLSPKAQDFPFETDYQYQVDANCLFTLLQKIAAEHSITTLPSTLETLQLDQHGTLKHIECEDHILSGDYFFDCTQSAQLLIGNMPGFRQETLPEVRINDRVLTYTLAAECCASEVVTTALDCGFVLQYTLQDAVHFQYHYSSKFIQDPQAVQLLERHIAQQGYKKVLQRHLSASQAYLVSQPWIHNCLAVGPACGLTQGSEDHELSHTFAMLEQFVSSIQSPDDAKDVIKNYNHRIKSRFVYAHSYHSTLQLLNSRRNSPYWQTPQDANALTPIGRSLFSQWLSGEDLSVEPILDINGLTAWYALFSGLGHYPTGELKPHPKARAIQDNIQDMCRKLAGCCLNFQTHDNLIAEGKHHANVTAV

SEQ ID NO: 86553 - protein, 506 aa, Xanthomonas campestris; identical to SEQ ID NO: 86170
  REGION 1..506: note = tr|A0A0H2XEI8|A0A0H2XEI8_XANC8 Tryptophan halogenase; OS = Xanthomonas campestris pv. campestris (strain 8004); OX = 314565 GN=XC_4225 PE=4 SV=1

SEQ ID NO: 86554 - protein, 501 aa, unidentified
  source 1..501: note = Streptomyces thermolilacinus
  REGION 1..501: note = tr|A0A1D3DZX3|A0A1D3DZX3_9ACTN Tryptophan halogenase; OS = Streptomyces thermolilacinus SPC6 OX=1306406; GN = J116_005385 PE=4 SV=1
MTASYLKAAFGDRIDITLVESGHIGAVGVGEATFSDIRHFFEFLGLKEKDWMPACNATYKLAVRFENWREKGHYFYHPFEQMRSVNGFPLTDWWLKQGPTDRFDKDCFVMASVIDAGLSPRHQDGTLIDQPFDEGADEMQGLTMSEHQGKTQFPYAYQFEAALLAKYLTKYSVERGVKHIVDDVREVSLDDRGWITGVRTGEHGDLTGDLFIDCTGFRGLLLNQALEEPFISYQDTLPNDSAVALQVPMDMERRGILPCTTATAQDAGWIWTIPLTGRVGTGYVYAKDYLSPEEAERTLREFVGPAAADVEANHIRMRIGRSRNSWVKNCVAIGLSSGFVEPLESTGIFFIHHAIEQLVKNFPAADWNSMHRDLYNSAVSHVMDGVREFLVLHYVAAKRNDTQYWRDTKTRKIPDSLAERIEKWKVQLPDSETVYPYYHGLPPYSYMCILLGMGGIELKPSPALALADGGAAQREFEQIRNKTQRLTEVLPKAYDYFTQLR

SEQ ID NO: 86555 - protein, 498 aa, unidentified
  source 1..498: note = Paraglaciecola agarilytica
  REGION 1..498: note = tr|K6Y7J2|K6Y7J2_9ALTE Tryptophan halogenase; OS = Paraglaciecola agarilytica NO2 OX=1125747 GN=GAGA_4405; PE = 4 SV=1
MSQPFNIVILGGGTAGWMAANLFAHKWADRLANNQLTVTLVESPDIGIVGVGEGSTPTLKRFFSMLGIADADWMRQCNATYKMNIAFKGFSPASGIDCYSHPFVSQIDTFTQRAFLVNARTRRLGLDTHTEPADFLLNGVLAKQNKGPQTPANFPFRMEYGYHFDSHLLGVFLQQHAISLGTEHIQANVDQVKQHENGDIAALCCKDGRELKGDLFVDCSGFSSVLMQKTLGVKFNCYQENLFNDSAVVVPTPIGKHIPVETTSTALSAGWCWKIPLTNRFGNGYVYSSDFISANHAERELKQHLQLGEDIECRHLSMQVGSLAKQWQNNCLGIGLSAGFIEPLEATALHLAQISVEQFILEFEEGGFTNRLQGQYNTKMHHRTERTRDYIVAHYKLNTRNDSEYWRANRNNMHLSESLLQILDVWYKRGDLEAEINRQNLSSHFNAVSWNCLLSGYGAFPPLAAKQPGTGDLYKEQNIESFLQGCALNFSNHAENLR

SEQ ID NO: 86556 - protein, 516 aa, Streptomyces sp.
  REGION 1..516: note = tr|A0A212SV77|A0A212SV77_9ACTN Tryptophan halogenase; OS = Streptomyces sp. PgraA7 OX=1157641; GN = SAMN02745831_05819 PE=4 SV=1
MLNNVVIVGGGTAGWMTASYFKAAFGERINITLVESGNIGAVGVGEATFSDIRHFFDFLGLKEKDWMPACNATYKLAVRFENWREEGHYFYHPFEQMRSVNGFPLADWWLREKPTDRFDKDCFVMPSIIDAGLSPRHLDGSLIDQPFVEGADEMQGLTMSEHQGKTQFPYAYQFEAALLAKYLTTYSVERGVKHIVDDVQQVNLDERGWIRNVTTAEHGEIGGDLFIDCTGFRGLLLNKALEEPFISFQDTLPNDSAVALQVPMDMERRGILPCTTATAQDAGWIWTIPLMGRVGTGYVYAKDYISPEEAERTLREFVGPAAADAEANHIKMRVGRSENSWVKNCVAIGLSSGFVEPLESTGIFFIHHAIEQLAKNFPGEDWNPVQRNLYNDSVAHVMDGVREFLVLHYVAAKRSDTQYWRDTKTRKIPDALAERIEKWKTQLPDTETVFPYYHGLPPYSYHCVLLGMGGIDVKPSPALALGDSAAAEREFAEIREKTRHLTSVLPKAYDYFSRMR

SEQ ID NO: 86557 - protein, 506 aa, unidentified
  source 1..506: note = Paraglaciecola agarilytica
  REGION 1..506: note = tr|K6XK47|K6XK47_9ALTE Response regulator receiver domain-containing protein OS=Paraglaciecola agarilytica NO2 OX=1125747 GN=GAGA_3584 PE=4 SV=1
MQTSLPFKKIIIIGGGTAGWMSACYLAKMWQDYDLEIKIIESDAIGTIGVGEGTTPSIKGFFEQLGIEAKEWMLACNATYKTGIRFVNWSSDPNYKSYFHPFYSQLDEYFQHEFFQNIQLKHRGFDVHAHPDQYLLASELAQQRKAPIEPEHYPFDMAYAYHFDATLLAQFLKKKALQWNVTHQVATINEVKQKDDGSIASVVTESGETIEADFFVDCSGFRSLLLGKTLKVPYNSFADSLLNDSAVTIVTEREDTTPSMTLSTALSCGWAWRIPLTNRFGNGYVFSSRFQSPQDAEEEFRRHLALPESAQFNHLKMRVGHFAKGWEKNVLAVGLSQGFIEPLEATALHFATQSVVDFVSAVDNSTDQAGYSNQTAYNNKLSDRFSCVRDYIELHYLANSRHDTPYWKAARSHTPSRRLQRILTTWHQGKSVPRVLDEEAVSLQLFGHESWLCLLAGKGVFPESEHTIDALPTAMRIDMQKIKHFVETSAKHYPLHDDALAALKQS

SEQ ID NO: 86558 - protein, 507 aa, Duganella sp.
  REGION 1..507: note = tr|A0A1H8QGM6|A0A1H8QGM6_9BURK Tryptophan halogenase; OS = Duganella sp. CF517 OX=1881038 GN=SAMN05428959_109138; PE = 4 SV=1
MQDQNKESNNRQAVRRVVICGGGTAGWMVAAGIAKVLGKRLDIKLIESDEIGTVGVGEATIPTLMNFHNLLEINEQEFMAETQATFKLGISFEEWRNVKENYIHSFGFTGVDHWTAGFQHFWHKGVERGLASDYGDYCLELKASLEHRFAHLPNNGMNYAYHLDASRYAKYLRRLSEPRGVQRIEGKIVRYTKHDGGDVRSIVLESGREIEGDLFIDCTGFRGLLIGDAMEEPMEDWSQWLFCDRAIAVQTEAVADAIPLTRSMAHQAGWQWRIPLQHRVGNGIVYSSRYLDDDTARKQLLANVEGRTLIEPRVIKFKPCQRKQTWKGNVVAIGLSSGFLEPIESTSIHLIQRSVVRLMQMFPSDGVRQTDIEEYNAQCNHEIEHIRDFIILHYHVNNRTDSQFWIDCREMSIPDSLKHRLDLFRETGRVFRVPNELFAENSWIQVMLGQGIMPRSHHQTADLMGDEELKQFLGNIKSKVDRTVVQLPTHQAYVQRYCGRAESVKAA

SEQ ID NO: 86559 - protein, 523 aa, Xanthomonas oryzae
  REGION 1..523: note = tr|Q5H5X5|Q5H5X5_XANOR Tryptophan halogenase; OS = Xanthomonas oryzae pv. oryzae (strain KACC10331 / KXO85) OX=291331 GN=prnA PE=4 SV=1
MTMPDTLPSDPQQRALRRVVIAGGGTAGWMAAAAMSKLLGRHLQITLVESDEIGTVGVGEATIPSLVTFHRLLEIDEAAFMAATQATIKLGIAFEHWRDVDRHYIHSFGHAGTDHWSAGFQHFWLKGQQRGVARDFGDYCLELRAAQEGRFAHLPNGGMNYAYHLDAGLYARFLRRFSEGFGVTRIEGRIGQVETDAESGFLTALTLQDGTRVEGDLFLDCTGLAGLLIGKTLGVGSDDWSRWLFADSALAVQTEAVGPPVTYTRSRADQAGWMWRIPLQHRVGNGIVYSSRYMDQDSARAVLERNLTGRALTEPRPLRVTPNQRHRVWEKNCVALGLASGFLEPLESTNIHLIQRGIIRLLQTFPQVINAVDIAEYNRQAAQEITHIRDFVILHYHATDRRDTPFWRDCAAMDIPDSLRHRVELFRQSGRVFHQANELFAENSWVQVMLGQGIVPQQHHPVADLMGDAELSRFLDTIHTRVEAALVRLPAHADFLQRYCPAPPPPEPAARLPAPPVMAPPAG

SEQ ID NO: 86560 - protein, 496 aa, unidentified
  source 1..496: note = Paraglaciecola agarilytica
  REGION 1..496: note = tr|K6XIM3|K6XIM3_9ALTE FADH2 O2-dependent halogenase I OS=Paraglaciecola agarilytica NO2 OX=1125747 GN=prnA; PE = 4 SV=1
MQKDSIKHIVIAGGGTAGWMTAAALGKLFGANIKVTLIESDAIPTVGVGEATIPTLHLFHDLLKIKESEFMAATNATFKLGIKFEDWYQRNQSYIHSFGRFDHGCWAAGFQHFWLRGRQLDIASEIGDYCPEHLACRMGKFATAPKQERNHAFHLDAGLYAKFLRDLAEQYGVRRIEGKIDNVNLNHNNGFIQSLSLESGQRVEGQLFIDCTGFRGLLIEQALHTGYEDWSHWLPCDSAVAVQTELNESNVPYTRSIAHDAGWQWQIPLQTRVGNGLVFCSKYISDDEAETQLLDNIRGKTLNTPRVLKFKTGVRRKLWNKNCVAIGLAGGFIEPLESTSIHLIQQSIIRLMQSLPSAHMESPIIDKFNATMRNEIDNIRDFIILHYHATARKDSAFWRYCKDMPIPTSLHERMEQFAHSAHVHQGNGELFGEASWLQVMLGQGITPKAYHPIVDLMPVQELASFLDNVKQQTARRVSSLPNHLAFIRYYCKRAAV

SEQ ID NO: 86561 - protein, 587 aa, Microcystis sp.
  REGION 1..587: note = tr|A0A551YMR5|A0A551YMR5_9CHRO Tryptophan halogenase; OS = Microcystis sp. M_QC_C_20170808_M3Col OX=2486216; GN = EWV84_22685 PE=4 SV=1
MNTTQALHYDVVIMGAGFAGLCQARHLMLNIPNIQVAMIDPRPENRPDTDLKIGESTVEIAALLICKELGLHDYMIENHPPKAGLNFHWPKNPAETDSIDDYYHVWINRQPPIPTFQINRAKFERDLLKMNKEMGATFYNGRVVDVDLTEGDQLKTVTVKLEDTTIEIKAKHLVDAAGRRFIIGQKTDNLIFGSDQLLGVNNGSAWVRIKDVDRTIFHSGYHPAGTTVSHYYATNHYFGPGHWLWMIPIDRDSKELSLGVIHHHDVIPAATINTQEKFTAFLKANHTVLYKLLQNSELVDFHYLPRVAHKSKVMFSPDNWYVVGDSACIFDAFYSLGTTMIAIAIESITEIVRAKLANDANAEEKRAVYNDFNLAFTDSVNTFMQEHQKQLGHASIMSWRIYFEYMWWFGILVPMYIGKWHLEPSFLKQFTGPFRTFLNGLFVDVYQDGNELVERGVNMGLMDAIRADQLIGSYYTFKHFEDFLENSKLEPQRCNIFTSMKNTFFYVAIWYAMFQWKGFGWRGLLKPRNLAHFSYLLAQSGLSALGEMRHNFLTRGLPDNSEIEEMRQEFKEYRYQGKLQPWSAELS

SEQ ID NO: 86562 - protein, 499 aa, Duganella sp.
  REGION 1..499: note = tr|A0A1H8EM28|A0A1H8EM28_9BURK Tryptophan halogenase; OS = Duganella sp. CF517 OX=1881038 GN=SAMN05428959_101660; PE = 4 SV=1
MDAAYKSAYRRIVVVGGGAAGWMAATALATALPGSAVELVESEEIGIIGVGEATFPSIRAFHKILGIDEAEFLRATNGTYKLGIEFCDWRVRGERYFHTFGDFGALAGPQSLWGQHRRLGDAAPGALGEQCLPSVMASQGRFQVPPEQGQFFNYAYHFDAVLYAGFLRTMALRKGVRRTEGRIVDVARRADGGVGQLRLADGRVVEGDLFIDCSGFASLLLGRTLEEPFVDFSHWLPVDRAWACPAERSGTALAPYTRATALEGGWAWRIPLSNRTGHGHVFASRHIDEERALSQLLAQMDAPALAEPRLLRFATGHRARFWVRNVVALGLSSGFLEPLESTSIFLVQSGLGRLIEALLPGTAPDARTLADYNSGMVRQFERVRDFIILHYRLTARRDSALWRTMATMELPDTLAFKIHAWRQTGALHQYGDEGFDATSWLAIHAGMGHWPEHADPALREVAPEAALLGLRQRREGIAAAVAAMPTHDDYLRAVLAQRA

SEQ ID NO: 86563 - protein, 496 aa, unidentified
  source 1..496: note = Paraglaciecola agarilytica
  REGION 1..496: note = tr|K6WFC0|K6WFC0_9ALTE FADH2 O2-dependent halogenase I OS=Paraglaciecola agarilytica NO2 OX=1125747 GN=prnA; PE = 4 SV=1
MNTAIKNVVIVGGGTAGWLTAALLQKVVGASINITLVESEAIGTVGVGEATIPPIRLVNQVLGINEAEFLRETKATIKLAIKFENWRRPNESYFHTFGSPGKSMAFCHFHHFVNRAKAFGAKASIWDYDLNYLCATQGKFAHIKAQDTVLDLPYAYHFDATLYAQFLRRYCTKLGVTRIEGMIESVQQHPSGNIAAVTLQDGQRIDGDLFIDCSGFRGLLIQQTLGVGYDDWTHLLPCNRAVAVPSERFETTVPYTRAIAHTAGWQWRIPLQHRNGNGLVYCSSHMSDDEATHTLLNNLDSAPLGDPKVIHFTTGRRRKQWYKNVVAVGLASGFLEPLESTSIHLIQSAIVRLIHLFPHAGIDSAAVDEYNQQSELEYLQIRDFLVLHYHLTERDDSQFWRNMQQMDIPASLRHKMTLFKQNGKLFREQNDLFLESSWLQVMTGQGIEPEDYHPIANTLSEQQLMNMLEQMRSVKHEPLANLPSHDAFLSHYCQAK

SEQ ID NO: 86564 - protein, 510 aa, Sphingomonas aurantiaca
  REGION 1..510: note = tr|A0A2T5GRA1|A0A2T5GRA1_9SPHN Tryptophan halogenase; OS = Sphingomonas aurantiaca OX=185949 GN=C8J26_0126 PE=4; SV = 1
MTDTRPGQITKVVIVGGGTAGWMAAAALSRLVAGGVSVTLVESEEIGTVGVGEATIPSLLDYNRMLGIDEDAFVRATGATFKLGIEFRDWRRLGEAYLHPFGTHGRDIDGVSFHQLWLRQAASGTPDPGPIGDYCLSSVAARRGRFTRPSANPQSVLSTLSYAFHFDAALYARFLRDMAEQDGVVRVEGRVVAVDRDAETGFIEAVRLEGDRRIEGELFVDCSGFRSLLLGETLDVSFTSWKQWLPCDRAWAVPSARQGPLTPYTRATADTAGWRWRIPLQHRVGNGYVYSSAHIDDDDAKQALLAGLDGAAQGEPRQLRFEAGRRERLWDRNCVAIGLSGGFLEPLESTSIHLIQSGITRLMSLFPDRGFGSAERDEYNRVMLREYEQVRDFIILHYHATERSDSPFWDHCRTMTVPESLLAKLGLWSGRARVFREQGELFTPDSWVAVLLGQGVRPDSFDPLTAGLPPSETARFMAHIRDMIDKTAAAMPMHEDFIAQHCAAPSRRSA

SEQ ID NO: 86565 - protein, 500 aa, Altererythrobacter sp.
  REGION 1..500: note = tr|A0A418NI14|A0A418NI14_9SPHN Tryptophan 7-halogenase OS=Altererythrobacter sp. Ery1 OX=2306995; GN = D2V04_09795 PE=4 SV=1
MRSDFTPMRIVVAGGGTAGWMAAAALAYTMGETIDLTLVESDAIGTVGVGEATIPPLVLFNRLIGISEADFMRETQATFKLGIEFENWRCEGEKYFHAFGTTGRDHWSAGFQHFWAEGNERGHSDSYSDYCLELVAAYARKFAHLPKNGLNYAYHLNATAYAAFLRRIAEKAGAKRVEGKIAQVELDGDSGDITALRLEDGQRLEGDLFLDCTGFRALLIEGALHVGYDDWSHYLPCDRAIAVQTELSGPPVPYTRAIAHDAGWQWRIPLQHRGGNGIVYCSRYLSQDAARERLMSTLEGKPISEPRAIPFTAGARRKQWHRNCVAIGLAGGFLEPLESTSIHLIQRAVVRLMRMMPAGQVSERDIAEFNDQQLTDMIQVRDFLILHYNATDRRDSPFWRQCATMDIPDTLRQKIELFRETGRVFRKNEEIFAENSWVQVMLGQGIKPRNHHPIAKKMSDAELSRFLSSLRENITKTVAALPSHEDYVAQFCGSKQATVA

SEQ ID NO: 86566 - protein, 503 aa, Shewanella baltica
  REGION 1..503: note = tr|A3D1M9|A3D1M9_SHEB5 Tryptophan halogenase; OS = Shewanella baltica (strain OS155 / ATCC BAA-1091); OX = 325240 GN=Sbal_1121 PE=4 SV=1
MTTAIKRVVIAGGGTAGWMAAAALTKLMGKHLEIVLVESDEIGTVGVGEATIPTLHIFHRLLGLKEQEVMAATNATFKLGISFENWQDINKNYLHSFGFLGKDCWACGFQHFWLKGKQLGMVSEIGDYCAEHLAARQGRFAVLPNQDYNHAYHMDASLYAKYLRKMAEQHGIHRIEGKIKQVLQHHDSGNIKALVLENDETIEGDLFIDCTGFRALLIEQTLNTGFEDWSHYLPCDSAIAVQTQSVGAPIPYTRSIARDSGWQWRIPLQNRTGNGLVFCSKFISDEDATELLLANLEGEPLNKPRVIKFKTGTRRLHWHKNCVAVGLSGGFLEPLESTSIHLIQRSIIRLMQLFPSAGIVQSDIDEFNQQTKLEMDNIRDFIILHYKATEREDSRFWRYCKNMEIPASLKHRIEMFADSGKVYKYGSELFGESSWIQVMMGQGIMPKHYHPIVDVMEEPELEAFLNNIKSTVKRKVESLPAHIDFIQHYCPAEVLANTKPMAM

SEQ ID NO: 86567 - protein, 513 aa, Caulobacter sp.
  REGION 1..513: note = tr|A0A2G5QTS1|A0A2G5QTS1_9CAUL Tryptophan halogenase; OS = Caulobacter sp. FWC2 OX=69664 GN=CSW62_21170 PE=4 SV=1
MTEAFSTSVAPPAREGALSRIVIVGGGAAGWMAAAALSKVLGPRGPAITLIESEEIGIVGVGEATIPPIRAFNGLLGLDEATFVRETQGTFKLGIEFVDWTRLGHRYFHPFGVYGHDFGVAPFEAVWRRLNRAGQAGPLDSYSVCAQAAAQGRFAPISQAANGPPPMGYAFHFDAALYARMLRTLAEAAGVVRREGKIVDVALRGADGFVEAVTLASGERIAGDLFIDCSGFRSLLLGQALGTGFEDWSRWLPNDRALAVPSANVGPPTPFTRSTAREAGWQWRIPLQHRTGNGYVFSSRHVSVDEATATLLSGLDGEPLAEPRLLTFQAGRREACWVKNVVALGLASGFLEPLESTSIHLIQSGVARLLEMLPTKAFEPADARRYNRLMAADFDNVRDFLVLHFHVTQRDDTPYWRELRTMTPPDSLAERLAIHRATGRIFRESDELFTKTSWLAVMEGQELGAGEDDPLALGVPPDMAAARLARSAEAAAQAAAAMPIHADFIRAHCAAKC

SEQ ID NO: 86568 - protein, 514 aa, unidentified
  source 1..514: note = Alphaproteobacteria bacterium
  REGION 1..514: note = tr|A0A1Q3JHB7|A0A1Q3JHB7_9PROT Tryptophan halogenase; OS = Alphaproteobacteria bacterium 64-11 OX=1895709; GN = BGN85_02305 PE=4 SV=1
MIHPVQKIVIVGGGTAGWLSAGVIAARHQGRIKAGAFSVTLVESPNVPIIGVGEGTWPTLRTTLERMGVSETDLFRHCDAAFKQGARFAGWTTGAEDDGYYHPLMLPQGFTQVNLVPHWLENEGGRSFCDMVTPQGVLCDDGLAPKTITTPEYQAMANYAYHLDASKFAPFIQKHCTEKLGVRHVLADVKQVKLAENGDIAGLSTEQAGDISGDLFVDCTGFRSLLLGQTLGVGFKDSGDVLFCDRALAMQVPYESEDAPMASHTISTAQSAGWTWDIGLPTRRGVGYVYSSRHISDEAAEEELRRYVGHRAKGLTARKIPIRGGHRETFWKKNCVAVGLAAGFLEPLESSAIVLIELSAKLIAEQMPANREVMDIVSARFNDVNHYRWGRIIDFLKLHYVLTRRPEKFWQDNTDPATVPDRLKNLLHLWKYQPPWFFDEFDRIEEVFPAASYQYVLYGMGFRTEVSPDSNSGTRAMAAGYMREAQDMTRKMRATLPRNRDLVKKIHEYGLQPI

SEQ ID NO: 86569 - protein, 501 aa, Caulobacter sp.
  REGION 1..501: note = tr|A0A2G5QHM9|A0A2G5QHM9_9CAUL Tryptophan halogenase; OS = Caulobacter sp. FWC2 OX=69664 GN=CSW62_24975 PE=4 SV=1
MAQTNPVRSLLIVGGGTAGWMAATWLAGRLARQNIQITVVESPDIRTVGVGEATVPAIRDYFRDIGVTEAEVMAATQGTVKLGIEFRDWKREGDSFFHPFGLYGMPSRGVAFHQFWLKRRAEGDATPLAAYSLCTQLAMANQMMDPPVSPPNDLGVFNWAVHFDAGLYAQFLRRKATSELGVTHVDGTVVEVSKHPETGFLTGVTLKEGRVLEADLFIDCSGFRSLLLGQQLGVGYEDWTHLLPCDRAVAMPCERDGPLTPYTRSTALAAGWQWRIPLQHRVGNGYVYSSRHISDDEATATLISRLEGRALAEPNLLRFQTGHRHRFWEKNCIALGLAAGFMEPLESTSIVLVQSGVERLGALFPTLDFDPALADEYNRITTLEYERIRDFLLLHYFANRREGEAMWDQVRQVTLPEPLVHKMRMFASRGTMVRYEWESFHDPSWLSMYAGFEITPRAYDPMADYFTKPELDSAFSRMRAAITRARALAMSHEAFLSSLKA

SEQ ID NO: 86570 - protein, 499 aa, unidentified
  source 1..499: note = Sphingomonadales bacterium
  REGION 1..499: note = tr|A0A258I830|A0A258I830_9SPHN Tryptophan halogenase; OS = Sphingomonadales bacterium 32-64-17 OX=1970592; GN = B7Y88_08565 PE=4 SV=1
MNEAGPTKRRIIIAGGGTAGWMTAAALARTLGPVVAVTLVESEQIGTVGVGESTIPPLVHFNRLLNIPEAEFMRAAQATFKLGIEFENWKDLGHSYFHSFGITGKDHWSAGFQHFWLRGRERGHTEDYDDYCLELKAAYERKFAHLPGEKMNYAYQLDAARYAAFLRGLAEQGGVSRIEGKIAKVDLDGESGNIAALTLESGERLEGDLFVDCTGFRALLIEGALHAGFDDWTHYLPCDRAIAIQTESVGPPVPYTKARAHDAGWQWRIPLQHRTGNGLVYCSSYLENDAALERLLGNLVGKPIAEPNHLRFTTGARRKQWFRNCIAIGLSGGFMEPLESTSIHLIQRAILRLIRMMPSGKVSTRDIAEFNEQQMTDMLQIRDFLILHYKVTNRRDSPFWRQCAAMEIPASLEQKIELFRETGRVFRKNEELFAENSWVQVMMGQGITPQSFHPIATKLGDEELAGLLGGLRESVQKTVAGLPYHEEYVARYCGALAPE

SEQ ID NO: 86571 - protein, 517 aa, unidentified
  source 1..517: note = Sphingomonadales bacterium
  REGION 1..517: note = tr|A0A258IA50|A0A258IA50_9SPHN Tryptophan halogenase; OS = Sphingomonadales bacterium 32-64-17 OX=1970592; GN = B7Y88_08550 PE=4 SV=1
MANSIKQVVIVGGGTAGWLSGCLLAARRRDLSVTLVESADVPTIGVGEGTWPTMRETLRTIGIPEAEFLRECDASFKQGSRFDGWRIGGSEDSYLHPFTPPPPADMAALLSAWQSQAGSEPFAAAMTAQAAICARDLAPRQRAMPDYVGALNYGYHLDAGKFARLLAHHATERLGLQHIVGHVSGVEADETGAIVAVDLGESRRIAGDFFLDCSGMAALLIDKHYATPWRDLSRISFNDRALAVQVPVEAGSAVASQTIGIAHEAGWIWDIALPTRRGVGCVYASRFMDDDRAQMVLRNYIGAKMPQADLAALEPRKLRFATGHRERFWQGNCLAVGLSAGFIEPLEASAIVLIELSLKALIDNFPASRETMPIHAKRFNRLFRYRWDRVVDFLKLHYVLSHRTEPYWLAQRDPHTIPPSLAEQLALWREQPPSGWDFPEANEIFPAASQHYVLYGMGFAPSPPRAGIVTEQATRSLAEVREGVRRLGAALPSNRAYLDALGAMPASNANQQELLSR

SEQ ID NO: 86572 - protein, 543 aa, Shewanella baltica
  REGION 1..543: note = tr|A3D1N2|A3D1N2_SHEB5 Tryptophan halogenase; OS = Shewanella baltica (strain OS155 / ATCC BAA-1091); OX = 325240 GN=Sbal_1124 PE=4 SV=1
MQQATHTAINNIVIVGGGTAGWITAALLAAEHNVDKGQLAHSPKLNITLIESPDVATIGVGEGTWPSMRNTLDKIGISETEFIRQCDASFKQGSRFIHWQYDDTEHTKPFGSNQYLHPFSLPHGHQELDLCPFWLPHSDKVSFAQAVSNQDTLTQLGLAPKTIATPEYHFQNNYGYHLDAGKFSQLLMQHCTEKLGIKYIRDHVSQVHSHANGDIESLATKEHGVILGDMFIDCSGTKSLLLGEHFNVPFLSQKAVLFNDSALAIQVPYTEENSPIASCTLSTAQPNGWIWDIGLPTRKGVGYVYSSAHCSDDEAEQTLRAYLANDTSTKPQSASSNALDSRKQECRKLNINPGYHAKCWQNNCIAIGMAAGFIEPLEASALALVEWTANTLATQLPTHRGVMDTIAQRVNERYERHWQQIIDFLKLHYVVSRREVDGYWRDHREAASIPERLQQQLELWRYQAPSSHDISYKEPLFPAASFQYVLYGMGFNTALPTHIKPSQQQVAQRLFSENQQKIHALSQSLPSNRDLLNKVRQFGFPKI

SEQ ID NO: 86573 - protein, 470 aa, Streptosporangium roseum
  REGION 1..470: note = tr|D2AY55|D2AY55_STRRD Putative tryptophan halogenase OS=Streptosporangium roseum (strain ATCC 12428 / DSM 43021 / JCM 3005 / NI 9100) OX=479432 GN=Sros_4161; PE = 4 SV =1
MRESTQILIIGGGPAGSTAAGLLAREGFQVTLLERDRFPRYHIGESILPSCRPIFELLGVWDKVEAHGFQPKGGAFFQWGPEEWEVRFSNLGDDTPNAWQVIRSEFDQLLLDHARELGVEVIEGVSVRDIEFDGDRAVAARWYDTKDPERSGRIEFGHVIDASGRGGVLATRHLKNRRFHDVFRNVAAWTYWKNAKPLSKGPSGAIAVCSVEDGWFWAIPLHDGTLSVGLVTGRDLFNDSRGRLNGDIQAVYDEALAKCPTVLELLDGAEQVSGMKVEQDYSYVAENFAGPGYLLSGDAACFLDPLLSTGVHLATYSAMLGAASLSSVLRGEVAEQDAWRFYNTVYHHAYQRLLILVSVFYESYRGKEHHFYNAQRLTSDERDHLNLQAAFDRIITGIADLNDAEQAYRLVQEHLRGGESGDPNPLNNLNRVHEVKQSPFDPANAVGGLYLVTEPRLGLRSNGATPSDPS

SEQ ID NO: 86574 - protein, 506 aa, Xanthomonas campestris
  REGION 1..506: note = tr|A0A381M5Z7|A0A381M5Z7_XANCJ Tryptophan 7-halogenase OS=Xanthomonas campestris pv. juglandis; OX = 195709 GN=CPBF1521_28150 PE=4 SV=1
MIPAPLRNIVIVGGGTAGWMAAAAFARVLGPGVKVQLIESEQLGTVGVGEATVPHIKAFNNLLGIDEAEFVRQTQGSFKLGIEFVDWQRPGTSYIHGFGTQIGHPLGLLPFHQYWIKQHARGKAQPLGAYTLNTVAAVRGKFMTSAGDVPANSPLANIAYAYHFDATQYARFLRTYAEQRGVTRIEGLVEQVQLHADSGHVQSLQLASGQVVSGDLFIDCSGFRGLLIEEALHTGYHDFTHWLPCDRALAVPSENVGPPTPYTRSTACAAGWQWRIPLQHRTGNGYVYSSAHISDDEAAATLLANLDGKPLADPRPLRFTTGRRKQFWNRNVVALGLASGFLEPLESTSIHLIQAGISRLLELFPREGISPVLVQRYNDRLAFEFDRIRDFLVLHYHATERDDSAFWRHCRTMPIPPELQTTLDLFRDSGRFYRNAEEMFAEISWVQVMVGQGILPRAYHPLVDQVPDHDAERFLASVAQTIGHCVDVMPTHQQFIDRYCKATAPR

SEQ ID NO: 86575 - protein, 500 aa, unidentified
  source 1..500: note = Alteromonadaceae bacterium
  REGION 1..500: note = tr|A0A559QKI4|A0A559QKI4_9ALTE Tryptophan halogenase; OS = Alteromonadaceae bacterium 2753L.S.0a.02 OX=1403320; GN = P886_2762 PE=4 SV=1
MEHRFIKKMAIVGGGTAGWIAAAALAKALHNRGIEIVLVESPDIGIVGVGESIIPPVISFLKRLGIDEIDFVRETQASYKLGNKFTDWNVKGDSYWHPFGKIGVDIDDRDFFAFVQKARQLGDTTELWRYSPSAVIAEAGRYYSPAAAQPDSLLAGADYAVHLDATLVAKYLRNYCEQRGVERRAATVTDASLTENGFIEALILDDKTRLQADFFLDCSGTSALLTGKVLNTPYLNWNNYLACNSAVIAHSQNQGGMPPFTQITARDNGWSWEIPLRHRIGNGFVYCDEFCDSASAEKQLLSFIQDSPISELKHFNFNPGKREKLWYKNCLALGFAAGFLEPLESTAIYLSAKGIETFISLFPDTSCSPALAQEYNRCMTSEYEHIRDFLVLHYALSNRSDTPFWQKIKTLDVPRTLLAKIALYQAQGRIYRNDADVFKPQSWHALFDGMGLIPEFYDPLIESADFNEVQNIFGQVRELMSKMANGLPRHADFLAKHCPI

SEQ ID NO: 86576 - protein, 503 aa, unidentified
  source 1..503: note = Alteromonadaceae bacterium
  REGION 1..503: note = tr|A0A559QW16|A0A559QW16_9ALTE Tryptophan halogenase; OS = Alteromonadaceae bacterium 2753L.S.0a.02 OX=1403320; GN = P886_1415 PE=4 SV=1
MSDNRIRSVVIVGGGTAGWMTAAACGKILKSSCKIRVIESEALPPIGVGEATIPQINLFNKVLGLNENDFVKHTQATFKLGIEFENWTRIGQRYLHPFGSFGRDMEGVEFHHFWLRLYQHGMAKEIEDYSLAAVAARAGRFTRPLDIPNSPLADIHYAFHFDAGLYAKYLRSFAEAHGVARTEGKINGVQQHSNGFIDSVTLESGETIGGDLFIDCTGFKGLLIEQTLKTGYDDWSHWLPCDTAIAVPCESAGELTPYTRSIAHTAGWQWRIPLQHRIGNGHVFSSRFMSADEATAILLNNLDGEPLADPREIKFTGGKRKKFWNKNVVAIGLASGFVEPLESTAIHLIQSAIARLFSLFPTRDFRQHEIDRFNRLSDLEMERVRDFIILHYIATERDDSPFWRYIQEMQIPDYLAKKIEMYQNSGRIYREDEELFNETSWLAVFHGQGIRAKDYHPVVDTVSFEEVQRRVDGIEAVIQRSCQEMPTQRDFIDKYCKADKPQM

SEQ ID NO: 86577 - protein, 508 aa, Sphingomonas aurantiaca
  REGION 1..508: note = tr|A0A2T5GIH0|A0A2T5GIH0_9SPHN Tryptophan halogenase; OS = Sphingomonas aurantiaca OX=185949 GN=C8J26_3453 PE=4; SV = 1
MTDANPGPIRKVVIVGGGTAGWMAAAAAARYLDDGQRQIVLIESDAIGTVGVGEATIPPILGFNALIGVDEREFLRATGATFKLGIEFVGWDTGDDRYMHAFGGHGRDIQGLAFHQLWLKLRDRPGIGGIDAYAPSAVAAYLNRFGLPTGPQTAPLAYAYHFDAGLYAAFLRRRAEAGGVTRIEGRITRVDRDPDTGHVRAVRLDDGRSVDGDLFIDCSGFRSLLLGETMGVPFEDWSHWLPCDRAVAVPTEPSAPLLPYTRATARTAGWQWRIPLQHRTGNGHVYSSAHISDDEATAVLLANLDSRPTAEPRQLRFKAGRRTSMWKGNVVALGLAGGFLEPLESTSIHLIQTGISKLFALFPDRGFSAVERDEYNRLMGDAYTSVRDFIILHYHATRRDGSAFWRHVRTMPIPDSLTRKLALFREKGRVFRYDDELFGISSWVQVLLGQNVIPVGHDPIVDALDADRVADAIRQIRAATIRGAQSLPNHADFVAHHGPFDRKNEFAK

SEQ ID NO: 86578 - protein, 515 aa, Shewanella denitrificans
  REGION 1..515: note = tr|Q12KP0|Q12KP0_SHEDO Tryptophan halogenase; OS = Shewanella denitrificans (strain OS217 / ATCC BAA-1090 / DSM 15013) OX=318161 GN=Sden_2707 PE=4 SV=1
MKIKRIAIVGAGTAGWLAANHFGVELSAENDVEITVIESKDVPTIGVGEGSVPYLINALKKFGISEAELLYSCDTTFKQGIKFVNWSDNSIKNEDYYHPFDIPYPSGFDMSPYWVAHGQPRPFGDVGIQARICELGLAPKRKSSAEYEGALTYAYHFDALKFAQLLAKNAKERFKVLHEFITVVGARRSANGNITHLVTSDDTELAFDFYVDCSGFSSILIDKVLQVPFVSKADQLLTDTVLVQQLAINEADEIPPYTTATAHSAGWIWDIPLTTRRGTGFVYSSKHMSDDEAIKEYANYLGIEKEHFFPRKIPMKIGYRQKSWSKNCVALGLAQGFVEPLEATSILATDFSAELLARNFPRDFTDFDIVAPYYNKVLTHVWESVVDFIKLHYCISDRNDSQFWLDNKNEAFISEQLKERLAKFAINTPKKSDFFSQFDLFNDKNFLYVLYGMKFNTRPAKISLHEVEHCKMLLRSNDKLVSGAAKELLSHKEWLSGLRTAMDKSLIKPTEALRA

SEQ ID NO: 86579 - protein, 514 aa, Sphingobium sp.
  REGION 1..514: note = tr|A0A2K0Y6Q7|A0A2K0Y6Q7_9SPHN Tryptophan halogenase; OS = Sphingobium sp. SA916 OX=1851207 GN=A8G00_13670 PE=4; SV = 1
MVHPVRNIVIVGGGTAGWLTAGVIAARHRSRIGNGFTVTLVESPNTPIIGVGEGTWPTLRTTLSRMGISETDLFRECDAAFKQGARFARWTTGTPDDGYYHPLMLPQNFGQVNLAPHWLAGEGDESFCDSVCSQGRICDDGLAPKTIATAEYDALANYAYHLDAGKFAPFLQRHCTEKLGVRHVLADVEQVLMKEDGDIRAIRTTQAGEIEGDLFVDCTGFKALLIEGAMKVPFRDCNDVLFCDTALAMQVPYERPDSPMASHTISTAQSAGWIWDIGLPTRRGIGHVYSSNHISDEEAERELRAYIGPLAEGLGARKIAIRSGHRETFWKGNCVAVGLAAGFLEPLEASAIVLIELSAKIIAEQMPACREVMDIIASRFNATTHYRWGRIIDFLKLHYVLTKRTDSNFWRDNVREETIPDRLKELMLLWRYQSPWFLDEFDRVEEVFPAASYQYVLYGMGFRTEVDRPALARDAHLADRARRENTAMTAKLRAGLPRHRDLIDKIVAHGLQPV

SEQ ID NO: 86580 - protein, 506 aa, Xanthomonas campestris
  REGION 1..506: note = tr|A0A383SXD3|A0A383SXD3_XANCJ Tryptophan 7-halogenase OS=Xanthomonas campestris pv. juglandis; OX = 195709 GN=CPBF426_40420 PE=4 SV=1
MLPAPLRNIVIVGGGTAGWMAAAAFARVLGPGFKVQLIESEQLGTVGVGEATVPHIKAFNNLLGIDEAEFVRQTQGSFKLGIEFVDWQRPGTSYIHGFGTQIGHPLGLLPFHQYWIKQRARGKAQPLGAYTLNTVAAVRGKFMTSAGDVPANSPLANIAYAYHFDATQYARFLRTYSEQRGVTRIEGLVEQVQLHADTGHVQSLQLASGQVVSGDLFIDCSGFRGLLIEEALHTGYHDFTHWLPCDRALAVPSENVGPPTPYTRSTARAAGWQWRIPLQHRTGNGYVYSSAHISDDEAATTLLANLEGTPLADPRPLRFTTGRRKQFWNRNVVALGLASGFLEPLESTSIHLIQAGISRLLELFPREGISPVLVQRYNDRLAFEFDRIRDFLVLHYHATERDDSAFWRHCRTMPITPELQTTLDLFRDSGRFYRNAEEMFAEISWVQVMVGQGILPQGYHPLVDQVPDHDAERFLASVAQTIGHCVDVMPTHQQFIDRYCKAAAPR

SEQ ID NO: 86581 - protein, 522 aa, Pseudoalteromonas sp.
  REGION 1..522: note = tr|A0A3Q8WY92|A0A3Q8WY92_9GAMM Tryptophan 7-halogenase OS=Pseudoalteromonas sp. Xi13 OX=2490635; GN = EJ103_09290 PE=4 SV=1
MNDTLKSIVIVGGGTAGWLSAGIIAAYLKKHHSLNYHITLVESADIATVGVGEGTWPTMRRTLQNMGVDEAQFINQCNVSFKQGAKFANWHSTKENDFYYHPLMMPQGFADNDLATAWLRQNTDSAAPHNHFANFVCPQHALCEHNLAPKALTTPQYSGVANYAYHLDAGLFATFLKNHCINHLNVTHVVASVLSVNNNANGDIHSLSLDNNTALCGDLFIDCSGLKSLLLGENLKIGFKSCKDILFADSALAVHMPYDDETQVISSHTISTAQTAGWIWDIGLQTRRGVGHVYSSRHISEQEAKEQLFDYLNISPAKRADFNVKKISFEPGHREKFWHKNCVAIGLSAGFLEPLEASALLLVEISANFIAEQLPANRQVMDITAARFNRTFSYRWQRIIDFLKLHYMLSERTDSLFWQQHCAEQSIPQSLQDNLALWRTHIPNDNHFDYSVEVFPAASYQYVLYGMGFKTATTHYGNHPRAIKKAHNLAAKNTKDTAELVSKLPDNRTLLKQIKQYGLQKI

SEQ ID NO: 86582 - protein, 477 aa, Alishewanella sp.
  REGION 1..477: note = tr|A0A0T5PL54|A0A0T5PL54_9ALTE Tryptophan halogenase; OS = Alishewanella sp. WH16-1 OX=1651088 GN=AAY72_07555 PE=4; SV = 1
MTAAMLARILGEQIDLQLVESDTIGTVGVGEATIPAIQHFNAALGINEAEFLRETKGSIKLGIQFENWGRQGDSYMHAFGPVGRQLGMASFHHFWLAAQAKGDNSSFWDYSLNYQAAKAGKFSPQSQLPNSPLPGLQYAYHFDAGLYAAFLRRYSEQRRVKRIEGLIAKVEQKPSGDIATVVLTDGQVLSADLFIDCSGLRALLIEQTLAAGYDNWQHWLPCDSALAVPSEARYPIVPYTRSIAHGGGWQWRIPLQHRTGNGLVYSSRFLDDEQAKQTLLSNLDAPALAEPRKISFVTGRRKQQWRRNCVAIGLSSGFLEPLESTSIHLIQSAVVRLVQCFPATQDMTALSNEFNRQSQQEFEAIRDFIILHYHLNQRTDHPLWQYCREMALPDALAQRLELFRHSAQIFRQQDELFTEVAWQQVLLGQNLLPASYHPLADSLTKAQLTGFFADLKQVVSKTVTALPSHQSFLQSQS

SEQ ID NO: 86583 - protein, 508 aa, Shewanella baltica
  REGION 1..508: note = tr|A3D1I9|A3D1I9_SHEB5 Tryptophan halogenase; OS = Shewanella baltica (strain OS155 / ATCC BAA-1091); OX = 325240 GN=Sbal_1079 PE=4 SV=1
MNNSPLKSITIVGGGSTGWMTALYLSKLYNHSSNIIDIRLIESKEIGIIGVGEATVHSLRFFFAAMGLDENELLRETNATLKTGILFRNWMKPVDGKMHEYFHPFEQQKPSGKIDNASAWILNNQINESNSTPFAEATSLSFSLMQNNLSPKTHYLNQYQGIVPYGYHLDATLMAAFLKRKATQAGVEHIEANVTDVLVNDGNITEVVTDLGSFKSDIFIDCTGFKGLLIQSLKNDNWQSFETELPCNKAVAMQREYLPHQLPRAYTTATALSHGWVWEIDLTNRQGTGYVYDGNSLTREQAEAELKAYLGDEQEIIRTVHLDMKIGCRREFWVGNCIAMGLAGGFIEPLESTGLHLINLGARLLATHLTSSNPSQAIRTSYNTAMKGLYTDLRQFIVLHYCLTDRDDNEFWQKAAQSSAFIPALEQKMTLWKDKVCEYVDLANGYSSVFTDENYRYVLYGMQHIPEIHIPCPKTEISRILDNLKTQQFRAKEQSLSHQEFLAKIKKF

SEQ ID NO: 86584 - protein, 501 aa, Shewanella baltica
  REGION 1..501: note = tr|A3D2G4|A3D2G4_SHEB5 Tryptophan halogenase; OS = Shewanella baltica (strain OS155 / ATCC BAA-1091); OX = 325240 GN=Sbal_1409 PE=4 SV=1
MKVKQAIRKIIILGGGTAGWMAAAALANNPVFAAIELCLVESDNIGTIGVGEGSTPHLKRFMDNLGISEKDWMELCHASYKTGIDFINWNGDGQQYFHPFYFQMDVKPAEVFFINANARRRGHGNAVKPDAFFSSGVLAKRNLSPRPNKALPCTNEYGYHFDATELANYLKDYACKRGVRQIIADVVEVSTTQHQQIETLILANGERLSADFFIDASGFSAKLIHKALGVPFQSFADELLNDSAVTVPVPALMDSTQTQQAKYHTRATALSAGWLWQIPLTHRLGNGYVYSSRHLSANAAAKELLHSINLPESTQVRFLKMRVGVSDKAWHNNVLAIGLAQSFIEPLEATSIMMTQFTLERFMSLFERYQLNKQAETLSRQTLNQAVMQLVLGIKDYIQAHYVTSQRSEAYWVAARKVAISQRLTQLLKAWYQGEDFDLLLYQYDQQLAYFRPSWYALLAGMDYRDPKLKRPFEPISAEITAQAISYCQTLVEQYFQPKHS

SEQ ID NO: 86585 - protein, 515 aa, Altererythrobacter sp.
  REGION 1..515: note = tr|A0A418NHM9|A0A418NHM9_9SPHN Tryptophan 7-halogenase OS=Altererythrobacter sp. Ery1 OX=2306995; GN = D2V04_09780 PE=4 SV=1
MHGDFARLVIVGGGTAGWLSAAYLAARCPELDITIVEAPDIPTIGVGEGSWPTLRKTLATIGISEVEFLTACDASFKQGSRFDGWANGGPGDSYYHPFTAPIAGDIAELLSAWKGTADELPFSYAMNPQAAICDRDLAPRQRAMPDFAGALNYGYHLDAGKLAVLLARHAVQKLGVTHVRDTAMDVETGEDGFITALRLREGEPLRGDFFIDCTGMAARLIGQELGVEWIDRSDVSFNDRALAVQVPTLPDSPIASQTVATAHEAGWLWDIALPSRRGVGCVYSSRFMDDDAAAEVLAEYVAANVPGADSASLTPRRLQFATGHRAEFWRGNCLAVGLSAGFIEPLEASAIVLIELSLKALADNFPRSRDALTLHAARFNSLFRYRWGRTVDFLKLHYVLSYRREPYWLAQRDPATIPQSLADQLVLWRDHPPSEADFPQINEIFSAASQQYVLYGMGYVLPADSGFTAGDGATRKLTEVRERERALASALPTNRAYFDALAGEPARAQGEIASQ

SEQ ID NO: 86586 - protein, 505 aa, Rhodanobacter sp.
  REGION 1..505: note = tr|A0A1M3NZ43|A0A1M3NZ43_9GAMM Tryptophan halogenase; OS = Rhodanobacter sp. 68-29 OX=1895823 GN=BGP10_03790 PE=4; SV = 1
MGDARIRRLVIVGGGTAGWLTAALLARALGPQLRIALVESAEIGTVGVGEATIPQILHVNRFLGLDEDDMLRAVHGTFKLGVQLNDFTRVGESYLHAFGDLGLPLGLTPFHHYWLRSRGRPGAAGLWAHSLNAAAAAANRFARMDTVPNSPLGGIRYAYHFDALRYGQYLRRHIAPGVVERIEGKVVDVRLRAGDGYIESLLLDGGAMVAGDFFIDCSGFRGLLIEGALKAGYENWQHWLPCDRALAVASAPGGAMRPYTQASARSAGWQWRIPLQTRTGNGHVYCSRFVSDDEAAAQLLASLETEALGDPRPLRFVTGMRKQAWSRNCLALGLAAGFMEPLESTSIHLVQSGVNRLLAMFSDRHCDPMLVDEYNRQTRFEYERVRDFLILHYKATERSDTPFWRQCGAMEIPPGLARRIELFRRTGMIFREGDELFAETGWLQVLLGQRIEPARHHPLADALSDQQLDHFLANVRTLVDRAAATLPPHHEFVARHCGMPAPAEA

SEQ ID NO: 86587 - protein, 496 aa, Sphingosinicella sp.
  REGION 1..496: note = tr|A0A2P7QJE4|A0A2P7QJE4_9SPHN Tryptophan halogenase; OS = Sphingosinicella sp. GL-C-18 OX=2116704 GN=C7I55_20660; PE = 4 SV=1
MTIVVAGGGTAGWMTAAALARFLGRNVRIHLVESEEIGTIGVGEATIPQIRTFNQALGIDETAFVRATEATFKLAIEFVGWSRPGERYMHAFGDIGRESGLLPFHHSWLRGRREGVARELAHYSLNNMAALGERMQTGAARTSALLPEMPYAFHFDAALYAAFLRRFAEEQGVVRTEGRIAGVERDQTSGDVAALALADGRRIAGDLFIDCTGFSGLLIENALGAGYDDWSHWLPCDRAVAVPSARVEAFTPYTRATAHGAGWQWRIPLQHRTGNGIVYASAHLSDDAASALLLANLDSAPLADPRPMRFTTGKRREMWKHNVIAVGLAAGFMEPLESTSIHLIQTAISRILKLLPGREATQAQRNQFNRESDIEYERIRDFLILHYRANRRDEPFWRARQEAAIPASLAAKIALWAGNGHIVREQDELFTEVAWLQVFVGQGVMPAGNHPIADFPSRDGLAEYLGLIDKLIAREVAQMPDHDAFVAALCPARIPA

SEQ ID NO: 86588 - protein, 504 aa, Sphingomonas aurantiaca
  REGION 1..504: note = tr|A0A2T5GIJ8|A0A2T5GIJ8_9SPHN Tryptophan halogenase; OS = Sphingomonas aurantiaca OX=185949 GN=C8J26_3451 PE=4; SV = 1
MRKTRVVVVGGGTAGWMTAAALVRLLPVACSVHLVESAEIGIVGVGEATLPHIRAFVERLGLDEADFMRATHATFKLGIDFRDFGAIGDSYIHPFGSFGRPLDDVGFHHYWLRLAAAGRAGPIGDYSVAVAAAKRHRFAIPDGAPDDLAASFGYAYQFDATLFGPYLRHFAEAHGARRTEARIVSVDRDPLNGDVRALRLDSGEAVEGDLFVDCSGFRSLLLGDAMAEPWEDWSRWLPCDRAVAMPCTSPDGPIEPYTRATAKPAGWQWRIPLQHRVGNGYVYSSAHLSDQAAADALVTSVEGAPLADPRVLKFRAGRRRNSWVGNVVAIGLASGFLEPLESTSIYLAQMAITQLIELFPQNIRADGIATADRTEFNRMVDMEYDRIRDFLILHYHATTRDDSDFWNHVRTMEVPATLADKIELFRQAGRVTQYSEGLFLEPSWIAVYLGQGIVPQAWDQRADRPGLDGLDRAIASLRDHVAATATAMPDHGTFIARRNATIAA

SEQ ID NO: 86589 - protein, 508 aa, Xanthomonas campestris
  REGION 1..508: note = tr|A0A2N7V0N6|A0A2N7V0N6_XANCJ Tryptophan 7-halogenase OS=Xanthomonas campestris pv. juglandis; OX = 195709 GN=C1H21_20355 PE=4 SV=1
MLPAPLRNIVIVIVGGGTAGWMAAAAFARVLGPGFKVQLIESEQLGTVGVGEATVPHIKAFNNLLGIDEAEFVRQTQGSFKLGIEFVDWQRPGTSYIHGFGTQIGHPLGLLPFHQYWIKQHARGKAQPLGAYTLNTVAAVRGKFMTSAGDVPANSPLANIAYAYHFDATQYARFLRTYSEQRGVTRIEGLVEQVQLHADTGHVQSLQLASGQVVSGDLFIDCSGFRGLLIEEALHTGYHDFTHWLPCDRALAVPSENVGPPTPYTRSTARAAGWQWRIPLQHRTGNGYVYSSAHISDDEAAATLLANLEGTPLADPRPLRFTTGRRKQFWNRNVVALGLASGFLEPLESTSIHLIQAGISRLLELFPREGISPVLVQRYNDRLAFEFDRVRDFLVLHYHATERDDSAFWRHCRTMPITPELQTTLDLFRDSGRFYRNAEEMFAEISWVQVMVGQGILPQGYHPLVDQVPDHDAERFLASVAQTIGHCVDVMPTHQQFIDRYCKAAAPR

SEQ ID NO: 86590 - protein, 503 aa, Sphingomonas aurantiaca
  REGION 1..503: note = tr|A0A2T5GFR7|A0A2T5GFR7_9SPHN Tryptophan halogenase; OS = Sphingomonas aurantiaca OX=185949 GN=C8J26_4027 PE=4; SV = 1
MTEHPIRRVVIAGGGTAGWMAAAAIARTMGGTIALTLVESDAIGTVGVGESTIPPMITFNRLLGINEAEFMRETQATFKLGILFDDWKDRGESYFHSFGITGKDHWSAGFQHFWLHGLTKGHDQPYDDYCLELRAALQGKFAHLPDDRMNYAYQLDSTRYAQFLRKMAEADGTRRVEGKIAQVELNGESGDIAALVLDSGARIEGDLFLDCTGFRALLIEGALHAGFDDWTHYLPCDSAIAIQTESVRPALPYTRAMAHDAGWQWRIPLQHRTGNGLVYCSRYLDRDAALDRLLGNIEGETLTEPNMIRFVTGARRQQWHRNCIAIGLSGGFMEPLESTSIHLIQRAVLRLLRLFPAGAVSPRDVTEFNDQQHTDMLQIRDFLILHYKATNRRDSAFWRQCAAMPIPESLEQKIELFRETGRVFRKNEELFAENSWVQVMLGQGIVPQSYHPIATKLLDEELARLLAGLRDGTNATVAGLPEHADYVARYCGAAPARPSTVVA

SEQ ID NO: 86591 - protein, 534 aa, Sphingomonas aurantiaca
  REGION 1..534: note = tr|A0A2T5GFU2|A0A2T5GFU2_9SPHN Tryptophan halogenase; OS = Sphingomonas aurantiaca OX=185949 GN=C8J26_4030 PE=4; SV = 1
MATDTGPGATNDQPITTIVVVGGGTAGWLAACLIAARADRGAEQPLSVTLIESPDVATIGVGEGTWPTMRRTLERIGISETDFLLACDGAFKQGSRFDGWRTGAADDSYLHPFTAPVDGDPRDIVAAWAEHGGRFADTVGAQGVICHRALAPRQRAMPDYAGTLNYAYHLDAGKLASMLMRHATERLGVRHIRDHVVGIDGTADGDIAAVRTRASGAIAGDLFLDCTGHAALLIEGYYGIGTVDRGGTLFNDRALAVQVPVAANSPIASQTNATAHAAGWIWDIGLPTRRGVGCVYSSAHLSDDAAADTLTRYLRATVPDAALPSFRQLTFRSRHRETFWHRNCLAVGLSAGFLEPLEASAIVLIELSLDALLDNFPSHRGAMDIHSMRFNTLFRYRWDRIVEFLKLHYVLSERDEPYWRDHRAPASIPPRLAELLQLWRHQPPSRADFPMVDEIFPAASYQYVLYGMGFPAPTRGPIATPDRARTQTLLAQVDQRRRMLAAGLPTNRAYLDALRHATAPAPAPAPAPAMEPIA

SEQ ID NO: 86592 - protein, 538 aa, Pseudomonas sp.
  REGION 1..538: note = tr|A0A2V3CH72|A0A2V3CH72_9PSED Tryptophan halogenase; OS = Pseudomonas sp. RW409 OX=2202895 GN=DK261_18420 PE=4; SV = 1
MNKPIKNIVIVGGGTAGWMAASYLVRALQQQANITLIESAAIPRIGVGEATIPSLQKVFFDFLGIPEREWMPQVNGAFKAAIKFVNWRKSPDHSRDDHFYHLFGNVPNCDGVPLTHYWLRKREQGFRQPMEYACYPQPGALDGKLAPCLADGTRQMSHAWHFDAHLVADFLKRWAVERGVNRVVDEVVEVRLNDRGYISTLLTKEGRTLEGDLFIDCSGMRGLLINQALKEPFIDMSDYLLCDSAVASAVPNDDAREGVEPYTSAIAMNSGWTWKIPMLGRFGSGYVFSSKFTSRDQATADFLNLWGLSDNQPLNQIKFRVGRNKRAWVNNCVSIGLSSCFLEPLESTGIYFIYAALYQLVKHFPDTSFDPRLSDAFNAEIVHMFDDCRDFVQAHYFTASREDTPFWLANRHELRLSDAIKEKVQRYKAGLPLTTTSFDDSTYYETFDYEFKNFWLNGNYYCIFAGLGMLPDRSLPLLQHRPESIEKAEAMFASIQREAERLRTSLPTNYDYLRSLRDGDAGLSRSQPGPTLAAREIL

SEQ ID NO: 86593 - protein, 520 aa, Xanthomonas campestris
  REGION 1..520: note = tr|A0A383SWM5|A0A383SWM5_XANCJ Tryptophan 7-halogenase OS=Xanthomonas campestris pv. juglandis; OX = 195709 GN=CPBF426_38670 PE=4 SV=1
MTDTTPADPQQRPVRRVVIAGGGTAGWMAAAALSKVLGRHLQITLVESDEIGTVGVGEATIPSLVTFHRLLEIDEAAFMAATQATIKLGIGFEHWRDVDRHYIHSFGHTGTDHWSAGFQHFWLKGRQRGVARDFGDYCLELRAAQEGRFAHLPNGGMNYAYHLDAGLYARFLRRFSEGFGVQRIEGRIGSVETDAHSGYLTALTLDNGMRVEGDLFLDCTGFAGLLIGKTLGVGTDDWSQWLFADSALAVQTESVGAPVAYTRSRADQAGWMWRIPLQHRVGNGIVYSSRYMDQDSAAQVLQHNLSGRALSQPRALRFTPNQRHRVWEKNCVALGLASGFLEPLESTNIHLIQRGIIRLMQTFPQVINDVDIAEYNRQAAAEITHIRDFVILHYHATDRRDTPFWRDCAAMDIPDTLRHRVELFRQSGRVFHQANELFAENSWVQVMLGQGITPKQHHPVADLMGDAELRHFLETIRTRVDAALLRLPAHADFLRRYCPAPLPEPATRLPTDTALVTGTR

SEQ ID NO: 86594 - protein, 532 aa, Sphingomonas aurantiaca
  REGION 1..532: note = tr|A0A2T5GK45|A0A2T5GK45_9SPHN Tryptophan halogenase; OS = Sphingomonas aurantiaca OX=185949 GN=C8J26_2523 PE=4; SV = 1
MPIAGRPTPPRACSAMAAPDGFEAGTQTMANHPLRIVIAGGGTAGWMAAATFARFLETGYEIDLIESDAIGTVGVGEATIPQIHLFNDALGLDEDAFLRATGGTFKLGIEFIDWFKPGRRYLHAFGDVGRDVGLLPFHQYWLRARSLGLAGDLGAYSLNTHAALANRMQRGPARTARTLPSMPYAYHFDAALYARYLRRYSETRGVNRIEGKIVRVTRDGDSGDVSGLVLENGTTVAADLYIDCTGFRGLLIEEALGTGYEDWTHWLPCDRAIAVPSARGEKFTPYTRSTAHAAGWQWRIPLQHRTGNGVVYSSAHMSEDEATATLLRGLDTPAMADPRTITFRTGRRKRMWNHNVVALGLAAGFMEPLESTSIHLIQSAIARLLKLLPGRVIAEADRTEFNRQSDFEYERIRDFIILHYKATERDDTPFWRQCRDMAVPDTLAAKIALWRGNGHIVREHEELFTEVGWLQVLAGQGIVPDGHHPLADAISTADLGEFMDTIDKLNAREAHQMQDHAAFVAQHCAAAPSLAA

SEQ ID NO: 86595 - protein, 506 aa, Xanthomonas vesicatoria
  REGION 1..506: note = tr|A0A1L5QTS0|A0A1L5QTS0_9XANT Tryptophan halogenase; OS = Xanthomonas vesicatoria OX=56460 GN=BI313_14980 PE=4; SV = 1
MIPAPLRNIVIVGGGTAGWMAAAAFARVLGPTFNVQLIESEQLGTVGVGEATVPHIKAFNNLLGIDEAEFVRQTQGSFKLGIEFVDWQRPGTSYIHGFGSQIGHPLGLLPFHQYWIKQHARGTAQPLGAYTLNTVAAARGKFMTSAGDVPANSPLANIAYAYHFDASLYARFLRGFAEARGVRRIEGMVDQVQLHPESGHVVSLQLASGQVIAGDLFIDCSGFRGLLIEDALHTGYHDFTRWLPCDRALAVPCEKVGPPTPYTRSTARAAGWQWRIPLQHRTGNGYVYSSAHISDDEAAASLLANLDGRPLGDPRPLRFTTGRRKQFWNRNVVALGLASGFLEPLESTSIHLIQSGISRLLELFPREGISPVLVQRYNDRLAFEFDRIRDFLLLHYHATERDDSAFWRHCRHMPITPELQTTLDLFRDSGRFYRNAEEMFAEISWVQVMVGQGILPTGYHPLVDQVPDTDAEGFLSSVAQTISHCVDVMPTHQQFIDRYCKAAPAR

SEQ ID NO: 86596 - protein, 517 aa, unidentified
  source 1..517: note = Alteromonadaceae bacterium
  REGION 1..517: note = tr|A0A559QW23|A0A559QW23_9ALTE Tryptophan halogenase; OS = Alteromonadaceae bacterium 2753L.S.0a.02 OX=1403320; GN = P886_1413 PE=4 SV=1
MQNKPISKIVIVGGGTAGWMTAAALANFIDTSQTQITLIESDQIGTVGVGEATLPHLRYFNQVLGIDEQDFLRATNATYKLGIEFIDWGNIGESYIHPFGDYGVPVADIPFHQFWCALTQGGYKHSINEFSVPVVAAYQNKFDYPARDVTSLLATYGYAFHLDASLYAKYLRNYAEAKNVLRIEGRINSVECDGSGAISTLHLEDAPSLSGDLFIDCSGFRSLLLGETLGVNFDDWSEWLRCDRAVALPCGGDEQPLPYTKARAHRSGWQWRIPLQHRTGNGHVYCSDFISDDEALSVLKSNLDGEPLAEPNFLKFKAGHRVKCWEKNCIAVGLAAGFLEPLESTSIYLIQVAITKLLELFPRRDFNASVVDEFNSQVNLAFERVRDFLILHYHATQRDDSDFWNYCRTMPIPEELQHKMTLFKKRGFVVQYDDGIFLEPSWVAVYLGQNIVPAHYDARVDNFDLSLIRNECDKLQQRILTAVNTMPMHGEVLQKHLKHSAEQPAPPASFNLYGRNS

SEQ ID NO: 86597 - protein, 508 aa, Pseudoalteromonas sp.
  REGION 1..508: note = tr|A0A3S8ZCZ5|A0A3S8ZCZ5_9GAMM Tryptophan 7-halogenase OS=Pseudoalteromonas sp. Xi13 OX=2490635; GN = EJ103_01095 PE=4 SV=1
MNKAIKTIAVIGGGTAGWLSAAIIASYHQGNKGDGLKVMLVESSDIPTIGVGEGTWPTMKNTLQQIGLREVDVFKACNATFKQGGKFVNWTHGNNDFYYHPFTVPLGYGRIDLAPYLDNVENFAQQTNFQHDICEANLAPRGIAQGEYQANCNYAYHLDAGAFAELLKQHCKSKLGIEHIIGTVDQVKLDESGAIDTLTLTDQTRTINADLYIDCTGFSSLLLGQALNVPFKKMDHVLFNDSALAMQVPYEEGDESLASHTIATAQNAGWIWDIGLTHRRGVGHVYSSKFLSDEEAEQNLRNYLGDAAKGLTARKISFESGYREKFWHKNCVAVGMSAGFVEPLEATAIMLVEISSRFVAEHMPADTQVMHIVAKRFNEQMDYRWQRIIDFLKLHYMLTKRPEPYWQAHIQPQSIPQSLQEDLLLWGTRGPLIQDFHGALELFPAASYQYVLYGMGFKPDFTKQAYLYSNDAQANQIIERNSQLTQQMLQTLPPHRAYIEQWLAANPV

SEQ ID NO: 86598 - protein, 515 aa, Altererythrobacter sp.
  REGION 1..515: note = tr|A0A4Q2KSX0|A0A4Q2KSX0_9SPHN Tryptophan 7-halogenase OS=Altererythrobacter sp. AY-3R OX=2268576; GN = ETX26_06860 PE=4 SV=1
MHGDFTRLVIVGGGTAGWLSAAYLAARCPELDITIVEAPDIPTIGVGEGSWPTLRKTLATIGIGEVEFLTACDASFKQGSRFDGWVDGEPGDSYYHPFTPPVAGHMAELLSAWKGRADDLPFSYAMNPQASICDRDLAPRQRAMPDFAGALNYGYHLDAGKLAALLARHAVQKLGVTHVRDTVTDVETGEDGRITALRLRGGEPLRGDFFIDCTGMAARLIGQELGVEWIDRSDVSFNDRALAAQVPTLRDSPIASQTVATAHESGWLWDIALPSRRGIGCVYSSRFMDDDAAAEVLTEYIAANVPGADTASLAPRKLQFATGHRAEFWRGNCLAVGLSAGFIEPLEASAIVLIELSLEALADNFPRSREALALHAARFNSLFRYRWGRTVDFLKLHYVLSRRAEPYWLAQRDPATIPQSLADQLVLWRDHPPSEADFPQINEIFSAASQQYVLYGMGYDLPADSGLPAGDGARRKLVEVSGRERALASALPTNRAYFDALADEAAGAQGETASQ

SEQ ID NO: 86599 - protein, 500 aa, Altererythrobacter sp.
  REGION 1..500: note = tr|A0A4Q2KM43|A0A4Q2KM43_9SPHN Tryptophan 7-halogenase OS=Altererythrobacter sp. AY-3R OX=2268576; GN = ETX26_06845 PE=4 SV=1
MKNGFTPMRIVVAGGGTAGWMAAAALAHTMGEAIELILVESDAIGTVGVGEATIPPLIQFNRLIGLNEAEFMRETQATFKLGIEFENWRRDGDKYFHAFGTTGRDHWSAGFQHFWAEGGERGCAESYSDYCLELVAAYARKFAHLPKNGLNYAYHLNATAYAAFLRRVAEKAGAKRVEGKIAEVQLDADSGNLTALRLEDGQRLKGDLFIDCTGFRALLIEGALHVGYDDWSHYLPCDSAIAVQTELSGPPVPYTRAIAHDAGWQWRIPLQHRGGNGIVYCSRYLSQDAARKRLMSTLEGKPISEPRAIPFTAGVRRKQWHRNCVAIGLAGGFLEPLESTSIHLIQRAVVRLIRMMPAGQVSERDVAEFNDQQLTDMVQVRDFLILHYKATDRQDSPFWRQCATMEIPDTLRQKIELFRETGRVFRKNEEIFAENSWVQVMLGQGIEPQNHHPIAKKMSDAELSRFLSSLRENVCRTVAALPKHEDYVAQFCAADKATVA

SEQ ID NO: 86600 - protein, 521 aa, Xanthomonas campestris
  REGION 1..521: note = tr|A0A2N7V095|A0A2N7V095_XANCJ Tryptophan halogenase; OS = Xanthomonas campestris pv. juglandis OX=195709; GN = C1H21_19430 PE=4 SV=1
MTDTTPSDPQQRPVRRVVIAGGGTAGWMAAAALSKVLGRHLQIVLVESDEIGTVGVGEATIPSLVTFHRLLEIDEAAFMAATQATIKLGIGFEHWRDVDRHYIHSFGHTGTDHWSAGFQHFWLKGRQRGLARDFGDYCLELRAAQEGRFAHLPNGGMNYAYHLDAGLYARFLRRFSEGFGVQRIEGRIGNVETHAHSGYLTALTLDNGTRVEGDLFLDCTGFAGLLIGKTLGVGTDDWSQWLFADSALAVQTESVGAPVPYTRSRADQAGWMWRIPLQHRVGNGIVYSSRYMDQNSAAQVLQRNLSGRALTQPRALRFTPNQRHQVWEKNCVALGLASGFLEPLESTNIHLIQRGIIRLMQTFPQVINDVDIAEYNRQAAAEITHIRDFVILHYHATDRRDTPFWRDCAAMDIPDTLRHRVELFRQSGRVFHQANELFAENSWVQVMLGQGITPKQHHPVADLMGDAELRHFLETIRTRVDAALVRLPAHADFLRRYCPAPPLPEPATRLPADAALTTGVR

SEQ ID NO: 86601 - protein, 497 aa, Shewanella denitrificans
  REGION 1..497: note = tr|Q12ML3|Q12ML3_SHEDO Tryptophan halogenase; OS = Shewanella denitrificans (strain OS217 / ATCC BAA-1090 / DSM 15013) OX=318161 GN=Sden_2030 PE=4 SV=1
MKSEISKVVIAGGGTSGWMTAAMLAKMFKKTLDIHLVESEDIGTIGVGEASIPPLKLFNNALGIPEAEFIHATQASIKLGIEFEHWGQQGERYMHAFGNIGKDLGLTPFHHFWLKSQQTNTSDFWQFSVNYQAAKQNKFAPLESLANNQMAGITHAYHFDANLYAKLLRQYSQQAGVNRHEGKIVTTKLDTQGNIESLELSDGRVIMGDLFIDCSGFAALLIGQALKVDYDNWQHWLPCDSAYAVPSTNSGPLKPYTQSIAHAAGWQWRIPLQHRTGNGLVYCSQYMSDEAAKQLLLQNLEGEALAEPRKISFTTGRRVKQWHKNCVSIGLSSGFLEPLESTSIHLVQSAITRLIKCFPNQGIKDIQVAEFNRQSQKEFEQIRDFIILHYHLNQKNNDAGLWQYCREMTIPESLQRKIDLFRTSGTVFREQDELFTEAAWVQVLLGQGITPEDYHPLANAISGADLTDFLGNMKSIISASVSRLPSHEHFLASLLLR

SEQ ID NO: 86602 - protein, 491 aa, unidentified
  source 1..491: note = Alteromonadaceae bacterium
  REGION 1..491: note = tr|A0A559QIN1|A0A559QIN1_9ALTE Tryptophan halogenase; OS = Alteromonadaceae bacterium 2753L.S.0a.02 OX=1403320; GN = P886_2068 PE=4 SV=1
MGAIKKVVIAGGGTAGWIVAAALSKKLGDVLDITLVESEDIGTIGVGEATIPPIRVFHRLLQIDEQEFMRATSATFKLGISFENWKNGDDTYIHSFGKTGRETWLADFIHFWLKAKEIGFAGDFGDYCYELQAAQKNKFGLSKNSEINYAYHLDATRYAQFLRKMSEASGARRLEGKIASVQQNNDTGYIESLTLENGEIIEGDLFIDCTGFHGLLIEKTLHTGYEDWGHWLPCNTAVAVQTESVGPAVPYTRSIAHHAGWRWRIPLQHRVGNGLVYSSDYMSDDEAVSTLLSSVEGKTLTEPRLIKYRTGRRRKIWNKNCVALGLSSGFIEPLESTSIHLFIMGITRLMQLFPFSGIEPSLVDEFNAETSKELEMVRDFIILHYKVTERNDSSFWQYCRNMDVPEKLARRIELFKSSALAFQREGELFRVDSWTQVMLGQGITPQSYHHLVELMSASELQNMLTGLDGSIAKAVEMLPTHQEFVDNYCKA

SEQ ID NO: 86603 - protein, 521 aa, Xanthomonas campestris
  REGION 1..521: note = tr|A0A381M4U2|A0A381M4U2_XANCJ Tryptophan 7-halogenase OS=Xanthomonas campestris pv. juglandis; OX = 195709 GN=CPBF1521_30770 PE=4 SV=1
MTDTAPSDPQQRPVRRVVIAGGGTAGWMAAAALSKVLGRHLQIVLVESDEIGTVGVGEATIPSLVTFHRLLEIDEAAFMAATQATIKLGIGFEHWRDVDRHYIHSFGHTGTDHWSAGFQHFWLKGRQRGLARDFGDYCLELRAAQEGRFAHLPNGGMNYAYHLDAGLYARFLRRFSEGFGVQRIEGRIGNVETHAHSGYLTALTLDNGTRVEGDLFLDCTGFAGLLIGKTLGVGTDDWSQWLFADSALAVQTESVGAPVPYTRSRADQAGWMWRIPLQHRVGNGIVYSSRYMDQNSAAQVLQRNLSGRALTQPRALRFTPNQRHRVWEKNCVALGLASGFLEPLESTNIHLIQRGIIRLMQTFPQVINDVDIAEYNRQAAAEITHIRDFVILHYHATDRRDTPFWRDCAAMDIPDTLRHRVELFRQSGRVFHQANELFAENSWVQVMLGQGITPKQHHPVADLMGDAELRHFLETIRTRVDAALARLPAHADFLRRYCPAPPLPEPATRLPADAALVTGVR

SEQ ID NO: 86604 - protein, 569 aa, unidentified
  source 1..569: note = Streptomyces thermolilacinus
  REGION 1..569: note = tr|A0A1D3E0M1|A0A1D3E0M1_9ACTN Tryptophan halogenase; OS = Streptomyces thermolilacinus SPC6 OX=1306406; GN = J116_016130 PE=4 SV=1
MKQGGLSVAVFEKEDFPREHIGESFAHPLIPVLEETGVLDKVLASDCWVKKFGGIFQWRGQDPHVAFFDHSNTVRDGAHRWAIHVNRSEFDKILLDHAAELGAEVFEGTAVSDCAPLPDGQGQEVTLKDGRTVRAGFFVDASGRRNSIVTKKRREWLSGYRNIAIWQHYLGGRTTQTLDGDWNIFREQDMSPIGCFAFRDGWCWYIPVPKVIDGKRVTTHSIGIVTDPAILRQPGADFTDPEVFLRTVKQVPKLGELIQDVTPVGDKMLTATNYSMINDKFADYDGRWILLGDASYFVDPLFSSGVAFATNQARAAAALIRETRREGLGEAEVRGLWRDYDTEWHGMAASFALSIDQWYYAIGKDNPDSVYWNSRGTDGPAGPDHETTFHALLNTAFTPDLLQVLSRGEGLAALDVDGPFMTAYAEANDLELDADTKVALKENVTVLTGPALDIPGFKAAIPPEPDLMPEEEQKAIAAYWDDPVRNGDLVDSPLDRTLAAHRFGFADDPEGPQVRGLDERDGAADLWERLRGGPVLWRDLVRGLHDGQERLLKRLLHAGMLDLGTRTTA

SEQ ID NO: 86605 - protein, 513 aa, unidentified
  source 1..513: note = Pseudoalteromonas profundi
  REGION 1..513: note = tr|A0A3A3EXQ4|A0A3A3EXQ4_9GAMM Tryptophan 7-halogenase OS=Pseudoalteromonas profundi OX=1774956; GN = D4741_18135 PE=4 SV=1
MQQNEVKKVVILGGGSAGWLSAGLIAAQPHLTHNAQITLIESPDIATIGVGEGTWPTMRQTLKTIGISESEFIQRCDASFKQGSRFDGWCDDEGDAHYYHPFSLPVAYQQLNIAPYWFANKDAVSFSHAVASQTYLCDHHKAPKNHLHSAYQGEANYGYHLDAGKFAMQLQQHCTTKLNVEHIVSHVECINSDEDGYISSLQTRDHGTIAGDLFIDCSGTHAKLLHQHYGIELIKQHDVLFNDRAVAVQVPYLNPQQDILSYTKATAQDAGWIWDIGLQSRRGLGMVYSSRFASSEDAKQALSQYIAKTQPGTAQNELTFREISFTPGYRRRFWYKNCLAIGMSAGFIEPLEASALVMVELGLNNLLANFPTHRAAMPTLAKRFDEQCHYRWQRIIEFLKLHYVLSKRTSPYWQAHKEANSIPLQLQENLALWQYQSPWLNDFDRAQEVFSAASYQYVLYGMKQLPQFPVLAMPTAIIEHFSANQQQAKRGLQQLPTNRELLNHIQQFGIQPI

SEQ ID NO: 86606 - protein, 510 aa, Shewanella sp.
  REGION 1..510: note = tr|A0KZX5|A0KZX5_SHESA Tryptophan halogenase; OS = Shewanella sp. (strain ANA-3) OX=94122 GN=Shewana3_3120; PE = 4 SV=1
MKIKRIAIIGGGTAGWLAANHLGAELCHDPEIEITLIESLDVPTIGVGEGSVPYLAKGLKRFGISEAEMLLTCDATFKQGIKFVNWLDPKHGENHYYHSFDTPYPAGVDVSNFWLANAAGRPFDDVGIQARICELGLSPKRKGSGDYEGALSYAYHFNALKFAGLLANNAKSRFNVKHQFATIKGAEVCQSGRITHLVTADDTSLAFDFYVDCSGFASILIDKTLKVPFVSKANELLTDTVLVQQVALGADEEINPYTTATAHRAGWIWDIPLTTRRGTGFVYSSRHMSDDEALGLYADYLNVDSAQFNPRKIPMKVGYRETFWHHNCVALGLAQGFVEPLEATSILVSDFSAELLARNFPRHLEDIDVLTPHYNQVTTYVWERVVDFIKLHYCISDRTDSDFWLDNKNSETISQELYQRLARFALKPPHASDFFGRFELFDHKNFLYVLYGMKFNTAAPVLSAQEVKHCEALMTGNDQLVVKAASMLLKHRDWLEGLKQAFEQARSTKV

SEQ ID NO: 86607 - protein, 416 aa, unidentified
  source 1..416: note = Kangiella sediminilitoris
  REGION 1..416: note = tr|A0A1B3BDZ2|A0A1B3BDZ2_9GAMM Tryptophan halogenase; OS = Kangiella sediminilitoris OX=1144748 GN=KS2013_2279; PE = 4 SV=1
MNRPSPDYDVIIIGAGPAGSLASSLLVQQGYSALVIEKETFPRFSIGESLLPQSMIYLEEAKMLKAVEEAAESLGFQYKNGAAFIANDQYSDFNFSEKFSAGPGHTYQVKRAHFDQLLANEAENQGADFKFGCLLTSLQLEPEPVLTIQTEKGISEQLTARFILDASGFARVLPRLLDLSQPSDFPVRSSVFCHIKDNISDTDYDRNKILIETHPELDDVWFWLIPFSDGTSSLGCVAKPEYFEQLTTADTPEALLDQAIAETSRFQTLLASSTKTSDTRQVTGFSSNVKQLYGRNFALLGNAGEFLDPIFSSGVTIAFKSAKLATDILNKQFTNQPYCWQTEFAEPLQQGVNTFKAFVNSWYQGDFQNIIHFKDAPTEVREMICSILAGYAWDKDNPFVQQPERRLQVVGGLCAS

SEQ ID NO: 86608 - protein, 516 aa, Sphingomonas aurantiaca
  REGION 1..516: note = tr|A0A2T5GR98|A0A2T5GR98_9SPHN Glycine/D-amino acid oxidase-like deaminating enzyme OS=Sphingomonas aurantiaca; OX = 185949 GN=C8J26_0127 PE=4 SV=1
MTKRILIVGGGTAGWLTAGYLAKRLGADLPAGVAITLVESRDIGILGVGEGTFPTIRRTLATIGIDEADLIRRCGATFKQGAKFVHWRHAPGQGPTDHYSHPFQVADSSDGLDLLPYWLLGHGGTENWDEVSNPQKKAADRHRAPKLASNPDYVGPLNYAFHFDAVALAGLLREQAVKNGVRHLTDTVNEVLLDADGAIGGVRTERNGMLDADLYIDCTGFRAELIGKAMRIPFRSCRDVLFCNRAIAAQLPYARPDEPIASYTISTAQEAGWIWDIGLDRRRGIGHVYSSDHSDDEAAERVLRGYLGAAGEKADVRHFKFEAGYREVNWYKNCVAVGLSSGFFEPLEATGIAFAEVSAGMIANLFPWGGDYETSARQFNANMLRRYERALDFIKLHYCISERRDTAFWRDNVADASVPDSLLEMLDRWRFRPPNELDIDGQIDIFTEASWQYVLYGMGWKTDLSAKAGVLRYGDDARRAFAEVQRQARYAIANLPSNRDLVAYAQSHSFGGRAAA

SEQ ID NO: 86609 - protein, 505 aa, Xanthomonas campestris
  REGION 1..505: note = tr|A0A383SCB3|A0A383SCB3_XANCJ Tryptophan 7-halogenase OS=Xanthomonas campestris pv. juglandis; OX = 195709 GN=CPBF426_06950 PE=4 SV=1
MSQAPIRKVVIAGGGTAGWIAACALSHQFRDLLEITLVESEQIGTVGVGESTVPPIRSFHRFLQIDEQEFLRAVAGTFKLSISFEHWRRQGERYIHPFGITGQSTLVCAFHHLWLESQRRGMPGSFGDYCLETVASRVDRFALLREPAVNYAYHLDAALYARFLRTRSEACGVRRMEGRIQQVTLQPDSGDVASLVLEDGQVLEGDLFIDCSGFRGLLIEQALHTGYEDWSHWLPCDRAVAVQTQALGPPVPYTRAIAHEAGWRWQIPLQHRVGNGLVFSSKHLSDDEAHARLLRDVAAPALKDPWLVPFRTGRRRKAWNRNVVSLGLASGFIEPLESTSIHLTIAAVVRLITLFPADGIAPSQVELFNDISRAEMEHVRDFIILHYHATQRDEPLWRQCRAMELPASLALRLRAWRERAHAWQAADELFRVDSWTHVLMGQGIVPAQHHPLARAMSDHDLRRLLDGIAQPIRHAVDQMPPQQAFIDAYCKAGERVWGLRSPGVA

SEQ ID NO: 86610 - protein, 261 aa, unidentified
  source 1..261: note = Burkholderiales bacterium
  REGION 1..261: note = tr|A0A257H376|A0A257H376_9BURK Tryptophan halogenase (Fragment) OS=Burkholderiales bacterium PBB4 OX=2015566; GN = CFE44_09455 PE=4 SV=1
NDRAVAVQTESVGEALPYTRSIAHASGWQWRIPLQHRVGNGLVYSSRYLDELQARSTLLENLQGTVLTQPRFLKFCPGQRHQTWHKNCVAIGLSSGFIEPLESTSIHLIQRGIVRLMQLFPTRGLSHADIEEYNQQARVEIEHIRDFIICHYHVTHRRDSPYWNACRSMEIPKSLQHRIDLFRENGRVFRVPNELFAENSWVQVMLGQGIMPRYHHQAADLMGDAELSRFLGNIQSSVDKTVAQLPSHQTYVQKYCGVAKD

SEQ ID NO: 86611 - protein, 427 aa, Streptomyces rapamycinicus
  REGION 1..427: note = tr|A0A3L8R3V6|A0A3L8R3V6_STRRN Tryptophan halogenase; OS = Streptomyces rapamycinicus (strain ATCC 29253 / DSM 41530 / NRRL 5491 / AYB-994) OX=1343740 GN=D3C57_133765 P; E = 4 SV=1
MSSALFGVPDEYDVIVIGGGPAGATTAGLLAKRGRRVLILDRERFPRYHVGESLIPAFMRPMQEMGITERMDARGFERKYGGTLVWGNKQVPWNFSFIEGGAHEYAFHTRRADLDALILDRARELGAFVIEDATVKEPVEVDGRISGVRFSLRGLDGLHEVRARLVVDASGQARVLGRRLTEVEWHDELRNVAVWTYFDNCERLPGDEYTNILIEGLDGGWFWAIPIDKGTISVGYVTRSATAGENGHSLEDLFHTERQRTTKLKKMLAGARQSAGFRTARDWSYHSNRFYGDGWVLVGDAAAFVDPLFSTGVALATLAGSTLAKIVDRIVEHPRIEEKALDRYATAYSGFFDEIRTFVERFYDQSKYKEFYYSLAQEMVDPERKNEPSADFVTLISGLSGRHPLFHISLDDLIADAAAPASGTPHA

SEQ ID NO: 86612 - protein, 508 aa, Massilia albidiflava
  REGION 1..508: note = tr|A0A411WWN1|A0A411WWN1_9BURK Tryptophan 7-halogenase OS=Massilia albidiflava OX=321983; GN = EYF70_10385 PE=4 SV=1
MQEMIKRIVIVGGGTAGWMSAAALSKILGGRIAIELVESDAIGTIGVGESTIPMIRRFNAVLDIDENDFIRETQATFKLGIEFRDWGRVGERYMHAFGRVGQDLATVDFHQYFLRMHAAGKADGLAPYSINAMAAAVGKFMRADPRHGNSPLADITHAFHLDAGLYAAYLRRYSEARGVVRSEGEVVEAVLRSGDGNVEAVRMADGRLVAGDLFLDCTGFRALLIEGALDTGFESWTRWLPCDRAWAVPCAAGPDLLPYTIATARSAGWQWRIGLQHRTGNGHVYASSFMDDDAAAAALMSSLDGEPLAEPRQLRFTAGRRRKIWNRNVVAIGLSGGFLKPLESTSIHLVQSAIARLVAFFPTAHPEQADIDEFNRQSAIESERIRDFLVLHYHATARSDSPFWEHCRTMPIPDTLQAKIELYRAGGRLSRHDMELFTEVAWLQVLHGQGVRPRGHHALADLLDEEEVAAYLGDIAEVTRNCVAVMPAHAAFIKAHCAAGDPARQANR

SEQ ID NO: 86613 - protein, 512 aa, unidentified
  source 1..512: note = Salinimonas sediminis
  REGION 1..512: note = tr|A0A346NN74|A0A346NN74_9ALTE Tryptophan 7-halogenase OS=Salinimonas sediminis OX=2303538; GN = D0Y50_11830 PE=4 SV=1
MADNTFLEHIVIVGGGTAGWMAAAALSRVLEQHSCAITVIEPSGIAPVGVGEATIPPIRLFNQMLGVDEATFLRETQGTFKLGIEFENWREQGHSYFHPFGRYGADLDTVAFHQYWRKLHQQGYQPTLADFSLATLAARANKFRLPDNDRHSVFSNISYAYHFDATLYAAWLKKYALARGVKVIDDTVDKVLLHPKTGFIEALSLRHSALLKADFFIDCSGFKGVLIEQALHTGYDNWQSLLPCDRAITVTTARLDPLPPFTRSIAQPAGWQWQIPLQHRTGNGHVYCSQFMSDDEALTCLLRQLPGAPISEPRRLSFTTGKRKKFWNKNCLALGLAAGFMEPLESTSIHLIQTALAKLMKAFPDKTFDPVDIDEYNRMAETEFVRIRDFLVLHYHANQRQDGAFWQHCASQSIPDTLAHKYALYKSRGRVFRYDEELFSDSSWVAVFEGQGVIPRRYDPLADTFAHDRLLRTCEKMRATLQAGVQAMPGHDAFLQHYCKPPNVVNTPIGYR

SEQ ID NO: 86614 - protein, 503 aa, unidentified
  source 1..503: note = Sphingomonas endophytica
  REGION 1..503: note = tr|A0A147I4H2|A0A147I4H2_9SPHN Tryptophan halogenase; OS = Sphingomonas endophytica OX=869719 GN=NS334_07960 PE=4; SV = 1
MAEKQSGGRVERVVILGGGTAGWMTATALARTYGRRLAITLLESEEIGTVGVGEATIPTIHWFNDLIGLDEAGFLRATQATFKLGIEFVDWARPGHRYFHPFGRYGAALPGVDFHHRWIKARRDGLDLPLAALSLATQAAGQGRFARPQGDARSILSTLGYAYHFDAALYAAHLRSIAEGAGVRRVEGRLATVERDSATGFISALTTQRGERLAGDLFIDCSGFRALLIGGEMASPFEDWSHWLPCDRAVAVPCARVAATTPFTRSTARAAGWQWRIPLQHRTGNGYVYASRYVGDDEAAATLLANLDGEALAEPRFLRFTAGLRRRPWVGNVVAIGLSSGFLEPLESTSIHLIQSGIAKLLTLFPDRDMDAGLATRFNRLLAADMDGVRDFLILHYHATQGRDDPLWRACRTMELPASLVEREAHYVRAGRLMLDPEELFREASWLAVLDGQGFVAGDHHPLADTIDAATNIAQVRGIAEVIARAAPTLPLHDVALEAITSG

SEQ ID NO: 86615 - protein, 506 aa, Xanthomonas arboricola
  REGION 1..506: note = tr|A0A429YCW2|A0A429YCW2_9XANT Tryptophan 7-halogenase OS=Xanthomonas arboricola pv. pruni OX=69929; GN = EJL05_09790 PE=4 SV=1
MIPAPLRNIVIVGGGTAGWMAAAAFARVLGPGFKVQLIESEQLGTVGVGEATVPHIKAFNNLLGIDEAEFVRQTQGSFKLGIEFVDWQRPGTSYIHGFGTQIGHPLGLLPFHQYWIKQHARGKAQPLGAYTLNTVAAVRGKFMTSAGDVPANSPLANIAYAYHFDATQYARFLRTYAEQRGVTRIEGLVEQVQLHADSGHVQSLQLASGQVVSGDLFIDCSGFRGLLIEEALHTGYHDFTHWLPCDRALAVPSENVGPPTPYTRSTARAAGWQWRIPLQHRTGNGYVYSSAHISDDEAAATLLANLDGKPLADPRPLRFTTGRRKQFWNRNVVALGLASGFLEPLESTSIHLIQAGISRLLELFPREGISPVLVQRYNDRLAFEFDRIRDFLVLHYHATERDDSAFWRHCRTMPITPELQTTLDLFRDSGRFYRNAEEMFAEISWVQVMVGQGILPRGYHPLVDQVPDHDAERFLASVAQTIGHCVDVMPTHQRFIDRYCKATAPR

SEQ ID NO: 86616 - protein, 501 aa, Sphingomonas sp.
  REGION 1..501: note = tr|A0A2T5GXW7|A0A2T5GXW7_9SPHN Tryptophan halogenase; OS = Sphingomonas sp. PP-CE-3G-477 OX=2135660 GN=C8J45_10318; PE = 4 SV=1
MTEHPIRRVVIAGGGTAGWMAAAAIARTMGSTIELTLIESDAIGTIGVGESTIPPMITFNRLLGINEAEFMRETQATFKLGILFDDWKDRGERYFHSFGITGKDHWSAGFQHFWLHGLTKGHAQPYDDYCLELRAALQGKFAHLPDDRMNYAYQLDSTRYAKFLRKMAEADGTRRLEGRIAQVELNGESGDIAALVLESGARIEGDLFLDCTGFRALLIEGALHAGFDDWTHYLPCESAIAIQTESVRPALPYTRAMAHDAGWQWRIPLQHRTGNGIVYCSRYLDRDAALDRLLGNIEGKTLTEPNVIRFVTGARRQQWHRNCIAIGLSGGFMEPLESTSIHLIQRAVLRLLRLFPSGAVSPRDVAEFNDQQHTDMLQIRDFLILHYKATNRRDSAFWRQCAAMPIPASLEQKIELFRETGRVFRKNEELFAENSWVQVMLGQGIVPRSYHPIATKLRDDELARLLGGLRDGTNATVAGLPEHAEYVARYCGTAPAPAVAA

SEQ ID NO: 86617 - protein, 436 aa, unidentified
  source 1..436: note = Rhodopirellula europaea
  REGION 1..436: note = tr|M2B0C1|M2B0C1_9PLAN Tryptophan halogenase; OS = Rhodopirellula europaea 6C OX=1263867 GN=RE6C_03635; PE = 4 SV=1
MSTPKMKDFYDCVVIGGGPAGGAAASIVADSGVSTLLIERDPVPRFHVGESLMPECYWPLERLGLIDQVKRSGWQTKKSVQFVTHTGKESAPFFFREHDERECSTTWQVERGEFDKMLYDRASELGADCFDQTRLIDVQTEPGDTDDQPVARAVVVRTADGTEKTIGCKVVVDATGQQAFLAGKMGLKEINPDLKKAAIWTYYRDAVRGEGDNDGATIILNTKSRDSWFWFIPQSRGITSVGCVGDNDYLLKGRGTPEETFEEELANCPGLQPRLANATRVGKITTAKEFSYMTRRHSGPGWVLIGDALGFIDPVYSSGVYFALEMGVRAGDAIVEGLKKNDLSAEQLGQWTDDFKEGASRVRQLVHAFYNRDFSIGRFMKEHPEHRGNVTDLLIGRVFHEDAGKMFPALDRSIEMARANAMSKADSMAETKPMST

SEQ ID NO: 86618 - protein, 512 aa, Massilia albidiflava
  REGION 1..512: note = tr|A0A411WUP3|A0A411WUP3_9BURK Tryptophan 7-halogenase OS=Massilia albidiflava OX=321983; GN = EYF70_05430 PE=4 SV=1
MNQHIKHIVIVGGGAAGWITAGRIAARHARDSGITVTLVESPTIGPIGVGEGTWPTMRSTLMKMGISETDFMRECEATFKQGAKFARWVDGTADDFYYHPLMLPQGFGQLDLVPYWQTACAGRSFSDTVCLQEQVCEHGLAPKMITTPEYASVANYAYHLDAGKFVGFLTRHCTTKLGVTHIQGDVTAVNSTPNGDIAAIVTAQQGEIAGDLFIDCTGFNSLLLGKHLGVPFVDRGDVLFIDKAIAAQVPYEREDAPIASHTISTGQAAGWIWDIGLVTRRGIGYVYSSRHTSDEQAEAALRAYIGPAGKSVGTRSIPIRSGHRQLFWKNNCVAVGLAAGFLEPLEASALVLVELSADMLAEQLPATRDTMDIVARRFNETFLYRWDRIIDFLKLHYILSKRTDNAFWTDNRAPETIPDSLKDLMRLWRHRPPGNCDFTSNNEVFPAASYQYVLYGMGFRTDPEFLRPSPGEQRAAQEHLSQNSAAVRKALKMLPAHRELIAKIHAYGLPAV

SEQ ID NO: 86619 - protein, 505 aa, unidentified
  source 1..505: note = Niveispirillum lacus
  REGION 1..505: note = tr|A0A255YSS5|A0A255YSS5_9PROT Tryptophan halogenase; OS = Niveispirillum lacus OX=1981099 GN=CHU95_20355 PE=4 SV=1
MMKSKAHDIVIVGGGTAGWMAAAILAKSTKGRLGRITLIESTEIGTVGVGEATIPPIQFFNQLLGIDERDFVARTQASFKLGIEFRNWHRKGQSYIHPFGTYGGNMDAVSFHHYWLRLRALGDGTDIGDYCPAIAAARQGRFAPEMPDGPPGGPVLAYAYHFDAALYAAYLRDYATRAGVTRIEGRITSIRQRAEDGYVTHLDLADGSSVTGDLFIDCSGFRSLLLGQTLGVGFKDWSRYLPCDRALAVPCEGGEAITPYTRSTAHTAGWQWRIPLQHRIGNGHVYSSAFMSDEEAEAILLGNLDGKVQADPRPLRFTAGRRERCWERNVVAIGLASGFLEPLESTSIHLVQTALFRLLALMPTDIKDQVTRDEFNRLTEAEYEHIRDFLILHYHATDRDDSDFWNYVRTMPVPDSLRHKMELFRARGRVARVDGQLFVEASWVAVFLGQGIEPIAYDPMADVVREPDLRQRLSRHLDHVRRSVAAMPLHRDFINRHCKASATAA

SEQ ID NO: 86620 - protein, 504 aa, unidentified
  source 1..504: note = Niveispirillum lacus
  REGION 1..504: note = tr|A0A255Z0X9|A0A255Z0X9_9PROT Tryptophan halogenase; OS = Niveispirillum lacus OX=1981099 GN=CHU95_11175 PE=4 SV=1
MKPLNRIVIAGGGTAGWITAAMLSFMTKGTSTAVELVESDEIGTIGVGESTIPPFVVLLRSLGIDEQDFIKSTNASFKLAIRFEDWFKKNQHYYHPFGTLGGLIDNHEFYQCWLRAKAAGHPSELQDFAAATVMADQMKFLLPFKAPRTMIASASYALHVDAKRVAQYLRRYAEERGVTRTEGRINRVRTHPDGSIAGLDLSNGKVVDGDFFIDCTGFRALLIGQTLGVGYVSWADELLCDRAVAVQTENTDDDADVHPYTLSQAQDCGWRWRIPLQHRAGNGYVYSSRFLSDDEAVATLMRQVKGRPLIEPNIIPFKTGMRAKMWEKNCVALGLAAGFIEPLESTAIHLVYRAVDYLFRFFPDADCDPSLQAEFNRRVAAEYEEVRDFIVLHYCTTQRDDTPFWRAAQRTPIPASLRARMELFKATGILRQGLEELFGAASWQSVYEGMGVRPARYQPFVDKLPMSVITETLDRSAPLLKAQVAGLPHHAQFLRDHCRAERDF

SEQ ID NO: 86621 - protein, 506 aa, Roseomonas sp.
  REGION 1..506: note = tr|A0A317FFI6|A0A317FFI6_9PROT Tryptophan halogenase; OS = Roseomonas sp. CQN31 OX=2184016 GN=DFH01_12860 PE=4 SV=1
MRVVIAGGGSAGWMAAAALSQYFGTRLSVSLVESEEIGIVGVGEATIPQIRLFNAGLGLDERAFLRETMGTFKLGIEFVGWRRDGMRYFHGFGEVGRAIGLVPFHHYWLRYRREGGTLPLDRFSPNTMAARENRFGVPAGGFAARLPASAYHFDATRYAAFLRRYAEARGVIRREGKIVNVRLDSESGFVRGLDLADGGQLEGDLFIDCSGFRGLIIEQALASGFEDWSHWLPCDRALAVPSTGDGKLEPYTRSTAREAGWQWHIPLRHRTGNGHVYSSSFTSDDEAHRVLLANLPGDRLADPRPLSFLTGKRREIWKKNCIALGLASGFLEPLESTSIHLIQAGIARLLSLFPDPQCDPVLVREFNRQLDWEFTAVRDFLILHYHVTERDGSEFWRYCRAMAIPDSLQEKLEMFRTSGRIVRQNMELFDVPSWLQVMWGQGLRPAGHHPMVDAASAADLAGYIAMNERETSEQVAALSDHASYLVRLVGDEGSVPSEQPTARAAR

SEQ ID NO: 86622 - protein, 431 aa, unidentified
  source 1..431: note = Rhodopirellula europaea
  REGION 1..431: note = tr|M5SL42|M5SL42_9PLAN Tryptophan halogenase; OS = Rhodopirellula europaea SH398 OX=1263868 GN=RESH_02469; PE = 4 SV=1
MKDFYDCVVIGGGPAGGAAASILADSGVSTLLIERDPVPRFHVGESLMPECYWPLERLGLIDQVKRSGWQTKKSVQFVTHTGKESAPFFFREHDERECSTTWQVERSEFDKMLYDRASELGADCFDQTRLIDVQTEPGDTDDQPVARAVVVRTADGTEKTIGCKVVVDATGQQAFLAGKMGLKEINPDLKKAAIWTYYRDAVRGEGDNDGATIILNTKSRDSWFWFIPQSRGITSVGCVGDNDYLLKGRGTPEEIFEEELANCPGLQPRLANATRVGKITTAKEFSYMTRRHSGPGWVLIGDALGFIDPVYSSGVYFALEMGVRAGDAIVEGLKKNDLSAEQLGKWTDDFKEGASKVRQLVHAFYNKDFSIGRFMKEHPEYRGNVTDLLIGRVFHEDAGKMFPALDRSIEMARANAMSKADSMAETKPMST

SEQ ID NO: 86623 - protein, 510 aa, Inhella sp.
  REGION 1..510: note = tr|A0A437LE65|A0A437LE65_9BURK Tryptophan 7-halogenase OS=Inhella sp. CCP-18 OX=2499851; GN = EOD73_14070 PE=4 SV=1
MNERLRTVAVLGGGSAGWLVAGLLAAEHPDLQITLIESSEVPVIGVGEGTWPSMRDTLRRIGLSETEFVRRCQVAFKQGSRFDGWQRGASAADGDRYYHPFMLPVGHGDVDLVSAWLATAPERPFADLTSPSVQVCEAGRAPKQAQTPEFGAVANYAYHFDAGLFGQLLREHATQTLGVRHCVDHVDAVLPHENGDIAALQTRTHGALAADLFIDCSGLSARLIGQHFGVPLKSEREVLFNDAALPVQVPYAEAQGPIATCTIATAWAKGWIWDIGLPTRRGVGCVYSRAHASEDEAQAALQAYLRATGAPDERPAPRSIRYDPGYRERFWVRNCVAIGLSSGFIEPLEASALALVELSVQRLCDELPMSRASMDAVARRFNDDFGYRWARVIDFLKLHYLLSERDDSAYWRAHRDPASWPERLRELLPMWRLRAPARHDFGRIDEVFPAASYQYVLYGMGFRPDAGPLSPDKLQAAHACFAEAHRLAQRYLPALPSHRGLIDHLHKTPT

SEQ ID NO: 86624 - protein, 515 aa, unidentified
  source 1..515: note = Sphingomonas bacterium
  REGION 1..515: note = tr|A0A3D0WDC5|A0A3D0WDC5_9SPHN Tryptophan halogenase; OS = Sphingomonas bacterium OX=1895847 GN=DEP91_10715 PE=4; SV = 1
MAGPIRNIVIVGGGTAGWLTAGVIAARHKARIEAGTFSVTLVESPNVPIIGVGEGTWPTLRSTLAKMGVSETDFFRECDAAFKQGAKFQRWTTGAADDAYYHPLMLPTNFQHLNLVPHWLAGEGDESFCDAVCPQGRICDDGLAPKTIATREWDAVANYAYHLDAGKFADFLTRHCTGKLGVRHVLADVQQVVQGEDGDVTHLVTEQAGEIAGDLFVDCTGFKALLIGGAMGVPFRPLKDVLFCDTAMAVQVPHETPDAPIASHTVSTAQSAGWIWDIGLPTRRGTGHVYSSAHVDDETAERELRAYLGPVADGLSVRKIPIRAGHREVFWKRNVVAVGLAAGFLEPLEASAIVLIELSAKLIAEQMPARREVMDTIARRFNETTAYRWGRIVDFLKLHYVLTKRIDTDFWRDNVRVESIPDRLAHLLELWRWQSPWFNDEFDRVDEVFPAASYQYVLYGMGFRTEVEPVTLGTDARLAERARRENRVQTERLRAGLPRHRDLIDRIKAQGLSAI

SEQ ID NO: 86625 - protein, 391 aa, Xanthomonas alfalfae
  REGION 1..391: note = tr|A0A1S1XP10|A0A1S1XP10_9XANT Tryptophan halogenase (Fragment) OS=Xanthomonas alfalfae OX=366650; GN = BHL63_01990 PE=4 SV=1
LESQRRGMPGSFGDYCLETVASRVDRFALHGEPAVNYAYHLDAALYAKFLRARSEACGVKRVEGRIQQVTVQPHSGDVASLVLEDGHVIEGDLFIDCSGFRGLLIEQTLHTGYEDWSHWLPCDRAVAVQTEALGPPVPYTRAIAHEAGWRWHIPLQHRVGNGLVFSSKHLSDDEAHAKLLRDVAAPAVKEPWMVPFRTGRRLRAWNKNVVSLGLASGFIEPLESTSIHLTISAVVRLLALFPAEGIAPSQVQLFNDVSRAEMEHVRDFVTLHYHATQRDEPLWQQCRQMELPESLALRLRAWRERAHAWQGADELFRVDSWTHVLMGQGIAPEQHHPLTRAFSDHDLRRLLDGIAQPIQHAVQQMPSQQDFIERYCKAGEQVWGMRSPVPA

SEQ ID NO: 86626 - protein, 425 aa, Streptomyces scopuliridis
  REGION 1..425: note = tr|A0A2T7T5B1|A0A2T7T5B1_9ACTN Tryptophan halogenase; OS = Streptomyces scopuliridis RB72 OX=1440053 GN=Y717_35190; PE = 4 SV=1
MSSTLFGVPEEFDVIVIGGGPAGSTTAGLLAERGHRVLVLDRERFPRYHVGESLIPAFMRPMKELGLTERMDARGFERKYGGTLVWGNAQVPWNFSFIEGTTHEYAYHTRRADMDSLILDRARELGAFIIEEATVKEPIETEGRVTGVRFTLRGTDGMHEARAKLVIDASGQARLLSRKYADVTWHEELRNVAVWTYFDNCERLPGDEYTNILIEGLDEGWFWAIPIDKGTISVGYVTRSEEANKDGKSLEDLFKDEMAKSTKLKKMLEGANQSAGWRTARDWSYTSQSFTGNGWVCVGDSAAFVDPLFSTGVALATLAGSTLSKIVDKIIQHPEIEEQALKRYVTAYRGFFDEIRTFVERFYDRTKYKEFYHSLAQEMVDPDRERTPSANFVQLISGLSGKHPMLTLTIDDLIDEGAEPAAEQS

SEQ ID NO: 86627 - protein, 491 aa, unidentified
  source 1..491: note = Sphingomonas bacterium
  REGION 1..491: note = tr|A0A3D0WAV5|A0A3D0WAV5_9SPHN Tryptophan halogenase (Fragment) OS=Sphingomonas bacterium OX=1895847; GN = DEP91_02885 PE=4 SV=1
VIVGGGTAGWMSAAYLARRLSHLPIAITVVDSVEIGTVGVGEATVPAIRDFLAAVELGEPDVLAATEGTIKYGIRFAGWGGEGYGFFHPFGLYGVPANGVAFHHYWLKLKAAGHDLPLGDYCLATQLAERGLFLPPSSQPGSDLGVFNFALHFDATKFAHLLRRLSLANGVGHVDGRIVDVTRGEAGVRSVRLADGRMIEGDLWIDCSGFRSLLLGEAMGVPYVDWRHWLPCDRAIAIPCRSAGVHRPFTTATAHDAGWRWHIPLQHRVGNGIVYSSAHLSDEAAEGRLRATLEGEPIAEPNRLRFVTGHRAEFWAGNVVGVGLSAGFLEPLESTSIVLIQSALERFVALFPDRGGDPRLAATYNRQSVLEFERIRDFILLHYWANRRTGEPFWDALRSLDLPGSLAERVEAWRAGGVFVRREWDTFQDPSWLSMYAGFDDLPVRASPIADQLGEDELLPAFARMREAIDRAARTAEPHADFLARQGRRAA

SEQ ID NO: 86628 - protein, 498 aa, unidentified
  source 1..498: note = Sphingomonas endophytica
  REGION 1..498: note = tr|A0A147I7F1|A0A147I7F1_9SPHN Tryptophan halogenase; OS = Sphingomonas endophytica OX=869719 GN=NS334_04485 PE=4; SV = 1
MTPPRVVILGGGSAGWITAHLMRHAWPDAAITLVEAPDIATIGVGEGSTPTLKRFFEVIGIAEAEWMPRCHATYKAGIRFDGWSPAAPWPSYRHPFITQVDVHTREAFVLNCRNRRLGHDVPVHPDAFLLGARLSAEGKAPIAPPHFPFRMEYGYHFDAALLGAFLRDVAVARGVVHRAARVEQVTRHANGDVAALVTDAGEAIAAELFVDCSGFAGRLIEQVLDVPFHGFGDHLFNDAAVVAPTPPVAAPATETVATALSNGWCWSIPLQHRVGNGYVYASAFQSAEAAETELRARLGLVDADEVRHLRFRVGRRARHWERNVVAVGLSQGFIEPLEATALHLVLNTVEQFIGHYARGKGTAKDRGAFNETINARIEGVRDYIVAHYKLTTRTDSDYWRANAANVALPDPLLDILDTWFRRGDLAEALRRQGNASHFGELSWHCLLAGYGAFPPVSEAPRDDVDFHAQRDVAAFLAGCALNYPAQREVLAAQSARPA

SEQ ID NO: 86629 - protein, 507 aa, Sinorhizobium sp.
  REGION 1..507: note = tr|A0A2A6P0N3|A0A2A6P0N3_9RHIZ Uncharacterized protein OS=Sinorhizobium sp. BJ1 OX=2035455 GN=CO676_28060; PE = 4 SV=1
MMLDLTNARRIGIIGGGTVGWLAAIALRRIFDVDVDVTVVEAPTVFPLGPGEGGSLNLTDTLCRNGIDVDVFIGEADATHKLGVLYENWRGGGISDHYYRMFGGSGIPEIECRVEGFFPLLSARIAAGENLHTYIPGFELIRRGASQNEIDELLATGESGLYPSYHFNDAEFERCLRRVGLARGITSRATVVHGMRLDDRGHVSALQLGGEELEVDFAVDASGFARVGLGTVFNMHWCSFANVLPTDHAIIFELEPREPPLQCVTRATAMKAGWMWEAPLNRSIRAGYVFSSRHADAAMALAELEHQYGYRVEAKHELSPAQGYFSTAWINNFVALGTASGFVEPLEAAPAAHTFEQLRNLECVLANGSGIVPAQAIEAYNSANARCWTGVRDFLRLHYDCKGIDTPFWRDLAGAELPEGYADLRACFQKRTPRFIDIQPYVASGWQSLFQQIDWISVAAPLGVVPPAAACAELRRLSAESQTEVQAYVDRLKGTITKISSTRGWMH

SEQ ID NO: 86630 - protein, 503 aa, Porphyrobacter sp.
  REGION 1..503: note = tr|A0A1D7NNM8|A0A1D7NNM8_9SPHN Tryptophan halogenase; OS = Porphyrobacter sp. LM 6 OX=1896196 GN=BG023_112350 PE=4; SV = 1
MAIQRIVIVGGGTAGWMAGAALSRLKTGRPVEIILIESEAIGTVGVGEATIPPFIGFNQLLGINEREMLAEVGGTFKLGIQFENWGKIGDSYIHPFGAYGYTMGGISFHHIWHAMARAGDKRPIQVFNVETMAAYFGKFARTEDYKGADLPPVNYAYHLDAGRYAAYLRRYAETRGVVRHEGKVQDVALDGESGFVTGVTLDDGREFSGDLFIDCSGFRGLLIEQALKTGYDDWSNYLPCNRAVALPCQREDGSPPPPFTRATAHRAGWQWQVPLQHRNGNGHVYCSSFMEDQEALDILLGNIAGKPQAEPNFLRFVTGRRKKFWNKNVVALGLAAGFMEPLESTSIHLINTGIDKLVSLLSLDGITQAQEDAFNRLTGREYARIRDFLILHYNATQRTDSDFWNYVRTMEVPVTLTEKIEIFKANGQIFREEDELFTETSWAAVMMGQGIHMDGHNPMADTLEPGKTRQEIDEMEKSIRFMVQNMPGHGDYLKHYCPAPMAA

SEQ ID NO: 86631 - protein, 500 aa, Henriciella sp.
  REGION 1..500: note = tr|A0A399RQR2|A0A399RQR2_9RHOB Tryptophan 7-halogenase OS=Henriciella sp. JN25 OX=2305466; GN = D1223_02240 PE=4 SV=1
MSDTQTNLVKRVVIAGGGTAGWIAAAGLSHHLGPALEITLIESDTIGTVGVGEATIPTQRTFHAHLGLREADFMKATGATFKLGIEFEGWLKPGHRYIHSFGTLGRHTWVAPFHHLWLHAKSRGFGGSLDDYCLELKAARADKFYTAPDKSVLNYAYHLDATAYARFLRAFSEQKGVRRVEGLIEHVEQSSETGFIEALKLQSGERIEGDLFIDCTGFRGLLIEQALKTGFDDWSDWLPMNAAVAAQSEATGPAIPYTRAIAHEGGWRWRIPLQHRVGNGIVFDSNYLDPDEAEKKLRDAIDGPLRTDPRLIRFRTGRRKRAWNKNCVALGLSGGFLEPLESTSIHLIQRGVADLVALFPYHGVTEDLANLFSRKMNRELEQVRDFLILHYKLTEREDSDFWRGRKAMDIPDTLAERIALFRESAYAYHNCDELFLTDSWVQVMMGQGLYPTGWHAVGHMFPDDKLKGALDGQRAQIERAVQQLPAHEDFVRQYCPVTPA

SEQ ID NO: 86632 - protein, 502 aa, Henriciella sp.
  REGION 1..502: note = tr|A0A399RT81|A0A399RT81_9RHOB Tryptophan 7-halogenase OS=Henriciella sp. JN25 OX=2305466; GN = D1223_04320 PE=4 SV=1
MKSGPVQKVVIAGGGSAGWMTAAALANATQGSCEITLVESEEIGTIGVGEATIPPVKYFNARLGIDEATFLRETSGTFKLGIEFINWTRDGHAYFHPFGQYGAEFDEVPFYQYLIRELIAGRESSVDGYSMAWAAAKAGRFEHPARDRRLIQSTFDYAYHFDATLYARFLRRYAEQRGVTRVEGRMVDAMQDGETGFVRSVTLEDGRAFNGDLFIDCTGFFGLLIEKTMKTGFEDWSHWLPCNRAVAVACKADEPLLPYTKSTAKTAGWQWRIPLQHRVGNGYVFCDDYLSPQDAESELLASLEGEPFAEPRHLRFQTGRRKKFWNGNVVAIGLSAGFMEPLESTSLHLIQYGIMRLLAMFPGRDMSPLLAEEYNALTAAEYERIRDFLILHYKATERRSDGFWRHCSEMDVPERLAYKIDHFRSHGMIVSDERELFTNPSWIAVYLGQGVVPERAPALSGMRAAVPVAERLGQVRSAMKEAVAAMPDHRAFIERYCKSALQ

SEQ ID NO: 86633 - protein, 515 aa, unidentified
  source 1..515: note = Burkholderiales bacterium
  REGION 1..515: note = tr|A0A257H7H4|A0A257H7H4_9BURK Tryptophan halogenase; OS = Burkholderiales bacterium PBB4 OX=2015566; GN = CFE44_01285 PE=4 SV=1
MTKTVRHVVVLGGGSAGWLTAGLLAAELGGPEPDAVKISLIESPDTPAIGVGEGTWPSMRDTLKRIGVGEADLVRECDAAFKQGSRFDGWVHGGSQDRYYHPFSLPQGYGDVDLVGGWMQGGAQEPFAQCVSPQVQLCDAHLAPKQVTTPEFAAIANYGYHFDAVKMGHFLRKHAVAKLGVQHIQDEVTEVCAHDNGDIAALRTRGQGDIAGDLFIDCSGLASLLLGQHFGVALQSQQKVLFNDSALAVQVPYAHSQAPLASATIATAHAEGWTWDIGLPTRRGVGLVYSSAHTSTEAATRALFAHLERSGGPSDLPAPRQIRFTPGFRERFWHRNCVAVGLSSGFIEPLEASALAMVELSAAMIRDEMPANRADMDIVARRFNDAFSYRWARIIDFLKLHYVLSQRSDSDYWREHRSAQSLPDRLGELLQLWKHRAPYRNDLHRIEEVFPAASYQYVLYGMGFRPAIPALRPGPLEQAQVAFQKAATLSKRFMGGLPRHRDLIQHIHAHGMPAA

SEQ ID NO: 86634 - protein, 521 aa, Xanthomonas arboricola; identical to SEQ ID NO: 86498
  REGION 1..521: note = tr|A0A3S0A249|A0A3S0A249_9XANT Tryptophan 7-halogenase OS=Xanthomonas arboricola pv. pruni OX=69929; GN = EJL05_01275 PE=4 SV=1

SEQ ID NO: 86635 - protein, 507 aa, Inhella sp.
  REGION 1..507: note = tr|A0A437LE48|A0A437LE48_9BURK Tryptophan 7-halogenase OS=Inhella sp. CCP-18 OX=2499851; GN = EOD73_14085 PE=4 SV=1
MNTTPRTFHRVVIAGGGTAGWMMAALMSKLLGKRLDIRLVESEEIGTVGVGEATIPALLTFHNLLGINEAEFMAATNATFKLGIHFEGWKAIGENYFHSFGSTGNDHWSAGFQHFWLKGREWGLSRNYTDYNPETVAAFANRFAHVQRGALNYAYHLDASRYAKFLRGMSEAHGVQRIEGKIARVLQHEVDAGAARAGDIAALQMEDGSRVEGDLFIDCTGFRSLLLGETLGVGYEDWSYWLPCDRAVAVQTASVREAWPYTRSIAHRFGWQWRIPLQHRVGNGLVYSSKELSDADAPEVLRQNVEGELLTQPRVIRFLPGQRHKVWERNCVAVGLAGGFVEPLESTSIHLIQRHAIRLMQLFPAGGISQADVDEFNLQSKRDLEHIRDFIVLHYHVNARNDSALWKHVREMDLLPSLRHRIELFQQTGRVFRPSDELFAENSWIQVMMGQGITPERHHPVADLMGREELQKFLGDIELRARRLVDSLPGHQDYVAQLCAPFRAQGA

SEQ ID NO: 86636 - protein, 454 aa, Amycolatopsis sp.
  REGION 1..454: note = tr|A0A429D6R5|A0A429D6R5_9PSEU Tryptophan halogenase; OS = Amycolatopsis sp. WAC 04169 OX=2203197 GN=DMC61_11240; PE = 4 SV=1
MDDYDVIVVGGGPGGSTVAGLTAAEGHRVLLLDKDRFPRYQIGESLLPATIHGICAVLGVRDEIERAGFVRKRGGTFKWGSGAEPWTFSFAASDRMAGPTSYAYQVERTRFDALLLDGARRLGAEIRQGHRALGTLRAGERIGGVRYLDDTGHERHATARFVVDASGHGSRLHHDVGGIREYSPHFRNLALFGYFEGGRRMPAPDAGNILCVSFPDGWFWYIPLSDTLTSVGAVVKQESADRVQGDPDASYAALIEDCPLVKDFLRDARRATEPPYDRLRVRKDYSYDRTVLWAPGMVLVGDAACFIDPVFSSGVHLATYSALLAARSINSTLAGFADEKRCFAEFEARYRREFALFRDFLITFYRLDSGEDDYFRHARRLTGHHGTADEAFAELVGGVSSQDFSRAMFGDVLAEGVQLQLRGLLGEAAGDEPPMFPGGLVPTADGRRWRVPDA

SEQ ID NO: 86637 - protein, 516 aa, Xenorhabdus beddingii
  REGION 1..516: note = tr|A0A1Y2SQ14|A0A1Y2SQ14_9GAMM Tryptophan halogenase; OS = Xenorhabdus beddingii OX=40578 GN=Xbed_01551 PE=4 SV=1
MVKSVLIVGGGMAGWMTAAYLAKAFAQNVKITVVESKKIKKIGVGEATFSTIRHYFDYLGLDETEWLTECAGSYKLGIRFENWDGKDQHFYHPFERWKVVKGFPISEWWLRKDIKDQNFDYATFLTPHLCEAKRSPRRLDGSLFVQSSDGGLGQSTLAEQRDQFPYAYHFDADNVASFLQRYAINRGVDHIEGDVAHIEIDKYDGSIGFLEIKEHGKLNADLYIDCTGFKGLLINQTLNEPFISFSDVLKNNRAVALRVPREDISDIDPYTTARTMSNGWRWTVPLYKRNGYGYVYCDKYQSPEEAEAELRKSIPYENSDCVANHIPMRIGRSHRSWVKNCVAIGLSSAFFEPLESTGIFFIQHGIEQLVRFFPGSNNNERLIEEYNTRVNHAVDGIKEFLLLHFSLAQRNDTVYWKEWKKVKLPKALVKKIMLSKNHLLDKETIYPFYHGFEEYSWNTMILGLCSETIMSRPALSLIPPDEADEILLQHYTKAENMINSLPTCHEYLRHLHNSKK

SEQ ID NO: 86638 - protein, 550 aa, Sphingomonas sp.
  REGION 1..550: note = tr|A0A2T5GXZ2|A0A2T5GXZ2_9SPHN Tryptophan halogenase; OS = Sphingomonas sp. PP-CE-3G-477 OX=2135660 GN=C8J45_10321; PE = 4 SV=1
MALLHPTEQAGMRKQGNRQQTMANETLAGEDPAITQIVIVGGGTAGWLAACLIAARADRDTARPLTVTLVESPEVATIGVGEGTWPTMRRTLERIGITETDFLLACDAAFKQGSRFDGWRTGAVDDSYLHPFTAPVDGDPRDLVSAWLEYGGRFADMVGAQGAICHHDLAPRQRAMPDYAGTLNYAYHLDAGKLASLLTRHATERLGVRHVRDHVVGIDGTEDGDIAAVRTRASGAIAGDLFLDCTGHAALLIGDHYGIATIDRGRELFNDRALAVQVPVAAGSPIASQTNATAHAAGWIWDIGLPTRRGIGCVYSSAHLSDDAAADTLTRHIRATAPDAPLPTFRQLKFQSRHRAKFWDRNCVAVGLSAGFLEPLEASAIVLIELSLDALLDNFPSHRGVMDIHAARFNALFRYRWDRIVEFLKLHYVLSERDGPYWRDHRDAASIPPRLVELLALWRHQPPSRADFPMIDEIFPAASYQYVLYGMGFPVPTRGAIATADRSRTEALLAQVDQRRRMLAAGLPTNRAYLDALRHATAPAMELPAMEPIA

SEQ ID NO: 86639 - protein, 542 aa, Hapalosiphon sp.
  REGION 1..542: note = tr|A0A0M0SQV0|A0A0M0SQV0_9CYAN Tryptophan halogenase; OS = Hapalosiphon sp. MRB220 OX=1704290 GN=AMR41_08565 PE=4; SV = 1
MLTQNTTNVVIVGGGTAGWMTASYLSKALQRNISITLIESSNITKIGVGEATFSSIKSFFDFLGLQEHEWMPKCNATYKMAIKFVNWNTNKKHFFHPFERLDIVDGFSISEWWMKLKKHSEPFDYSCFAAPTLCDSQRSPRYLNGEVFDSRVKQLFSDEHFSEKRLITLADAEGQYPYAYHFDANLIAKFLKDYAMQRGVKQIVDDVIDVKLTTEGSIDCVHTKGNRRISGDLFVDCTGFRGLLINKALGEPFISFSESLLCDSAIAMQVPTNIKKDGINPYTKATALSSGWVWEIPLYGRNGAGYVYSSAFISKEDAEQEFRQHLGPVCQHQQASHIKMRIGRNRNSWVKNCVAIGLSSGFVEPLESTGIFFIQHGIEELVSHFPSNSLNEELIKSYNQAIAKCIDGVRDFLILHYHASDRTDTPFWKATKHDIQLPDELSQRFKLWKKRLPNKKNINPYFHGFETYSYSVMMLGLNHVPENSLPIMEYMDDHKATVQFRAIKEKTEFLNSTLPSQYEYLTYVMKSQEQSEYLNENLLDAV

SEQ ID NO: 86640 - protein, 497 aa, Sphingomonas sp.
  REGION 1..497: note = tr|A0A2T5GZB2|A0A2T5GZB2_9SPHN Tryptophan halogenase; OS = Sphingomonas sp. PP-CE-3G-477 OX=2135660 GN=C8J45_10227; PE = 4 SV=1
MTDPIRKVVIVGGGTAGWMAAAAAARFLDDGQRQVVLVESDAIGTVGVGEATIPPILGFNQLIGVDERDFVRATGATFKLGIEFVGWDTGADRYMHAFGGHGRDIQGLAFHQLWLKLRDRPGIGGLDAYSPSAVAARLGRFGQPSGTAPLAYAYHFDASLYAAFLRRHAEAGGVTRIEGRIIGADRDPENGHVRAVRLEDGTAVDGDLFIDCSGFRSLLLGETMGVEFEDWSHWLPCDRAIAVPTEPTTPVLPYTRATARPAGWQWRIPLQHRTGNGHVYASTHMSDDEATALLLANLDSAPTADPRQLRFKAGRRAKMWEGNVVALGLAGGFLEPLESTSIHLIQTGISKLFALFPDRGFSAVERDEYNRLMGDAYTSIRDFIILHYHATRRDDSAFWQHVRTMPVPDSLTRKLALFREKGRIFRYDDELFGIPSWVQVLLGQNVIPVGYDPVVDALDADRVADALRQTRAATLRAAEALPSHADFVARYAAFVGV

SEQ ID NO: 86641 - protein, 492 aa, unidentified
  source 1..492: note = Salinimonas sediminis
  REGION 1..492: note = tr|A0A346NRG3|A0A346NRG3_9ALTE Tryptophan 7-halogenase OS=Salinimonas sediminis OX=2303538; GN = D0Y50_18250 PE=4 SV=1
MQQSHIPHIVIAGGGTAGWMAAAALTRVLGKQVKVTLVESSQIGTVGVGEATIPTLVFFHKLLKVSEQEFMAATHATFKLGINFEHWKNTDHSYLHAFGVTGKDCWAAGFQHFWLRGLAEGLSTDFGDYCLERQAAAAGRFAHLPNNGLNYAYHIDAARYAQFLRELAEREGLTRIDAKIQQVNLRDHDGHISSLTLDNGQTVEGDFFIDCTGFQGLLIEQAMHTGYEDWSHWLPCDSAVAVQTEASGAPLPYTRCIAHEAGWQWRIPLQHRVGNGMVFCSHYASDSQIKEKLLNNIEGAPLNEPKIIHFRTGRRRKQWNRNCLALGLASGFLEPLESTSIHLIQQGIVRFLRMFPTNGEVIEQDIAEFNRQADFDIEHIRDFIILHYHVTERNDTAFWRHCAQMDVPESLRHRIDLFRRTGRVFREGNELFDDSWQQVMIGQGLMPQRYHPLVDTMSKAELETLLTQTKQHIKRTVDKLPAHQQYLKQYCG

SEQ ID NO: 86642 - protein, 490 aa, Sphingomonas sp.
  REGION 1..490: note = tr|A0A2T5GZB8|A0A2T5GZB8_9SPHN Tryptophan halogenase; OS = Sphingomonas sp. PP-CE-3G-477 OX=2135660 GN=C8J45_10228; PE = 4 SV=1
MTERTPVRSIAVLGAGIVGLSAAIAFARALPGLAITLIKTPADPAALADRMPSTLPSIAAFHDRIGLGERDLLAAGTLHHIGTRLSDWRSDGGRVVLARGDRGGPIGTGAFHQHWLNARRAGKVAAFDAFSPAAALAAADRFVHPADDSASPLSGLAYALRLDPPRYRDLLRALARHLGLAPVPGAFAGVERRADGGVEALMLADGRRIVADLYLDCAGPAAPLRSAIDTRWEDWGRYLPVDRLLLGTGPTRAPSPTDDLIAVPAGWRFEKPLRDRTLVGLAYAAAQTPDSSARRILPAGEEVVDIAPGVRPEPWLHNVLALGDATVTLDPLADANLHLAQAGILRAIDLLPGRDCAAGELAEYNARAYRQASRIRDFQAAHYHAATRTGGDFWKHVRRLPRPDSLDHTLDQFAHRGRLPFYEDESFEPDEWRGLLLSLGMIPRTPDPIASTTPLETVRTALTRIAEANAALPSRLPPYPAYLAQLERRR

SEQ ID NO: 86643 - protein, 505 aa, unidentified
  source 1..505: note = Unknown
  REGION 1..505: note = tr|A0A2A4X335|A0A2A4X335_9GAMM Tryptophan halogenase; OS = SAR86 cluster bacterium OX=2030880 GN=COB20_09165 PE=4; SV = 1
MDNNNIRHIVIVGGGTSGWMSAAALSRIIGTRDCKITLVESDQIGTVGVGEATIPPIVEFNNLLGINADEMLRATQGTFKLGIEFINWGRIGDSYMHPFGVFGRTIMNVSFWHYWKKAYDLGLSPSLDAYSLNWLAAKQNRFLRSGNVPNSPLSKVPHAYHFDASLYARFLRKFSTNLGVNRVEGLVKQVIQNPESGFITGIKLQDGKFIDGDFFLDCTGFRGLLIEKCLQTGYEDWTHYLPCNSAQAVPSKAISPKRPYTKSIAHPIGWQWQIPLQHRTGNGIVYSTEFASDEQAQQALLANLPSTALAEPRPLRFVTGKRKKSWNKNCLAVGLSSGFMEPLESTSIHLIQSTIMRFLSLFPRRTNFDTEMDRFNKSADLELYTVRDFLILHYKATERDDSELWNYCRNMAIPDSLQEKLELYQSGSWIERDNKELFGVDSWLSVFNGQHIRAESYSPLVDSLPKDKLESILRETREVIAQCAAAMPPHEDFIRKHCADPILHQ

SEQ ID NO: 86644 - protein, 504 aa, Sphingomonas sp.
  REGION 1..504: note = tr|A0A0Q4Q3R0|A0A0Q4Q3R0_9SPHN Tryptophan halogenase; OS = Sphingomonas sp. Leaf67 OX=1736230 GN=ASE90_02515 PE=4; SV = 1
MSAPLLRRIVIVGGGSAGWMTAAALSSLLDPKDVAITLVESDAIGTVGVGEATIPDILAFNQMLGVDEAEFMAATQATFKLGIEFVDWGTRGDRYVHPFGQHGVDMQGIDFHQYWLRAREHGAPQPIEEYSLCAVAARAGRFALPDPNPRSVLSQIRYAYHFDATLYARFLRRYAEKRGVVRIEGIVGAVGQGADGAITRLTLADGRVVAGDFFFDCTGFRALLAGEALGSGFVDWSHWLPCDTALAVPSEHAGPPTPYTRATARDAGWQWRIPTQRRVGNGHIFASAFTTEEAASATLLAGLDAPALADPRRIRFRAGCRETFWSGNCIAIGLAAGFLEPLESTSIYLIQEGISRFISLFPRGDIPEILRTEYNRHMRTEFEQVRDFIILHYAATTRDDTPFWNHCRTMRLPDTLLHKIELFRETGRVFRYNDELFTRPSWVAVMLGQGIVPTSSDPIVATLPERDVARSLASMRDAMAAAVARMPTHGDFLARYCPAPAMAA

SEQ ID NO: 86645 - protein, 496 aa, Colwellia sp.
  REGION 1..496: note = tr|A0A2N1I7B8|A0A2N1I7B8_9GAMM Tryptophan halogenase; OS = Colwellia sp. 12G3 OX=2058299 GN=CXF71_14925 PE=4 SV=1
MNNKAIKRVVIAGGGTAGWMTAAALSKLFGKNLNVVLVESDDIPTVGVGEATIPTLHIFHRLLGINEQEFMAATNATFKLGISFENWRDVNKDYIHSFGFLGQNCWAADFQHFWLKGKQRGIVSDIGDYVPEHLGAREGKFAVEADQASNHAYHLDAGLYAEFLQKIAEKHGLKRIEGRIDKVVLDEDSGFISSLELGNGKVVEGDLFIDCTGFRGLLIEQALNTGYEDWSHILPCDSAIAVQTKTVTKPVPYTRSIARDAGWQWKIPLQNRTGNGFVFCSKYMSNEEATQTLLANIEGELLNEPRVIKYKTGTRRKHWNKNCIAIGLSSGFIEPLESTGIHLFQKAIIRLMQMFPSQGIKQAEVDEFNRQSKDEVNSIKDFIILHYNLTDRKDTEFWRYCSNMDIPETLKHRMSLFKESANVFKKEEELFGETSWVQVMMGQGLMPEQYHPIVDLMGDNELQSFLDNIKSTVKRKVDNWPDHLDFIKQYCKATAK

SEQ ID NO: 86646 - protein, 503 aa, Cellvibrio sp.
  REGION 1..503: note = tr|A0A2T6FFW9|A0A2T6FFW9_9GAMM Tryptophan halogenase; OS = Cellvibrio sp. 79 OX=1954207 GN=B0W54_11695 PE=4 SV=1
MSDNRIKSIAIVGGGTSGWMTAAALAKVLKNNYCDITLIESDEIGTVGVGEATIPQIQLYNQLLELDENEFIRKTQGTFKLGIQFVNWTRLGDKYIHAFGEVGKDMDSIHFYHYWLKMSQLGEVEELGNYTLSGVASDKGKFMRSVDAGNSPLSNIAYAFHFDAGLYARYLREYAETRGVIRKEGKVRNAILHPDTGFIESLQMESGEKIAADFFIDCSGFRGLLIEQALHTGYEDWSHWLPCDRAWAVPCESVGDPIPYTRSTAHSAGWQWRIPLQHRIGNGHVFSSQFMDENQACSILMSNLDGKALAEPRLLKFLTGKRKKIWNKNCLAIGLSSGFMEPLESTSIHLIQSSIARLMSFFPNKYFDQEDIDEFNRQADFEVEKIRDFLILHYHATERNDSEFWNYCRTMPIPDALTQKIEQFKKNGRIYRNSSEMFNDLSWLEVMHGQGIKPRAYHPLVDRMSKEDIAKRLDGIKRVIDKSVDYMPTHAQFIADNCKAEKM

SEQ ID NO: 86647 - protein, 508 aa, Cellvibrio sp.
  REGION 1..508: note = tr|A0A2T6FHR1|A0A2T6FHR1_9GAMM Tryptophan halogenase; OS = Cellvibrio sp. 79 OX=1954207 GN=B0W54_15950 PE=4 SV=1
MKIKRIAIVGGGNAGWISANHLGLELSRDPEIEITLIESKDIPVIGVGEGTIPIIRDSLQSFGISEGDILTQCDATFKTGIKFSNWMAENTQRENNFYYHVFDSPYPGGYDATHYWLGNKAIADFSKLSTSYWISEKNRCPKRNDSPAYKGFVNYAYHFDAAKFATLLANNAKRKFGIKHIFETVEQVTMHADGSIKGLQYESGKYEEFDFYIDCSGFSALLLGEILAVPFVDKGAQVPTDSALVLQVPTEQNEQIFPYTKSVAHGAGWIWDIPLTTRRGTGFVYSSQHMTDDEAIGVFSKYHGKNLESSSVRKIPMKAGFRERFWEKNCVALGLAQGFVEPLEATSLFVTDFCAAMVAKKFPVNTEEIPIYAKSGNEIAQIIWARILDFIQLHYVISDRRDTQFWRDVTSNIATSDLLKERLELWKFSIPQRTDFASTFDFFNAENYLWVLYGMNYPTRAPVVNEQVGRIAEKIISGHIENASRFADSLISQRAWLTQLKEFAVKNK

SEQ ID NO: 86648 - protein, 606 aa, Fischerella thermalis
  REGION 1..606: note = tr|A0A2N6KLS5|A0A2N6KLS5_9CYAN Tryptophan halogenase; OS = Fischerella thermalis CCMEE 5268 OX=2019662; GN = CEN50_01770 PE=4 SV=1
MLMNNTQSQVYDVVIMGAGMAGICQARHLLLNIPNIKIALVDPRPEERADKDMKVGESTVEISTLMICKELGLYDYMIENHPPKFGLNFHWPKDPAKTENTDDYFHLWATRQPPLASVLINRPKFERDVLKMNKEMGVEFYNGRVVDVDLTSGDELNSVQVKVGDQQLELKTKHVIDAAGRKFIIGRKTDNLVFGPENLYGVNNGSAWMRVRNVDRTIFHSGYDPENATCSHYYATNHWMGHGHWVWMIPTDTESMELSIGLVHHHEVIPAQSVNTKEKFSAFLEANHNVVYQLLKSGEEVDFHYLPRLAHKSKQMYSRDNWYVIGDAAAMFDPFYSMGMTMMSFQIENVTEIIRAKFAGEADVERKRVVYNNFAVNMIARNNHLVSHHEKQLGNASIMSWRIFLENMWWFGVLIPMYIGKWHLDLPFLHKFGKQGRGAVVAETLEEAYKLFDKLLEKKQNLGFMYTHRTDELPFGYSITKDVSKYIGLSKYEPKHCNIYAEMRNTYFFVALWYLKLLWKGFGLSGLLAPKNVKRVLTLLKISAQSYVDELIFDYQTRNIPTNSAVAKQREEFKNYQPRTELQPWQNLATVDANDTKLPELVKVGS

SEQ ID NO: 86649 - protein, 202 aa, Pseudoalteromonas tunicata
  REGION 1..202: note = tr|A4CBM5|A4CBM5_9GAMM Tryptophan halogenase, putative OS=Pseudoalteromonas tunicata D2 OX=87626; GN = PTD2_18110 PE=4 SV=1
MVGEVIGEPHIIPFVTGIRKQSWHNNCLALGLAQGFLEPLESTAIHLVSKTLALFVRMFPDKQCNSIQMAEFNRRVRADYQEIRDFLVLHYCTTKRSDSAFWQDCQTMAIPESLQQKIDFFKVAGGLIPEVEALFQPTSWYAVFEGMQVRPAGFNPTLHALNSQKLAQSLAQGQAALARSVVKQPSHQAFLTDYCQAPKIES

SEQ ID NO: 86650 - protein, 376 aa, unidentified
  source 1..376: note = Myxococcaceae bacterium
  REGION 1..376: note = tr|A0A4Q6A402|A0A4Q6A402_9DELT Tryptophan halogenase; OS = Myxococcaceae bacterium OX=2484252 GN=EOO71_02150 PE=4; SV = 1
MSDAHCDVAILGGGPAGAGVALALRTQTRRSVTLVERASDDTPRIGETLPPDARLPLAKLGVWSGFLRDGHLASRGTASAWGSATVGYHDTLMSPLGSAWHLDRARFDASLRAQVAERGGTVRFGTTLTGCESLGVEGFRLHLSHPSEGPSTLRARFVVDATGWKAEFATSQGARRQVVDRGFALYGDFRLREGAAFSTHALVESRPEGWWYSALLPGGRVVVALIGDGESLRGVRPGTPGSWLSLLAHTTATRERLAVCDFTGEALRAVPATVGGLDRLHAEHWLAVGDAACTLDSLSSQGISTALGSALMAAEALEQHLQGHPEALGAYGARVRQGFVEHLRTRDHFYREERRWPDAPFWRNRREALASSALAA

SEQ ID NO: 86651 - protein, 504 aa, Erythrobacter sp.
  REGION 1..504: note = tr|A0A547PCN6|A0A547PCN6_9SPHN Tryptophan 7-halogenase OS=Erythrobacter sp. JBTF-M21 OX=2584124; GN = FGU71_08005 PE=4 SV=1
MAIQNIIIVGGGTAGWMAAAALSRLKQNRELGITLIESEQIGTVGVGEATIPPFVEFNELLEIDEREMLASVQGSFKLGIQFENWGKIGDSYIHPFGAYGYAMGGISFHHIWHRLANSGDNRPIQVFNVETMAAHFGKFARSEDYQKTRDDLPPVNYAYHLDAGQYAMFLRKYAEQRGVVRKEGKICDVQLDSESGFVTSVKLEEGGVIEGDLFIDCSGFRGLLIEEALETGYEDWSHWLPCNRAVALPCKRDDGSPPPPFTRATAHKAGWQWQVPLQHRNGNGHVYCSDFMEDQEALDILTGNIRGKPQAEPNFLRFKTGYRKKFWNKNVVALGLSAGFMEPLESTSIHLVNTGINKLISMLSLDGITQTQQDAFNRLTLREYSRIRDFLILHYNATSRDDTDFWNYVRTMDVPDSLTEKIELFKANGQIFREEDELFTETSWAAVMMGQGIAMQGHNAMADAIDHARTRKEIDEMEQSIRYLVQHMPGHGDYLANYCPAKAA

SEQ ID NO: 86652 - protein, 503 aa, Sphingomonas sp.
  REGION 1..503: note = tr|A0A430DDS1|A0A430DDS1_9SPHN Tryptophan halogenase; OS = Sphingomonas sp. S-NIH.Pt3_0716 OX=1920124; GN = BRX37_03320 PE=4 SV=1
MHVDFPTSDRVVKRVVVAGGGTAGWVTATALVRHLGPLIDITLVESDAIGTIGVGESTVPTFRGFHQLMKIREDRFMAEAQATVKLGIEFKNWGQVGDRYIHPFGTIGLQWSWMADFHHFWLHARAQGFGGELGEYCLEWVAGEANRMSLSSSVAPSYAYHIDAARYARFLRSLAEPAGVKRVEGKIRNVELAPESGHIAALVLESGTRIEGDLFIDCTGFRSLLLGEALGVGFEDWGQWIRTDRAVAVQSTSDGPAQPYTSAIAHEAGWRWRIPLQHRDGNGFVFASDFMSDDEAHARLLAEIEGEPIVDPWLVRFKTGTRTKAWHKNCVGLGLAGGFIEPLESTSIHLMMAAVTRLIEDFPFHGFDDALLDHFNRKSRLEFENIRDFIILHYHVTQRDDSPFWDHCRTMEIPDSLKERLALWQENGRAYQLGHELFRVDSWSSVLLGQGMHPRGYHHVAAMMPEPQLREELARMRKEIAGVVAEMPSHREFLRRYCPAELV

SEQ ID NO: 86653 - protein, 520 aa, Pseudoalteromonas tunicata
  REGION 1..520: note = tr|A4CBD8|A4CBD8_9GAMM Putative tryptophan halogenase OS=Pseudoalteromonas tunicata D2 OX=87626; GN = PTD2_17675 PE=4 SV=1
MSHRVNQVVIIGGGTAGWLTAAVLSSQLQSTNKEAVQVTLVESPNIPILGVGEGTWPNLRATLKQIGVSEAEFMKGCDATFKQGALFCNWMKSVNEQTHQYYHPLNTVFHSSYEFSLAPYWLLGHSERSRYDHAVATQSLVCEAGLGPKEKTTPEYQAVQEYSYHLNANKFARFLTKHCTEKLGVKYIQANVLKANRDGDDYVTSVTTDSEQYDAICGDLFVDCSGTTPVLFEQTYHIPWVDISDVILNDTAIAMQVPYADPERDIASHTIMTAQDNGWIWDIGLYNRRGVGHVFSSKHTDIKTAEKQLRDYIGQEAEGLTARVIPLKLGYREKFWHKNCVAIGMSAGFVEPLEASAIYLYDAAAKMLADQFPRTRESMQYVEEKFNRSFNMRMIRTIDFIKLHYCISDRDDSAYWRDNCSNKTIPKALQQRLLHWKEHPPTKYDFDNAWEPFNLDSYLYVLYGMKYQTSLAHNQDGFIYSDKAKAKFRDVSMMADKLVTHLPKHRDLLKKVYQFGFTKI

SEQ ID NO: 86654 - protein, 520 aa, Erythrobacter sp.
  REGION 1..520: note = tr|A0A547PA23|A0A547PA23_9SPHN Tryptophan 7-halogenase OS=Erythrobacter sp. JBTF-M21 OX=2584124; GN = FGU71_03385 PE=4 SV=1
MQPGNDSDIAQIVIVGGGTAGWMAAAAFSRYFDNGRRTITLVESEQIGTVGVGEATIPPIANFNKMLDIAENDFLRATNGTFKLGIEFVNWGQQGDRYFHPFGGYGQDLHGIAFHQLYLREKALAQAGLAAGRETVGDIAGYSMSSMAARHGKFARVKPGSQSLAGQIGYAYHFDASLYAKFLRSLAEKQGTIRREGQISAVHRDSETGDVTSVELDNGEKIEGELFIDCSGFRGLLIEGALETGYDNWSHWLPVDRAIALPCANPATLDPYTRSTAHGAGWQWRIPLQHRTGNGHVYCSDYMEADEAETILRANIEGEPLGDARHLRFTTGMRSKAWNHNVVALGLASGFIEPLESTSIHLVQNGIARLFALFPDKKISPVERDEYNRGMHELYEDVRDFVILHYKATQRDDTEFWRYVRDMDVPETLAKKMELWKLHGRVFRENAELFTMPSWIAVMLGQNIWPDKYDPMADTLDDAKVAGAMKQMREAYRNTALQMPAQVDFLKQSNSWAAAQDMSG

SEQ ID NO: 86655 - protein, 496 aa, Sphingomonas sp.
  REGION 1..496: note = tr|A0A418WLA7|A0A418WLA7_9SPHN Tryptophan 7-halogenase OS=Sphingomonas sp. K2R01-6 OX=2320861; GN = D3876_11635 PE=4 SV=1
MAEQIVRRVVIAGGGTAGWIAAVALSKQLGTLLDITLVESDQIRTVGVGESTVPTAHTFHHLIGIDEQEFMRETGSSFKLGINFENWGEIGDRYIHSFGTLGKSTWMADFHHLWLHARGEGLAGELEDYCLELQAAEQGKFATSDQFKVNYAYHLDAGYYARYLRRLSEAAGVRRVEGKIASVEQHPQTGFIQSLLLESGERIEGDLFIDCTGFRGLLIEQTLKAGFEDWSHWLPNNSALPVQTRSVGPAMPYTSAIAHDAGWLWRIPLQHRVGTGLVYCSDYLSDDEALARLHQMIEGEILIEPWSIRFKAGRRLKVWEKNCIALGLASGFVEPLESTSIHMIMIAVTRLIQLFPFNGCDDALQRRYNDLSQNEIEKIRDFIILHYHLTERDDSPFWRQVRTMEIPDTLAQRLALFGENAHAYQITEELFRIDSWVQVMLGQRLRPAGHHQLGRLMRPEQLRQALLDLKTNIGKAVAGMPSHQDFLNRYCPAAMA

SEQ ID NO: 86656 - protein, 481 aa, Novosphingobium sp.; identical to SEQ ID NO: 82733
  REGION 1..481: note = tr|A0A257YMY6|A0A257YMY6_9SPHN Tryptophan halogenase; OS = Novosphingobium sp. 12-63-9 OX=1970403 GN=B7Z36_01545; PE = 4 SV=1

SEQ ID NO: 86657 - protein, 515 aa, unidentified
  source 1..515: note = Thalassotalea agarivorans
  REGION 1..515: note = tr|A0A1I0HV21|A0A1I0HV21_THASX Tryptophan halogenase; OS = Thalassotalea agarivorans OX=349064; GN = SAMN05660429_02940 PE=4 SV=1
MSEKIRHIVIVGGGTAGWLTANHLAKQLQPSSNTDVTITLVESPNIPTVGVGEGTVPMMRQSLQYLGISETDFLQQCDATFKQGIKFVNWEHNPADKGEHSYHHIFDYPAPADIDSTLYWLNSNTHQSFVDAVSIQGRVCDNNLAPKLITTPEYQGAVSYAYHLDAAKFAKLLTKHATDMGVKHVKATVEQVETAPLGDISAIITKELGAISGDFFVDCTGFQSLLLGKTLDVSFIDQSDVLFADRALAVQVPYVAPSDEIPSYTIASAQDAGWIWDIGLTTRRGTGYVFSSKYCSDEQAKYTLAQYLGDDALVEGARFIDMNIGYREKFWFKNCAAIGLSQGFVEPLEATGLLVFDATARMLAEQFPTFKEQMPLMADCFNERVKASWLHVIDFIKLHYCISKRDDTPFWRDNRSLASIPLSLQQKLERWALQPPHAYDFENKFSVFNKENYLYVLYGMHFDTDATHLAYKAGQEEHAKAYFQQLEQHCQTALDRLPKHRELLEKIKRFGLQKV

SEQ ID NO: 86658 - protein, 495 aa, Cellvibrio sp.
  REGION 1..495: note = tr|A0A2T6FFC4|A0A2T6FFC4_9GAMM Tryptophan halogenase; OS = Cellvibrio sp. 79 OX=1954207 GN=B0W54_20230 PE=4 SV=1
MTAPIKKIVIAGGGTAGWMAAATISHHLGSVLDIRLIESEEIGTVGVGEATVPPMQTFHKLLNIDEQDFLRATQGTFKLGINFENWGQKGDQYIHSFGVTGKELWMADFIHFWLKAKGMGLENDYGDFCFELQAARLGKFAITENPRTNYAYHFNASLYAKFLRKYSEARGVKRTEGKIVGVATHSDDGFIKSVTLESGEVVEGDLFIDCTGFRGLLIEQTLHTGYEDWSQWLLNDSAIAAQTKNPLPALPYTRAVAHQAGWQWHIPLQSRIGTGFVYCSKYISDDDARRTFFDNLPGKLINEPHVLKFKTGRRKRSWNKNCVALGLSSGFIEPLESTSIHLIMNGALRLVRFFPSNGIKESSVAEYNEQTRNEIERIRDFVILHYKATIRDDTPYWRYCRDMDIPDTLAHRIKLFREAGIAYKAEGEIFQLDSWSQVMIGQRIIPEDYHQYVDAMNHQDLCKYMQVFSADIKKRAMQLPSHEDFVRQYCAEDQA

SEQ ID NO: 86659 - protein, 499 aa, unidentified
  source 1..499: note = Thalassotalea agarivorans
  REGION 1..499: note = tr|A0A1I0E2X4|A0A1I0E2X4_THASX Tryptophan halogenase; OS = Thalassotalea agarivorans OX=349064; GN = SAMN05660429_01683 PE=4 SV=1
MSTDKRIRKIVIAGGGTAGWMAAAGLSKLMGKNGNLEVKLVESDDIPTVGVGEATIPTLHIFHRLLGINEQEFMAKTNATFKLGISFENWRDVKKDYIHSFGFLGKDSWAAGFQHFWLKGQQLGIAKPIGDYCTEHLASREGRFAVLPKQDLNHAFHLDAALYAKFLQEIATKHGVERVEGKIDKVNLDEETGYIQSLDLANGKHVEGDLFIDCTGFRGLLIEQALHTGFDDWSHLLPCDSAIAVQTTSNDKFPPYTRSIAHDAGWQWRIPLQNRTGNGLVFCSKYMTDQQAIDTLLANVEGELLNEPRVIKYKTGTRRKHWNKNCIAIGLSSGFIEPLESTSIHLFQRGIIRLMQLFPYDGINEADVDEFNQQTMTEIYNVRDFIILHYHLTERTDSAFWRYCKNMPIPETLKHRMDLFGKSGRVYKKADELFGENSWIQVMMGQGLMPERYHPIVDMMPEEDLKGFLQNVEMGVRKKVDSWPNHHDFIQHYCQANID

SEQ ID NO: 86660 - protein, 740 aa, Saccharophagus degradans
  REGION 1..740: note = tr|Q21LR3|Q21LR3_SACD2 Tryptophan halogenase; OS = Saccharophagus degradans (strain 2-40 / ATCC 43961 / DSM 17024) OX=203122 GN=Sde_1104 PE=4 SV=1
MHGVKKIVIAGGGTAGWMCAAALSKLLGKNLDITLVESDEIGTVGVGEATIPTLHIFHELLGINEREFMSATNATIKLGISFENWKDLKEDYLHSFGFLGTDCWAAQFHHFWLKANQLGMAQPIGDYCVEHLATRVGRFGVHPNQERNHAYHLDASLYAKFLKGIADKFGVKRREGKIVDVKVGAKDGNIQSLSLDSGEVIEGDLFIDCTGFRGLLIEDALHTGYDDWSHWLPCDRAIAVQTTAKKSPALYTRSIAHDAGWQWQIPLQSRMGNGMVFCSKYWTDEQALAVLKENLTGECLNEPRVIPFRTGTRRLHWNKNCVALGLASGFIEPLESTSIHLIQRSIVKLMLLFPKDEIKQADRDEFNRQTREELEHIRDFIVLHYRVTDRTDTPFWRHCKQMAIPDTLQHRLSLFDETGRLYKYDKDLFGEASWVQVMLGQGVSPKSYHPIVDLMGRDELNRFMSSNLTSVQQSVDAFPLYSDFLKKYCPYKDEGLDLRKKNTIESVKFSFNKESLPVITPMGLNSTPIVLLDSVTNDGGAALRQIAKTLDFEFDTNTMYPGVRAQLPREYVLGVLDKMDGAIRQTYKIPPTLKTNVVQASFSLLTQEEKSLTPFQKVPHFDSTNPYFFAILHYLSTGDHGGTGFFRHEPTNLESIDVETKALYMNAINQSAKSTGFGSEGYIKAANDEFDLYHQVDYRTDRLVSYPGSLLHSTVVKPELDIGWDVDTGRLTANIFIVYE

SEQ ID NO: 86661 - protein, 505 aa, Rhodanobacter sp.
  REGION 1..505: note = tr|A0A0Q9P2A5|A0A0Q9P2A5_9GAMM Tryptophan halogenase; OS = Rhodanobacter sp. Soil772 OX=1736406 GN=ASG75_13250; PE = 4 SV=1
MNDPRIRRIVIVGGGTAGWMAAALLAKALGAGVAIRLVESAEIGTVGVGEATIPQIRHINRFLGIDEDDMLRFAHGTYKLGVQLNGFGRLGDSYLHAFGDLGLPLGLTPFHHYWLRAVQERSRADTPDLWAYSLNAAAAAENRFAPLEAVPDSPLGGIRYAYHFDASRYAQYLREHIAPGAVQRTEGKVVDVRLHAEDGFIESLQLDNGEIVEGDFFIDCSGFRGLLIEGTLNTGYENWQHWLPCDRALAVASAPGGPMRPYTQASARTAGWQWRIPLRHRVGNGHVYCSRFISDDEAAAQLLANLETEALGDPRPLRFVTGMRRLAWSRNCLALGLAAGFMEPLESTSIHLVQSGISRLLAMFPDRHCEQQLVDEYNRQTRFEYERVRDLLILHYKATERTDTPFWQQCGAMEIPPALARRIELFRRTGMIFREADELFTETGWLQVLLGQRIEPQRHHPLADALTTEQLDGFLADIRTLVGRAKNTLPPHHEFVARAAGGLAA

SEQ ID NO: 86662 - protein, 503 aa, Cellvibrio sp.
  REGION 1..503: note = tr|A0A2T6FGZ9|A0A2T6FGZ9_9GAMM Tryptophan halogenase; OS = Cellvibrio sp. 79 OX=1954207 GN=B0W54_14335 PE=4 SV=1
MNTNKIKRVVIAGGGTSGWITAALLSRQLGKVLDITLVESEEIGTIGVGESTVPPMKAFNKIMGIDEQEFMRETAATFKLAIWFENWCLKGDQYIHPFGVTGQPGWACEFHHFWLRSQKMGLKSALGEYCVEWVAADQGKFFTSPNSKINYAYHIDAALYAKFLRKIAEGYGVKRVEGKIERVNQNADSGFIESLNMASGEVIDGDLFIDCTGFRGLLIEQTLHTGFEDWAHWLPCDTAVAVQTENVGPVQPYTSAIAHDAGWRWNIPLQHRSGNGYVFCSRYMSVDEATSQLLAAVPGKQTRDPWTVKVRTGRRRKAWNKNCVAIGLAGGFVEPLEATSIHIIMSTAARLSHLFPFNGIDQSLVDQFNKETKEEIEEIRDFIVLHYNTTERQDTPFWRYCKNMEIPESLKLRIDLFKDVGHAISNNGGLFRLDSWVHVLMGQRVVPRSYHRAADVMDDDYLQNFLNNFKTSVKNPVAAMPDHQTFLDQYCPAQVDVWGRPKG

SEQ ID NO: 86663 - protein, 507 aa, Cellvibrio sp.
  REGION 1..507: note = tr|A0A2T6FNS5|A0A2T6FNS5_9GAMM Tryptophan halogenase; OS = Cellvibrio sp. 79 OX=1954207 GN=B0W54_06155 PE=4 SV=1
MKIKRIAIVGGGTAGWLAASHLGAELSADKELEITVIESADVPTIGVGEGTVPYIMNGLKRFGISEAELILSCDVTFKQGIKFVNWLNPNIHGEGNYYYHPFDVPYPAGFDVTPYWVSHAKNLPFDYVGIQSRICELGLSPKKISSEQYSGVLNYAYHFNATKFFKLLSKNAQEKFNVVHKVATIVGADKDDSGNIMNLIADTGEKFAFDFYVDCSGFSSLLLGKELGVPFISKATELFIDTALVQQVPLDGQEELNPYTTATAHKAGWIWDIPLTTRRGTGFVYSSNYMEHEEALSLYANYLGIPPDSFLPRKIPMNVGYRKNFWSNNCVALGLAQGFVEPLEATSILVADFSAELLVRNFPRHSEDIATLTPYYNKVVTHVWDRVIDFIKLHYFISDRNDSPFWLDNQSSEGLSETLRERLEIWKIRPPQKSDFFSRFDLFGADNFLYVLYGMKYKTRELIITPGEINRSRRLIEENESLVEKSASMLLKQKDWLMRLNAAVSRV

SEQ ID NO: 86664 - protein, 519 aa, unidentified
  source 1..519: note = Saliniradius amylolyticus
  REGION 1..519: note = tr|A0A2S2DZN9|A0A2S2DZN9_9ALTE Tryptophan 7-halogenase OS=Saliniradius amylolyticus OX=2183582; GN = HMF8227_00244 PE=4 SV=1
MNQSIQRILVVGGGTAGWLSAAYLAKSLRVADPNSPYRISLVESPDIPTIGVGEGTWPTLRNTLRHLGISETRFLRQCCASFKQASKFIDWQQSPKNGQHNHYYHLFDLPGMHWPFSPAGYWAAGLAGDTPYADAISVQAKVCEAGLAPKQITTPDYQGLLNYAYHLDAGKFAELLTEVATGELGVTHIQANVTEVQKHNNGDIAAVGTDRAGLLEADLFIDCTGFQSLLLGQSLEVPFKSLSDVLFTDRAVVAQVPHTNEDTELASCTLSTAQQAGWIWDIGLTNRRGVGHVYSSNHTDKTTAEESLRRYIGSGHDALNYRHLSMQVGHREKFWHRNCVAIGLSAAFMEPLEASAIFLIEAACYMVADQFPKNRQVMDTIAGQFNDSFRTRWQKVVDFIKLHYVLSGRTDNAFWLDNKDPSSIPDSLKQKLELWRHQLPSRYDFSFAFEPFTQESYEFILFGMTPGKLPEAGPLDPDLASRAREQFERIQTAWTQVNSDLPSHRALLNRVQQQGFYPS

SEQ ID NO: 86665 - protein, 508 aa, unidentified
  source 1..508: note = Thalassotalea agarivorans
  REGION 1..508: note = tr|A0A1I0DYK3|A0A1I0DYK3_THASX Tryptophan halogenase; OS = Thalassotalea agarivorans OX=349064; GN = SAMN05660429_01656 PE=4 SV=1
MQKRINHVVILGGGSAGWLTAGILAAEHQAKIKLGELSISLIESPNIPTVGVGEGTWPTMPQTLKKIGISELTFLSTCHATFKQGSKFINWHHSNKASSYTHPFEVVPGAVEGEQAKFWFNQDRGTSYAQATSLQHSMIEAGLAPKTNRLGEYDAYFNYGYHLDAGKFATLLQQHCTTKLGVQHVLAEVASIKLEESGDISRLVLANNAEVAADLFVDCSGFKGLLIGECLGVGKISADDALFANRAVTVQVPYADANQKIPSCTLSTAQESGWIWDIGLTNRRGVGYVFSDNHSNVDQAHQALEAYLKTDFSSQLVVNDIKFTSGYREKFWHKNCVAIGLSAGFIEPLEASALVLVELSATFLAEHLDQASQNMGAVEAQFNQVFSYRWQRVIEFLKLHYLLSERTEAFWQDNKAAQTIPDRLQHLLNEWQTRPPTTSDFPQAGEVFQAASYQYVLYGSGFIPKMMPKQLPQYEQHIRAQKQNIAHNKQQLLQGLPSNRALITSLIQ

SEQ ID NO: 86666 - protein, 533 aa, Bdellovibrio bacteriovorus
  REGION 1..533: note = tr|A0A1Z3N9P8|A0A1Z3N9P8_BDEBC Tryptophan halogenase; OS = Bdellovibrio bacteriovorus OX=959 GN=B9G79_11820 PE=4; SV = 1
MKTLSEHIENAFDLSYLNFPKCPPTDIKTIGILGGGTAGYLAALALAKYHPEVEVTVIESSKIPVIGVGESTTTEIVPFLHRGLEIDPVEFFREVEPTLKFGIHFEWGCPGDYKFNFSFFAGHQYESYYYENDIKNSNWPSVLMNANKIPVIRNKNGSLTSFLPSIPFSYHIDNKNLIRFLNKEVKSRGIEIVDAEVHEAKLDAQGNVASLESKEGHSLSYDLYIDCSGFRSKLLGQTLKTEFMPFTDTLITDRALTFDLPNKDVVDCYTSVITMNNGWCWKIPMRTEDHYGYVFSSKFCDEETALAEARARFGHFEKYKMVEFRSGRHKQAWVKNVFSLGNAYGFIEPLESTAIQTAVHSINVLCRLMPKSLEDQISINGINNEIAVTWDTFRWFVGMHYKFNKKLDTPFWKHCREKTNIGNAQTVVDLFNQRPPLSAGNFGSNSQFTATEALVFNSYSYDTLIFGQKEVHKPLTAPEMSKEEYFSKLKSYEELTSRSLSLFELFKGDHLMEDGILEQLFNDTDTWIMEADV

SEQ ID NO: 86667 - protein, 487 aa, Marinovum sp.; identical to SEQ ID NO: 82342
  REGION 1..487: note = tr|A0A2D7K4D5|A0A2D7K4D5_9RHOB Uncharacterized protein OS=Marinovum sp. OX=2024839 GN=CMH03_10310 PE=4; SV = 1

SEQ ID NO: 86668 - protein, 519 aa, unidentified
  source 1..519: note = Thalassotalea agarivorans
  REGION 1..519: note = tr|A0A1H9YA93|A0A1H9YA93_THASX Tryptophan halogenase; OS = Thalassotalea agarivorans OX=349064; GN = SAMN05660429_00144 PE=4 SV=1
MSKVNSINRIVIMGGGTAGWMTAAALSKLLPKTHYTVTLVESEQIGTVGVGEATLPHLRFFNQRLGIDEKAFMRATNATFKLGIEFSHWAQIGDAYIHPFGDYGEGHNGVDFYQYWLAEGIADIHDLDNFSLPVALCNAKKFAFPSDDLSNISSTYSYAYHIDAGLYATFLRQFSEQHGARRIEGKVVDVKRRALSGNIESLILENGAVIEGDLFIDCSGFSSILLQKVLGVAFEDWSEFLPCNRAVAVATKAVDSNVLPYTKAMARDAGWQWNIPLQNRQGNGYVYCDKFISETQAIDTLQQHLNGEQINDINSLSFTAGKTKCAWKNNVVAVGLSSGFLEPLESTSIYLIQSSIMKLIEFLPQSQNINQCRTEFNRFMGMEMDRIRDFLILHYCATEREDSEFWRYVKHMQLPDSLGQKMAMYKSTGYIEKYQYGLFLTPSWQAVYHGQRVRPNQIDTRTTQLSDADRKALLQHYKEQVLRCVDGAHEHSQVLQKFLGSSQQSPAPATFSLYGARRA

SEQ ID NO: 86669 - protein, 508 aa, Cellvibrio sp.
  REGION 1..508: note = tr|A0A2T6FND7|A0A2T6FND7_9GAMM Tryptophan halogenase; OS = Cellvibrio sp. 79 OX=1954207 GN=B0W54_05335 PE=4 SV=1
MNSDAHISPRIKKIIIVGGGTAGWMTAATLAKVLGKEQYSIQLIESDAIGTIGVGEATIPHIGIFNKILGIDEQDFMRKTQATFKLGIEFTNWGNIGESYIHPFGSYGVNIDSLHFYNYFLKMARQEGSLNPEEYSIGALAARRNKFMHPLNATHSPLGNIRYAYHFDAGLYAKYLRNYAEGKGVERIEGAITQVKLQEDNGFIDSVLLEDGRVYNGELFIDCSGFRGILIQEALGTGYEDWSNLLPCDSAIAVPTANLHPPASFTRSTAHEAGWQWRIPLQHRTGNGHVYSSRFMTDDQAGRILLDNVEGDLLTEPRVVRFKTGMRRKFWNKNCVAVGLSSGFLEPLESTSIHLIQASIKKLLEFFPDKEFDQRNIDAYNEILQRNLLFIRNFIVLHYKVTNRNDSDFWNYCRTMPIPESLEKRIALYRQEGKIYHDSNELFSEDSWFAVMFGQGLVANKYHPLADVVSGQRLKKMFSEIQTVIGNSVNAMPMHTDYIAKYCAQSAS

SEQ ID NO: 86670 - protein, 498 aa, Saccharophagus degradans
  REGION 1..498: note = tr|Q21LS1|Q21LS1_SACD2 Tryptophan halogenase; OS = Saccharophagus degradans (strain 2-40 / ATCC 43961 / DSM 17024) OX=203122 GN=Sde_1096 PE=4 SV=1
MNNNIKKILIVGGGTAGWMAAAAMGKLLKSRLCDIELIESEEIGTVGVGEATIPQLQLFNKLLEIDEDEFVRETSGSFKLGIQFVNWGEIGSSYIHAFGDVGKNMEGIPFYHYWLRAFNSGLATHIDDYTLSSLACHQERFMRSVDAGNSPLSNIAYAYHFDATKYAKYLRKYAESKGVVRTEGKVVETVLHDDGFIKGVRLESGEFKEADLFVDCSGFRGLLIEEALKTGYEDWSHWLPCNAAVAVGCESSGDPLPYTRATAHSAGWQWRIPLQHRIGNGHVFCEKYMGEDEATSILLNNLDGAPIGTPRTLRFKTGHRKKFWNKNCVTLGLASGFMEPLESTSIHLVQTALAKLFSFFPNKNFDEVDIDEYNRQTQFEYERIRDFLILHYCATNRNDSEFWNYCRTMDLPEALVQKMDQFKCNGRIFRHNYELFSDLSWFEVMLGQGIMPSGYSPLVDVFSDEELKRRMDSIKGVVQRSVEKMPKHQEFINLHCKV

SEQ ID NO: 86671 - protein, 501 aa, Pseudoxanthomonas sp.
  REGION 1..501: note = tr|A0A0Q8FEA1|A0A0Q8FEA1_9GAMM Tryptophan halogenase; OS = Pseudoxanthomonas sp. Root65 OX=1736576 GN=ASD77_03645; PE = 4 SV=1
MQTPEPVATPRPVKRVVIAGGGTAGWMAAAALSKTLGKVLDITLVESEEIGTVGVGEATIPTLVVFHRLLDIKEQDFMSAVQGTVKLGISFENWKDVDHRYIHSFGISGKDHWSAGFQHFWLRGRAEGLASEYSDYCIELQAALQDRFSHLPRYHVNYAYHMDAALYARFLRDFSARHGCKRVEGKIVDVATDAEGCISSIKLERGEVIEGDLFIDCTGFRALLIGKALGVGYTDWSQWLFNDSALATQTTAVRDAVPYTRAIAGTAGWQWRIPLQHRVGNGIVYSSRHISDDEAREQFLSSVEGEVIKQPWPIRFQPGQRQQCWAKNCVALGLAGSFIEPLESTTIHLIQRGIVRLLQTFPHTITQPAIDEYNARLDEELQHVRDFVIMHYKVSDRRDSPYWREIAEMEIPSTLRHRIDLFRETGTVFHVPGELFGENSWIQVMMGQGIVPKRYHPTADVMSPADLQRFLDDIRRNVLDTARQMPAHMDYLRSYCPAPKP

SEQ ID NO: 86672 - protein, 503 aa, Brevundimonas sp.
  REGION 1..503: note = tr|A0A1V1V2G9|A0A1V1V2G9_9CAUL Flavin-dependent tryptophan halogenase RebH OS=Brevundimonas sp. SH203; OX = 345167 GN=rebH_2 PE=4 SV=1
MDQRADDVRHVAIVGGGTAGWMAAAALARAFHRPGGLKVQITLIESEAIGTVGVGEATIPPIRQFVESLGLSEDDFIRSTAATAKLGIAFKDWSGPGSEYFHGFGDYGPVIAGPPWRQYLFRLKAEGRIENLDAWSMPTAMARACKFAPPVDDSRSVLSHYSYAYQFDAGLFARRLRTLAEALGVQRREGRIEGVDRDGENGLVRALRMQDGGEVAADLFIDCSGFRGLLIEQTMQAGYEDWTRWLPCDRAVALPCASTRAPEPLTTARARDAGWQWRIPLQHRVGNGYVYCSDHVDDQTALDDLLGQIESAPLAEPNRLRFVTGRRREAWKGNVVALGLASGFVEPLESTSINLIQTGIGRLLELFPDRTFDPALIREYNRRSAQEFERIRDFIVLHYHLAGREGAMWDRCRRTPPPDTLAAKIDLFRARGEIALLEDESFREDSWTAVFTGSGVWPKRLSPLVEIEPLEAVERQATQFSQLIARAVASLPDHSHHFTGYAR

SEQ ID NO: 86673 - protein, 497 aa, unidentified
  source 1..497: note = Sphingomonas jeddahensis
  REGION 1..497: note = tr|A0A1V2ETW7|A0A1V2ETW7_9SPHN Flavin-dependent tryptophan halogenase RebH OS=Sphingomonas jeddahensis; OX = 1915074 GN=rebH_2 PE=4 SV=1
MTPRRIVVAGGGTAGWMAAAAIARTLGRAATVTLVESEAIGTIGVGESTIPPIVGFNRLLGINEAEFMAATNATFKLGIVFDDWRDGDDRYLHAFGLTGKDHWAAGFQHYWLAGRARGHHAPFGDYSLEHQAALAGKFAHLPDDRLNYAYQLDSGLYAKFLRAMAERDGTTRVEGKIASVELDGETGDIAALMLDGGRRVDGDLFLDCTGFRALLIEGALHAGFDDWTHWLPCDSAIALQTASIGPAVPYTRAIAHDAGWQWRIPLQHRVGNGYVWCSRYLGRDEALDRLLANVEGEVLTEPNHLRFTTGVRRRQWHRNCIAVGLSGGFMEPLESTSIHLIQRAVLRFLRMLPAAGPISPRDVAEFNDQQHADMVQVRDFLILHYKVTDRRDTAFWRQCAAMPVPDSLKQKIELFRDTARVFRRNEELFAEHSWMQVLLGQGIEPKTWHPLADKLTDEELARLLGTLHDQVSRTVAGLPPHADYVAQLCANARSQAA

SEQ ID NO: 86674 - protein, 589 aa, Fischerella thermalis
  REGION 1..589: note = tr|A0A2N6KSU9|A0A2N6KSU9_9CYAN Tryptophan halogenase; OS = Fischerella thermalis CCMEE 5273 OX=2019663; GN = CEN49_18340 PE=4 SV=1
MNTTAQQLEYDVVIMGAGYAGVCQARHLLLKIPNIRLAIIDPRSQDPSQVNHRPGESTLEAASMFLFSELGLHDYLLEEHTHKAGLNWHWPKDVDKTESLDDYYNIWVNRQLTIPSFHLNRLKFDLDVLEMNKQMGAHFYNGRVVDVDLTPGDEDNTVKVKLHNDYIHLKAKHLIDAAGRKFIIGRKTDNLLLHPKELPVHIKPSSGWVLVRNVDRTIFDNSVYSTESLESRYYATNHWMGKGHWLWMIPVDSQSKELSVGLLHHPDIIPSELVNTKEKFYAFIKANHNLVYKVLQSGEHVEFNYWPRIAHTSKKLFSRDNWYVIGDAASNFDALYSTGTTMSCIAIESVTEIIRAKLANEQDAEKKREAYHHFNLALARFMNLAVSSQEKQVGNASIMSWRLYGNYMVWFNTLLPIYVGKWHLDLLFSRLALIFFKLNGSFWVDTYKQLSYLAERGTNIGFMDQLRADQLIGGYHPDKFFDNFLENAKLEPSKLNVFAGLRAYCFYIVVWFVMWQWKGFGPIGLLRPRNIFQIVRLLLTGVVMAIAELTHKLKLLGQPTNSIVAKTREEFKSYRYQSRLQNWVGSSEL

SEQ ID NO: 86675 - protein, 606 aa, Fischerella thermalis; identical to SEQ ID NO: 86648
  REGION 1..606: note = tr|A0A2N6KXC6|A0A2N6KXC6_9CYAN Tryptophan halogenase; OS = Fischerella thermalis CCMEE 5273 OX=2019663; GN = CEN49_10050 PE=4 SV=1

SEQ ID NO: 86676 - protein, 609 aa, Fischerella thermalis
  REGION 1..609: note = tr|A0A2N6KX73|A0A2N6KX73_9CYAN Tryptophan halogenase; OS = Fischerella thermalis CCMEE 5273 OX=2019663; GN = CEN49_10045 PE=4 SV=1
MTTNNTQSQVYDVVIMGAGIGGVCQARHLLLNIPNIKIALVDPRPEERTDRDMKVGESTVEISTLMICKELGLYDYMIENHPPKFGLNFHWAKEAGKTENTEDYYHIWTVKQPPLASVLINRPKFERDLLRMNQDMGAEFYNGRVVDVDLTPGDELNTVHVKQGDRYLELKTKHVIDSAGRKFLIGCKTDNLITGPENLYGINNGSVWMRVRNVDRTIFHSGYDPYVCTCSHYYAANHWMGHGHWVWMLPTDTQNMELSIGLLYHHDIISPHSVNTKEKFYAFLEANHNVVYRLLKSGEEVDFHHWPRIAHKSKQMYSQDNWYIIGDAAAIFDPFYSQGLTMMSFQIESVTEIIRAKLAGEANAKEKCALYNKFALNMIDRTNVLVSRHEKQIGDASIMTWRMYLENIWWFKMLIPMFVGKWHLDLDFLKNVVAKPGRLYVVQIMNAVYEHLDELVERKANIGFLHTHIADQLPFGFTMSNDFDNFLHLTKYEPQRANIYVSIQWSHFFVALWYLKFLWKAYGLKGVLSPHNLKHVFALFKAFLEAAWDHLIFRIKTKNIPGNSIIANIRQEFKNYRAPAKLEPWLEEVTEASNGNVTTQSRELVKAEV

SEQ ID NO: 86677 - protein, 500 aa, unidentified
  source 1..500: note = Gammaproteobacteria bacterium
  REGION 1..500: note = tr|A0A1G0I334|A0A1G0I334_9GAMM Tryptophan halogenase; OS = Gammaproteobacteria bacterium RIFCSPHIGHO2_12_FULL_63_22 OX=1798290 GN=A3E01_10540 PE=4; SV = 1
MVPERVKRVLIVGGGTAGWMTAAFLSQALGKGVRIELVESDEISTVGVGEATIPPINNFNTALGIDEDEFIKQTQATFKLGIQFKNWGALGDSYIHGFGTMGHVTGVVDFHHYWLKMFQAGKVDRIEDYSINLLACEKNKFMRGTDKYPNSPLKDIGHAFHFDAGLYARYLRVYAEQHGVARTEGKIVGVQQHPESGFVTSVTMENGNVIEADLFVDCSGFRGLLIEQTLKTGYDDWSHWLPVNRALAVPCESVAPLTPYTRSTARSAGWQWRIPLQNRIGNGHVYCSDYISDDEAASVLMANLDGKALAEPRPLRFVTGKRKKFWDKNVVAIGLSSGFMEPLESTSIHLIQKGVSRLVSFFPDKGFEQPDIDEFNRQSTQEFEQIRDFIILHYTATERDDTPFWNYCRTMPIPDTLQQKIDLFKSNGRLFRINNELFTEISWFQVMFGQRIRPQGYHPLVDAKPEDLIERMVADVKRVMHGVVDHMPTHEAFIAQNCKA

SEQ ID NO: 86678 - protein, 505 aa, Sphingomonas rubra
  REGION 1..505: note = tr|A0A1I5URM6|A0A1I5URM6_9SPHN Tryptophan halogenase; OS = Sphingomonas rubra OX=634430 GN=SAMN04488241_11420 PE=4; SV = 1
MNRQTGKREGGIRRVVIAGGGTAGWMTAAAVARTMGAAIELVLVESDAIGTVGVGESTIPPLVTYNRLLGINEADFMRETQATFKLGILFDEWKERGSRYFHSFGLTGKDHWSAGFQHFWLYGRHKGHQHPYDDYCLELLAAMAGKFAHLPDDQMNYAYQLDSTLYARFLRRLAEADGTRRVEGKIARVELDEESGDIARLVLDSGTHIEGDLFIDCTGFRALLIEGALHAGFEDWTHWLPCDAAIAVQTENVAPPVPYTRAMAHDAGWQWRIPLQHRTGNGIVYCSRYLDREQALERLLGNIEGTVLTEPNALRFVTGMRRRQWHRNCVAIGLSGGFMEPLESTSIHLIQRAVLRLLRLFPVAGISERDVTEFNDQQLTDAVQIRDFLILHYKATDRRDSAFWRQCAAMPIPDTLHHKIELFRETGRVFRRNEELFAENSWVQVMMGQGIVPQSWHPIAAKLRDDELDRLLGTIRDTMRRTVAGLPDHAAYVAQYCGARRGSAR

SEQ ID NO: 86679 - protein, 494 aa, Novosphingobium sp.; identical to SEQ ID NO: 82741
  REGION 1..494: note = tr|A0A257YPL1|A0A257YPL1_9SPHN Tryptophan halogenase; OS = Novosphingobium sp. 12-63-9 OX=1970403 GN=B7Z36_01530; PE = 4 SV=1

SEQ ID NO: 86680 - protein, 521 aa, Acinetobacter lwoffii; identical to SEQ ID NO: 83693
  REGION 1..521: note = tr|N9H0V1|N9H0V1_ACILW Uncharacterized protein; OS = Acinetobacter lwoffii NCTC 5866 = CIP 64.10 = NIPH 512; OX = 981327 GN=F925_03092 PE=4 SV=1

SEQ ID NO: 86681 - protein, 509 aa, unidentified
  source 1..509: note = Saliniradius amylolyticus
  REGION 1..509: note = tr|A0A2S2E794|A0A2S2E794_9ALTE Tryptophan 7-halogenase OS=Saliniradius amylolyticus OX=2183582; GN = HMF8227_02385 PE=4 SV=1
MSNQENSLYSGDRRIRNIVIVGGGSAGWMTAAALAKVMGHHTSITLIESADIGTVSVGEATIPNIRAFNQLLELNEDELLAKTQGTFKLGIEFVDWYEKDHAYMHPFGPYGQNLSGVPFHHYWLGSSEHAGAPITDWCLEATAAYQGKFERYTRQRGRPVPTNYAFHFNAVAYAAYLADYAVDRGVKRIIDHVDEVRTSKDSGFIQSLMLSSGQEIAGDLFIDCSGFKGLLIEQTLHTGFEDWHHWLLCDSAIAQPCAIGDHYPPYTRSLAQEAGWQWQIPLQNRWGNGHVYASAFLEQDKALNVLHANMPDTPTGDPNYLHWRTGRRRQAWNKNCIAIGLSAGFLEPLESTGLHLVQSAISRLLSLFPDRHFDDTLRNKFNQYSREELERIRDFIILHYKATRRTDTDFWAYCANMDIPDSLSEKIELYRHSGRIFRENLELFSEISWFSVLNGQGIKPNAIHPLTEGMQVAERDSLLSQLKTQTQQQAQAMSCHQAYIKQHCSMESQ

SEQ ID NO: 86682 - protein, 503 aa, unidentified
  source 1..503: note = Gammaproteobacteria bacterium
  REGION 1..503: note = tr|A0A1G0HZS9|A0A1G0HZS9_9GAMM Tryptophan halogenase; OS = Gammaproteobacteria bacterium RIFCSPHIGHO2_12_FULL_63_22 OX=1798290 GN=A3E01_06395 PE=4; SV = 1
MTPEPVRNIVIVGGGTAGWMTAAALSKVLEGQCNIRLVESDEIGIIGVGEATIPHIGEFNRALEIDEDEFMRATQGTFKLGIEFLNWGAIGDRYMHGFGFVGQATQALPFHHFWLRLAKLGKASPLDAYSINTVAAYQAKFMRARTDMVGSPVADIAHAYHFDAGLYARFLRGYAEKRGVIRTEGKIAQVLQRADDGFIEAVVLESGERIDGQFFIDCSGMRGLLIEQTLHAGFDDWSQWLPVNRALAVPCESVDPLLPYTRSTAHTAGWQWRIPLQHRIGNGHIYCSSFMEQDEATSILMKNLDGKPLAEPRPLKFTTGRRKSFWTKNCVAVGLSSGFLEPLESTSIHLINTAISRIISFFPQSGFDAADIAEYNTQTHWEYERIRDFLVLHYKATIRDDSEFWNYCRTMPVPDTLQRKIDLFRSNGRIQRDGLELFAEPSWLQVMVGQRIVPQAYHPFADLRPEAEVESYVKHIEQVIAKCVRVMPTQADYIAKHCAANSA

SEQ ID NO: 86683 - protein, 508 aa, Brevundimonas sp.
  REGION 1..508: note = tr|A0A1V1V0I5|A0A1V1V0I5_9CAUL Flavin-dependent tryptophan halogenase RebH OS=Brevundimonas sp. SH203; OX = 345167 GN=rebH_1 PE=4 SV=1
MRRPTLSQSPSDIQNIVIVGGGTAGWMAAAALAHTFEGAGKSVTLVESEAIGIIGVGEATIPEILKFNARLGIDEADFLRETKATFKLGIEFDGWRRDGERYFHPFGAFGVDMEGIAFHHFWLKACAEGQVEPLETYSMAWQAARRGRFAHPQGGPQSPLSSLGYAYHFDAALYAGFLRRFAEGLGVVRREGRIVAVQQAENGDVSGVTLEDGGVVSGDFFIDCTGFIGLLIEKTLNAGYDDWSAWLPCDSAVAVPCERVEPLSPYTRSTAREAGWQWRIPLQHRVGNGYVYASSHLSHQEAEDALMSRLEGPALAPPRRLRFVTGRRRQCWKRNCVAVGLSSGFLEPLESTSIHLIQSAITKLIALFPARTTDEALRREFNALMEEEFTTVRDFLILHYKVTQRDGPFWDQVRTMPIPDRLAEKIALFEETGRVIRRDHDIFGESSWLAVAVGQGLAPRGRHPVSDVIGRDANLGRLAAIKDSIWRTADALPSHTDMLAATMDRRAS

SEQ ID NO: 86684 - protein, 508 aa, unidentified
  source 1..508: note = Burkholderiaceae bacterium
  REGION 1..508: note = tr|A0A5C8B8L1|A0A5C8B8L1_9BURK Tryptophan 7-halogenase OS=Burkholderiaceae bacterium OX=2030806; GN = E6Q34_02220 PE=4 SV=1
MNTEARGTDLIQNVVIVGGGTSGWVTAAALATVLRGKYNIRLVESDEIGIVGVGEATIPMIQRYNQILGIDENEFLRETQGTFKLGIEFVNWGKLGDRYMHGFGTIGQEMWTVRFDQYWQKYNMQGKAGKLEEYSITRMASKKNKFMPADLSVPNSPLNQITYAYHFDASMYAKYLRKFSEARGVIRTEGKINQVLQREGDGFIEAVVLENGTRVEGDLFIDCSGFRGLLIEQTLQTGYEDWTHWLPCDRALAVPCESAPVLTPYTRSTAHKAGWQWRIPLQHRIGNGHVFCSQFTSEDEAAATLLGNLDGKALADPRLIKFTTGMRKQAWNKNVVAVGLASGFLEPLESTSIHLIQTAIARLINFFPSRAFNPVDIKEYNRQSRFEFERIRDFIILHYKWNQRDDAVFWKNCAEMPIPDSLTHKMEMYRASGRLLRVDDELFAEIGWLQVFEGQNMPVEGYHPLVDLQTEEGTLEYLQSVREVIAKCVDVMPDHAAYIAKHCAAPRM

SEQ ID NO: 86685 - protein, 501 aa, unidentified
  source 1..501: note = Opitutae bacterium
  REGION 1..501: note = tr|A0A2A2XZU1|A0A2A2XZU1_9BACT Uncharacterized protein OS=Opitutae bacterium AMD-G3 OX=1982317; GN = CAK89_07900 PE=4 SV=1
MIQDVLILGGGTAGFFMAASLKTHHPRLRVRVVRSPTLGIIGVGEGSTTDLLRFIHGFLNVPPAEFYRAVQPSLKLGIKFLWGKEDYHYTFSGALRQKLEPSGVPIGFACGGTLADADAVTSLMAAGKVFPRSPDGPWPVVNPTVGYHIENAELVAWLEGHAAKLGIEVIDGDLASVEQAGGEIQALHLNDGQRLAADFFVDASGFRAELIGKALGTPFSSYADSLFCDKAVVGGWTRTSEPILPYTTAETMDAGWAWQIEHPRRINRGYVYCSKFISDAEAEAEFRAKNPKVGPTRVVPFVPGRYAHQWVGNVFAVGNAAGFVEPLEATSLLCIAHECRFLTIAFTEGGLRRNNSMRETTDRLCGRLWDEIRDFLAVHYRFNRRADTPFWRHCRDHVALHGAQRLVEFYQENGPTFCLEVELLSPAQSIFQLEGFWLHLLAMGVPHGRADRLTPAEQAQWSALRATHRAVAERGMTVEETLQVLHDPRWRWTPGFYKDVV

SEQ ID NO: 86686 - protein, 520 aa, Saccharophagus degradans
  REGION 1..520: note = tr|Q21KW9|Q21KW9_SACD2 Tryptophan halogenase; OS = Saccharophagus degradans (strain 2-40 / ATCC 43961 / DSM 17024) OX=203122 GN=Sde_1398 PE=4 SV=1
MRELTKRVVIVGGGAAGWLTAGILAAKHGKIGSGADVSITLIESPDVATIGVGEGTWPTMRETLSTMGVSESKFITACDVSFKQGSQFINWRNNCEGDNYFHPFSIPNRYYDMDLADLWNSTGRQTDFAYFAGSQALLCDEGLAPKQKITPEFAAVVNYGYHLDAGKFGEFLKQHCTQVLGVEYIQDHVISVDGERDTNIIAINTRVNGAIIGDFFIDCTGSNSLLIGGHYSVPLIAKDKVLFNDRALAVQVPRQIENQAIASCTRSTAQKYGWIWDIGLPTRQGIGYVYSSRYGTKEEIYTGLVDYISKSCGVESVDDLNIRELEFTPGVRSEFWVKNCVAVGMSSGFIEPLEASALAMVELAAKKIRDDFPYTASQMEPICRRYNESFHYKWDRVIDFLKLHYVLSDRRDSEYWLANTESVKECPRLEELLDKWKYRSPNKHDFPEVDEVFPAASYLYILSGTYFERYSDSHKNEKLRSAAMALVEENKAQAKKLLNGLPTNKELLESIAAVGLPKKQ

SEQ ID NO: 86687 - protein, 504 aa, unidentified
  source 1..504: note = Chania multitudinisentens
  REGION 1..504: note = tr|W0LJW3|W0LJW3_9GAMM Uncharacterized protein; OS = Chania multitudinisentens RB-25 OX=1441930; GN = Z042_23765 PE=4 SV=1
MLNFRNAKRFVVLGGGTAGWFAAIAMRRLFSPNIEVRVIESSKIGIVGVGEGGLLNLAHAFERYQIPVDRFMAETDATYKWGFCYEGWRTGKEDDRYFHLFAGGGKAEWTEYGFLPGFSALIAQQLPLPSYIRGFQAVAHNAPQQEAKQMVAEGRTDIQTSYHFDSYKTANFLKTIALERGVIHQDAIVDRVELDEAGNATALIIGEESLPVDFVIDASGFARKIVGNTLNAEWVSFKEHLLMDSAIPFYMPHPFENPILVTRALAMNAGWMWQIPLVGRVGAGYVYSSKHISDEQALAEIEQKLGYKIEPHKTLKFDPGCFKEVWHGNIMALGLSSGFVEPLEATSIGQMLEQLRNFERVLRAGQGIVSEKSIKEFNQANLRSWEGIRDFLRMHYDCPRRDNPFWCDVAASAMPDDYREIKQCWQERTPRMLDIENYAINGWSGVFHVINWMFVAAPLGLISEQAAQKEVAALPQASKEKVVQLLQELPSLLGPDWRPRSSLK

SEQ ID NO: 86688 - protein, 505 aa, Cellvibrio sp.
  REGION 1..505: note = tr|A0A2T6FGP0|A0A2T6FGP0_9GAMM Tryptophan halogenase; OS = Cellvibrio sp. 79 OX=1954207 GN=B0W54_13690 PE=4 SV=1
MSHQPIKNIVIVGGGTAGWMAAASLSQFLAHKSINITLIESTSIGTVGVGEATIPSIVQFNHSVGLDELEFIRATRASFKLGIQFTNWRKPGDQFFHPFADYGIDFSGVEFQHYFYRFKKNNPAEDLHDYSIGSQLAKHNHFAQPRETPNNPLADFSYAYHFDAALYAKVLRELSISRGVVHIDQKIEQVNLRESDGFIESLLLDSGNIIAGDLFIDCTGFKGLLIEESLHTGYEDWQQWLLCDAAVAVQSTNTEEPTPYTRVTALDAGWMWQIPLQHRTGNGYVFCSRFLDKKIAEETLMQRISGNPITAPKSFAFKAGRRKKVWNKNCYALGLASGFIEPLESTSISLIQTGITHLLTFFPDMSFNPAMIAEVNRRHQHEMERIRDFIVLHYKLTQRTDTEFWRYCQAMEIPSSLEHKIELFKSCGHILQHEPEAFEKSSWLSIYHGFGIIPERTDNRINGFNDDDIATQLTKIKQTLDHAGKNAISHAEFIRRHCTAPDFEA

SEQ ID NO: 86689 - protein, 532 aa, unidentified
  source 1..532: note = Sphingomonas jeddahensis
  REGION 1..532: note = tr|A0A1V2ETN4|A0A1V2ETN4_9SPHN Flavin-dependent tryptophan halogenase RebH OS=Sphingomonas jeddahensis; OX = 1915074 GN=rebH_1 PE=4 SV=1
MVNERHNKPDYMDATVERQVASIVIVGGGTAGWLAAATIAARADPAAPAPLSVTLVESPDVPTIGVGEGTWPTIRRTLSRIGIPEAEFLAACDASFKQGSRFDGWRTGAPDDSYLHPFTAPIDADARGLVAAWAASDEPRFAAAVTPQARACALDLAPRQRAMPDYAGALNYAYHLDAVKLAALLQRHATRRLGVAHVRDHVVGVDRCENGDIAAVRCRDHGAIAGDLFIDCTGHAALLIGGAFDVPFIDRGHELFNDRALAVQVPVAPDSAIGATTNATAHDAGWIWDIGLPTRRGVGCVYASAFLSDDEAAASLRAYLARTAPGADLEALAPRRLAFRSGHRARFWERNCLALGLSAGFLEPLEASAIVTIELGLDALLDNFPATRASMAAHARRYNDLFRYRWDRIVDFLKLHYVLSERDQPYWRANRAPASIPDRLAELLAIWRHQPPSAQDFAAVNEIFPAASYQYVLYGMGMAPPPPGPVRIDGHDAAATSIRQITQRARALAASLPTNRAYLDALRAERPHGIVA

SEQ ID NO: 86690 - protein, 470 aa, Pseudoalteromonas tunicata
  REGION 1..470: note = tr|A4CBM6|A4CBM6_9GAMM Uncharacterized protein; OS = Pseudoalteromonas tunicata D2 OX=87626 GN=PTD2_18115; PE = 4 SV=1
MNNNIKKIVIVGGGTAGWMAAASLAKYVNNSAEICLIESSDIATVGVGEATIPNIVQFNRNLGIDETAFIKATQATFKLGIQFENWHPQNKQFFHPFADYGLKIDQVDFHHYLYRAQQTECSSQLADFSFACQLAKQYKFAQPHANPSTPLADYAYAYHFDAGLYGQFLKKHSINAGVNHLIGTIEQVNLHPDTGFINNVALTDGQIVEGEFFIDCSGFEGLLIEKALHTGYEDWSHWLFCDSALAVQTTRVNPPEPFTRSIAQSAGWQWHIPLQHRSGNGYIYSSRFESDEQAKALLQTNINGEPLGEIRKITFKPGRRKQIWHKNCFALGLASGFLEPLESTSISLVQTAIAKLLTFFPDCSFNQADINEVNRLHNLELENIRDFLILHYKLSARCDTPFWQACQNMAQQSHCHNPHNYTRSRSRCSGVGRAPSPQSHSPSMLVRIQVLAAFEHIERRRVYALYLPRI

SEQ ID NO: 86691 - protein, 498 aa, Cellvibrio sp.
  REGION 1..498: note = tr|A0A2T6FIB8|A0A2T6FIB8_9GAMM Tryptophan halogenase; OS = Cellvibrio sp. 79 OX=1954207 GN=B0W54_17105 PE=4 SV=1
MKTNNIKKVVIAGGGTSGWMTAAAITKLLGKNLDVTLVESDEIGTVGVGEATIPTLLTFHKMLAINEQDFLSAVGGTFKLGISFENWLNIGEKYIHSFGNAGTDCWACGFQHFWLRGMQEGKAQDYARYSLETQASLADRFAHLPNNKMNYAYHFDASLYAKFLRGIAEEYGIKRVEGKINSVQLNDDSGFIESITLESGRVIEGDLFIDCTGFRALLIEGALHTGFEDWSHYLPCDSAVAVQTYKVAPPVPYTRAIAHPSGWQWKIALQHRVGNGLVYCSRYLSDDAAKKLLLENVEGETLFEPRVIKYRPGQRRKYWNKNCISVGLSSGFIEPLESTSIHLIQRAVVRLLQNFPQDEIVQKDADEFNKQMTAEIINIRDFIILHYNATQRTDSPFWRYCKDMPIPDSLKHRIDLFRETGRVFFAAFELFGENSWVQVMMGQGIVPKQYHPIVDMMSDKEMDVFLNGITSNVDNLVRQMPSQEEYLKHYCPQRNIDM

SEQ ID NO: 86692 - protein, 505 aa, Sphingomonas parapaucimobilis
  REGION 1..505: note = tr|A0A0A1W7B3|A0A0A1W7B3_9SPHN Putative tryptophan halogenase OS=Sphingomonas parapaucimobilis NBRC 15100; OX = 1219049 GN=SP5_059_00300 PE=4 SV=1
MVEGQARSILIVGGGTAGWLTAAYLARFLGPETRITLLEDPAIGAIGVGEGAFPTMRSTLRFLGIDEAQFVRAAGATFKQGIRFDDWRHAPDGGRRHRYVHPFEPPFQADGVDLVAHWLAQDPAARAPFAEAVTIQHRVAAAGRGPKQAGEGAFDGPLSYAYHFDAHRLVALLADCAMGLGVGHLEGRLTGAVVGADGLIAHVMTDRQGMMTADLYVDCTGQRAELISGALGEPLASVRDQLFTNRALACRLPYDATRGHALPTMTIASAHRAGWTWDIGLAEGRGIGTVYSDAHMDDEAALATLAAYLERDPDRLEPRLLTFEPGYRQRPWIGNCVAIGLAGGFLEPLESTGIVLIEAAVAMLAELFPHRGPIAAPAARFNALMTARYRTIVDFLKLHYCLSSRDEPFWHDNGAAGTISDRLRDLLEQWRYRPPGRFDFTLDVESFAHFNYQYILYGMGFADGDARPTRASGEAERLFRKLQMFGDRAVADLPSHDELVAAMRG

SEQ ID NO: 86693 - protein, 518 aa, Sphingomonas rubra
  REGION 1..518: note = tr|A0A1I5UQ64|A0A1I5UQ64_9SPHN Tryptophan halogenase; OS = Sphingomonas rubra OX=634430 GN=SAMN04488241_11417 PE=4; SV = 1
MTEREVSKVVVVGGGTAGWLSACLLAARLRDTAATTVEVTLVESPDVPTIGVGEGTWPTMRRTLAQIGLDETDFLLACDGAFKQGSRFDGWRTGVGDDRYYHPFVPPLAGEPRDVVAGWQAHAADQRFAEAVGAQPRICGLDLAPRQRGMPDYAGALNYAYHLDAGKFAALLADHATGRLGVRLVRDHVTDVVTDVDGDIAAVRTRASGEVAGDLFIDCTGQTALLIGRTLATGLVDRSAELFNDSALAVQLPVAAGSPIAAQTVATAHPAGWIWDIGLPTRRGVGCVYASRYMDDEAARTVLDAYLARTAPDIDIAALPARKLSFRSAHRERFWVRNCLAVGLSAGFLEPLEASAIVLIELSLDALIANFPARRDTMDVHARRFDALFRYRWDRIVEFLKLHYVLSERTEPYWRDQRDPATIPPRLAELLAVWRDQPPSSFDLPHADEVFPPASYQYVLYGMGFPPPAKARDAGAGIIGGLVQVEQRARALAAGLPTHRAYLDALRRERGAVIMERH

SEQ ID NO: 86694 - protein, 475 aa, Marinovum sp.
  REGION 1..475: note = tr|A0A2D7D065|A0A2D7D065_9RHOB Uncharacterized protein OS=Marinovum sp. OX=2024839 GN=CMH04_04285 PE=4; SV = 1
MEVKNIVIVGGGSAGWMTAAAIAYKCPNINLTLVESKKIGNVGVGESTLGHINNYMNLLDLKDEDWMKECSATYKTSIQFTDFKENGYTFQYPFGEYKAYSNGLSDFFDIQYAHPEISDLDFARSHSINALMAENNKMWGDKINEYGYDPKWDVAYHMDADAFGQYLKKRYCGSVRHIVDDVIRFQKNEDGYIERITTEGHIVLAADMFIDCTGFASLLIEKTMGIEFEKFKTLPNDSAVAARIPYKNEEDKRNKMSCVTDCKALSSGWLWDIPLWSRLGTGYVYSSQFQTTVSAEEEFRQETSWDGEVRHIKFRHGKHKKAWHKNVVAIGLSYGFIEPLESTGLLTTHENIMNLVHHLCLRDGYVNSLDATMFNTSCNESITGLSDFVAIHYGMSTRSDTPYWQYVTNDIEYNGVEGMGMTYIATGMGVKKHIHRLEKLPEKSKTELQEHIKDLEHLVEQMSHHYDYLKSNIYK

SEQ ID NO: 86695 - protein, 518 aa, Colwellia sp.
  REGION 1..518: note = tr|A0A2N1I7A9|A0A2N1I7A9_9GAMM Tryptophan halogenase; OS = Colwellia sp. 12G3 OX=2058299 GN=CXF71_14940 PE=4 SV=1
MNEPLKKIVIVGGGSAGWLTAGVIAAEHSTNQDSGIEIILVESADVAPLGVGEGTWPSMRSTLQKMGISETEFLLECDASFKQGSKFTNWMNNTNEHYYHPFTLPNGFNEINLSSYWQPFSDKISFADAVCEQSHLGAHGLAPKQITTAEYSFASNYGYHLDAGKFGQFLQKHCTVKLGVKHVIDHVTKINSSATGDIASITTKMQGDIFGDLFIDCTGTSSLLLAQHYKIPFISKKHILFNDSAMAVHVPYENSDSPIASFTSSTAQTAGWVWDIGLPSRRGVGYTYSSVHISHDKAEQELRNYLVPSMGEDTANSVMIRRIPLNPGHREKFWHKNCVAIGMAAGFIEPLEASALALIELSAKMISEQLPANRQTMDIIAKRFNDKFLHRWENVVDFLKLHYVLSQRTDSAYWLDNKNENSIPKSLQELIKLWRYQPPYNYDATHTEEMFPPASFQYILYGMNFVTDPLGHKKRVSHAEKADKLFNDNIKKTQKLLSILPTNRELINKIKKYGLPKI

SEQ ID NO: 86696 - protein, 504 aa, Rhodanobacter sp.
  REGION 1..504: note = tr|A0A0Q8DVS0|A0A0Q8DVS0_9GAMM Tryptophan halogenase; OS = Rhodanobacter sp. Root627 OX=1736572 GN=ASD68_09065; PE = 4 SV=1
MGNNRIRKVVIAGGGTAGWIAASALAYQLKDQIELTLVESSKIATVGVGEATVPPVRNFHRFMNIDEQEFLRAVAGTFKLAISFENFVRPGHRYIHPFGNTGKGTLVAGFQQYWLESVRRGMKSDLGNFSLEAMAALEDKFALTENPEINYAYHMDAALYVDFLRKKFERYGINRIEGMIKEVRQNPDSGYVEALVLDDGQVIEGDLFIDCTGFRGLLIEQTLKTGYEDWNHWLPCDRAIAVQTQSVDPSPVPYTRAIAHEAGWRWHIPVQHRVGCGLVYDSRYMSDDEARAKLLHDVGAEPVRDPWQVKFRTGRRLKAWNKNVVALGLASGFIEPLESTSIHLAMSAVMLLVELFPSEGIPDSLVKRYNDVCRGELEHVRDFITLHYHANQREEKMWKDCREMTLPDSLQIRIDAWRDRAHVWKDQGELFATTSWMHVLLGQEIMPNQHHPVTREISDADLRRLLDSIRGPIDRTLPLLPLQQEFIDRYCKSPDGIWDMHRLG

SEQ ID NO: 86697 - protein, 589 aa, Fischerella thermalis
  REGION 1..589: note = tr|A0A2N6KLR1|A0A2N6KLR1_9CYAN Tryptophan halogenase; OS = Fischerella thermalis CCMEE 5268 OX=2019662; GN = CEN50_01805 PE=4 SV=1
MNTIAQQLEYDVVIMGAGYAGVCQARHLLLKIPNIRLAIIDPRSQDPSEVNHRPGESTLEAASMFLFSELGLHDYLLEEHTHKAGLNWHWPKDVDKTESLDDYYNIWVNRQLTIPSFHLNRLKFDLDVLEMNKQMGAHFYNGRVVDVDLTPGDEHNTVKVKLHNDYIHLKAKHLIDAAGRKFIIGRKTDNLLLNPKELPVHIKPSSGWVLVRNVDRTIFDNSVYSTESLESRYYATNHWMGKGHWLWMIPVDSQSKELSVGLLHHPDIIPSELVNTKEKFYAFIKANHNLVYKVLQSGEHVEFNYWPRIAHTSKKLFSRDNWYVIGDAASNFDALYSTGTTMSCIAIESVTEIIRAKLANEQDAEKKREAYHHFNLALARFMNLAVSSQEKQVGNASIMSWRLYGNYMVWFNTLLPIYVGKWHLDLLFSRLALIFFKLNGSFWVDTYKQLSYLAERGTNIGFMDQLRADQLIGSYHPDKFFDNFLENAKLEPSKLNVFAGLRAYCFYIVIWFIMWQWKGFGPIGLLRPRNIFQIVRLLLTGVVMAIAELTHKLKLIGQPTNTIVAKTREEFKSYRYQSRLQNWVGSSEL

SEQ ID NO: 86698 - protein, 524 aa, Streptomyces sp.
  REGION 1..524: note = tr|A0A515YJ32|A0A515YJ32_9ACTN Tryptophan 7-halogenase OS=Streptomyces sp. RLB3-6 OX=2594457; GN = FNV61_45885 PE=4 SV=1
MANNVVIVGGGTAGWMTATYLRAAFGDDVGITLVESKNVPTIGVGEATFSTVRHFFSYLGLAEHEWMPECHASYKLAIRFENWRAEGHHFYHPFERPRNVQGFSLADWWLHTRPGEQFDRDTSLLAALCEAKSSPRHLDGAMFTSGFGATDEPAKAAEDGRETQFPYAYHFDAALLARFLTRFGTERGVRHVLDDVLDVVLDDHGDISHVVTREHGALTGDLFIDCTGFRGMLINKALGVPFESFRESLPNDSAVALRVPVNGEKAGMRPCTTATAQDAGWIWTIPLFGRIGTGYVYAGDYCTPEEAERTLREFAGPAADGLAANHIKMRIGRCAQSWVRNCVAIGLSSGFVEPLESTGIFFIHNAVEQLVKHFPGGRDDEHRRRTYNRQVAAVMDGVREFLVLHYYAAARDDNAYWRDAKKRPLPDGLAERIEAWGHQLPDAESVFPRFHGFEPYSYTAMLLGLGGLPVRPPAALSRMDDTAARREFALIRDQAQALAQRLPSQYAYLAHQQNASTGRPASAA

SEQ ID NO: 86699 - protein, 512 aa, Pseudoalteromonas sp.
  REGION 1..512: note = tr|A0A3D5EQY2|A0A3D5EQY2_PSEAS Tryptophan halogenase; OS = Pseudoalteromonas sp. OX=53249 GN=DG048_25010 PE=4 SV=1
MSKIINNIVIIGGGAAGWLTAGLLAKEHPHLHITLIESADIGISGVGEGTWPSMRNTLQRIGVKETDFLYQCDASFKQGSKFINWRGEQQGDNYYHPFMIPEGYYEYDVHTAWKQLFSHQKYADAMNMQSFICQAALAPKQINTPQYAGVTNYGYHLDAHKFARFLTQHCVNTLNVKHIVDNVICANNDEQGYIKSVSTQHNGAITGDLFIDCSGSQGLLIAKHYQIPFLDQSHILFNNTAVAAQIPYESQSQNIASATLSTAQSAGWIWDIGLPTRRGIGYTFSDKYCDEASAIETLKSYAAQTIGTQQADTIETRTLRFTPGYREIFWHKNCVAIGMSQGFIEPLEASALAMVELSISMLSEQMPVDQDHMQLLSTRFNKRFKYRWEQVINFLKLHYVLSNRDDNGYWHANRNPNSIPLELQNLLTLWQYQAPSRFDLVENEEIFSSASYQYVLYGMGFETSLTTKLDGQKCHKAEQLYQLNRNKIAQYLQKLPTNRLLLEQLQGSKVAT

SEQ ID NO: 86700 - protein, 512 aa, Couchioplanes caeruleus
  REGION 1..512: note = tr|A0A1K0FSJ1|A0A1K0FSJ1_9ACTN Tryptophan halogenase; OS = Couchioplanes caeruleus subsp. caeruleus OX=56427; GN = BG844_02570 PE=4 SV=1
MTASYLKAAFGDRVNVTLVESKNVPSIGVGEATFSTIRHFFNYLGVDEGEWMPECHATYKLAVRFEDWREPGHVFYHPFERNRIVDGFPLTDWWVQKKPTERFDRDSFLLASMCDAKSSPRYLDGSLFDSIFDLSDGGRTTLSEQNTQFPYAYHFDAALLAKFLTRYGVARGVRHVLDDVVDVVLDDQGAIDHVRTRQQGDVHGDLFVDCTGFRALLVHKALEEPFISFQDHLPNDSAVALRVPSDMAAEGLRPATTATAKDAGWIWTIPLFERVGTGYVYASEYATPEEAERTLREFVGPAADDVAANHIRMRIGRSQRAWVKNCVAIGLSNGFVEPLESTGIFIIQNGIEQLVKNFPVGHAETDDGLRKAYNRQAAHVMDGLREFMVLHWYASGRADNQYWKDTKTRTIPDGLAERLEQWKVKLPDQDSIYPHYHGFESYSYRAIILGLGGLPVPSLPVLGKLDGTAADREFQQVADQAAALLEKLPSQYEYFAHLHGLPPARRTATAGR

SEQ ID NO: 86701 - protein, 514 aa, unidentified
  source 1..514: note = Saliniradius amylolyticus
  REGION 1..514: note = tr|A0A2S2E190|A0A2S2E190_9ALTE Tryptophan 7-halogenase OS=Saliniradius amylolyticus OX=2183582; GN = HMF8227_00898 PE=4 SV=1
MSNPIERIVIVGGGSAGWLTACVLASEYQFDHSIAITLVESPSIQHIGVGEGTWPSMKQTLARIGISENDFLNHCQASFKQGSQFINWGCGRTPDHYHHPFTPPATQSERNTAAFWQPYQQTHSFAEFFSIQPKVIEQGLAPKQISTPEYAFIANYGYHLDAGKFVQMLTEHGKRKLNIHHLLDDIVEIQSQPGSDEIAAVVGQRHGAISGDLFIDCTGFRSLLLGQHYGIDFIEQDSVLFNDRAIAAQVPYPLPDAPIASATLSTAQEAGWVWDIGLQNRRGVGYVYSSSHSNESQAEQVLSQYIKQSGVSEVPEFRSISIRPGYRERFWHKNCVAVGMAAGFIEPLEASALVMVEMAAQYLAEQLPQNQSAMPLVASHYNDCFTRRWQQIMEFLKLHYVLSNRTDTQYWRDNKSTDSIPDTLQEKLTLWQTSCPSHYDFGYIQELFPAASYQYIYYGMGGQTRFRPTASLQEQHQAMQQRLRDNEVKSRQWLSRLPSNRQLLNQIQAQGLAT

SEQ ID NO: 86702 - protein, 509 aa, Xanthomonas oryzae
  REGION 1..509: note = tr|A0A0K0GFN9|A0A0K0GFN9_XANOP Tryptophan halogenase; OS = Xanthomonas oryzae pv. oryzae (strain PXO99A) OX=360094; GN = PXO_03613 PE=4 SV=1
MIPAPLRNIVIVGGGTAGWMAAAAFARVLGPTFTVQLIESEQLGTVGVGEATVPHIKAFNNLLGIDEAEFVRQTQGSFKLGIEFVDWQRPGTAYMHGFGTQIGHPLGLLPFHQYWIKQHARGKAQPLGAYTLNTVAAARGKFMTSAGDVPANSPLANIAYAYHFDATQYAHFLRRYSQQRGVTRIEGLVEQVQLHPESGHVQSLQLASGQTVHGDVFIDCSGFRGLLIEEALHTGYHDFTHWLPCDRALAVPCEKVGPPTPYTRSTARAAGWQWRIPLQHRTGNGYIYCSAHISDDEAAATLLANLDGKPLADPRPLRFTTGRRKQFWNRNVVALGLASGFLEPLESTSIHLIQSGISKLLELFPREGISPVLVQRYNDRSAFEFDRIRDFLLLHYHATEREDSAFWRHCRSMPITPELQTTLDLFRDSGRFYRNAEEMFAEISWVQVMVGQGILPQGYHPLVDQVPDRDAEGFLASVAHTIAHCVDVMPPHQQFIDRYCKAAALPCGG

SEQ ID NO: 86703 - protein, 374 aa, unidentified
  source 1..374: note = Burkholderiaceae bacterium
  REGION 1..374: note = tr|A0A5C8AUV7|A0A5C8AUV7_9BURK Tryptophan 7-halogenase (Fragment) OS=Burkholderiaceae bacterium; OX = 2030806 GN=E6Q34_09805 PE=4 SV=1
INTVASLMGKFSVGRPDLPNSPLSDLSYAYHFDAGLYAKYLRRYSEQRGVKRTEGKIVKVNVKPENGFIESVTMENGDVISGDFFIDCSGMVGLLIEQALHTGYEDWSHWLPCDTAIAVPCSLGGSSQAHTRSTAHEAGWQWRIPLQHRIGNGHVFSSKFMDKEKATHILLNNLDGQVLAEPRQIKFTTGKRKKAWNKNCLAIGLSGGFMEPLESTSIHMVKTGLMRLLSFFPNKDFDQVDIDNYNRLTDKDYAQIRDFLILHYKVNTREDSEFWKYCREMEVPESLQIKLDLFASNGRILRENEELFPEDSWLQVMHGQGMRPRRYSPVVDQRSKDEIAGFLYNTQMVIRKCVDAMPTHLDYIRANCMAREAA

SEQ ID NO: 86704 - protein, 502 aa, unidentified
  source 1..502: note = Micromonospora deserti
  REGION 1..502: note = tr|A0A2W2CXX8|A0A2W2CXX8_9ACTN Tryptophan halogenase; OS = Micromonospora deserti OX=2070366 GN=C1I99_17100 PE=4; SV = 1
MTDNEVDSGFDVVVVGGGPCGSTVSTLIAMQGHRVLLLEKERFPRYQIGESLLPSTVHGICRILGVEEELRQANFMPKRGGTFRWGSNPEPWTFSFAISAKFAGDAATAYQVERMRFDQILLDNARRKGVEVREETSVVDVLTDPETDRVCGVRYTGPDGVRREVRSRFVVDASGNKSRIHTRVGGQRRYSEFFRNLALFGYFEGGKRLPAPNQGNILAVAFDAGWFWYIPLTPDLTSVGAVLLPEALDRAQGDREQALLDLIQQCPLIAEYLANARRVTTGPYGEVRVRKDYSYIQEKFWRPGLVLVGDAACFIDPVFSSGVHLATYSALLAARSINTVLRGGADETACFEEFEVRYRREYARFHDFLVAFYDMHQDENSYFWKAKKVTNNAASEVESFVELVGGGASQEAALVSAGTYAQRRDAAYQELADLVAQPVQQAGEDRDLLRATLARSVSREGARIQIQAELGESADENVPVRDGGLVPSTDGLHWSTPPRPAS

SEQ ID NO: 86705 - protein, 504 aa, unidentified
  source 1..504: note = Burkholderiaceae bacterium
  REGION 1..504: note = tr|A0A5C8B9E3|A0A5C8B9E3_9BURK Tryptophan 7-halogenase OS=Burkholderiaceae bacterium OX=2030806; GN = E6Q34_01465 PE=4 SV=1
MNNRIKKITIVGGGSAGWMAAATLATYLGKASQICLVESEEIGIVGVGEASVPHIRQFNGQWLGIEETEFVRRTQATAKLGIQFKDWGKIGDSYVHGFGAIGRAIGPLPFHQFWLKLFLSGRASPIGDYSPQTVMAPRNKFVPRDHRATADSPFADIAYAYHFDATLYARYLREIAEQRGVQRFEGKVVAVKQSQANGHENFVEAVVLENGQVIEGDLFIDCSGFRGLLIEETLKTGYHDWSHWLPCDRAQAVPSESVNPLTPYTRATAQAAGWQWRIPLQHRVGNGYVYCSKHISDDEANATLLRNLDGKALAEPRLLRFTTGMRKQFWNKNVIAIGLAGGFLEPLESTSIYLAQTGITRLLSLFPHQDFDPELRQRYNNETAFEYERVRDFLILHYHATQRDDSPFWNHCRTMEIPESLRAAISLFRKDGRYFRHGEDFFALPSWVQVMLGQGIIPQHYHPIVDEMPEDRLIAQVEGMRDLLQHATASMPTHAEWVERYWRA

SEQ ID NO: 86706 - protein, 497 aa, Massilia sp.
  REGION 1..497: note = tr|A0A0J1DBZ8|A0A0J1DBZ8_9BURK Tryptophan halogenase; OS = Massilia sp. WF1 OX=1406431 GN=AB595_12840 PE=4 SV=1
MQQQHKPIRRIVIAGGGTAGWMTAAALSRTLGKVIDIKLVESDEIGTVGVGEATIPTLVHFHRLLDIDEREFMAATQATFKLGISFESWRDRGKDYIHSFGSTGTDHFTAGFQHFWMKGRSKGLARDYGDYCLELKASLEGKFAHLPNDGLNYAYHLDAGRYARFLRRFSEHFGVERIEAKIAKVDTDPASGDISALVLDSGTRIEGDLFIDCTGFRSLLLGQTLGVGYEDWSQWLFNDSAIAVQTERMGPALPLTRSMAHDWGWQWRIPLQHRVGNGIVYASRYIDDARAQATLLGNIEGKALTEPRVIRFKPGQRKQTWSHNCVAIGLSSGFLEPIESTSIHLIQRSIVRLLQNFPSQGIRKSEVDEFNAQAWSEIESIRDFIILHYKVTERRDTPYWKDAAEMAVPAPLQHRIDMFRETGRSFRVLNELFAENSWIQVMLGQGIMPEQHHPSADLMGDEELNGFLEGIRKHVERTAAQLPSHQEYVERYCGATL

SEQ ID NO: 86707 - protein, 518 aa, unidentified
  source 1..518: note = Alteromonadales bacterium
  REGION 1..518: note = tr|A0A2N0WTZ2|A0A2N0WTZ2_9GAMM Tryptophan 7-halogenase OS=Alteromonadales bacterium alter-6D02; OX = 2058087 GN=CW748_02165 PE=4 SV=1
MTQQTVQQVVVVGGGTAGWLTAANLAKRFNSTQPGSIQVTIVESPDIPTIGVGEGTWPTMRKTLANLGISETEFLVKCNASLKQATKFVNWRETPAAGDSNHYYHLFTSVYDASDFNLAPYWQRGDLGSSTYAQSVSVQGEVCERKLAPKAITHKEYEGAQNYAYHLDAGLFADLLKQHAVEVLGVKHIAANVSQVNLDKDEYIASVTTDRSGVIEGDFFIDCTGFKCLLLGDALGVKFKKVDNALLTDHAVVMQVPYQDEQQEIASCTISTAQEAGWIWDIGLSNRRGTGYVYSSKFTSHEQAEQTLRDYVGPESEGLMTRVIPMNIGYREKFWHKNCLAVGLSAAFIEPLEASAIFLMEAASNMLCDLFPRDRQAMAVVEKKFNQSFQFRWNKTIDFIKMHYVLSQRTEPFWLANQHQETIPETLTELLERWRYHPVSDYDFDNVYEPFPMESYQYVLYGMGFKQDLSFNAGRYSKSAQAIQNFNNVQHIAQQVESKLPSNRDLLNKVNQYGFQKL

SEQ ID NO: 86708 - protein, 609 aa, Fischerella thermalis
  REGION 1..609: note = tr|A0A2N6KLP1|A0A2N6KLP1_9CYAN Tryptophan halogenase; OS = Fischerella thermalis CCMEE 5268 OX=2019662; GN = CEN50_01775 PE=4 SV=1
MTTNNTQSQVYDVVIMGAGIGGVCQARHLLLNIPNIKIALVDPRPEERTDRDMKVGESTVEISTLMICKELGLYDYMIENHPPKFGLNFHWAKEAGKTENTEDYYHIWTVKQPPLASVLINRPKFERDLLRMNQDMGAEFYNGRVVDVDLTPGDELNTVHVKQGDRYLELKTKHVIDSAGRKFLIGRKTDNLITSPENLYGINNGSVWMRVRNVDRTIFHSGYDPYVCTCSHYYAANHWMGHGHWVWMLPTDTQNMELSIGLLYHHDIISPHSVNTKEKFYAFLEANHNVVYRLLKSGEEVDFHHWPRIAHKSKQMYSQDNWYIIGDAAAIFDPFYSQGLTMMSFQIESVTEIIRAKLAGEANAKEKCALYNKFALNMIDRTNVLVSRHEKQIGDASIMTWRMYLENIWWFKMLIPMFVGKWHLDLDFLKNVVAKPGRLYVVQIMNAVYEHLDELVERKANIGFLHTHIADQLPFGFTMSNDFDNFLHLTKYEPQRANIYVSIQWSHFFVALWYLKFLWKAYGLKGVLSPHNLKHVFALFKAFLEAAWDHLIFRIKTKNIPGNSIIANIRQEFKNYRAPAKLEPWLEEVTEASNGNVTTQSRELVKAEV

SEQ ID NO: 86709 - protein, 510 aa, Pseudoxanthomonas sp.
  REGION 1..510: note = tr|A0A0Q8EZF1|A0A0Q8EZF1_9GAMM Tryptophan halogenase; OS = Pseudoxanthomonas sp. Root65 OX=1736576 GN=ASD77_14580; PE = 4 SV=1
MDSPTTPEGRIRKVVIAGGGTAGWLAGCALAHQFRDRLDITLVESEQIGTVGVGESTVPPIRTFHRFLQIDEQEFLRAVAGTFKLSISFENWRRPGERYIHPFGITGQGTWAAAFHHFWLDSLRRGMTSELGDFCLETVASRGDLFSLQTQPQVNYAYHFDAGLYAKFLRRIAEGHGLRRVEGKIREVRQHAHDGAVQSLVLEDGQVIEGDLFIDCTGFRGLLIEQTLHTGYEDWNEWLPSDRAVAVQTESVGPPVPYTRAIAHEAGWRWHIPLQHRVGCGLVFSSRHMSDDEARAKLLRDVGAPALRDPWLVPFRTGRRLKAWNRNVVSLGLASGFIEPLESTSIHLAISAVVRLIQLFPFDGIASSLVDLYNDVSRAEMEHVRDFIILHYHATQRDEPMWKACREMALPDSLEIRLRAWRERAHAWQDADELFRVDSWTHVLLGQGIQPGSPHPLARALADDDLRTLLQSIRQPIERAVAQMPSQQAFIERYCKAAPEVWPSPRAVTA

SEQ ID NO: 86710 - protein, 513 aa, Novosphingobium sp.
  REGION 1..513: note = tr|A0A158S291|A0A158S291_9SPHN Tryptophan halogenase; OS = Novosphingobium sp. KN65.2 OX=1478134 GN=SPHV1_2360023; PE = 4 SV=1
MQRPTKKIVIVGGGTAGWLTAGVIAAKHRSRMPGGFSVTLVESPNTPIIGVGEGTWPTLRTTLARIGVSETDFFRECDAAFKQGAKFARWTTGAPDDAYYHPLMLPQSFAQLNLAPHWLANGESSFCDAVCPQGRICDDGLAPKTIATPEFEALANYAYHLDAGKFAPFLQRHCTQKLGVRHVLADVQRVEMTDDGDIKSVVTEQAGEIEGDLFVDCTGFKALLIGEALGVPFKDCSDVLFCDTALAVQLPYESETSAIASHTISTAQSAGWIWDIGLPTRRGIGYVYSSDHTSGDEAEQELRAYLGAAGKDLPLRKIPIRSGHRETFWKRNCVAVGLAAGFLEPLEASAIVLIELSAKLIAEQMPACREVMDAIARRFNATTDYRWGRIIDFLKLHYVLTQRTDSAFWLDNLRPETIPERLQELLLLWKYQGPWFHDEFDRVEEVFPPASYQYVLYGMGFRTEVEPEALAGDASLAARAMRENAAQTQRLRAGLPRHRDLIRKIVDHGLQPV

SEQ ID NO: 86711 - protein, 466 aa, Sphingomonas faeni
  REGION 1..466: note = tr|A0A2T5UCG3|A0A2T5UCG3_9SPHN Tryptophan halogenase; OS = Sphingomonas faeni OX=185950 GN=C8J25_101659 PE=4 SV=1
MSQTVAILGANLCGWMAAAALARRLPRDRYSVVVIDDGTTGDGLGDFAPVIAVPPALGGFHADLGIEPTALVRATGGSHALGVAFGGWRKDGAAAFLSYGETGAPLQGIAFHQLAGRLRKDGIHVRLADYAVSAVAAQVGRFALEAPIAHALHLLVDPYTAVLRAAAMNFGASCTNAPFADAQIDASGIVETLKLADGTDIAPLLVLDCSGSSARIASRTAPAFEDWSAWLPCDRTYTQTLPATGAPPPYTQVDAQGSGWTATWPLGGADVRLTCAASGEGTPFRAGRRVEAWRGNCIAMGAAAGLIEPLHPTALTVLLRSLAQLIQLWPAERRAPVEAKAFNRFTANAMTGARDFVIAQKAAARGSNAIGDVRSEPVLPDAIEAKRTLFAARGRLPMFDDEPFEEEDWAAMFDAMGLVPRRYDARADALPLATIQQHFADHRARIIAQVRALPPYAHAMAELAAA

SEQ ID NO: 86712 - protein, 504 aa, Sphingomonas parapaucimobilis
  REGION 1..504: note = tr|A0A0A1W3E7|A0A0A1W3E7_9SPHN Putative tryptophan halogenase OS=Sphingomonas parapaucimobilis NBRC 15100; OX = 1219049 GN=SP5_010_00070 PE=4 SV=1
MNDRSAEAIRLVVIVGGGTAGWMTAAALAHAMPRGLSITLVESDAIGTVGVGEATIPPIRLFNQTLGIDEAEFLRETRGSFKLGIEFVDWGRKGHRYFHPFGTHGKSFDLVAVHQHWLAAGGPDSGIAFDDLSMAWGAGQRGRFAQPMADPRSVASTFDYAYHFDAGLYARFLRRYAEARGVVRVEGKISGHALEGARGHVASVTLDDGRVLAGDLFVDCSGFRGLLIEEALGTGYEDWTHWLPCDRAVAAPCETGGDGLTPYTRSTAREAGWQWRIPLQHRTGNGYVYCSRHISDDQAAATLMANLDGKALGDPRFLRFTTGRRKLMWNRNVVAIGLSSGFMEPLESTSIHLIQAGIAKLLAYFPTRAFAAAGIEEYNRVAITEYERIRDFLILHYKLTERTDAPLWRECAGMPIPDTLAMKIAHFRESGRLVARDMDLFGPASWAAVHLGQFNMPEGLDPLLAYADPAQSRGFVGKLASAIGQMAESMPSHADWLKKIGATA

SEQ ID NO: 86713 - protein, 503 aa, Pseudoalteromonas sp.
  REGION 1..503: note = tr|A0A4Q6YXN1|A0A4Q6YXN1_9GAMM Tryptophan 7-halogenase OS=Pseudoalteromonas sp. CO342X OX=1777270; GN = EXT47_09850 PE=4 SV=1
MKNQKIVILGGGTAGWMAANMMAKSWADKAIEITVVESSSIGTIGVGEGSTPQFKGFMDYLGISEAEWMPACNATYKNGIRFIDWSTKPGFSSYFHPFPAQPDDYSAPAFFHNSFVRRKAIDVEGHPDHFFLATHLADLNKSPIAAESFPFEINYGYHFDSALLGQLLARKAAEFNVKHIDATITDVRKHLDGDIAALITSDGTEIAGDIFIDCSGFKSLLLQHTLGVGFESFESNLFNDAAVVIPTKQLDTIRSETQSVARQFGWSWHIPLTNRIGNGYVYSQRYCDADQAETELRAALGLLDSEVEARHIKMKVGQVKAHWSKNCIAIGLSQGFIEPLEATALHIVQETVQSFIECYQDADFTDGNRDKHNRALSERYQAIRDYIVAHYRVNSRTDTNYWLDNANNNHLSRSLYQILQTWVSGNNLSDELVRQNVDQYYPSVSWHCLLAGYGIYPEQAQLKSGNALANQHNIEKVNDFIRRCGLNFKDHRMELESFAANVH

SEQ ID NO: 86714 - protein, 500 aa, Novosphingobium sp.
  REGION 1..500: note = tr|A0A257YPZ8|A0A257YPZ8_9SPHN Tryptophan halogenase; OS = Novosphingobium sp. 12-63-9 OX=1970403 GN=B7Z36_00050; PE = 4 SV=1
MTTPHHPRRIVIAGGGTAGWMTAAALARTLGPVAQVTLVESEQIGTVGVGESTIPPLVAYNRILGIAEADFMRATQATFKLGINFENWRVAGESYFHSFGGTGKDHWSAGFQHFWMNGLTRGHTVPYSEYCLELKAAEASRFAHLPEDRMNYAYQLDSGLYARFLRGMAEADGTRRIEGKIAQVQLDGETGDIAALLLDSGERIEGDLFIDCTGFRALLIEGALRVGYDDWSNWLPCDSAIAIQTSSVRPPVPYTRAIAHEAGWQWRIPLQHRQGNGVVYCSDFLGHDAALEKLLSTVEGEKLVKPNHIRFRTGARRKQWHRNCVAVGLSGGFMEPLESTSIHLIQRAILRIVRMLPAGTISQRDIDEFNDQQFTDMEQIRDFLVLHYKVTDRRDTPFWRHVAAMDVPESLTHKIELFRETGRVFRKNEELFAENSWVQVMLGQGIMPQSHHPVAAKLRDDEMAHLLTTLREQVARTVAALPSHADYVARYCGADIPAAA

SEQ ID NO: 86715 - protein, 519 aa, Cellvibrio sp.
  REGION 1..519: note = tr|A0A2T6FIL2|A0A2T6FIL2_9GAMM Tryptophan halogenase; OS = Cellvibrio sp. 79 OX=1954207 GN=B0W54_17120 PE=4 SV=1
MNNPIKKIMIVGGGSAGWLTAGLIAAEHLVDKMRGIELVLIESPDVPIIGVGEGTWPSMRTTLKKIGVSETDFFRECDASFKQGSKFIDWVKPGGGAYYHPFNLPDGGNEFNLAEQWLPFRDTVTFADAVCPISHISERNLAPKLITTPEFVGNSNYGYHLDAGKFSVFLKQHCIEKLGVTYIQDHVVKINSAENGDIASLSTKMNGDLSADLFIDCTGFASLLLGEHYQIPLKQEHRVLFNDSALAVQIPYPDADAPIASCTLSTAQDCGWIWDIGLPTRRGVGHVFSSAHTSDEQVLKNLQAYLEPAIGKAAAEKMMPRKLTFNPGYRQELWHKNCVGVGISAGFIEPLEATALVLIELSAQMIAEQLPATRGVMDTVAKRFNRKLFDHWQRIIEFLKLHYVISERRDTDYWRDHLDESTQPDGLRELLELWRHHVPWRNDIRSDEMFPWASYQYILYGMGFQTNVPAVAKRGAAMNAENAGRMFSENSKKTNALVKNLPTNRALLVKLREYGFQKI

SEQ ID NO: 86716 - protein, 499 aa, Pseudoalteromonas sp.
  REGION 1..499: note = tr|A0A2D5T1Q1|A0A2D5T1Q1_PSEAS Tryptophan halogenase; OS = Pseudoalteromonas sp. OX=53249 GN=CMK64_07855 PE=4 SV=1
MQNKINHVVIVGGGTAGWMTANLLAKVLGKSINVTLLESNDIATVGVGEATIPPILHFNQAIGVNEHAFMQASKATIKLGIQFENWLKPEHNYMHAFGSIGKNFPFCDFHHFWLKQQNNNAQVDNLTYWDYSLNYQAAKHNKFQKLKNIPNTNLPGIAYAYHFDAGLYAKFLTEHGKQQGVKHVIGTVKQVNQNHETGFIESLLLDDDTQLNGDLFIDCTGMHALLIENTLSTGYEGWSHWLPCDRAMAVPSENAETLVPYTRSIAHHVGWQWQIPLQHRTGNGLVYSSKHMSDDEAKKTLLGNLPGKPLSEPRVIKFRTGRRRKVWNKNVISIGLSSGFLEPLESTNIHLVQSVATRLLKFFPHNGISQTLVDEFNRLCKTEVEGIRDFIILHYKLNARSDSAFWRQCQQMDVPDTLNTKIELFKQTGKVHCEPNDLFTEIAWQQVMLGQGVTPADTHPLVDGLSNEQIEDMMNSLRTLVDKTVETMPTHQDFLPTLI

SEQ ID NO: 86717 - protein, 495 aa, Cellvibrio sp.
  REGION 1..495: note = tr|A0A2T6FKJ3|A0A2T6FKJ3_9GAMM Tryptophan halogenase; OS = Cellvibrio sp. 79 OX=1954207 GN=B0W54_11360 PE=4 SV=1
MASRSVKKILVVGGGTAGWMTAAYLARWLENTNIQVALIESEQIGTIGVGEATVPGIHQFIRDLDIKESEFIRATNATFKLGIEFSGWAGEGQHFFHPFGGYGVPIEDRSFHKTWWSAKNQGYALGLDKFSLCTQLARAGRFAQPSFEPESSLAWYSYAYHFDASLFAKFLRSYAEQRNVTRIEGKVNHIQLDASSGFIQSVTMESGLVVESDLFIDCTGMPALLIHKTLGVGYEDWSKWLLCDSALAVQTKSAAEPDPFTRSSARTAGWQWHIPLQHRVGNGYVYSSQFTSPEQAHRELLGNLAGELTTDPRLIHFTTGMRRDFWYKNCVAIGLSSGFLEPLESTSISLIQTGIAKMAAFLVNFEINETRVAEANRLNRLEYERVRDFIILHYKLNGRSNPFWQHVREMAIPASLEEKIASFRASGDIKEEEQESFKADSWISMFYGLGLAPQGLAPLADPEKAPAILNNMAGAIAKGCHYASSHADFLKTLGN

SEQ ID NO: 86718 - protein, 505 aa, Cellvibrio sp.
  REGION 1..505: note = tr|A0A2T6FGX1|A0A2T6FGX1_9GAMM Tryptophan halogenase; OS = Cellvibrio sp. 79 OX=1954207 GN=B0W54_13695 PE=4 SV=1
MSNYRVNHILIAGGGTAGWMTAAKLNQHFSQTTVKITVIESSEIGTIGVGEATIPTLRRFYQSLGMSDLEVIRKTAATVKLGIEFKDWHKPGSSFIHPFGIFGHEANGIRFHHYWMKLRELGDNSALEEYSLGIAMARANKFTFPLENPESPLSIFDWALHFDASLFGKLMRDYALAQGVEHIDAKINHVNIHADNGFIRSLTLDDDRELAADLFIDCTGFRGLLIGDALKTDYVDWSQWLLCNRAMAVQSELVGEAMARTVSKAHTAGWQWKIPLQHRQGNGHVYCSEFVSDEQAKETLLQHIDGKVLHSPRKFHFTPGRRSRAWNKNCIAIGLAAGFLEPLESTSIALIETGIEKICSSFLRPFFDQEVVDQFNQRTAAEWERIRDFIIVHYKLNQRNDSEFWHYCRNISMPDSLQQKITAYHERGDLLHYPYEIFHPDSWLAIYSGFGFYPQNYHKNVERLNPKYLQQSLALMRQSITEAVAGFPSLNDFMLQNQAQYSVGE

SEQ ID NO: 86719 - protein, 508 aa, Pseudoalteromonas luteoviolacea
  REGION 1..508: note = tr|A0A167D6I5|A0A167D6I5_9GAMM Uncharacterized protein OS=Pseudoalteromonas luteoviolacea H33 OX=1365251; GN = N476_21605 PE=4 SV=1
MKLIVVGGGTAGWLTACHLAKSLENSPEYSVTLIESPNIPIIGVGEGTVPSIRDSLKTIGISEQEIFQKCDATFKQSIKFINWRHREKSESIHFYHHLFDYPLPSGVDLYPLWKVEGQQEPYASFVAPQYSVCENGLAPKLITTPEYKGITSYAYHFDAHKFADLLRNHGVKRLNIEHIKADVESINKDSEGYIESLICQDESIITGDLFVDCTGFNSFLMGQQLGIPFVDKSDLLFTDKALTMQVPTTENEDIPPYTLSTAHQAGWIWDIALTTRRGVGFVYSSRHMDEETARLKFRAYLGESITDEQFTPRKIDMKVGRREKFWHKNCVAIGLSQGFVEPLEATAILISDLSARLLAQRVPKNRQEMEALSTRFNNRLVYGWDKVLEFIKLHYALSDRKDSAFWTDNRDLSLCSNNIKDMLALWSHQPPVKEDFFSKFEVFDYENYLYILFGMDFQTGSEHRQGQNLSMEMKCREQVKSASKHFCDNLEEHRTLLNKIAEFGIQKS

SEQ ID NO: 86720 - protein, 412 aa, Nonomuraea sp.
  REGION 1..412: note = tr|A0A2W2F1J6|A0A2W2F1J6_9ACTN Tryptophan halogenase; OS = Nonomuraea sp. KC333 OX=2070368 GN=C1J01_14105 PE=4 SV=1
MEQTPDRTVDVVVIGAGPAGSSTAALLAEAGYQVLVIEREKFPRYHIGESLIPGCLPVVKDLGLTDRLEAMAFTKKYGGTLLWGKDEGTWEFRFADGTVYEYSYQVRRADFDSLLATRARELGAQVVEEATVKQVEFEGDRATGVAFTRKGKDEVERVKASIVVDASGQGRVLARQLGLVEWHEDLRNVAVWSYFQGHTLLEGNKAGDILIEHRPDGWFWFIPLSDGTVSVGYVTRTSDLKESGLTPEQLFAREREASVEIRKLMASAEEVSAYRTIRDWSYTCTDFHGPGWVLVGDAAAFIDPLFSTGVTLAMRGARSVSKAVEEALRRPESEAKVLDIYEARYREFLSSILAFVRFFYDKNKHKEEYWAEAQELIDPNQVQAPHEDFSTLLSGLADLITADFSLDISFDD

SEQ ID NO: 86721 - protein, 517 aa, Sphingomonas parapaucimobilis
  REGION 1..517: note = tr|A0A0A1W4X7|A0A0A1W4X7_9SPHN Putative tryptophan halogenase OS=Sphingomonas parapaucimobilis NBRC 15100; OX = 1219049 GN=SP5_034_00630 PE=4 SV=1
MQVVETEVRRVVVVGGGSAGWIAACRLAAQARRIGSGVQVTLVESRHVPTVGVGEGTWPTMRNTLARIGITETDFIRSCDAAFKQGARFVGWTDGTADDGYYHPLNPPAGATEIDLAPHWLHGAAETASFADWVDYQAMLCDAGLGPKTIVMPEYAGHANYAYHLDAGKFATLLREHGVGTLGIDHVLGDVVRPEMSDHGDIVHLELADGRIVPGDLFVDCTGFAARLIGGVYQVPFRRCGDVLFADRAMALQVPYEDEDAPITCHTVSTAQGSGWIWDIGLWTRRGVGHVYSSAHSSDDAAEAALRRYVGPAAQGLNVRRITIDAGHRTRFWQNNCVAVGLSAGFIEPLEASALMLIEASMDAIADRLPRTRAAMDVMARQFNATFTHHWMRIIEFLKLHYVLTRRTDTDFWRDNVAASSIPDGLAEQLELWRHHSPGPQDFTHAREVFSWPSYQYVLHGMGFASRQPRIDPAAPDTALAQRFVTRMARARDDLRTRAPRHRDLLRAIREHGLQRV

SEQ ID NO: 86722 - protein, 517 aa, Cellvibrio sp.
  REGION 1..517: note = tr|A0A2T6FIL1|A0A2T6FIL1_9GAMM Tryptophan halogenase; OS = Cellvibrio sp. 79 OX=1954207 GN=B0W54_17595 PE=4 SV=1
MNKPVLSIVVVGGGTAGWITAGRIAAHHRTNANSPIQVTLVESPNIPIIGVGEGTWPTMRSTLMKLGISETDFIRECDASFKQGAKFARWTTGASDDFYYHPLMLPQGFGKTNLVAHWQKNRTQLNNESFSATVCFQEAICEQGLAPKMISTPEFSSVANYAYHLNAGKFSQFLQRHCCEKLGVRHILADVIHVNSNDHGDITSVTTAQAGNIAGDLFVDCTGFSSLLLGQHLQVPFIDHSDVLFIDTALAAQIPYEHENSPIASHTISTAQSAGWIWDIGLRHRRGIGHVYSSRHTNEERAMEELQRYIGPAFNQASVRKIPIHCGHRKIFWKNNCVAVGLSAGFLEPLEASALVLVELSATFIAEQLPARREVMDITAKRFNETFQYRWQRIIDFLKLHYILSKRTDSEFWIDNRDKSTIPPSLQELMELWRYQAPGDLDFSSNNEVFPAASYQYVLYGMGFETDFSNHAHLLMDKEFAHSQFIKTQKAIAHASSNLPGNRELLNKIYEYGLQTI

SEQ ID NO: 86723 - protein, 502 aa, Sphingomonas parapaucimobilis
  REGION 1..502: note = tr|A0A0A1W9P2|A0A0A1W9P2_9SPHN Uncharacterized protein OS=Sphingomonas parapaucimobilis NBRC 15100; OX = 1219049 GN=SP5_073_00160 PE=4 SV=1
MSGDAPIGRIAIIGGGTAGWMAAAALARVLGPEGPAITLVESEEIGTVGVGEATIPPIQAFNALLGIDEDDFIRATQGTFKLGIEFVDWLRPGHRYFHPFGVYGIDKGAIPFEAMWQRLRLAGEALPLEAYSICAAAARSGRFMRPQPGNTPLAHIGYAFHFDAALYARFLRGHAEAAGVRREEGRVVSVERGGPRDFIEAVMLADGRRIAADLFIDCSGFRGLLIDDAMGAGFEDWGHWLPNDRAVAVPTANAGPPAPFTRSTAHGAGWQWRIPLQHRTGNGLVYASRHLSDDEAVATLLAHLDGAPLADPRPLHFRTGRRDRFWIGNCVALGLAGGFLEPLESTSIHLIQAGIARLLEMLPTQAFEPADTRRYNRLMAAEFDSVRDFLILHFHATERRDTAYWRELASMDIPETLAERLAIYARTGRVYREADELFTKTSWLAVMDGQGLIASGHDPLAQGMPMDELRARLDRIAAVTQAAAGHMAAHADFLARHCSARN

SEQ ID NO: 86724 - protein, 515 aa, Sphingomonas parapaucimobilis
  REGION 1..515: note = tr|A0A0A1W2L9|A0A0A1W2L9_9SPHN Putative tryptophan halogenase OS=Sphingomonas parapaucimobilis NBRC 15100; OX = 1219049 GN=SP5_003_00010 PE=4 SV=1
MVQPVQNIVIVGGGTAGWLTAGVIAARHQGRRPHGFTVTLVESPNVPIIGVGEGTWPTLRTTLKRMGVSETAFLRECDASFKQGARFNRWTTGAADDGYYHPLMLPQSFAQVNLAPHWLMVDDDAVSFCDAVTPQGRICDAGLAPKTIATPEYEAIANYAYHLDAGKFADFLRRHCCEQLGVRHVLADVEEVLLTESGDIRSVRTAQAGEVTGDLFVDCTGFRSLLLGEAMGVPFQPLNDVLFCDTALAIQVPYDDPEAPIASHTISTAQSSGWIWDIGLPTRRGVGHVFSSSHIDRDDAERELRAYLGEAGRDLPVRELKIRAGHRTRFWERNCVGVGLAAGFLEPLEASAIVLIELSAKLIAEQMPACREVMDTVAKRFNDTTLYRWGRIVDFLKLHYSLTKRTDSDFWRDNCRPETMPDRLQELMELWRYQAPWMHDEFDRVEEVFPSASYQYVLYGMGQRTDIAPGSLIAETVAAERARRENDVQTGRLLAGLPKHRDLIRKIVERGLPTI

SEQ ID NO: 86725 - protein, 494 aa, Cellvibrio sp.
  REGION 1..494: note = tr|A0A2T6FEC2|A0A2T6FEC2_9GAMM Tryptophan halogenase; OS = Cellvibrio sp. 79 OX=1954207 GN=B0W54_22770 PE=4 SV=1
MNTIRNIVIAGGGTSGWLAAAAISKVLGKNLNITLIESPDIGRIGVGEATIPTLRVFHKLLGINDQELMAQVQGTFKLGIEFSHWANKGDKYFHSFGLTGKECWACQFQHFWFAGKKYGINVPFGDYCPESKAARLEKCSGEHDGINYAYHFDANLYADYLKAFSTKLGVKHVEGFIERVNISPENGYITSLLLKDGQEIAGDLFLDCTGFKAMLIDGALNTPYVPYGHYLPCDSAVALQTENVRSPRPYTQAIAHDFGWQWRIPLQHRSGNGLVFSSRHVSDDEAIHTLLNNLEGRPVTEPRVIKYKTGRRIKSWNKNCIAVGLASGFIEPLESTSIHLAMSAIYRLLRYFPQHEISLSNVDEFNRQSSEEMDRARNFVVLHYHATQRDDTDFWRYCKNMEIPEILARRIQLFKDTGAITLEDKELFLNDSWVQVMMGQGIMPTAYHPIVDMMEEKELKGFLAFLKDDVHKKVTAMPSHQEFINQFCKARPPV

SEQ ID NO: 86726 - protein, 523 aa, unidentified
  source 1..523: note = Alteromonadales bacterium
  REGION 1..523: note = tr|A0A2N0WTX9|A0A2N0WTX9_9GAMM Tryptophan 7-halogenase OS=Alteromonadales bacterium alter-6D02; OX = 2058087 GN=CW748_02170 PE=4 SV=1
MAQDNNHILIIGGGTAGWLSAAILAKSLNSQSKDGVKLTLVESPDVPIIGVGEGTWPNLRGTLQRIGVSETDFIRECDVTFKQGAEFVNWSHTPTPQQPHSYYHPLSTVNHSSYNFSLAPYWLQQDVATRLPYDRAVATQARLCDHGLAPKQIVMPEYSAVQEYAYHLNANKFADFLKRHCIEKLGVNFVSANVTEVVLDHDEFISHVTTDSAEQPHLEADFFIDCSGNRGLIIKQTYNIDWQDISDVIFNDTALAVQVPYPNDDREIKTHTIATAQDAGWIWDIGLRNRRGVGHVFSSKYTTEAKAKQQLIDYIGTDYSDDLMIRTIKLNHGYHKKFWHKNSVAIGMSAGFVEPLEASAIFLFDAAANMIAAQFPRDKAQMPYVEQKFNQHFTMRMERTVEFIKLHYCISQRRDSQYWIDNCDDKSIPDNLKQRLSYWKSLPPTKYDFDNAWEPFNLDSYLYVLYGMGFETDAANVATKYTEKDAAQAMFNDINKASDLLIDKLPKQKELVDKVLQYGFAKV

SEQ ID NO: 86727 - protein, 498 aa, Pseudoalteromonas sp.
  REGION 1..498: note = tr|A0A3D5EF33|A0A3D5EF33_PSEAS Tryptophan halogenase; OS = Pseudoalteromonas sp. OX=53249 GN=DG048_05435 PE=4 SV=1
MESKKITKVVIAGGGTAGWITAALLNKVLGKVLDITLIESAEIGTVGVGEASIPPILHLNGALGITEKEFIKATGATIKLGIEFENWRSQGHSYMHAFGEIGKDFPFCEFYHFWLKANQANNAPDFWDFSLNYQAAKAHKFAHLKHIPNTQLAGLHYAYHFDATRYGEFLKELAQSRGVKRIEGKIESVNQCHQSGHITSLLLKNGEQIDGDLFIDCTGLSALLIEQTLNTGFEDWSHWLPCDSAVAVQSESANDAIPYTRSIARDSGWQWQIPLQHRVGNGLVYSSRFLSDEAAKQQLLDNLPAKVLTEPRVIKFKTGRRLKQWHKNVVSVGLSSGFLEPLESTSIHLIQSAAIRLIKFFPHQGIKQSLVDEFNQQSKTEFERIRDFIILHYKITERDDSAFWRFCKGMDIPSSLKKKIELFKTSGKLVREDDELFAEVAWQQVMIGQGLIAEDHHPLTNALSDEQLNELFSNLKTLINSTVEQLPSHSQFLEKVQN

SEQ ID NO: 86728 - protein, 532 aa, Bdellovibrio bacteriovorus
  REGION 1..532: note = tr|A0A150WEM6|A0A150WEM6_BDEBC Tryptophan halogenase; OS = Bdellovibrio bacteriovorus OX=959 GN=AZI86_17355 PE=4; SV = 1
MSSIANAVDTAFDLSYLNFPKYPPTQIKSIGVLGGGTAGYLTALALKKLHPQIKTSVIESSKIPVIGVGESTTTEVVPFLHRTLGIEPERFFREVKPTLKLGIKFDWGCPGDYHFNFNFFAGHQQESYYYEDSINNANWASVLMDANKIPVIRNEDGELSSFLASIPFSYHIDNKHLIRFLNTVVRERGIDIVDAEVTKVNLDEKEFVSSLETNEGQKFTYDLYIDCSGFRSRILGQALKTDFIPFTDTLINNRALTFDTPNNGVIGPHTRCTTMNNGWCWTIPMREENHHGYVHSTLYCDEATALAEVRAKYGNIEKYKMVEFRSGRHTQAWNKNVFAIGNSYGFVEPLESTAIQTAMHSIMTLCKLMPNNFEDYASIAGINSEIAATWDTFRWFLGIHYKFNKQLDTPYWQWCRENTNIGDAQMILDLFHQRPPLSASNFGTQSPYSTLEALVFNSYSYDTLIYGQKLLKDPKKPKMTKEEYLSRVDSYHELTKHALTLKELFDSNALFDQEILSQLFEDPDTWIVETEA

SEQ ID NO: 86729 - protein, 498 aa, Xanthomonas campestris; identical to SEQ ID NO: 83595
  REGION 1..498: note = tr|B0RQE8|B0RQE8_XANCB Tryptophan halogenase, probable OS=Xanthomonas campestris pv. campestris (strain B100) OX=509169 GN=XCCB100_1333 PE=4 SV=1

SEQ ID NO: 86730 - protein, 495 aa, Pseudoalteromonas sp.
  REGION 1..495: note = tr|A0A3D5EPK7|A0A3D5EPK7_PSEAS Tryptophan halogenase; OS = Pseudoalteromonas sp. OX=53249 GN=DG048_25005 PE=4 SV=1
MRQQSIKQVIIAGGGTAGWMTAAALAKLLNKDIKVSLVESDDIGTVGVGEATIPPIRTFHKLLGIDEKLFMKATQATFKLGISFENWHKPQSDYIHSFGMTGKECWAGEFHHFWLHAKKMGNKDDFGDYCYELQAAKQGKFGISPHNPINYAFHMDASRYAAFLREFAENLGVKRFEGKIERVNKHADNGFIKSLLLDDGTEITGDFFIDCTGFKGLLIEQALHTGYEDWSHLLPCDSAVAVQTKGTPEIAPYTRSIAHQSGWQWQIPLQNRVGNGLVYCSRYLSDHDATQLLLNNLSSKTLTEPKIIKFKTGRRRKGWNKNCLALGLASGFLEPLESTSIHLIMTGIIRFMRLFPFTGITQHAIDEYNKQLQSELESIRDFIVLHYKVTDRDDSEFWQHCKTMETPKSLAHKVALFKETGRVFLDDGDIFRVDSWVQVMLGQGIMPEQYHHVASLMNDQELSRFMQGIKQQIAQRLQQLPTHRAFIEQYCPVDT

SEQ ID NO: 86731 - protein, 520 aa, Pseudoalteromonas sp.
  REGION 1..520: note = tr|A0A4Q6YWM0|A0A4Q6YWM0_9GAMM Tryptophan 7-halogenase OS=Pseudoalteromonas sp. CO342X OX=1777270; GN = EXT47_10175 PE=4 SV=1
MNLKEISKVVIVGGGTAGWIAACHIAKKLNPNENDNISITLLDSPDIPTIGVGEGTVPVIKDTLKYFGIKESDFIGQCDVTFKHSIKFVNWCHNPSAVEEDFYHHLFDFPNIRPFDVTPHWLLNKELASKKYADLVSVQSYICEKALPPKRLSDKEFSGLFNYAYHLDAGKFTELLRQHAIHKLGVKNLKCNVTKANLNEEHFIESLELDNGERVKGDFFVDCSGFQSLLIEQSLGGKFIDKGSELLADTALAVQVDYDTPNATIKPYTTSTAQKYGWIWDIGLTTRRGIGYVYSSKYQTEESARSTLLNYIEDSKMLSQVRKLPMKVGYQQTPWINNCVAMGLSQGFVEPLEATGLLMFDVTARMFAEAFPRDVENIKLRQKRFNEDVTQMWESTTDFIKLHYYLSKRDDSAFWIDNRNENSLSNELKEKLQLWRAKIPSQFDFRSNLDLFRVSNYLYVLYGMNYYTHLSIQPPSGEASALSKLLEDIQKGVSYCSNNLRGHRETLEHIKRSVVHVGQK

SEQ ID NO: 86732 - protein, 554 aa, unidentified
  source 1..554: note = Unknown
  REGION 1..554: note = tr|A0A2E5AVU9|A0A2E5AVU9_9BACT Uncharacterized protein OS=bacterium OX=1869227 GN=CL660_07000 PE=4 SV=1
MKVEEPDHFIEFENFDPYKGKIESVVIVGGGSSGWMTAAALAKLCPHLEVALVESKDIKTIGVGESTLGHFNQYLELLDLKDEDWMPHADATYKNGIQFTNFREGKEEVFQYPFYTDYDLTYAPHGLNTWAHLANMFPEDFPPESFAEFYCANTFLCNENKQTRNRDGVIRQFDFRRHTAYHLDATKFGLYLRDNICLPNGVQHIIGEITGFQTMYEKPNDQTISYLIMDGVNAIQADLYIDCTGFKSKLLGGFQGIPFIPAENKLANDKAWAARIPYLEETREKEMHNVTDCWAMPNGWTWNIPLWNRIGKGYVYSSRFVRKEQARKEFIEHLRHTVGKKRADEAKLFHIDIEHGRRQRAWVNNVVGIGLSYGFVEPLESTGLLTTHENILRLVTTLNQRNGYVTRTEKEGFNWICNYTLDNFIDFVAMHYAFSMRTDTPYWRWCTQQNFYNPESVTQNVPVHQSIEQFVSSTLGEGWHPNMNGIPFIAAGHGIKSSSYLRRTDYLLGELMSDKDHLVDKRKKYMQWKDYMEKYIAQLPTHYEFLRDEIYGTP

SEQ ID NO: 86733 - protein, 546 aa, unidentified
  source 1..546: note = Unknown
  REGION 1..546: note = tr|A0A2E5AX61|A0A2E5AX61_9BACT Uncharacterized protein OS=bacterium OX=1869227 GN=CL660_09360 PE=4 SV=1
MKVENIVIVGGGSSGWMTAAALLKCCPWTNVILIESDKPTVGVGESTLGHFNKYLRALDLEDKDWMPKCNATYKNSIQFTDFREKGTVFQYPFGKYDYTDTVEGMKDWFDLARQRPEDFPPESFAEFFNKENSALVKHNKQWDNRDNRWRNFDWLTDVAYHLDAEKFAEYLRDEYCDNFDDRFTHIRGEVRGSVKDINAGGSPAVSNRYIKQLAVRLNEDKRTVGVIGDLFIDCTGFKSVLLEEYMGTRFIKFNDLANDKAYFARIPYLTQDEREKHMHNVTDCQAAENGWLWSIPLWNRIGVGYCWSSRFAMETETRTEFETWIEQKYSVSPDQYEVGTIDIKHGYHEKAWNLNVVAIGLSYGFVEPLESTGLLTTHENILRLVDVLSRRRGYVTQIERNWYNYAAQREVIGFSKFVAMHYALSQRTDNPYWRWCSQRNEYVVEQFDGVVRVNDNYERLGSSLDLDQTMDVNMNGMNYIAAGQGMMLGRDWYADRDPDELTFVENSHLQYQKEVNDFVESDDCPTHYEYLRDYIYGGDELRAELI

SEQ ID NO: 86734 - protein, 520 aa, unidentified
  source 1..520: note = Alteromonadales bacterium
  REGION 1..520: note = tr|A0A2N0WUG3|A0A2N0WUG3_9GAMM Tryptophan 7-halogenase OS=Alteromonadales bacterium alter-6D02; OX = 2058087 GN=CW748_00940 PE=4 SV=1
MAENTNRTIKKVVIVGGGTAGWLAANHLGKQLINEHSGVEVCLIESPNIPTIGVGEGTVPLMRQTLQELGISETEFIRECDVTFKQGIKFVDWVDNPVANKPSYYHHVFDYPNITELDLTPYWLDGLAGDKSYADALSIQGAVCDAGLAPKLITTPEYQGLTAYAYHLDAGKFAAILTKNATKKLGVKHIFADVLKVNVAESGDITSVTTDSAGEIAADIFVDCTGFKALLIGEALGSKFISKQNTLFADHALAIQVPYDEPAAPIPSYTISTAQQAGWIWDIGLNERRGIGHVYSSAHTSHEQAEQDLRQYIGPAAEGIDARLIPMNIGYRELFWKNNCVAIGLSQGFVEPLEATGLLVFDATSKMLATQFPAKHDDIATVAKQFNRNVQATWDNVISFVKMHYCLSKRDDSAFWLDNRDKNSIPDTLLEQLELWRNYVPTQYDFSNRFDIFNRENFLYVMYGMHYPTQIDAIKSRFQEDEVAKQHFKMMAQRTQGALANLPLHRELLLKIARYGLQKR

SEQ ID NO: 86735 - protein, 501 aa, Pseudoalteromonas sp.
  REGION 1..501: note = tr|A0A4Q6YW58|A0A4Q6YW58_9GAMM Tryptophan 7-halogenase OS=Pseudoalteromonas sp. CO342X OX=1777270; GN = EXT47_17765 PE=4 SV=1
MKTHVPMKTIQSLTILGGGTAGWMCAAYLAKHQPNLSITVIESSSIGRIGVGEGSTPHLQLFMQNLGVKERDWIPACQASYKTGIYFDNWNGDNGSYFHPFFSEMDAKTAEVYFVNANARRRGSEYIDKPEHYFLAAVLADKQQAPLPQRPLPRALEYGYHFDAQKLADWLRAFSLARGVKHIQSTVSSVQHHAKEIIALTLESGEQVKSDFYVDASGFNALLIEKTLEVPFISFADQLLNDSAVAIAGAKINPLPSSTSAIAMPCGWRWQIPLQGRTGHGYVYSSAHTTPEEAEAQLRQAAQLDKGQATHLTMKVGMMARCIEGNVFAIGLAQSFIEPLEATALMVTGYSIELLNRLLSQQLKAQAINQQLSELVLGIKEYVLAHYATSKRADSPYWQDAKIAALSLNELDELLTHWRSGGDFDAWLNQHRMHSPYIRPSWYCLLGGMDHRDSTCQMPFDQAPQHIEQAAKAYLTKLSDEHFTAHTTALEQLQRAQAFRA

SEQ ID NO: 86736 - protein, 536 aa, Sphingomonas parapaucimobilis
  REGION 1..536: note = tr|A0A0A1WBK4|A0A0A1WBK4_9SPHN Uncharacterized protein OS=Sphingomonas parapaucimobilis NBRC 15100; OX = 1219049 GN=SP5_080_00150 PE=4 SV=1
MTSSSDHQIRRVVIVGGGTAGWMAAAAFARLLNNGYTHVTLVESEEIGTVGVGEATIPPIITFNQMLGLDENDFLAKTAGTFKLGIEFVDWGAKGERYIHPFGRHAQDLQGVHFHQLYLRERSRRALPDIAEWSMSAVAAKAGKFGRAKPDARSPIRELFYAFHFDASLYARYLRDYAERGGVTRVEGRIEAVNLRPEDGYVEAVTLADGRRIEGDLFIDCSGFRGLLIEEALGTGYESYAQWLPCDRAVAAPCALPNPTEPDPFTRSTAREAGWQWRIPLQHRMGNGLVYCSEYLDAETAEAQLLGNLEGELLGDPRHLRFTAGRRRQSWNRNVVALGLSSGFLEPLESTSIHLVQAAIQRLVALFPDKRFDPAERDEFNRQMHDLYEDVRDFIILHYKATRRDDTPFWNRVRTMEVPDSLARKMALWAGKGRLFREGYDLFSNPSWVAVCLGQGLVPERWEPAADALDEDLVAQALDQMHAGYADTAARMPSHGDFLRMTAPSPLAPAMAARSGTEGFDFARASGAVQSKAPLL

SEQ ID NO: 86737 - protein, 506 aa, Xanthomonas campestris
  REGION 1..506: note = tr|B0RZ29|B0RZ29_XANCB Putative tryptophan halogenase OS=Xanthomonas campestris pv. campestris (strain B100) OX=509169 GN=XCCB100_4345 PE=4 SV=1
MIPAPLRNIVIVGGGTAGWMAAAAFARVLGPSFNVQLIESEQLGTIGVGEATVPHIKAFNNLLGIDEAEFVRQTQGSFKLGIEFVDWQRPGTSYIHGFGTQIGHPLGLLPFHQYWIKQQRRGKAQPLGAYTLNTVAATRGKFMTSAGDVPANSPLASIAYAYHFDASQYARFLRGYAEQRGVTRLEGLIEQVQLDAHTGSVQSVQLASGQVVSGDLFIDCSGFRGLLIEEALHTGYHDFTHWLPCDRALAVPCEKVGPPTPYTRSTARAAGWQWRIPLQHRTGNGYVYSSAHISDDEAAAALLANLDGTPLADPRPLRFTTGRRKQFWNRNVVALGLASGFLEPLESTSIHLIQSGISKLLELFPREGISPVLVQRYNDRLAFEFDRIRDFLVLHYHATERDDSAFWRHCRTMPITPELQTTLDLFRDSGRFYRNAEEMFAEISWVQVMVGQGILPQGYHPLVDQVPDTDAEGFLASVAQTISHCVDVMPTHQQFIDRYCRADPVR

SEQ ID NO: 86738 - protein, 505 aa, Sphingomonas faeni
  REGION 1..505: note = tr|A0A2T5UCE2|A0A2T5UCE2_9SPHN Tryptophan halogenase; OS = Sphingomonas faeni OX=185950 GN=C8J25_101658 PE=4 SV=1
MTLGSPVRRIVIVGGGTAGWMAAAALARLIPTGASVTLIESDTIGTVGVGEATIPPIRAFNAMLGIDEAAFLAATAGSFKLGIEFVDWGAIGERYLHPFGGFGFDIEGVRFHQHWRRRRAAGVVEDIDAYSLCAVAARAGRFAPPSPDPASILSQMAHAYHFDAGLYARFLRGRAERDGVTRIEGEIGDVVLDGPTGHVRHVMLGGDRRIEGDLFLDCSGFRGLLIEQTLGAGYEDWTRWLPCDRAVAMPTANIGTAIAPYTRSTAQASGWQWRIPLQHRTGNGYVYSSAHCSDDEAAATLLDGVDGPPLADPRVLRFTAGRRRKQWIGNVVALGLASGFTEPLESTSIHMVQTGISKLLALFPDQGFSPVEIDTYNRLAETQFDQVRDFLVLHYHATRRTDSPFWREAGARAIPDSLAEKIALWRRRGRLFRWEDDLFAEASWVAVLLGQGIVPEGWDRLADAVDARDVDARFDRLRAMFADAAARMPRHEDYLARTSPTRVRA

SEQ ID NO: 86739 - protein, 494 aa, unidentified
  source 1..494: note = Unknown
  REGION 1..494: note = tr|A0A2E5AXK2|A0A2E5AXK2_9BACT Uncharacterized protein OS=bacterium OX=1869227 GN=CL660_09365 PE=4 SV=1
MKLDRICIIGGGSAGWMTASMLSRHFEGTGIEITVVEADIPRIGIGESTTQFFNTFIRYLDLKDEDWMPHCNATYKHSVKFTNFNQDGSFHYPFGTRGTNIPLTEYYNWRRGRNIDSMTFCRVFSDVIDPIEVNRLYPPFLERFVGYHVDALLFGNFLRDHYAIPKGVKHIKGTVTNIQSCVDGVSRVFLGTDDRYVDGDLFIDCTGFRALLMNELNVKWEDWSTLLKNDSTWAVRKPYTNKKTEMQPYTECTGLSSGWVWNVPTWDRIGTGYNYCSQYITDEDALAEFKEHLGVDIPENMFRLLKWPTGIREKVWSHNVVSIGLSAGFIEPLESGGLYSVHEFLFKLIQVLPRASNKWNGFQREQFNHSVRKKFTSFRDFVVKHYTMGYRDDTPFWKDYTDMDALGEFPDLLTRDWEQIQALNCVSEGEAYLLGGYEYDIMPEHYEMLSKRNGYNIPDFEEPILRRTFMDQTLGRYPNAYEYYEKYLYNEQGN

SEQ ID NO: 86740 - protein, 501 aa, Pseudoalteromonas sp.
  REGION 1..501: note = tr|A0A2D5SXT3|A0A2D5SXT3_PSEAS Tryptophan halogenase; OS = Pseudoalteromonas sp. OX=53249 GN=CMK64_00765 PE=4 SV=1
MKVDNAINSVVILGGGTAGWMTAISLAKYAQTQPLKITLIQSNEIETIGVGEATLPNIVDFNYQLGIDEKEFIEQTEASFKLGIEFKDWYKPGHAFFHPFADYGMKVKGVDFHHFYHKAKQQGLDAELADFCLSTQLASKGKFYIPQKIDNDLEDFGYAYHFDAGLYAEFLKKKSIVMGVQHLIATVEKVTTDSESGFIQSLTLNSGEVIESDLFIDCSGFTGKLIEQTLEVGYEHWNEWLLCDRAVAVHSQGHDEVTPFTVSKAKSAGWQWRIPLQHRVGNGYIYSSQHISDEDAKQSLLADLDGDAITEPRVIKFHPGRRDKIWHKNCFAIGLSSGFIEPLESTSISLIQSAISKLLTFFPDKSFHQADIDEVNRLHNLEVERVRDFIILHYKLTQRDDSDFWLKCQSMDIPESLRHKIALYQSRGHINQQECESFEQSSWLSMFAGFCMTPDRVDPRTMHVNDTALLSDLRKIKQFIEEVANKAPTHREFINTLKLKR

SEQ ID NO: 86741 - protein, 454 aa, Streptomyces sp.
  REGION 1..454: note = tr|A0A429CNF3|A0A429CNF3_9ACTN Tryptophan halogenase; OS = Streptomyces sp. WAC 05977 OX=2203208 GN=DMC63_00245; PE = 4 SV=1
MDDYDVIVVGGGPGGSTAAGLTAAEGHRVLLLDKDHFPRYQIGESLLPATIHGICAMLGVRDEIERAGFVRKRGGTFKWGTGAEPWTFSFAASDRMAGPTSYAYQVERTRFDALLLDGARRLGAEVRQGHRVLGTIQVGERIGGVRYLDDAGHERQATARYVVDASGHGSRLHHDVGGIREYSPHFRNLALFGYFEGGRRMPAPDTGNILCVSFPDGWFWYIPLSDVLTSVGAVVKHESADRVQGDPEVAYSALIEDCPLIDEYLRDAHRATEPPYDRLRVRKDYSYDRTVLWSPGMVLVGDAACFIDPVFSSGVHLATYSALLAARSINSTLAGFSDEKRCFAEFEARYRREFGLFRDFLITFYQLDSDEDDYFQQARRLTGHHGTADAAFAGLVGGVSSQDFSRAMFGDVLAEGVQLQLRGLLGEAAGDEPPMFPGGLVPTADGRRWRVPDA

SEQ ID NO: 86742 - protein, 503 aa, Pseudoalteromonas sp.
  REGION 1..503: note = tr|A0A2E4CQB7|A0A2E4CQB7_PSEAS Tryptophan halogenase; OS = Pseudoalteromonas sp. OX=53249 GN=CMK68_12950 PE=4 SV=1
  VARIANT 476: note = Xaa can be any naturally occurring amino acid
MIKKIAIVGGGTAGWLAANHLGHALLHSGIEITLIESPNIASIGVGEGTVPSMRNSLQKFGISESDFINECDVTFKQSIKFVNWLDKHKHGANFYHHLFDHPHIFGEQLTQQWLADGNGNDYAEFVSKQHVCCENNLAPKTIATPQYAGINGYAYHFDAKKFASFLGSHATQHFSVKHLFAEIKDITCDQQGFITHLIDSEGNALEFDFIIDCSGFSAAFIGQKLGVGFVDKSDSLLTDTAITLQVPTQSDDEIPPYTIATAHQAGWIWDIALTERRGVGFVYSSKYMSDEQAHEKLHRYLGNKFEHLTPRKIPMKVGHREKMWHKNCVAIGLSQGFVEPLEATAILIADFSAGLLAKRFPRSRDDIKLVADDYNQHVNYVWQQTFDFIKMHYCISDRTDSAFWRDNKKTDQLSEKLKNNLTRWQRFTPVREDFASKFDLFDLENYLYVLFGMHYVPAKQQSKQNDNQHVAEFKQXRVKQLLNELPKHRELLDKIKKFGLQKN

SEQ ID NO: 86743 - protein, 532 aa, Sphingomonas faeni
  REGION 1..532: note = tr|A0A2T5U942|A0A2T5U942_9SPHN Tryptophan halogenase; OS = Sphingomonas faeni OX=185950 GN=C8J25_102114 PE=4 SV=1
MSMAGRLTPPRICPAVAAPDGFEAGTRTMVNHPLRIVIAGGGTAGWMAAATFARFLETGYEIDLIESDAIGTVGVGEATIPQIHLFNDALGLDEDAFLRATGGTFKLGIEFVDWFKPGHRYMHAFGDVGRDVGLLPFHQYWLRARSLGLAGDLGAYSLNTHAALAERMQRGPARTARTLPSMPYAYHFDAGLYARYLRRYSETRGVNRIEGKIVRVTRDGESGDVSGLVLENGTTVAADLYIDCSGFRGLLIEEALGTGYEDWTHWLPCDRAIAVPSARSEAFTPYTRSTAHTAGWQWRIPLQHRTGNGVVFSSAHMSEDEATATLLAGLDTPVMADPRTIAFRTGRRKRMWNRNVVALGLAAGFMEPLESTSIHLIQSAISRLLKLLPGRVVADADRTEFNRQSDFEYERIRDFIILHYKATARDDTPFWRQCRDIAVPDTLAAKIDLWRGNGHIVREHEELFTEVGWLQVLAGQGIMPAGHHPLADAISTSDLGEFMDTIDKLNAREAGQMQDHAAFVAQHCASPAGLGA

SEQ ID NO: 86744 - protein, 496 aa, Erythrobacter sp.
  REGION 1..496: note = tr|A0A109LVX8|A0A109LVX8_9SPHN Tryptophan halogenase; OS = Erythrobacter sp. AP23 OX=499656 GN=ASS64_08800 PE=4; SV = 1
MSETQPPRVVVLGGGSAGWITACLLHHRWHARGGEVTVVESPEIGIIGVGEGSTPQLKALFDHLGIEEAEWMAACDATYKLGIRFSGWSEREGHASYFHPFPGPVDLHTEPRFLHNCALRRRGFDVPAHPDDWFLAEVLAEQRRTPHPQDSFPFAPSYGYHFDAHKLGAFLREWAIARGVVHKSLKVTEVELGSAGDVAALLCEGGERIDGDVFVDCSGFRSLIAQQKLGAKFLPFAENLFNDRAVVMPTPHREAFKPQTDSIAMRAGWRWSIPLTTRVGNGYVYSSKYVSDEEAEAELRQAIGMEHEGDVRVLQMRVGRVEDSWTRNCLAAGLAQGFIEPLEATALHIVIATALDFAEAYEKGGFGPAHRDTFNRSIAAKYEGIRDYIVAHYRLNQRSDTQYWRDNATNHALSDNLKGLMTAWFTHEDLREINLRQHDGNPHYANMSWHALFAGYGTFPPQAKMVPLPAGLAGADRAKTRAMLAACASNFADYKL

SEQ ID NO: 86745 - protein, 493 aa, Alteromonas sp.
  REGION 1..493: note = tr|A0A4Q8UA90|A0A4Q8UA90_9ALTE Tryptophan 7-halogenase OS=Alteromonas sp. KUL42 OX=2480797; GN = EYR97_01180 PE=4 SV=1
MKALPANIVIVGGGTAGWMSACYLARAVELARQQHPSKQQPVNITLLESADISTVGVGEGSTPYLRHFFDYLGVDENTWMQTCSATYKMGISFENWNNADVDNSYFHPFFSALDIPTADQYFDAVNQRRRGINTDVNPSHYFTAAQMVEDGILPNTLSTATHIDYAYHFDAGQLGDFLKQYAKAKGVKHHIGTIASVHADAQTIHAVQLEDGQQLQAELFVDCSGFRGLLGKQAQKRVFKSYSDTLFNDAAVAIASPVLPSPEAKLQTRSIGLEHGWQWEIPLTSRTGNGYVYSTQFCSSSDAEAELRQVLGEQVNDSEARHLRMQVGRLEEHWQGNCVCIGLSQGFIEPLEATALMLVQYALHHFVDCWQADHPHKYQQYNVEMNRMFDGIRDYIAAHYYLNTRTDTAYWQACRHDIKVPDTLAYLLKEWDSGANFETALNQVDSKLVYLRPSWYCIFAGMQRFSSPLSSMASPNEKALYAMKASLSGALSK

SEQ ID NO: 86746 - protein, 505 aa, Rhodanobacter sp.
  REGION 1..505: note = tr|I4W7N1|I4W7N1_9GAMM Tryptophan halogenase; OS = Rhodanobacter sp. 115 OX=1162282 GN=UU5_11235 PE=4 SV=1
MSDDPHDSRIRHVVIVGGGTAGWMTAALLAKALGRRVQIRLIESEQIGIVGVGEATIPQIRHINAFLGIDEDDMLRATHGTFKLGVQLNNFGRLGDSYLHAFSDIGLPLGLIGFHHYWLRKRASDPANDLWSYSLNTQTANEHRFGRMDKVGSSPLGGIKYAYHFDAGLYGQYLRQRCDPQVVQRIEGKVVDVQLREVDGFIESVRLESGERIAGDLFIDCSGFRGLLIEGALHTGYESWQHWLPCDRAMAVASARTEPLWPYTRATARTAGWQWRVPLQHRTGNGLVYASQHLSDDEASAMLLANLDGEALGTPRPLRFTTGMRRKAWQRNCVALGLAAGFMEPLESTSIHLIQSGISRLLAMFPDRHCDPVLVDEYNRQTRFEYESIRDFLILHYKATERDDTPFWRQCASMDIPPTLARKIELFRGHGQIFREHEELFTEVAWLQAMIGQHIEPQAYHPLADALDETQLDAFLGDIRTLVGRAAGSLPDHARFVADHCLTRT

SEQ ID NO: 86747 - protein, 522 aa, Alteromonas sp.
  REGION 1..522: note = tr|A0A4P6B3A0|A0A4P6B3A0_9ALTE Tryptophan 7-halogenase OS=Alteromonas sp. KUL42 OX=2480797; GN = EYR97_13970 PE=4 SV=1
MTTATPITHIVVVGGGSAGWLTAGRIAAQHQCATRKDIKVTLVESPNVPIIGVGEGTWPTMRSTLIALGISETTFIKECDATFKQGAKFAKWTTGGEDDFYYHPLMLPQGFSQGNLGPYWQTVAPDLNESFSQAVCVQEAICEAGLAPKSIRHAEFAGTANYAYHLDAGKFTTFLTKHCTENLGVNHVLADVSQVQSADNGDIEALHTQQGVLIEGDLFVDCTGFRSLLLGEHYKVPFIPCDDVLFIDRALAVHVPYDNAQSPIASHTISTAQDAGWVWDIGLQSRRGVGHVYSSRHQSKDDAYTRLDTYVRQTSALDGIDDLNVKDITIQSGHRQRFWQNNCVAVGLAAGFLEPLEASALVLVELSASMIAEQLPANRAVMDIVAKRFNDTFSYRWARIIDFLKLHYMLSKRYDSAFWRDNRDSQTIPDSLKELLELWQYHPPSDKDFTSNNEVFPAASYQYVLYGMGFTSELGAHQQWVNADFARQQLTQNRKARAMAVEKLPQHRELINKIHQFGLQAV

SEQ ID NO: 86748 - protein, 502 aa, Alteromonas sp.
  REGION 1..502: note = tr|A0A4Q8TWH2|A0A4Q8TWH2_9ALTE Tryptophan 7-halogenase OS=Alteromonas sp. KUL42 OX=2480797; GN = EYR97_16450 PE=4 SV=1
MTAAALSKLLNPNVFSITLIESDAIGTVGVGEATLPHLRFFNQRLGIDESEFIKATNATIKAGIEFSNWGNSGDTYIHPFGDYGKPLKSVEFHHYFYALKKYNDQLNLDDYSLPVVACKSGKFNFPTSDPSLLTSSYSYAYHIDAGLYAQYLRGFAEQKGVTRIEGKVNSVSLRKSDGSISGLKLNNGELINGDFFVDCSGFRGRLIEQSLKAGYEDWSHWLPCDRAIAVQSEHNGRPLPYTKAIAREAGWQWQIPLKHRMGNGYVYASQYVNEERALQTILANLPGKPTSEPNYLKFTTGKRKLSWLKNCVAIGLSSGFLEPLESTSIYLIQAAIMKLVELLPQRENMAAKSAEYNRYFSNEMDKIRDFLILHYHATFREDTPFWNFCKHMKIPLSLEEKMELYKEIGVIEDYQYGLFLTPSWLAVYNGQGVIPSFSDIRVNEITLAQANKYMATLYADIKQAVAGMPTHEQIVARLHEETICNEPSQLNQAVRFSLYGQR

SEQ ID NO: 86749 - protein, 499 aa, Sphingomonas faeni
  REGION 1..499: note = tr|A0A2T5TXU1|A0A2T5TXU1_9SPHN Tryptophan halogenase; OS = Sphingomonas faeni OX=185950 GN=C8J25_1127 PE=4 SV=1
MNHTSEPPRTRVIVAGGGTAGWIAAAAIVRQLGPLVDVTLVESDEIGTVGVGESTIPTARSFHAFLGIDEAAFMRATQATFKLGIAFENWRQVGDRYFHPFGSVGRSVAIADFQHFWLEARARGFGGAYGDYSLEQQAAGAGLFGHDEQHSLAYAYHLDATAYARFLRTLAEPCGVQRVEGRIERVERDGEGGNIAALVLASGERIAGDIFIDCTGFRALLTEGALGTGFEDWSEWLSTDRALAVQTETVAPPVPYTRAIAHDAGWRWQIPLQKRTGNGLVYSSAHMSDDEAHATLIGALDGRPLFEPRSLRFRSGMRRQAWNRNCIALGLAAGFIEPLESTSIHLIMNAVIRLIQLFPFRGDDHVALAARFNAQSRHEWEHVRDFIILHYHVTQRDDSRFWRDCARMTIPDSLAERIALFANTAGAWQGQDDLFRIDSWVSVMLGQGVEPRAHHRIARIIKEQELQTSFADLSRGITSTMRALPRHCDFLARYCLADG

SEQ ID NO: 86750 - protein, 513 aa, Alteromonas sp.
  REGION 1..513: note = tr|A0A4P6B5H1|A0A4P6B5H1_9ALTE Tryptophan 7-halogenase OS=Alteromonas sp. KUL42 OX=2480797; GN = EYR97_18725 PE=4 SV=1
MTSLDLDNTHAKPSRFANSNEGASKSVKKVVIAGGGTAGWMAATALSRLLGKSISVTLVESKDIGIVGVGEATIPPIRTFHKLLGIDEKAFMKASQATFKLGIEFQNWRESDHSYIHSFGITGRECWAGEFHHFWLRAKEYGFADDFGDYCPELIAAKQGKFATSDAMPLNFAYHFDAVAYGRFLKQLAIQAGVTHIEGDIKQVEQCPTSGNITALRLTDNTHISGDFFIDCTGFKGLLIEETLHTGYDNWQHYLMCDRAVAMQTELTDAPLPYTKSVANHAGWRWQIPLQQRMGNGLVYCSRYMSDDEAIDTLKSQVTGNPINTPRVIRFTPGKRRMGWNKNCVALGLASGFIEPLESTSIHLIMTGLVRLMRLFPFDGVTQSAIDEYNTKFASEMDAILDFIVMHYKVTNRTDSPFWQQCQRMDIPQSLTHKLRLFEETGRVFLDDGDIFRVDSWTQVLMGQGLMPKQYHKVADEMSEEALKQFMAGLKQQVTQRVNSLPSHHAFLSQYLG

SEQ ID NO: 86751 - protein, 506 aa, Massilia sp.
  REGION 1..506: note = tr|A0A0J1D846|A0A0J1D846_9BURK Tryptophan halogenase; OS = Massilia sp. WF1 OX=1406431 GN=AB595_19225 PE=4 SV=1
MESHKRINRITIVGGGSAGWMAAAALATYLGKGATIRLIESEEIGIVGVGEASVPHIRMFNGQWLGIDEAEFVKRTQATVKLGIQFNDWGRIGDSYIHGFGAIGRSLGPLPFHQFWLKLHLAGRAGPIGDYSPQTVMAPQGKFAPGDRNAAPNSPLADIAYAYHFDATLYARFLRELAEQRGVQRIEGKVVGVQQRAGDGFIESVTLESGRLVDGELFIDCSGFRGLLIEQTLDTGYEDWSHWLPCDRALAVPCESVAPITPYTRSTARAAGWQWRIPLQHRTGNGYVYSSKHLSDDEATATLLANLDGKPLGEPRPLRFTTGMRKKLWNKNVVALGLASGFLEPLESTSIYSAQSGITRLLSLFPTRDFNPLLAERYNRDSVFEFERIRDFLILHYHATERKDTPFWDYCRTMAIPDSLREAMDLFRADGRYFRNGEDFFALPSWVQVMLGQRIVPQGYHPMVDEMPEDRLLDHVDSMRALLAHAVAAMPTHQEWIDRYWKAPAA

SEQ ID NO: 86752 - protein, 544 aa, Mastigocladus laminosus; identical to SEQ ID NO: 85766
  REGION 1..544: note = tr|A0A4D9C7M2|A0A4D9C7M2_MASLA Tryptophan 7-halogenase OS=Mastigocladus laminosus UU774 OX=1594576; GN = BLD44_027740 PE=4 SV=1

SEQ ID NO: 86753 - protein, 510 aa, Sphingomonas parapaucimobilis
  REGION 1..510: note = tr|A0A0A1WA25|A0A0A1WA25_9SPHN Uncharacterized protein OS=Sphingomonas parapaucimobilis NBRC 15100; OX = 1219049 GN=SP5_073_00250 PE=4 SV=1
MSDPYRPTHVVIAGGGTAGWLAATALARQLGPLVDVTLVESDEIGTVGVGESTIPTARSFHAFLGLDEAEFMRATQATFKLGIAFENWGPDGARYFHPFGTVGRSVAIADFQHFWLEARRHGFGGAYTDYSLETRAAEAGRFGRDEAGTLAYAYHLDATAYARFLRGIAEPAGVRRVEGRIARVERDGAGGDIAALHLASGNRIEGDLFLDCTGFRALLIEGALETGFEDWSEWLACDRALAVQTEAVSPPVPYTRAIAHRAGWRWRIPLQTRVGNGLVYSSADMSDDEATATLLGGIEGKPLFEPRTLQFRAGMRRRAWSANCVALGLAAGFIEPLESTSIHLVMIAVMRLIQGFPFQGQDCAALRTRFNAQSRHEWEHIRDFIILHYAQTGRTDSVFWQRCSTMSVPDTLAQRMALFVESAGAWQGQDDLFKIDSWISVMLGQGMVPKAHHRISGMLSPHALRDSFDGLDQQLSRQVQQIPDHLAFMNGYCATQARPDLRIDPGDAAH

SEQ ID NO: 86754 - protein, 505 aa, Xanthomonas albilineans
  REGION 1..505: note = tr|D2U8F8|D2U8F8_XANAP Putative tryptophan halogenase protein OS=Xanthomonas albilineans (strain GPE PC73 / CFBP 7063) OX=380358 GN=XALc_0046 PE=4 SV=1
MIAAPLRNLVIVGGGTAGWMAAAALARMLGADNRITVIESEQIGTVGVGEATVPHIKAFNTLLGINEAEFVRDTQGSFKLGIEFVDWLRPGIAYVHGFGSEIGHRLGLLPFQQYWFKQALAGKASPLGDYTLNTVAAKRGKFMTAASDVPPNSPLANIAYAYHFDAALYAQFLRRYAEQRGVIRYEGIVEQVLLHPESGDVASVRLVSGEVIAGDLFIDCSGFRGLLIEQALHTGYHDFSHCLPCDRALAVPCAKIGPPTPYTRATARAAGWQWRIPLQHRTGNGYVYSSAHVSDDEAAATLLANLDGPALAEPRPLRFVTGRRKQAWNRNVIALGLASGFMEPLESTSIHLIQSGISKLLELFPREGISPVLVQRYNERIAFEFDRIRDFLVLHYHASERADSAFWQQCRGMSIPAELQATLDLFRDSGRFYRNGEEMFAEISWVQVMVGQGILPRAYHPLVDQVPVADLERFMLSVAQTIGHCADAMPPHQAFIDRYCAAAPG

SEQ ID NO: 86755 - protein, 498 aa, Pseudoalteromonas sp.
  REGION 1..498: note = tr|A0A2E4CRP1|A0A2E4CRP1_PSEAS Tryptophan halogenase; OS = Pseudoalteromonas sp. OX=53249 GN=CMK68_15505 PE=4 SV=1
  VARIANT 383: note = Xaa can be any naturally occurring amino acid
  VARIANT 394: note = Xaa can be any naturally occurring amino acid
  VARIANT 407: note = Xaa can be any naturally occurring amino acid
  VARIANT 414: note = Xaa can be any naturally occurring amino acid
  VARIANT 422: note = Xaa can be any naturally occurring amino acid
  VARIANT 426: note = Xaa can be any naturally occurring amino acid
  VARIANT 430: note = Xaa can be any naturally occurring amino acid
  VARIANT 443: note = Xaa can be any naturally occurring amino acid
  VARIANT 454: note = Xaa can be any naturally occurring amino acid
  VARIANT 461: note = Xaa can be any naturally occurring amino acid
  VARIANT 467: note = Xaa can be any naturally occurring amino acid
  VARIANT 471: note = Xaa can be any naturally occurring amino acid
  VARIANT 473: note = Xaa can be any naturally occurring amino acid
  VARIANT 478: note = Xaa can be any naturally occurring amino acid
  VARIANT 480: note = Xaa can be any naturally occurring amino acid
  VARIANT 485: note = Xaa can be any naturally occurring amino acid
  VARIANT 488: note = Xaa can be any naturally occurring amino acid
MESKKITKVVIAGGGTAGWITAALLNKVLGKVLDITLIESAEIGTVGVGEASIPPILHLNGALGITEKEFIKATGATIKLGIEFENWRSQGHSYMHAFGEIGKDFPFCEFYHFWLKANQANNAPDFWDFSLNYQAAKAHKFAHLKQIPNTQLAGLHYAYHFDATRYGEFLKELAQSRGVKRIEGKIESVNQCHQSGHITSLLLKNGEQIDGDLFIDCTGLRALLIEQTLNAGFEDWSHWLSCDSAVAVQSESANDAIPYTRSIARDSGWQWQIPLQHRVGNGLVYSSRFLSDEAAKQQLLDNLPAKALTEPRVIKFKTGRRLKQWHKNVVSVGLSSGFLEPLESTSIHLIQSAAIRLIKFFPHQGIKQSLVDEFNQQSKTEFXRIRDFIILHYXITERDDSAFWRFXKGMDIPXSLKKKIEXFKTXGKLXREDDELFAEVAWXQVMIGQGLIAXDHHPLTXALSDEXLNEXFXNLKTXIXSTVEXLPXHSQFLEKVQN

SEQ ID NO: 86756 - protein, 511 aa, Pseudoalteromonas sp.
  REGION 1..511: note = tr|A0A2E2LXU3|A0A2E2LXU3_PSEAS Tryptophan 7-halogenase OS=Pseudoalteromonas sp. OX=53249; GN = CMK69_06525 PE=4 SV=1
MDIKKVAIVGGGTAGWLAANHIGKEMLNRKGISVTLIESPDIPPIGVGEGTVPDIRNTLKSFGIREDEFIRQCDATFKQSIKFINWMDKKKHGEGNFFHHLFDVPSSYDAKHLTSYWLNNKEKSQSYAQGLSSQHVICEAGLAPKNITNAQYEGELAYAYHFNAGKFAQLLACNAKEKFSVEHIHTHVTQVKLGDDGAIAALITDNNEELEFDFYIDCSGFESLLMSKALKIPFVDVSESLLINSALVVQVPTKADDAIPPYTLATAHQAGWIWDIALTNRRGVGFVYSDKHMTDEQAHEKLDRYLGDSKQDLTYRKIPMRVGYRKKFWHKNCIVLGLAQGFLEPLEATSILLTDFSAKFLTLRFPSSTEQLEQLETRFNHAMGYAWERTIDFIKLHYCISDRTDSAFWVANKSDDTISESLKEKLSLWEEFIPVRDDFFSQFEVFYLENFLFVLYGMHFNTKAPPCTSAEHEHCLVRLQQRAEIDQYLINKLPNHRALLDKIKQYGLQSI

SEQ ID NO: 86757 - protein, 500 aa, Alteromonas sp.
  REGION 1..500: note = tr|A0A4P6A9T5|A0A4P6A9T5_9ALTE Tryptophan 7-halogenase OS=Alteromonas sp. KUL42 OX=2480797; GN = EYR97_01780 PE=4 SV=1
MTQPLRIVIAGGGTAGWMAANLFANIWKNSPVEISLIESEDIGTIGVGEGSTPTLKRFFQTLSIAEHEWMPQCQATYKVNIKFNGWNGDVHASYSHPFISQLDVFSERAFHINALTRRLGLNVETRPEKFLMAGYLAKKQLAPIPSHNFPFAIEYGYHFDSMKLGQFLRNFGKKLGVKHIIGNIESVETHANGEISALTCTDGRRIEGNLFVDCTGFNSLLLQKTLGVKFNAFGKNLFNDAAVVLPTAPLQTMPVETESTAMSNGWCWQIPLRNRTGNGYVYSQQYQSKEDAERELRQRLNLLDCDVEAKHLKMRVGQCEKHWHKNCLALGLAQGFIEPLEATALHLVQVSIEMFIDTFTKGHFSAQYQDTYNKDISERFERIRDYIVCHYKLNGKRDSQYWVDNRDNMHLSESLLSLLDVWYRKGDIVEEIKRQGIGKHFSTTSWHCLLAGYGVFPPIALQQPDSLKEKGDLFEENKLASFFSRCSLNFEKQKLLFQIA

SEQ ID NO: 86758 - protein, 512 aa, Sphingomonas haloaromaticamans
  REGION 1..512: note = tr|A0A1S1HDL6|A0A1S1HDL6_9SPHN Flavin-dependent tryptophan halogenase PrnA OS=Sphingomonas haloaromaticamans OX=653954 GN=prnA_2 PE=4 SV=1
MAKRIIIVGGGTAGWLTAAYLIRSLGRSGWSITLVESPDIGIIGVGEGTFPTIRETLSAIGVDEREFLREADGSFKQGVRFSGWTGGPTPGNDTDDYFHPFNLPYGGDEGLLPYWIKAAGEARRPSYADAVTVQGHVIRAGCAPKRASDPGFDGPMNYAYHFDAARFADYLRKVATANGVERIEATINEVRQAEDGRIAAVVPGDGRAAIEGDFFIDCSGFRALLIGKALGSPFRHVGDVLFNDRALAMQVPHGDADTPIRPYTLATAHEAGWTWDIGLGARRGIGYVYSSRHSDDEAAERVLRAYVGKAADGLSPRQLRFESGYRSVQWIGNCAAVGLSAGFFEPLESTGIMLIEVAARMISDFLGSPAIDEAAMAAAARQYNRLMLARFDAIVEFLKLHYCISGRRDTAYWRDNSDAASIPEGLRDKLAQWRHRPPSRFDFVVDHETFLPASWQFILYGMGFRTDPAAVSSSHRDDEQAGAAFVRVFQAARQAVAELPPHRALLEQLRAA

SEQ ID NO: 86759 - protein, 506 aa, Xanthomonas albilineans
  REGION 1..506: note = tr|D2UGW8|D2UGW8_XANAP Putative tryptophan halogenase protein OS=Xanthomonas albilineans (strain GPE PC73 / CFBP 7063) OX=380358 GN=XALc_3150 PE=4 SV=1
MTQIRKVVIAGGGTAGWIAGCALAHQFRDLLEITLIESEQIGTIGVGEATLPPLRQFHRFVQIDEQEFLRAVAGTFKLSISFEHWGQAGERYMHPFGITGQSTLVCAFHHFWLEAQRRGLHSELGDYCLESVAARADRFAREAPSPLNYAYHLDAGLYARLLRAHAERHGLRRVEGKICQVRQHPENGAITALQLEDGQLIDGDLFIDCTGFRGLLIEQTLHSGYEDWSHWLPCDRAVAVQAEAVAPPVPYTRTIAHAAGWRWQIPLQHRVGCGLVYSSAHLSDEAARAQLLREVAAPTLKEPSLVPFRTGRRRKTWNKNVIALGLASGFIEPLESTSIHLTITAVMRLLALFPSDGITPSLEALYNAASRAEMEHVRDFVILHYHATRREEPMWRACREMPLPASLQQRLDAWRARAHVWQDTDALFRGDSWAYVLLGQGVMPNAHHPLAHALPDQELQRFLAAIRAPIERSVAQMPSQAQFIAQYCKAPPQVWAGSPMTALANA

SEQ ID NO: 86760 - protein, 501 aa, Sphingomonas faeni
  REGION 1..501: note = tr|A0A2T5U9B1|A0A2T5U9B1_9SPHN Tryptophan halogenase; OS = Sphingomonas faeni OX=185950 GN=C8J25_102186 PE=4 SV=1
MAEQRIRKVVIAGGGTAGWLTAAALSRQLGQLLDITLVESEEIGTIGVGEATIPTMRAFHSILGLDEREFMRATQATFKLGISFENWARDGDRYIHSFGDIGKSTWMGDFHHFWLAAKADGDSSEIGDYCLELQAAKAERFALPSEGQINYAYHLDAGLYARFLRARSEANGLKRIEGRIASVDRDSETGFIRALVLKSGERVEGDLFIDCTGFRGLLIEGTYAAGYEDWSHWLPTNSALAVQTAATGPAHPYTRAIAHDAGWRWRIPLQHRVGNGLVYASDHLSDDEANGRLLATIDGAPLTEPRLIRFRTGRRRQVWMGNCVALSLASGFVEPLESTSIHLIMTGITRLMQTFPFGGIAPALVKRYNDQAQAELERVRDFIILHYHLNERPEPFWAARRDMPIPDTLVERIALFTEGAQAYQGGDDLFRVASWVQVMLGQRLTPRDHHRLGSIMGGPQLAGVLTNIRRTIADAVAGMPTHQQFLDRYLAAPVTASHGMR

SEQ ID NO: 86761 - protein, 513 aa, Sphingomonas sp.
  REGION 1..513: note = tr|A0A1M2ZLZ6|A0A1M2ZLZ6_9SPHN Tryptophan halogenase; OS = Sphingomonas sp. 66-10 OX=1895848 GN=BGN95_17210 PE=4; SV = 1
MKPIQNIVIVGGGTAGWLTAGVIAARHRGRIPQDFTVTLVESPNIPIIGVGEGTWPTLRSTLKKIGVSETDLFRECDAAFKQGARFARWTTGAQDDGYYHPLVLPQGFERLNLVPHWLSGNGQQSFCDAVCPQGRLCDDGLAPKAITTPEYEGAANYAYHLDAGKFAPFLTRHCTEKLGVRHVRADVSRVALDESGDIRAIVTEQAGEIAGDLFVDCTGFRSLLLGEAMNVPFRDCSDILFCDRAMAVQVPYEHEDSPVRSHTVSTAQTAGWIWDIGLPTRRGTGHVYSSRHISDDEAERELRAYLGPAADDLAVRKIVIRSGHREQFWVRNCVAVGMSAGFLEPLESSAIVLVELSAKLIAEQMPLCREIMDIVASRFNATTHYRWGRIIDFLKLHYVLTRRTDSAFWRDNVLPETIPERLRELLLLWKYQSPWFLDEFDRVEEVFPAASYQYVLYGMGFRTEVSPGMVAYDARHADRAMRENAMLTERLRTTLPRHRDLIRKIHEHGLQPV

SEQ ID NO: 86762 - protein, 500 aa, Sphingomonas faeni
  REGION 1..500: note = tr|A0A2T5UCA5|A0A2T5UCA5_9SPHN Tryptophan halogenase; OS = Sphingomonas faeni OX=185950 GN=C8J25_101660 PE=4 SV=1
MSARIQVVIVGGGTAGWMTAATLAMSFAGRLADVTLIESEDIGTVGVGEATVPHIRFFNQRLGIDEADFIRRTNATFKLGIEFRDWGRIGDSYIHPFGDFGHDIDGLPFHQYWAHAARGGVDGLPTLEDCSLPIVVARDNRFTPPLEDPRSIGSTYSYAYQFDATLYAAYLRDYAEARGVVRIEGRVDAVEQKDDGIGAVRLADGRRIAGDLFIDCSGFRALLIDGALKVKYEDWSHWLPCDAAWAVPTANAGALTPYTRATAREAGWQWRIPLQHRTGNGHVFSTRFTDPEAARAVLIDNLEGEAVAEPRMLRFRTGRRHRQWVGNCVAIGLSAGFLEPLESTSIHLIQLAIGKLIELFPSGGVFDPADAAEFDRAMALEYDRVRDFLVLHYCATERDDTPFWRYMRTMTLPSSLTEKIAEFRERGIVASYREGMFLPASWLAVYYGQRIMPGRVNPLIANTPTATSRDHVARVAAACASAAKAMPLHEAYIARIKAAA

SEQ ID NO: 86763 - protein, 498 aa, Erythrobacter sp.
  REGION 1..498: note = tr|A0A125QKQ6|A0A125QKQ6_9SPHN Tryptophan halogenase; OS = Erythrobacter sp. AP23 OX=499656 GN=ASS64_08780 PE=4; SV = 1
MRFVIAGGGTAGWMTAAALARFAPPGTQITLVESEAIGTVGVGEATIPQIHLFNNALGIDEAEFVRETKASFKLGIEFDGWLREGDAYMHAFGAVGRGVGLLPFQHYWLRARQLGMAKPLMRYSLNELAARTMRMQRGRRTPQAPEMPYAYHFDAGLYAAYLRRRAEANGVVRHEGRIERVEQHPESGAISALALDGERVVEGDFFVDCTGFRALLIGDALDTGYEDWSHWLPCDRAIAVPCSNGGDFTPYTKSIARKAGWQWRIPLQHRIGNGMVYSSAHWSEEEAVETLLANLDGEPQGDPRPLRFTTGKRQATWHRNCLAVGLAAGFMEPLESTSIHLIQSTISRFLAVLPSDEIDPSMVDWFNAQCDFEWSRIRDFLILHYTANAREGEPFWDELRQIDLPRSLHAKLDQWRATGFIHRENEELFTEVGWFQVLVGQGVEARSYNPIADGLPGNDLQMLLDGTEAALVEEVRQMPRHLDFVHQFVNSPSEEVTA

SEQ ID NO: 86764 - protein, 512 aa, Pseudoalteromonas sp.
  REGION 1..512: note = tr|A0A2E4CJY6|A0A2E4CJY6_PSEAS Tryptophan halogenase; OS = Pseudoalteromonas sp. OX=53249 GN=CMK68_05425 PE=4 SV=1
MSKIINNIVIIGGGAAGWLTAGLLAKEHPHLHITLIESADIGISGVGEGTWPSMRNTLQRIGVKETDFLRQCDASFKQGSKFINWRGEQQGDNYYHPFMIPEGYYEYDVHAAWKQLFSQQKYADAMNMQSFICQAALAPKQINTPQYAGVTNYGYHLDAHKFARFLTQHCVNTLNVKHIVDNVICANNDEQGYIKSVSTQHNGAITGDLFIDCSGSQGLLIAKHYQIPFLDQSHILFNNTAVAAQIPYESQSQNIASATLSTAQSAGWIWDIGLPTRRGIGYTFSDKYCDEASAIETLKNYAAQTIGTQQADTIETRTLRFTPGYREIFWHKNCVAIGMSQGFIEPLEASALAMVELSVSMLSEQMPVDQDHMQLLSTRFNKRFKYRWEQVINFLKLHYVLSNRDDNGYWHANRNPNSIPLELQNLLTLWQYQAPSRFDLVENEEIFSSASYQYVLYGMGFETSLTTKLDGQKCHKAEQLYQLNRNKITQYLQKLPTNRLLLEQLQGSKVAT

SEQ ID NO: 86765 - protein, 507 aa, Novosphingobium sp.
  REGION 1..507: note = tr|A0A158S5X3|A0A158S5X3_9SPHN Putative Tryptophan halogenase OS=Novosphingobium sp. KN65.2 OX=1478134; GN = SPHV1_40005 PE=4 SV=1
MTQNRFSIVIVGGGTAGWMSAAALARFAPPGYAVTLVESEAIGTVGVGEATIPAIRLFNKALGIDEAQFLRETSASYKLGIAFDGWLREGHSYMHAFGTVGRHLGLLPFRHYWARARASGVARPLAHYAANELAARTGRMATGISGPGIPELPWAYHFDAGLYAAFLRRLAEGMGVVRHEGRVARVIRNDAGDIAAVETDAGQALAADFFIDCSGFTGLLIEKELQTGYEDWRHWLPCDRAVAAPCEAAGPFTPYTRSIARSAGWQWRIPLQHRIGNGLVYCSEYLSDDAATGLLLSHLEAPAQAEPRALRFTTGRRAKAWNRNVLAVGLASGFMEPLESTSIHLIQSTIMRFLTVLPSGPASPAIVNEFNRRTAEEFERIRDFLILHYRANARVGEPFWDRCRDMAVPDTLAARIAEFEEACQIQPAGDELFQEPAWLQVMAGQGIEPKGWNPIADALSDDDLSGFLGAIEQACIETVRPMPRHMDFLAATCAAAPSRSPELETLR

SEQ ID NO: 86766 - protein, 513 aa, Massilia sp.
  REGION 1..513: note = tr|A0A0J1GCM5|A0A0J1GCM5_9BURK Tryptophan halogenase; OS = Massilia sp. WF1 OX=1406431 GN=AB595_12825 PE=4 SV=1
MSEAIKHIVIVGGGSAGWLVAGVLAAEHPLRVTLVESPAVPAIGVGEGTWPSMRDTLHRIGVSESDFFRECDASFKQGSRFDGWRTGKLDGAAGDYYFHPFVLPQGHGEANLAGAWRQSHPDVPFADLVSFQPHLCVHGRAPKQAATPEFAAVANYGYHLDAGKFGVFLRDHCVTKLGVRHVVDHVEAIRPHPDGDIGALVLHGGGVVEGDLFVDCTGMQSLLLGKHYGVPLLHQRHVLFNDSALAVQVPYASGDAPIASQTTSTAQPNGWIWDIGLPGRRGIGHVYSSAHSSDDEAERQLRAYVAATGGPADMPSPRKLSFEPGYRERFWHRNVVAIGLSSGFIEPLEASALALVELSAAWLADDMPATRAQMDTVASRFNEAFTYRWQRVIDFLKLHYVLSKRSDTAYWIEHRAAASIPDRLQALLQLWRTRPPSRRDFSRIEEVFPSASWQYILYGMGFATETAPRASDRPDLADGFFREAARLTARMLPALPSNRELLDHIRQHGLQRI

SEQ ID NO: 86767 - protein, 496 aa, unidentified
  source 1..496: note = Thalassotalea agarivorans
  REGION 1..496: note = tr|A0A1I0BUZ9|A0A1I0BUZ9_THASX Tryptophan halogenase; OS = Thalassotalea agarivorans OX=349064; GN = SAMN05660429_01063 PE=4 SV=1
MNKDNVNKVVICGGGTAGWITAALMAKVLGKTLDITLVESEQIGIVGVGEATIPPMIQFNQALGIDEKTFLKATKGTIKLGIEFDGWKTEQDSYMHAFGGIGKNFPFCDFQHFWVKAHQQGMTKELGDFSLNYQAAKENKFAPLPNITGTNLPGIHYAYHFDAGLYAMFLREFSEKHGVKRVEGIIDTVEQCQQSGHITAITLKDGTDIQGDLFVDCTGMRALLIEQTLNTGFEDWSHYLPCDKAMAVACESVSPTTPYTRSTAHRAGWQWRIPLQHRIGNGIVYASKHMSDEDAKALLLANLDGQAIGEPRVIPFKTGRRRKQWNKNVVSIGLSSGFLEPLESTSIHLIQTAAIRLLKFFPHQGIKQSEVDTLNQLSVFELERIRDFIILHYKVNERSDSDFWQQCQRMEIPESLAKRITLFKETGKIYRDVDELFTEVAWQQVMIGQGIIPQDHHPLVDGLTQKQMEDLIDSLKTLIARDVAKMPTHDEFLKQL

SEQ ID NO: 86768 - protein, 387 aa, unidentified
  source 1..387: note = Unknown
  REGION 1..387: note = tr|A0A3N5GG23|A0A3N5GG23_9BACT Tryptophan 7-halogenase (Fragment) OS=bacterium OX=1869227; GN = EHM82_05430 PE=4 SV=1
MAKSIVVVGGGSAGWMTASYLKKALKGIDVTLIESANIKSVGVGEATFSTIKLFFDFLGLDESEWMPSCNATYKLAIKFANWTKNGGYFYHPFQRYEVVDGFNMGEWWLKLKRHEEPFDYACFAIPELCDLKRSPRFFDGRVFDDKVQDCFTGSHRENKNVLADHKVQYPYAYHFDASLLAEYLKGYATRLGARQIIDEVAEVRLREDGSIDHLVTREHGEVRGDLFVDCTGFRGLLINQALDEPFVSFSDSLLCDSAVAMQVPRDIETEGIEPFTSATALSAGWVWNIPLYGRIGTGYVYSSKFISKEEAEAEFRRHLGPAADSVKAAHIKMRIGRCRNSWVKNCVAIGLSSGFVEPLESTGIFFIQHGIEELVSHLPGDTIDEEA

SEQ ID NO: 86769 - protein, 496 aa, Colwellia sp.
  REGION 1..496: note = tr|A0A2N1IGJ7|A0A2N1IGJ7_9GAMM Tryptophan halogenase; OS = Colwellia sp. 12G3 OX=2058299 GN=CXF71_07520 PE=4 SV=1
MNNTPIKNVVIAGGGTAGWMAAAALSKLLGKAINVTLVESDDIPTVGVGEATIPTLHIFHQLLGINEAEFMAATNATFKLGISFESWRDVNKDYIHSFGYLGQDCWACGFQHFWLKGLKKGIVSDIGDYCPEHLASREGRFAVLANQDLNHAYHLDAGLYAKFLQKIADKFGCQRIEGKINKVNLDEKTGNITSLNLENGKVVEGDLFIDCTGFRGLLIEDALHTGYDDWSHYLPCDSAIAVQTETVNKPVPYTRSIARDSGWQWRIPLQNRTGNGFVFCSKYMTDEEAKKTLLDNVEGKLLNEPRVIKYKTGARRKHWNKNCIAIGLSSGFIEPLESTGIHLFQKAIVRLLQMFPSQGINQSDVDEYNDQTKKEADNIRDFIILHYHLTDRRDTRFWRYCAMMPIPDSLAHRMKLFKESGRVFKKANDLFGETSWVQVMMGQGLMPEQYHPIVDMMSDDELKTFLDKIKNGVHKRVANWPDHNDFINHYCKSSNG

SEQ ID NO: 86770 - protein, 504 aa, Erythrobacter sp.
  REGION 1..504: note = tr|A0A120GBV5|A0A120GBV5_9SPHN Tryptophan halogenase; OS = Erythrobacter sp. AP23 OX=499656 GN=ASS64_09955 PE=4; SV = 1
MAIEHIVIVGGGTAGWMAAAALSRIRDGRPVAITVIESEQIGTVGVGEATIPPLVEFNQALGIDEREFLAEVQGTFKLGIQFVNWGQVGESYIHPFGAYGYDIGGINFHQVWHSLRGRGDKRPLQLFNLETMAAYYGKFSRTEDYARDDLPPMNYAYHIDATAYARYLRKYAEKRGVVRREGIVEQVALDPESGHVAKLTLSDGEEIEGDFFVDCTGFRGLLIEQALETGYEDWTHFLPCDRAVALPCNRDDGSPPPPFTRATAHKAGWQWQVPLQRRNGNGHVYCSQFMEADEAHDILVQNLAGKPTAEPNHLRFVTGRRKKVWNKNVVALGLASGFMEPLESTSIHLINTGVNKLIATMSLDGITEAQANTFNRLTVKEYERIRDFLVLHYKATRRDDSPFWDYCRTMDVPDSLTEKIELFKANGQVFREEDELFTTTSWTAVMMGQGISMEGNSPMAAAVADTSAQEIDEMAKSIQWLVQQMPGHHQYLQRYCPARQPAPA

SEQ ID NO: 86771 - protein, 503 aa, Streptomyces sp.
  REGION 1..503: note = tr|A0A515YGX8|A0A515YGX8_9ACTN Tryptophan 7-halogenase OS=Streptomyces sp. RLB3-6 OX=2594457; GN = FNV61_41285 PE=4 SV=1
MESRKEQVDVVVVGGGPGGSTVATLLARRGHSVVLLEKEKFPRYQIGESLLPATVHGVCKLLGVTEEMEAAGFMYKRGGSFRWGTNPVPWNFLFSISPEYSGPTSNAYQVERARFDEILLRNAARCGADVREECDVTGSLQADDGRVTGVSYRDADGGEHEISATYVVDASGNRSSLWRATGGERKYSEHFQNVAVFGYFNGGGRLPEPNSGNILCEAFDEGWLWYIPLTDDLTSVGAVISRENASQIQGDREAALMKFVDRSSYVKDMLTDATRVNDDSMYGEVRIRKDYSYANTRFHAPGIVLIGDAACFIDPVFSTGVHLATYAGVLAARSINSVLEKSVSEERAFAEFDGRYRREYSVFYEFLSSFYHMDQAEDSYFWRARKVTNLPQSSFEAFVSLVAGGSSKERVLTDGAQVAERFARSAEDISRAAERTGGMETDSGQRMNHLFSAPVVREVMEEMNALQANSGEGTEVVEPPLLEGGLVPTPDGLGWAEPVSVPV

SEQ ID NO: 86772 - protein, 494 aa, Sphingomonas faeni
  REGION 1..494: note = tr|A0A2T5UCB8|A0A2T5UCB8_9SPHN Tryptophan halogenase; OS = Sphingomonas faeni OX=185950 GN=C8J25_101657 PE=4 SV=1
MTDALRSVTIVGGGTAGWMAAVAFGRLLGPAGTRVTLIESDDIPTVGVGEATIPPIRTFHAMLGIDEDAFLRATGGSYKLGIRFEGWTRPGESYVHPFGQIGTDIAGVPFAAQWLRARHAGLAVPLGAYSLEARAAEAGRFSRPIANGDSPLSRIGYAYHFDAGRYAAFLRTQSEAYGVVRHEGLVKRVERGPAGIAAVHLADGSRISGDLFIDCSGFRALLIEGAMEAGWIDWSEWLPCDRAVAVPSVADAVPLPLTRAIAERAGWRWRIPLQHRTGNGHVFSSRHMSEDEATAMLLAGVEGETLADPRVIRFATGHRNRFWSGNCIALGLAAGFMEPLESTSIHLVQSGLQHLLRMLPVGRPAAATVERYNRIMTAEFSRIRDFLVAHYHLNARAEPFWRDRATAAIPEGLAEKLALFHAGGRIFREADELFNETSWLAVLTGQNAPVSGYDPICDGIPIETAANRLAQIERVVATSLTHMPSHAHALARLA

SEQ ID NO: 86773 - protein, 516 aa, Colwellia sp.
  REGION 1..516: note = tr|A0A2N1IG81|A0A2N1IG81_9GAMM Tryptophan halogenase; OS = Colwellia sp. 12G3 OX=2058299 GN=CXF71_07505 PE=4 SV=1
MNNSIKKITIVGGGSAGWLTAGILASEFKTQGDLAVEITLIESPDVPTVGVGEGTWPSMRQTLKKIGVSEADFLMECDATFKQASKFDNWINGTNDSYFHPFTLPSGFFETNIAEFWQQHSKQVSFADATTVQSHLCKNGLAPKQISTPEYAFACNYGYHLDAGKFSTFLQKHCCEKLGVKHILDHVVKINSHENGDIASVSSKLHGDIDGDLFIDCTGFKSLLLGEHYGVEFISQKHVLFNDTALAVHVPYPHENSPIASHTISTAQTSGWIWDIGLPSRRGVGHVYSSAHISDDEAEQQLRSYISPSLGKNQKLADIRKISINPGFRSKFWHKNCVAIGMSSGFIEPLEASALALIELSAKMVADQLPANRQVMDITAKRFNEKFSYRWQRIIEFLKLHYVLSSRQETYWQDNRCENSIPEHLNELIALWKYQTPYGYDTHHTEELFPAASFQYILYGMGFKTDLALRQKREDKKEIANKFFNDNIAHTHKLMNAMSSNRELLNKIKQYGLSKV

SEQ ID NO: 86774 - protein, 516 aa, unidentified
  source 1..516: note = Thalassotalea agarivorans
  REGION 1..516: note = tr|A0A1I0ASX0|A0A1I0ASX0_THASX Tryptophan halogenase; OS = Thalassotalea agarivorans OX=349064; GN = SAMN05660429_00806 PE=4 SV=1
MTNISHIVIVGGGSAGWLSAGIIAAKLKQSVASGFTVTLIESNTIASVGVGEGTWPTMRSTLKNMGISETEFIKQCDVSFKQGAKFARWRTGKQDDYYYHPLVLPQGFEQLDLVPHWQASDSPLSFSEMVCPQESLCEQGLAPKLITTPEYRAVANYAYHMDAGKFATFLQQHCVENLDVHHIVDDVVGVNKTDSGDISSLATAKHGQIKGDLFIDCTGFKALLIGEHLNVPFVSCNETLFVDQALAIQVPYQQENSAIASHTISTAQSAGWIWDIGLPTRRGVGHVYSSRHVGEDHAYQQLMQYLSGQVDKPESLDVKKIPIEAGHRAQFWKNNCVAIGLSAGFLEPLEASALLLIEISAQMVVDQLPTNRQVMDIVAKRYNETFTYRWARIIDFLKLHYCLSERTDNPFWIEHRDPSTMSERLQEQLMLWKHQFPSDADFESALEIFPAASYQYVLYGMGFRTHQNPLGRSQQSIDRAQMAFKKNIAETQQMSNVLQSNRDLLEKIYKYGLQTI

SEQ ID NO: 86775 - protein, 533 aa, Colwellia sp.
  REGION 1..533: note = tr|A0A2N1IEP0|A0A2N1IEP0_9GAMM Tryptophan halogenase; OS = Colwellia sp. 12G3 OX=2058299 GN=CXF71_09770 PE=4 SV=1
MYIMNKLTKTVVIVGGGIAGWLTAGRLAAKHKSNTEQGLKVILIESANIPAVGVGEGTWPTMRSTLRALGISESDFIRECEASFKQGAKFAKWFDGTEDDFYYHPLVLPQGFGKTDLAAHWLAKQAQTKQNHSHVNSFSNDVCFQEAICEQGLAPKTIRHAEFADVANYAYHLDSAKFAVFLQKHCQKKLGVTHIVDDVTGVNCADNSANNDTTNKGDILSVSTENNGDIAGELFVDCTGFSSLLLGKHYQVPFKKCDDILFIDTALAVQVPYDSADSPIASHTISTGQEAGWIWDIGLQHRRGVGYVYSSKHSTEAEARAVLATYVGDKFASLNVRKIPIVSGHREKFWQNNCVAVGLSAGFLEPLEASALVMVELAAQMISEQLPASREVMDVVAKRFNETALYRWDRIIDFLKLHYILSERTEPFWSDNRDPTTIPQSLQDLMTEWQYRAPADHDFTSNNEVFPAASYQYVLYGMHFKSDYCHTPYALDDGEFANSQFMKNKQLIDKALSSLPSNRELLDKIKSYGFSRI

SEQ ID NO: 86776 - protein, 493 aa, Cellvibrio sp.
  REGION 1..493: note = tr|A0A2T6FI53|A0A2T6FI53_9GAMM Tryptophan halogenase; OS = Cellvibrio sp. 79 OX=1954207 GN=B0W54_16780 PE=4 SV=1
MINKKMKVVIAGGGTAGWIAAAALAHQMGELLDITLVESQEIGTIGVGEATIPPMRTFHRLVGINEQEFMRATNATFKLGIQFENWKQIGDKYFHSFGMTGKQTLITDFIHFWLRGQKLGIAQEFGDYCLEYKAALMDRFSINDQTKINYAFHLDAGRYASFLRTRAEARGVKRVEGKIAEVQQHPDSGDIAALKMESGQDIPGDLFLDCTGMRGLLIEQTLQTGFEGWEQWLPCDSAIAIQTESTAPAVPYTRSIAHHAGWRWKIPLQHRVGNGLVFSSRYMSDDEAINMLLSSVEGKVLIEPRVIKFKTGKRKKTWNKNCIAVGLSSGFLEPLESTSIHMIMTAITRLLQLFPHGEIRQPIVDEFNIQAESEITRIRDFIILHYKATERDDSPFWRYCKDMDVPEDLMHRINLFKDYGRCYPVEGELFRLDSWTQVMLGQGIFPSSYHPVVELMPERDLQNFLNNIAADVDKSIATMSSHHDFIKKYCASN

SEQ ID NO: 86777 - protein, 520 aa, Cellvibrio sp.
  REGION 1..520: note = tr|A0A2T6FE97|A0A2T6FE97_9GAMM Uncharacterized protein OS=Cellvibrio sp. 79 OX=1954207 GN=B0W54_23895; PE = 4 SV=1
MINENVKHVVIVGGGTAGWITAGVLAAKCVKEHGRDLTITLIESPTIGNIGVGEGTWPSLRTTLQTMGISETEFIRQCDATFKQGACFKKWIDNSEGDAYYHPLMLPSSLGPLNSIIRKLNSDPTKGQNSGDLSYSTMLCSQETVCERGLAPKNITTPEYRGILNYAYHLDTNKFSIFIKEHCISKLNINHVVNDIVGTTLGADGEIGSLRLVDGTELTADFYIDCSGFAGLLIDKHFNVPFLDRSDILFCDRAVAVQCPYEHQDAPIASHTVSTATGSGWIWDIGLQKRHGIGHVYSSGHMNQDEAERDLRKYVGKQMDQLDVRHIKYKPGHREKFWMKNCVAVGLAAGFVEPLEASSILLVEIAAFWIAEKLPHKKSGFVHCEKQFNETFRYRWDTIIEFLKLHYCISQRTDTDFWRDNTHPDSIPDGLLEKLDLWRGQCPSVVDFLSRADVFPFESYCYILYGMKFKTATHAVSAAQLIMLEKKIHEQQLAMANVVNSLPANRSLINKIREHGLQRI

SEQ ID NO: 86778 - protein, 506 aa, Cellvibrio sp.
  REGION 1..506: note = tr|A0A2T6FGN4|A0A2T6FGN4_9GAMM Tryptophan halogenase; OS = Cellvibrio sp. 79 OX=1954207 GN=B0W54_13685 PE=4 SV=1
MNNTTAADSRIRSIVIVGGGTAGWMAAAALANRFKQGVTKITLIESAEIGIIGVGEATVPYIKEFLQDLNINEVDFMRATKATYKLGIDFDGWHKPGEKFIHPFAGYGARIARIPFHHYWAKMRTQKKAQALDDYCLAAQMARHNKFALPKANNDIELSSFNYAFHFDAGLFAHYLSGIAQTLGVKRIQANVQQVNQCPDSGFIRSVGLDTGEIIEGEFFIDCSGFNGLLIEQTLKTGYETWNQWLRCDRAVAMPCTSKIAPASATRSLAMDAGWQWRIPLQHRVGNGYVYCSDYISDDLAAEKLRENLEGEALADPKFIRFTTGMRKQAWNKNVFCLGLASGFMEPLESTSIYLIQSSLTLLLNHFPNNQYNQALVDTVNNNLRIRQEKLRDFLILHYHLNQRHGQALWDECRTMSIPDTLAARIEYFKKTCQPQVDELDFFGTNSWLAMFSGFNIQSDYYHPVVDDFDTHLVEKELQAIATNINNTVKNLPSHLDFIKRNIVGE

SEQ ID NO: 86779 - protein, 511 aa, unidentified
  source 1..511: note = Thalassotalea agarivorans
  REGION 1..511: note = tr|A0A1I0E1L5|A0A1I0E1L5_THASX Dehydrogenase (Flavoprotein) OS=Thalassotalea agarivorans OX=349064; GN = SAMN05660429_01686 PE=4 SV=1
MVNESNSIVIVGGGTAGWITAGVIAAQHKGQVSVTLVESPDIPTIGVGEGTWPTMRKTLEQMGISETTFVRQCDASFKQGSLFKDWHSIGHQYYHPFTLPTGYQEINLAPYWLPHKQRMPFAFATSPQAAICEQGLAPKQIGTKEYAFFNNYGYHLDAGKFSELLKQHCVESLAVKHVLANVATITNDASGDIDHLVLDSGETISGKLFVDCTGQHSLLLGKHYNVSYLDQSKYLFNDTAIALQLPYKTEQENIASATISTGQSCGWIWDIGLPTRRGTGLVYSSAHADEQTAMDVLMAYAKERVTEQQFSQLSPRKISIAPGYRKEFWHRNCVAVGMSAGFIEPLEASALALVELSAKMISEQLPKTREAMTIVANRFNKKFEQRWQQIIDFLKLHYVLSERDDSAYWRDHRDPAGIPESLQEQLILWKTQSPYTYDSMYTEELFPSASNQYILYGMDFTTDIDPTSLANVERADRLINENLQRTRQMMAALPTNRELLQQVKAQGFAKI

SEQ ID NO: 86780 - protein, 493 aa, unidentified
  source 1..493: note = Thalassotalea agarivorans
  REGION 1..493: note = tr|A0A1I0E195|A0A1I0E195_THASX Tryptophan halogenase; OS = Thalassotalea agarivorans OX=349064; GN = SAMN05660429_01693 PE=4 SV=1
MSNKPVKKVVIAGGGTAGWMAAAAFGKLMGKQLDITLVESDEISTVGVGEATIPTMVFFHRLLNVSEKEFMQATNGTFKLGINFENWRDVNEDYLHAFGVTGKASWAAGFQHFWRKGKDKGFSGDFGDYCLERVAAEAGKFQHLPNNGLSYAYHIDAGLYAKFLRQLSEACGVKRVEGKIEQVNTDADTGFITSLTLAKGDVIDGDFFIDCTGFRGLLIEQALHTGYEDWSHWLPCDSAIAVQTQATQAPIPYTRSIAHQAGWQWRIPLQNRVGNGLVFCSKYLSDENAKQLLLENIEGDTLNQPRVIKFRTGRRLKTWNKNCLAVGLSSGFLEPLESTSIHLIQQSIVRFIKLFPAAGVQQCDIDEFNYQTNFDVEKIRDFIILHYKVTHRNDSEFWRYCRNMEVPASLAHRIALFKETGRMFREGDELFDDSWQQVMIGQGLIPEAYHPIVDSLSDEELKRMLLQLKNNIARTVDNMPSHEQYLAQFCPAH

SEQ ID NO: 86781 - protein, 495 aa, Streptomyces sp.
  REGION 1..495: note = tr|A0A515YEM3|A0A515YEM3_9ACTN Tryptophan 7-halogenase OS=Streptomyces sp. RLB3-6 OX=2594457; GN = FNV61_36235 PE=4 SV=1
MSTGEEFDVVVVGGGPSGSTVASFVAMQGHRVLLLEKESFPRYQIGESLLPATVHGICGLLGVSEEIERAGFMRKHGGTFRWGSSPEPWSFAFAISPRMAGPTSHAYQVERMKFDDILLKHSRKLGVEVREECSVVEVTEDEERVRGLVYTDSTGARHTVGARFVVDASGNKSRIHRDAGGDRIYSDFFRNIAIFGYFEGGKRLPAPRDGNIFCAAFDEGWFWYIPLSDRITSVGAVVSREFADSVQGDPADALSRLIAKCPRIDDMLADAERVTEGVYGQVRVRKDYSYSNSRYWRPGMVLVGDAACFVDPVFSSGVHLATYSALLAARSINTVLAGDLGEDESFAEFEARYRHEYGLFYEFLVSFYDMNSDHESYFWQAKKVTAFAESELEAFVELVGGVASLDGTFVDAESARARFKHTAGELERSVSQVDRTRGDDSTPMYQSDIMGSVMEQGTQIQVQAVLGGDLDPEAALFPGGLVPSADGLRWAAAAE

SEQ ID NO: 86782 - protein, 456 aa, unidentified
  source 1..456: note = Thalassotalea agarivorans
  REGION 1..456: note = tr|A0A1H9YBN4|A0A1H9YBN4_THASX Tryptophan halogenase; OS = Thalassotalea agarivorans OX=349064; GN = SAMN05660429_00145 PE=4 SV=1
MPYTIEIDVHNHSHLMGYGLIQALLSALFIVDKTNNQVTVNILKPADTETVDGVVLLDQHWLHLLAKFDVTEALLLTDADADFVSAQRFENLQTGQYFYQASSEYGIGFEGFAFNQYFSASNLTQHSFDSFCLSALLAKHQKFAHPSKDPTNVASTIEYQLNCDLNQLCDLLAQRLDKQNVNISKQSQPHDLRFACGLTDKVNSLRQRRVVLDRSKVSLPDTYYYQHALGHIIISPSHSNVEVCIVASEENIDALTDYVCRHVIKHEQITWQETNASHHMETTVMSSDGIKLGLSAYANCYHHIGHMTNLRWDLNRLWQYPIFNGYSQALATSFNAQTVLGNSTMNTFYALPAYLWNDVQSVLSQHELDALTYDLEVFTHTGQLPEIEGRQVESKQWIALLMNLGIKQHSVDAIVSHMPTQQIDRQLSQLAQFFSQQSNAFPSKQDYRQTYLKQHQ

SEQ ID NO: 86783 - protein, 508 aa, Colwellia sp.
  REGION 1..508: note = tr|A0A2N1IGC3|A0A2N1IGC3_9GAMM Tryptophan halogenase; OS = Colwellia sp. 12G3 OX=2058299 GN=CXF71_07485 PE=4 SV=1
MSQSTANRQNKIKKIVIVGGGTAGWMTASALSKILGSNYCDIQLIESDQISTVSVGEATIPQISLFNKILGIDENDFVKKTQGSFKLGIEFIDWTKKGGGYMHPFGDHGTNMDAIQFHHYWLKMHQQGKGPDLEEYSLAAVAARQGKFMRPQNRGNSPLSQINYAFHFDATLYAKYLRDFSVERGVTRTEGKVVNVSVRDSDGFIDSVYLENGERVAADLFIDCSGFKALLIEGALKTGFDDWSDVLPCDRAVAMPCMPKEADVLHPYTQAKAQKAGWIWRIPLQHRVGNGYVYPSKFVSDEEAVKILTEQMEGEPIGEPNFLRWTTGVRKKSWNKNCIAIGLSAGFVEPLESTGLHLIQSSIAKLMALFPHQGFDQIDIDTYNQQTKTELEYIKDFIVLHYKATDRDDSEFWRDCQQMKVSDRLQAKMDLYQKNGRIYREDNELFNETSWLAVMHGQGLTPSGYHPLVDVLSEEEIERRLQHIYSVIQKSVETMPMQKDFIDKYCKA

SEQ ID NO: 86784 - protein, 495 aa, Alteromonas sp.; identical to SEQ ID NO: 84932
  REGION 1..495: note = tr|A0A2D7GVQ5|A0A2D7GVQ5_ALTSX Tryptophan halogenase; OS = Alteromonas sp. OX=232 GN=CL600_10335 PE=4 SV=1

SEQ ID NO: 86785 - protein, 95 aa, Pseudomonas sp.
  REGION 1..95: note = tr|A0A2N8BRW3|A0A2N8BRW3_9PSED Tryptophan halogenase (Fragment) OS=Pseudomonas sp. FW306-2-11AA OX=2070663; GN = C1X97_30545 PE=4 SV=1
MTESPLGEIAHAYHFDASLYARYLRGLSEGRGVRRIEGKIVDVRLRGEDGFVEAVVMESGEVVAGDLFLDCSGIRGLLIEQALHAGYEAWGEWLP

SEQ ID NO: 86786 - protein, 503 aa, unidentified
  source 1..503: note = Xanthomonadaceae bacterium
  REGION 1..503: note = tr|A0A4Q6GB88|A0A4Q6GB88_9GAMM Tryptophan 7-halogenase OS=Xanthomonadaceae bacterium OX=1926873; GN = EOP92_38245 PE=4 SV=1
MQNAPIKDIVIVGGGTAGWMTAAALSTMLNGRYNIRLVESDDIGIVGVGEATIPMIQRFNRVLGIDEHEFMRETQGSFKLGVEFVNWGRLGDRYMHGFGRLGQDLATVPFDQYWQRMHMAGKAAPLEEYSITRMAAKANKFMPPRFDVQNSPLRDINYAYHFDAGLYAKFLRKLAESRGVTRIEGKITRATLREPDGHVDAVELENGARVEGELFIDCSGFRGLLIEQTLETGYEDWTRWLPADRALAVPCESAAAMTPYTRATAHKSGWQWRIPLQHRTGNGHVYCSRFISDDEAASTLLANLDGKALAEPRLIKFQTGMRKQAWNRNVVAIGLASGFLEPIESTSIHLIQSSIQRLIDFFPDRRFSPVDRDEYNRQARFEYERIRDFIVLHYHLNQRTDSDYWKECANMAIPDTLRHKMAMYRSHGRVVRVDNELFSEVGWIQVFEGQNMPIDGYHPLANTQSEEDVAEYLASVRDVIAKCVEVMPSHDDYIAKMCAAKKM

SEQ ID NO: 86787 - protein, 318 aa, Alteromonas sp.
  REGION 1..318: note = tr|A0A3D5F4K1|A0A3D5F4K1_ALTSX Tryptophan halogenase (Fragment) OS=Alteromonas sp. OX=232 GN=DGF36_02960 PE=4; SV = 1
VLQHDNGDIKALRLASGELIEGDFFIDCTGFKGLLIEETLHTGYEDWSHWLLCDSACAVQTTSTEPAAPFTRSAAHPAGWQWEIPLQHRTGNGNVYSSAFMDDNAASEQLMQNVKGEAITTPRTLRFKTGRRNKTWHRNCLALGLASGFVEPLESTSIHLVIMGITRFMQLFPHGGNDQALADEYNQQTQLELERIRDFIILHYHVTQRDDSPFWEHCKNMTVPDSLQTRITLFKEQAHAFQKQNELFRVDSWAQVMLGQGVTPDSHHPAAAMLSDAQLHQSMQQQRQRVLQAVAQLPAHGEFIRRYCATPQKAEVLS

SEQ ID NO: 86788 - protein, 523 aa, Xanthomonas oryzae
  REGION 1..523: note = tr|A0A0K0GQJ7|A0A0K0GQJ7_XANOP Tryptophan halogenase; OS = Xanthomonas oryzae pv. oryzae (strain PXO99A) OX=360094; GN = PXO_02802 PE=4 SV=1
MTMPDTLPSDPQQRAVRRVVIAGGGTAGWMAAAAMSKLLGRHLQITLVESDEIGTVGVGEATIPSLVTFHRLLEIDEAAFMAATQATIKLGIAFEHWRDVDRHYIHSFGHAGTDHWSAGFQHFWLKGQQRGVARDFGDYCLELRAAQEGRFAHLPNGGMNYAYHLDAGLYARFLRRFSEGFGVTRIEGRIGQVETDAESGFLTALTLQDGTRVEGDLFLDCTGLAGLLIGKTLGVGSDDWSRWLFADSALAVQTEAVGPPVTYTRSRADQAGWMWRIPLQHRVGNGIVYSSRYMDQDSARAVLERNLTGRALTEPRPLRVTPNQRHRVWEKNCVALGLASGFLEPLESTNIHLIQRGIIRLLQTFPQVINAVDIAEYNRQAAQEITHIRDFVILHYHATDRRDTPFWRDCAAMDIPDSLRHRVELFRQSGRVFHQANELFAENSWVQVMLGQGIVPQQHHPVADLMGDAELSRFLDTIHTRVEAALVRLPAHADFLQRYCPAPPPPEPAARLPAPPVMAPPAG

SEQ ID NO: 86789 - protein, 508 aa, Saccharophagus degradans
  REGION 1..508: note = tr|Q21G69|Q21G69_SACD2 Tryptophan halogenase; OS = Saccharophagus degradans (strain 2-40 / ATCC 43961 / DSM 17024) OX=203122 GN=Sde_3053 PE=4 SV=1
MKVKKVESILVVGGGTAGWLTAGIIAAKHGTSVSITVVESPNIKTVGVGEGTWPTMKTTLQEMGVSETDFLRQCDASFKQGAKFCQWKTGEQSDYYYHPLMLPRDFDEFNSAPFWLDQKSGESFSNSVCFQQALCEKNLAPKTLTMPEYAGAANYAYHLDAGKFAPFLTHHCTKKLNVTHVKATVENVKLTDSGEIDYLLTKEAGQLEADLYIDCSGFCSLLLGQALDVPFVDKSDILFLDTAIATHVPYPTENSAIAPHTLSTAQTSGWIWDIGLQSRRGVGHVYSSKYIDDQTAKQQLADYLCTDVQSLETKTIPMPCGHREKFWQKNCVAIGLAAGFLEPLEASALVLVEMSAQFIRDQLPAHTSIMPIVEKRFNTTFHYRWQRIIDFLKLHYVLSQRRDSEFWCAQQDACSIPESLQELLNLWQYQPPWRHDFLHKDEVFPAASYQYVLYGMGFKTHCREDEVNKARYQQLLEETSFTKHRAIKALPPTRELLNTLHQHRMQVI

SEQ ID NO: 86790 - protein, 510 aa, Erythrobacter sp.
  REGION 1..510: note = tr|A0A547PA19|A0A547PA19_9SPHN Tryptophan 7-halogenase OS=Erythrobacter sp. JBTF-M21 OX=2584124; GN = FGU71_03390 PE=4 SV=1
MTAAKTGKPIQSITIVGGGTAGWMTAAALSRLLSGIPGLSIKLIESEAIGTVGVGEATIPQINSFNTLLGINEHEFVRETHATYKLGIEFVDWTRLGHSYVHPFGSFGLDMYGIEFHHYWHRGLAAGDSSGLNDYSISGMAGKLDKFMHPQHNNPKSALSKLGYAFQFDAGLYAKYLRRMAETAGVERIEGKIVHVAQHSDTGFVTHVKLDDETEIGGELFIDCTGFRSLLLGEVLGVGFEDWSKWLPCDRAVAIPCSLGGKNEALTRSTARPAGWQWRIPLQHRLGNGHVYSSAHMSQDEATDLLVANLDGAPLADPNHLRFTAGYRHKAWDKNVVALGLSAGFLEPLESTTIHMVQTGIARLMTFFPTTDFSAPEIAHFNKQNVQDYVDIRDFLLLHYTATERDDSEFWNYCRNLEPPSGLADKLEMFRSSGRIIREHNELFTEASWLAVMTGQGIKPGGWNTANSVIDDAETLKRLAHIRHVVSSTVQQMPSQAEFLAANGSAIAAR

SEQ ID NO: 86791 - protein, 51 aa, unidentified
  source 1..51: note = Xanthomonadaceae bacterium
  REGION 1..51: note = tr|A0A4Q6GCE7|A0A4Q6GCE7_9GAMM Tryptophan halogenase (Fragment) OS=Xanthomonadaceae bacterium OX=1926873; GN = EOP92_38030 PE=4 SV=1
MSGAIKEIVILGGGSAGWLTAAVIAAEHQSASGAGLKVTLIESPDVRTIGV

SEQ ID NO: 86792 - protein, 314 aa, Alteromonas sp.
  REGION 1..314: note = tr|A0A359K0B8|A0A359K0B8_ALTSX Tryptophan halogenase (Fragment) OS=Alteromonas sp. OX=232 GN=DEH24_02855 PE=4; SV = 1
MTSASQPVRKVVIVGGGTAGWLTAGRIAAEHATKAHHPVEVVLVESPNIPTIGVGEGTWPTMRNTLIKLGIRETDFIRECDASFKQGAKFAGWVTGDTDDFYYHPLMLPQGFSQGNLGPYWQQHQDTIEQSFSNAVCFQEALCEHNRAPKSIRHAEFGAVANYAYHLDAGKFTSFLTRHCTEKLNVRHVLADVTGVTAHDNGDIRAIQTQQAGEIGGDLFVDCTGFQSLLLGKHYKVPFVPCDDVLFIDRALAVHVPYDSPDAPVATHTISTAQQAGWIWDIGLQSRRGVGHVYASRYQSEQQALDQLAQYVGP

SEQ ID NO: 86793 - protein, 239 aa, unidentified
  source 1..239: note = Burkholderiaceae bacterium
  REGION 1..239: note = tr|A0A5C7NYD1|A0A5C7NYD1_9BURK Tryptophan 7-halogenase (Fragment) OS=Burkholderiaceae bacterium; OX = 2030806 GN=E6Q92_08230 PE=4 SV=1
MDDINRSLRRIVVVGGGSAGWMAAAALSRAVQRDCTIVLIESDEIGTVGVGEATIPPIQTFNAMLGIDEAEFMRRTQGSFKLGIEFVNWGAQGHRYFHPFGPHGHQFDLSPQHQYWLRSRHQPGAAGLDDHSMAWAAASRGRFDKPSRDPRTVQSTFDYAYHFDAGLYARFLREVSESRGVQRLEGKIARVDLRSGDGFVQSVHLEDGRDVAGDLFIDCSGFRGLLIEDALHTGYEDWT

SEQ ID NO: 86794 - protein, 508 aa, Cellvibrio sp.
  REGION 1..508: note = tr|A0A2T6FFS8|A0A2T6FFS8_9GAMM Tryptophan halogenase; OS = Cellvibrio sp. 79 OX=1954207 GN=B0W54_11975 PE=4 SV=1
MTTSINPLKKIVILGGGTSGWIAASMLAAHLKPGFCEIELVESEDIGSIGVGESTIPPVVRLVTSLGIDEEEFIRETQACYKLGIKFVDWRVKSQSYFHPYGTLGKRIGSQDFYQCWLKATKEGDVYDLQDFSPCAVMAAQEKFFLPSQAMNTPIGGAGYAVHLDAKLVAAYLRRYAEARDVKRSEGNCINVVRKENGFIEALELSDGRKIHGDFFIDCSGFKSLLIEQAMGVAFEDWSHYLPCDRAYVVKTEKAGSRMPYTTATARKSGWAWRIPLRNGTGHGYVYSSRFCSDAEAKTTLLKNLDAARINDPRMITFNTGRRKEFWKDNCLALGLSGGFIEPLESTAIHLIARGMDFFLRFFPDADCDRSLQREYNRRMAADYEEVRDFIVLHYCTTEREDTEFWRWCKTMELPDSLNERIELFRGHGILRENNDELFRPASWQSVFEGMGIRPQKYNPRIDNLDYQQISETLKLARSAIFNMVKSLPSHDEYLAEHYGLDPESPKN

SEQ ID NO: 86795 - protein, 509 aa, unidentified
  source 1..509: note = Thalassotalea agarivorans
  REGION 1..509: note = tr|A0A1H9YAF5|A0A1H9YAF5_THASX Tryptophan halogenase; OS = Thalassotalea agarivorans OX=349064; GN = SAMN05660429_00146 PE=4 SV=1
MTTNNSIKNIVIVGGGTAGWMTAAAFSKVLGDQYCNITLIESDAIGTVSVGEATIPQIQLFNRILDIDENEFIKQTQGTFKLGIEFVDWLRKGHSYMHPFGTIGNDMDAIPFHHYWLKAHQQGKVPNLDSYSLASQAARQGRFVRPQNMGNSPLSQITYAFHFDATLYAQFLRNYAEQRGVVRKEGKIVDVVLRHSDGFIDSVVTEKGEHLNADLFIDCSGFKGLLIEQALETGFEDWSHWLPCDRAVAMPCMATKESLPYTISTARDAGWTWRIPLQHRVGNGYVYPSKFVSDDEAVAILRKSMESEPIAEPNFLRWTTGIRKKGWNKNCVAIGLSAGFIEPLESTGLHLIQSAIAKLLGFFPSQGFAQEDIDAYNSQLTVEMERIRDFIILHYKATEREDTPFWQYCKHMEVPEYLTKKMDLYRANGRIYRQDGELFNETSWLAVMQGQGVTPAGYHPLVDVLSQQELERRLMHIKSVIDKSVTLIPKQQDFIDKYCKAESMKKEMV

SEQ ID NO: 86796 - protein, 511 aa, Massilia sp.
  REGION 1..511: note = tr|A0A086WCI7|A0A086WCI7_9BURK Tryptophan halogenase; OS = Massilia sp. BSC265 OX=1549812 GN=JN27_07685 PE=4 SV=1
MNDKPIRRIVIVGGGTAGWMTAAPLAQRLARRADAPCEVILVESPEIGTIGVGEATLPTIRFYNAALGLDPDNFVRQTKASYKLGIEFTDWGRVGNRFFHGFGDFGPSLGKHPTYMYWLRMAAQFNNMPALENWSVSSMMARTNKFVPPDERTPSPVLDTYSYGYHFDAGLYANHLRDYAIARGAQRIEGMVVEVEQHPESGYITALKLRDGRRIEGDLFVDCSGFRGLLIEGALKAGYEDWSEQLPCNSALAVPCASAAALTPYTRSSAKEAGWTWRIPLQHRTGNGHVYSNAFTSDERAREVLLDSLDGDALDEPRQLRFVTGRRKKSWVKNCVAVGLSAGFVEPLESTSIHLIETAVGKLVELFPDRECRPELADEFNRAMGVRYESVRDFIILHYKLTERDDSEFWRYCANMPIPDSLRHQIELFRETGRVAILDRDGFAEPSFVAMLMGLGVVPKRYDPFVDGVDIRQVHGHFAGVRDMIAQGVNRMPAHDAYIAGQVKGASPRAA

SEQ ID NO: 86797 - protein, 279 aa, Alteromonas sp.
  REGION 1..279: note = tr|A0A349Z745|A0A349Z745_ALTSX Tryptophan halogenase (Fragment) OS=Alteromonas sp. OX=232 GN=DCW59_13475 PE=4; SV = 1
LIDGAMQSEFVDWHHYLPCDRAIAVQTKLAGAPDPFTRSTADDAGWRWRIPLQTRLGNGHVYSSDFMEQDEALQKLLAGVEGEPVTQPLPLKFRTGHRKAFWDKNCVAIGLAGGFIEPLESTSIHLTQMGIQRLVNLWPGRGCNRSEIAQYNALMTADYERLRDFIVLHYNATEREDTEFWRYVKHMAIPDSLAAKLEIFRSNGRLIPSPEDLFTPHSWLAVMLGQGLYPQNYDVLVDRVPAQALLKNMQMLRMSVAKTAGSMPTHEEFIRRYCQASAA

SEQ ID NO: 86798 - protein, 505 aa, Xanthomonas axonopodis; identical to SEQ ID NO: 85881
  REGION 1..505: note = tr|A0A3S4RYB5|A0A3S4RYB5_XANMN Tryptophan 7-halogenase OS=Xanthomonas axonopodis pv. manihotis str. CIO151 OX=1185660 GN=XANMN_14920 PE=4 SV=1

SEQ ID NO: 86799 - protein, 523 aa, Streptomyces netropsis
  REGION 1..523: note = tr|A0A445NJY6|A0A445NJY6_STRNE Flavin-dependent tryptophan halogenase RebH OS=Streptomyces netropsis; OX = 55404 GN=rebH PE=4 SV=1
MDSHVRRVVVVGGTASGWVAAARLASAFHGTVSVAVLETPQRAAAVSATGQAAVVAPELQRGLFDRIGVPEEEWMRACCASFKAAVRYVNWRTEGAAETTVRITGNGGEDHFYRPCAEMPRCAELPLSDFWRHRRHEGGTTEPYDYACFREPPLLDARKSPRRLDGRTAVPYGWHVDVRMFTQFLRKTAMREFGVRSVRGKLLRAERDARGMLTALHTVGGASVAGDLFLDCTGTESLLLAGVLGEPFLDARDRLLCDSAVTVTVPHDDAAHGIDPFTTATAMPDGWAWRMPLPGRFAAGLVHARDLTAPQEAADRLCALWGLRPGHATVRHLAYRTGRSRRAWVKNCVALGPAASFVEPLADEGLADVLHMVDRLVRDFPSRDGAEAPAARFNRAAQARYARARDFAQLLYSAAPRADTPFWRAQRELPLSDALEEYLVGHRAGLSPEAGEAPYEALLAALAPRRAAPPAALAHRPAARRTADAEFSRIRRQQRILLETLPGAHEYLHRLHTRPVPAAAVTV

SEQ ID NO: 86800 - protein, 159 aa, unidentified
  source 1..159: note = Burkholderiaceae bacterium
  REGION 1..159: note = tr|A0A5C8B7R5|A0A5C8B7R5_9BURK Tryptophan halogenase (Fragment) OS=Burkholderiaceae bacterium OX=2030806; GN = E6Q34_02505 PE=4 SV=1
MADNRIQDIVIVGGGTAGWMSAATMAQLLPNGHRIRLIESDLISTIGVGEATIPSIRNFNMHLGIDENDFLRNTQGTFKLGIEFVNWGVKGTKYFHGFGSVGRDQPMANFYHYWLKMNQLGLVDGLEPFSINPVASLMGKFSVGRPDLPNSPLSDLSYA

SEQ ID NO: 86801 - protein, 498 aa, Erythrobacter sp.
  REGION 1..498: note = tr|A0A547PA17|A0A547PA17_9SPHN Tryptophan 7-halogenase OS=Erythrobacter sp. JBTF-M21 OX=2584124; GN = FGU71_03400 PE=4 SV=1
MSVPRAPLKRIVVAGDGQLGSLAALAIKQALPFAEVIIIGTPFDNGALADRSPTALPFTNRFHDRLGLQEAVLLLRAGGCHRLVLRYIGWGGQDSAGTLQHGAMPYGLSNDASLKTRFAQEWGGGSRSGTEGQSNAQFAGSVAEVLSGRGRFAILPAEPPTPLREIDYGLRWNPTAYRDVIIEMASAAGVRHVSGEISGTVPDGQGGLSALTIDGTGAIEADFFVDCTGPSAMLLSGTAPIKRDDWREYLPIRQLAFAQPVKPVLSLEDRVSLPQYGWLNELAGRDALQLMLALPDGVSDQQIIEMLGQPPADSVSLNPGAVREPWVGNVAALGDATAQFEPLGFLNLDLAHRQLELLLEMLPGQVIDPRERAEYNRRAGLMAAGVRDVLGLHYAAPAAVKRFGARKQSAHLERLLDQSSRRGRIPFAEELPFANQELSALLAALGIGGGLTPLASAEGSGAAHQSRSAFEAKAQAALHAAPPYGEWLGRFLQSNQPR

SEQ ID NO: 86802 - protein, 503 aa, Saccharophagus degradans
  REGION 1..503: note = tr|Q21GW5|Q21GW5_SACD2 Tryptophan halogenase; OS = Saccharophagus degradans (strain 2-40 / ATCC 43961 / DSM 17024) OX=203122 GN=Sde_2807 PE=4 SV=1
MKPLQKIVILGGGTTGWMCAAMLANSVNTKRINIELVESEQIGTIGVGESTVPPFMDMLASLGIDEVEFIQATQATFKLGIQFKDWLKKDETFFHPFGRAEAGMDELSLYHLWLRAQLNGDTFSRFLDYSPNSVMAQQKRFAPYKAVPGTLLADSRYALHLDAGLVAKYLRNFAQQKGVKRTEGKVEKVNTSIDTAPRILSLQLESGQTINGDFFIDCSGFRALLIGDALQSSFTDWSTYLPCNRAVTVQSEALPELPPYTKATAQLAGWQWRIPLQHRTGNGYVYASKYISDEQATQTLLSNIQGKTLTEPRIIPFTTGMRKQVWKANCIGVGLAAGFIEPLESTAIHLAMRGIAEFLQQFPHSDCNPALINEYNARLQQDYEEIRDFIILHYAATERNDSDFWAYCKNVDWPASLVQTVEYFKARGDVPRKLAPLFESTSWRSLCEGMNIRPSAYSAFIENADYKASKQHMQNYKQQLVSLVKQIPTHKAFIEQNCASSSK

SEQ ID NO: 86803 - protein, 532 aa, unidentified
  source 1..532: note = Burkholderiaceae bacterium
  REGION 1..532: note = tr|A0A5C8BB50|A0A5C8BB50_9BURK Tryptophan 7-halogenase OS=Burkholderiaceae bacterium OX=2030806; GN = E6Q34_02625 PE=4 SV=1
MHSVKQILIVGGGTAGWLTAAFLARQLASNRTHGIQIRLVESPEIGIIGVGEGSFPSIRGTLAAIGIDEARFVRECHATFKQGIRFDDWLHTPRAQVPHRSQQHYFHPFNQPSQRQGTPDLLPYWLHGVAGTALPFAQAVSMQKRIADASRAPKRISDANFMGPMNYAYHFDAALFAKLLATHAKSLGVQHLLGNVQQVELAEDGAIAAVHTAEHGALRADLYIDCTGFRARLIGQALDSEFHSVSDTLFVDRALAVQVPYPSNDSPIPSYTISSAQEAGWIWDIGLQERRGVGYVYSSRHTDQARAEQILRQYLGNQAEHQQARLLELKLGYRPRPWIKNCVAVGLSGGFLEPLEASGIGLVETAAYLLAYLFPYHGEFEVSAQHFNQQMVQRYERIVDFIKLHYCISQRRDHRFWIDNTDEASIPQSLRDKLSLWRHRPPHRLDFVTDLEMYPPSSWQYVLYGMHYPTQIHPSMLDASKLVLVEQEFAAIAAMSQRATQDLPDHRAYVAQLCRKAESQSETKKTISYAMR

SEQ ID NO: 86804 - protein, 520 aa, unidentified
  source 1..520: note = Micromonospora deserti
  REGION 1..520: note = tr|A0A2W2DLV9|A0A2W2DLV9_9ACTN Tryptophan halogenase; OS = Micromonospora deserti OX=2070366 GN=C1I99_05240 PE=4; SV = 1
MINNVVIVGGGTAGWMTASYLSATFGPQISVTLVESKNVPTIGVGEATFSTIRHFFAYLGLEERDWMPECSATYKLAIRFENWREPGHHFYHPFERARVIDGFPITDWWLRQRGTGHFDDDCFVIPALCEKKSSPRFLDGRIFEQREGDDGSGLAGRSTMTEQRTQFPYAYHFDAALLARYLTRYGTARGVRHVLDDVTDVVLDQRGWISHVTTAEHGELHGDLFIDCTGFRGMLINKALEEPFQSYQETLPNDSAVALRVPLDMASYGLRPCTTATAQDAGWIWTIPLFGRIGTGYVYARDYTSPDEAERTLREFVGPAAEGMEANHIRMRIGRTRNAWVRNCVSIGLSAGFVEPLESTGIFFIQNGIEQLVKHFPDKNWNDQLRTSYNSHMARMMDGVREFLVMHYYAARRENNQYWKDAKTRPLPDGLAERIENWKVRLPDSQSIFPYYHGFESYSYHAMLLGLGGLPLQAPAALSAIDGTAAEKAFELIGQEARDLTDQLPSQYEYFAHLRKLPTP

SEQ ID NO: 86805 - protein, 498 aa, Alteromonas sp.
  REGION 1..498: note = tr|A0A359K6L6|A0A359K6L6_ALTSX Tryptophan halogenase; OS = Alteromonas sp. OX=232 GN=DEH24_13935 PE=4 SV=1
MNKPGNSSNKVNNVIIAGGGTAGWMAAAALSRLIGKSVNVTLVESKDIGIVGVGEATIPPIRTFHKLLGIDEKAFMRATNATFKLGIEFANWREPDHAYIHSFGVTGRECWAGEFHHFWMRAQQEGLGSAFGDYCFELKAAQQYKFGMSERMPINFAYHFDAVAYGKFLRQFAEKLGVTHVEGDIDKVNVNVTSGDIESLTLKDGRNLAGDLFIDCTGFKGLLIEQALHTGYENWSHWLPCDRAVAMQTESVEAPAPFTRSVAHEAGWRWQIPLQNRVGNGLVYCSRYMSDEQAKQTLMDQVTGNPINDPRVIQFTPGKRRLGWNKNCVALGLASGFIEPLESTSIHLIMTGIIRLLRLFPFDGVTQSAIDEYNNKYNSEMAAILDFIVMHYKVTNRDDSLFWQHCQRMAIPDSLTHKINLFKETGRVFLDDGDIFRVDSWTQVMLGQGLVPEQYHRVADEMSIEELTRFMNGLHQHVSQQVQALPAHGDFLKQYLGM

SEQ ID NO: 86806 - protein, 504 aa, Sphingomonas sp.
  REGION 1..504: note = tr|A0A0Q4TRA2|A0A0Q4TRA2_9SPHN Tryptophan halogenase; OS = Sphingomonas sp. Leaf257 OX=1736309 GN=ASF14_12095 PE=4; SV = 1
MTTPSPDAIRSVVIVGGGTAGWMTAAALAHASPRGLSITLVESDAIGTVGVGEATIPPIRLFNQTLGIDEAEFLRETKGSFKLGIEFVGWGRAGHRYFHPFGTHGKSFDLVAVHQHWLAAGGPGSGIAFDDLSMAWGAGQRGRFAAPMADPRSVASTFDYAYHFDAGLYAQFLRRYAEARGVVRVEGKIAGHALEEVRGHVASVTLDDGRVLAGDLFVDCSGFRGLLIEEALGTGYEDWTHWLPCDRAVAVPCETGGDGLTPYTRSTAREAGWQWRIPLQHRTGNGYVYCSRHISDDQAAATLMAKLDGAALGDPRFLRFTTGRRKRMWNRNVVAIGLSSGFMEPLESTSIHLIQAGIAKLLAYFPTQAFAPAAIEEYNRVAITEYERIRDFLILHYKLTERTDAPLWRECAAMPIPDTLAMKIAHFRESGRLVARDMDLFGPASWAAVHIGQFNMPEGLDPLLAYGDPAQSRGFVAKLAGAIGQMAESMPTHAQWLTKIGATI

SEQ ID NO: 86807 - protein, 459 aa, unidentified
  source 1..459: note = Xanthomonadaceae bacterium
  REGION 1..459: note = tr|A0A4V2BK64|A0A4V2BK64_9GAMM Tryptophan 7-halogenase OS=Xanthomonadaceae bacterium OX=1926873; GN = EOP92_15285 PE=4 SV=1
MRDTLRRTGVTETDFVRECDAAFKQGSKFARWTEDRDDDYYYHPFVLPQGYLETNVVAGWQERSEIPFGKLVSFQPHLCEAGKAPKQFSTPEYAAVANYAYHLDAGKLGVFMRKHCVGKLGVRHVSDHMTSVNTHENGDIASLQTREHGAIQGDLFIDCTGMRSLLLGQHYGIEMVSQKHVLFNDRAIALQVPYADPESPIACQTISTAQRNGWIWDIGLQSRRGIGHVYSSTHTTDEAAEQELLRYVAATGGQVQDMVELPRITIRPGYRERSWHRNCVAIGLSSGFMEPLEASSLVLVELAAGMLSDQMPATREAMDTVAARYNDTFAYRWERVVDFLKLHYVLTKRTDTDYWRDNCRPETIPDRLQELLRFWRQQPPSRYDLHRVEEVFPSASYQYILYGMGFKPDARPTTRRIDDVRQAEGYYREAADMTRKMLSALPGHRELLDHINSRGLPRI

SEQ ID NO: 86808 - protein, 413 aa, Streptomyces sp.
  REGION 1..413: note = tr|A0A1Q5CSD2|A0A1Q5CSD2_9ACTN Tryptophan halogenase; OS = Streptomyces sp. CB02058 OX=1703921 GN=AMK10_34645 PE=4; SV = 1
MSTQEEFDVVVIGGGPGGSATAGLLAMRGHSVLVLEREKFPRYHIGESLITGLMPTLEELGLLERLEGMGFTKKYGGTLLWGKNQGTWGFRFHESALYDHAYQVRRADFDALLLARARELGVTVLEEAAVKAPVFDGDRVVGVTYTEKGSKEVRTARSRMLVDASGQNHLLGREFDLIHYHDDLRNIATWSYWQGCNRYGGNRAGDIVSENRPSGWFWYIPLHDGTVSVGYVTPIDEYKASGESLEDLYTKELAQTEEIKTLMAGARRVSGFRNIKDWSYTCEKFHGPGWALVGDAAAFIDPLLSTGVTLALRGSRALAEAVDEALTDPSAEKDVLDWYEHSYRSFLDSVLDFVRFFYDRTKNKEDYWDKAQEQIDPDKLRPREVDFARMLSGLTGIDDIFDKRRRKRGSEAA

SEQ ID NO: 86809 - protein, 106 aa, Alteromonas sp.
  REGION 1..106: note = tr|A0A349Z1E2|A0A349Z1E2_ALTSX Tryptophan halogenase (Fragment) OS=Alteromonas sp. OX=232 GN=DCW59_03265 PE=4; SV = 1
MSTKPLHVVIAGGGTAGWMTANLLAKHWLNQPVTITLVESPDIGIIGVGEGSTPTLKRFFSDMGIAEQDWMPACNATYKVSIRFEGWSPGANIPAYSHPFISQLDT

SEQ ID NO: 86810 - protein, 502 aa, Sphingomonas sp.
  REGION 1..502: note = tr|A0A4R2U419|A0A4R2U419_9SPHN Tryptophan halogenase; OS = Sphingomonas sp. PP-CC-3A-396 OX=2135655; GN = C8J40_103394 PE=4 SV=1
MKRVQRLVILGGGTAGWMTAAALGATFGDLVKISILESDAIGTVGVGEATIPTIHWFNQLIGLEEAAFVAATKASFKLGIEFVDWARPGTRYFHPFGRYGVDLGPVPFHQHWLRARADGLDRPLSAYSLAAQLAAAGRFAKPVDDPRSILSTLGYAYHFDAGLYARHLRQLAEKRGVVRHEGLLRDIERDPETGFVTALTNDRGERLEGDLFIDCSGFRALLIGETMGAQFEDWSHWLPCDRAVAVPCARIAATTPFTRSTLRPAGWQWRIPLQHRTGNGYVYASSFVSDDEAVATLLSNLDGEALADPRMLRFTAGFRREAWRGNVVAIGLASGFLEPLESTSIHLIQSGIAKLITLFPDADCDPALARQFNTLLARDMDGIRDFLILHYHATQGHDAPLWRHTRHMTPPPTLIDKMTQYARAGRLMLSADELFREASWLAVLEGQGVGALGHAPLADTLDAVTNRRQLDQIETVIARATPTLPLHDVAIAALVDPQVAAR

SEQ ID NO: 86811 - protein, 509 aa, Alteromonas sp.
  REGION 1..509: note = tr|A0A2D5BYM1|A0A2D5BYM1_ALTSX Tryptophan halogenase; OS = Alteromonas sp. OX=232 GN=CL593_03860 PE=4 SV=1
  VARIANT 4: note = Xaa can be any naturally occurring amino acid
  VARIANT 154: note = Xaa can be any naturally occurring amino acid
  VARIANT 188: note = Xaa can be any naturally occurring amino acid
  VARIANT 229: note = Xaa can be any naturally occurring amino acid
  VARIANT 504: note = Xaa can be any naturally occurring amino acid
MQNXKKNPIKRVVIAGGGTAGWLTASLMKKVLGEAVNITLVESEVIGTVGVGEATIPPIRLVNQVLGIDEAQFLYETKATIKLAIKFENWKTKGQSYYHTFGAPGKAMAFCHFHHYWLKGQQLGKTQDLWDYDLNYHAAEAGKFAPINAKDPLXELPFAYHFDASLYAKYLRKLSESMGVVRIEGKIXSVERDNVNGYIKALRLDNKNRIEGDLFIDCTGFKGLLIQEXLGTGYDDWSHLLPCDSAIAVPSERHESTRPFTRSIAHDAGWQWRIPLQHRNGNGHVFCSRYVSEDHALDTLMGNLDTKPLADPKLIKFTTGRRRKQWNKNVVSVGLSSGFLEPLESTSIHLIQSAIVRLIQLFPHNGITPSLEAEYNKQSALEFEQIRDFLILHYSVNERTDSAFFNDMRNLDLPDTLRHKIALFKENGSLFRDQNDLFLESSWLQVMYGQGITPNDYHGLVNTFSDEKLKEMLTRLLKIKREPLSQLPSHDEYLNGMVKRAKQXMSANA

SEQ ID NO: 86812 - protein, 490 aa, Sphingomonas sp.
  REGION 1..490: note = tr|A0A4R2TWF4|A0A4R2TWF4_9SPHN Tryptophan halogenase; OS = Sphingomonas sp. PP-CC-3A-396 OX=2135655; GN = C8J40_103156 PE=4 SV=1
MTSRTPIASIAVLGAGVVGLSAAIAFARALPGLAVTLIETPDDPTALTDWLSGTLPSITAFHDRIGLRERDLLAAGATHRLGTRLSDWSGDGAPVVLAQGERGGAIAPGAFHQHWLNARRAGKTAAFDAFSVPAVLAAAEKFVHPSDDPNSPISGFGYALRLDPPRYRDLLRALARHIGIVPVPGAFAGVERGEDGRVSAVLLADGRRLVADLYVDCSGPAAPLRSALDTRWDDWRRWLPVDRLLLGTAPVQTLTPTDDLVAVPAGWRFASRLRDRTLVGLAYAADQTSDSSARRILPAGDTFVPLTPGARPEPWKHNVLALGDAAVVLDPLADANLYLAHAAILRAIDLLPGRDCAPTELAEYNQRSYRQAARVRDVQAAHYLPTGRTRGPFWKHASRLPRPDSLAHTLEHFAHRGRLPFYEDESFDKDDWHGLLLGLGIIPRIADPIASASPPETIAATLKRLAEATAALPARLPPYPLYLAQLERAR

SEQ ID NO: 86813 - protein, 505 aa, Pseudoxanthomonas sp.
  REGION 1..505: note = tr|A0A4Q9TGH4|A0A4Q9TGH4_9GAMM Tryptophan 7-halogenase OS=Pseudoxanthomonas sp. NML171590 OX=2527958; GN = EYC45_05000 PE=4 SV=1
MGDNRIGSVVVVGGGSAGWMAAAALATYLGRQARVRLVESEQIGIVGVGEASVPHMRTFNAQVLGLDEREFAQRTQATAKLGIAFEDWGRIGERYVHGFGTIGQSKGPLPFHQFWLKQFLAGRAEPIGAYSLQTVMAPLERFVPGVANAPAGSPLADIAYAYHFDAGLYAQYLRQVSEARGVERIEGRIVQVHQHPETGHVTSLVLDGGQQVEGELFVDCSGFVGLLIEQTLQAGYIDWSQWLRCDRALAVPCARSGPIAPYTRATARGAGWQWRIPLQHRTGNGYVYSSAYVDDDQAAATLLGHLDGAPQGQPRQLRFTTGMRRRFWQGNVVALGLAAGFLEPLESTSLYLAQSGISRLLALFPTRDFDPLLAQRYNRESAFEYERVRDFLILHYHATTREDTPFWRDCRTMQVPESLREAMELFAADGRYFRNGEDFFALPSWVQVMLGQGIVPRGYHPIVDDMPQEALARYVEGTRERLAEAVAAMPTHQQFLDRYWKAEAP

SEQ ID NO: 86814 - protein, 498 aa, Alteromonas sp.
  REGION 1..498: note = tr|A0A2D7GQ55|A0A2D7GQ55_ALTSX Tryptophan halogenase; OS = Alteromonas sp. OX=232 GN=CL600_00275 PE=4 SV=1
MTNNTVTNVVVVGGGTAGWISAAVIKRLLGSQVNVNLVESEDIGTVGVGEATIPPIALLNNMLGLDEKEFLRETNATMKLAIRFENWKTQGDSYYHTFGAPGKSYAFCHFHHYFKRAQQLGLKDSIWEYDLNYLACEAGKFAHIKTPDPVIEMPYAYHFDASLYARFLRKKCEAMGVVRTEGVIERVEQHPENGFVKGVCLKNGQMINGDLFIDCSGFKGLLTQQTLNTGYEDWSHWLPCDRAVAMPSERFEKTVPFTRSIAHSAGWQWRIPLQHRNGNGLVYSSNYYSDDEALGILSANLETKPLADPNFIRFKTGRRRKQWNKNVIAVGLASGFLEPLESTSIHLIQSAIVRLIHLFPHHGVKQKQVDEYNEQSRIEYEQIRDFIILHYHVNERTDSQFWRDVREMDVPDSLTHKIELFRDSGNLFREQNDLFLESSWLQVLMGQGVSPNDYHPLANGISEQKLMDLMENIKRIKREPVSKIASHDEFLKQFCAQQ

SEQ ID NO: 86815 - protein, 498 aa, Saccharophagus degradans
  REGION 1..498: note = tr|Q21GU4|Q21GU4_SACD2 Tryptophan halogenase; OS = Saccharophagus degradans (strain 2-40 / ATCC 43961 / DSM 17024) OX=203122 GN=Sde_2828 PE=4 SV=1
MKQNKIKKVVIAGGGTAGWMAAAAISKLLGKNLDISLVESDQIATVGVGEATIPALQTFHKLLGIKEPHFMAATQATFKLGIEFKRWKDTQSSYIHSFGAVGKDCWAAGFQHFWRRGVDLGVNHDYGDYCLELEAAKQNKFAHPNSGNIFYAYHLDATLYAKYLRKFSETFGVKRIKGKIVEVKTHLHNDYIKSLVLESGQEVEGDLFIDCTGFIGLLIEQTLQTGYEDWSHWLPCDSAVAVQTAATQAPIPYTRSTAHAAGWQWRIPLQHRVGNGLVYCSKHISDEEAKQTLLNNIEGELLTEPRVIKYRTGQRLKHWNKNCVALGLASGFIEPLESTSIHLIQRGILRLLFLFPSNGINDTDVAEYNQQTKAEIEHIRDFIILHYHVNQRNDSRFWRYCANMSIPETLAHRISLFKKSSRFYPKDDELFGEYSWVQVMLGQGIEPEGYHPIVDMMSEDELHHFLKNIRSSVQQALASMPQHTDYIQQYCKAPPIPI

SEQ ID NO: 86816 - protein, 491 aa, unidentified
  source 1..491: note = Saliniradius amylolyticus
  REGION 1..491: note = tr|A0A2S2E094|A0A2S2E094_9ALTE Tryptophan 7-halogenase OS=Saliniradius amylolyticus OX=2183582; GN = HMF8227_00568 PE=4 SV=1
MKVVIVGGGSSGWMAASILTRLMNQQLDITLVESEQVGTVGVGEATIPPITHFNRVLGISEAEFLKQTQGSIKLGIEFSDWYQPGQSYMHAFGQIGKNMGLAGFHHNWLKAKSEGQGGDFWDYSLNYQAAKANKFTHLNTIPNTQLQGLVQAYHLDAGLYAAYLRQLSEKQGVKRVEGFVESVTLVPETGFIDSLVLQSGQKIQGDLFIDCSGFRGLLIEGALKTGYEDWRHWLPCDRALAIPSEKLDPLPPYTRSIAHNAGWQWQIPLQHRTGNGLVYCSDYLSDEQAQELLLKNLSSDPLAEPKPIRFTTGRRVKQWHKNCVALGLSSGFLEPLESTSLHMVQSGLVRLIKLFPQNGISPVDVEEYNRQSKVEFERIRDFIILHYVLNNRPEAFWQRCRTMPIPDSLAHKIELFREGGKVFREQDELFTEVAWYQVMIGQGLLPQKYHPLADSLTTEQQADLLTGLKTLIDRTVQQLPTHQSFLDKIMA

SEQ ID NO: 86817 - protein, 509 aa, Alteromonas sp.
  REGION 1..509: note = tr|A0A2D6HPS6|A0A2D6HPS6_ALTSX Tryptophan halogenase; OS = Alteromonas sp. OX=232 GN=CL591_01100 PE=4 SV=1
  VARIANT 4: note = Xaa can be any naturally occurring amino acid
  VARIANT 114: note = Xaa can be any naturally occurring amino acid
  VARIANT 123: note = Xaa can be any naturally occurring amino acid
  VARIANT 504: note = Xaa can be any naturally occurring amino acid
MQNXKKNPIKRVVIAGGGTAGWLTASLMKKVLGEAVNITLVESEVIGTVGVGEATIPPIRLVNQVLGIDEAQFLYETKATIKLAIKFENWKTKGQSYYHTFGAPGKAMAFCHFXHYWLKGQQXGKTQDLWDYDLNYHAAEAGKFAPINAKDPLLELPFAYHFDASLYAKYLRKLSESMGVVRIEGKISSVERDNVNGYIKALRLDNKNRIEGDLFIDCTGFKGLLIQEALGTGYDDWSHLLPCDSAIAVPSERHESTRPFTRSIAHDAGWQWRIPLQHRNGNGHVFCSRYVSEDHALDTLMGNLDTKPLADPKLIKFTTGRRRKQWNKNVVSVGLSSGFLEPLESTSIHLIQSAIVRLIQLFPHNGITPSLEAEYNKQSALEFEQIRDFLILHYSVNERTDSAFFNDMRNLDLPDTLRHKIALFKENGSLFRDQNDLFLESSWLQVMYGQGITPNDYHGLVNTFSDEKLKEMLTRLLKIKREPLSQLPSHDEYLNGMVKRAKQXMSANA

SEQ ID NO: 86818 - protein, 502 aa, Sphingomonas sp.
  REGION 1..502: note = tr|A0A0Q4UBW6|A0A0Q4UBW6_9SPHN Tryptophan halogenase; OS = Sphingomonas sp. Leaf257 OX=1736309 GN=ASF14_06480 PE=4; SV = 1
MSDDAPISRIAIIGGGTAGWMAAAALARVLGPEGPAITLVESEEIGTVGVGEATIPPIQAFNALLGIDEDDFVRATQGTFKLGIEFVDWLRPGHRYFHPFGVYGIDKGAIPFEAMWQRLRLAGEALPLEAYSICAAAARSGRFMRPQPGNTPLAHIGYAFHFDAALYARFLRGHAEAAGVHREEGRVISVERGGPRDFIEAVLLADGRRIAADLFIDCSGFRGLLIEDAMGAGFEDWGHWLPNDRAVAVPTANVGPPTPFTRSTAHGAGWQWRIPLQHRTGNGLVYASRHLSDGEAATTLLAHLDGEPLSDPRPLRFRTGRRDRFWIGNCVALGLAGGFLEPLESTSIHLIQAGIARLLEMLPTRAFEPADTRRYNRLMAAEFDSVRDFLILHFHATERRDTAYWRKLASMDIPETLAERLAIHARTGRVYREADELFTKTSWLAVMDGQGLVANGHDPLAQGMPMDELRARLNRIAAVTQAAAGHMPAHADFLARHCSARR

SEQ ID NO: 86819 - protein, 536 aa, Yersinia frederiksenii
  REGION 1..536: note = tr|A0A0T9NM53|A0A0T9NM53_YERFR Tryptophan halogenase; OS = Yersinia frederiksenii OX=29484 GN=ERS008531_00129 PE=4; SV = 1
MSKPIKNIVIVGGGTAGWMSASYLVRALQQQANITLIESAAIPRIGVGEATIPSLQKVFFDFLGIPEREWMPQVNGAFKVGIKFVNWRKSPDPSRNDYFYHLFGSVPNCDGVPLTHYWLRKREQGFQQSMEYACYPQPEALDGNLAPCLHDGSRQMSHAWHFDAHLVADFLTRWAVDRGVNRVVDEVVEVKLNDRGFISSLFTKEGRKLEADLFIDCSGMRGLLINQALKEPFIDMSDYLLCDSAVATAVPTDDAQVGIEPYTTSIAMNSGWTWKIPMLGRFGSGYVFSSKFTSRDQATADFLNLWGLSDNQPLNQIKFGVGRNKRSWVNNCVAIGLSSCFLEPLESTGIYFIYAALYQLVKHFPDTSFDLRLTDAFNAEIIYMFDDSRDFVQAHYFTTPREDTPFWLTNRHDLRLSDAIKEKVERYKAGLPLTTTSFDDSTYYETFDYEFKNFWLNGNYYCIFAGLGMLPDRSLPLLRLRPESNDKAEAMFARIQREAERLRANLPTNYDYLRSLHEGDSGLFRPGPTPASLEIP

SEQ ID NO: 86820 - protein, 110 aa, unidentified
  source 1..110: note = Xanthomonadaceae bacterium
  REGION 1..110: note = tr|A0A4Q2XR16|A0A4Q2XR16_9GAMM Tryptophan halogenase (Fragment) OS=Xanthomonadaceae bacterium OX=1926873; GN = EOP89_06690 PE=4 SV=1
MSARIQVVIVGGGTAGWMTAATLAMSFAGRLADVTLVESEDIGTVGVGEATVPHIRFFNQRLGIDEADFIHRTNATFKLGIEFRDWGRIGDSYIHPFGDFGHDIDGLPFH

SEQ ID NO: 86821 - protein, 463 aa, Alteromonas sp.
  REGION 1..463: note = tr|A0A3D0Q1E2|A0A3D0Q1E2_ALTSX Tryptophan halogenase (Fragment) OS=Alteromonas sp. OX=232 GN=DEP33_02960 PE=4; SV = 1
VGEATIPTLMEFNDFLGIKEHDLLRECQGTYKLGIDFVDWYQKGQSYFHPFGFYGRDTPEFSFHQLWLRLNAMAAKGEIPADAPGIISDYNLCTVAAMQGRFAPPQGGADTILSTMRYAYHFDSARYGQMLRRYAEQRHVERIEGIVNSVEQDHSTGLLKSVTLNSGQVLQGDLFVDCSGFKALLIDGAMQSEFVDWHHYLPCDRAIAVQSKLAGAPDPFTRSTADDAGWRWRIPLQTRLGNGHVYSSDFMEHDEALQKLLAGVEGEPVTQPLPLKFRTGHRKAFWDKNCVAIGLAGGFIEPLESTSIHLTQMGIQRLVNLWPGRGCNRSEIAQYNALMTADYERLRDFIVLHYNATEREDTEFWRYVKHMAIPDSLAAKLEIFRSNGRLIPSPEDLFTPHSWLAVMLGQGLYPQNYDVLVDRVPAQALLKNMQMLRMSVAKTAGSMPTHEEFIRRYCQASAA

SEQ ID NO: 86822 - protein, 506 aa, Alteromonas sp.
  REGION 1..506: note = tr|A0A2G2PDR7|A0A2G2PDR7_ALTSX Tryptophan halogenase; OS = Alteromonas sp. OX=232 GN=COB03_05745 PE=4 SV=1
MMSSVSDNLNAMGKGAKNSPVKRVVIAGGGTAGWMAAAALSKLLGKSLSITLVESKDIGIVGVGEATIPPIRTFHKLLGIDEKAFMRATNATFKLGIEFENWREQDHSYIHSFGVTGRECWAGEFHHFWLRANALGFGGDFGDYCTELKAAQEGKFAYGERMPMNFAYHFDAVAYGRFLKELAVEAGVTHIEGDIQHVSKCSHTGCISSIKLSDGQEIAGDLFIDCTGFKGLLIEKTLHTGYENWSHWLPCDSALAVQTASTGAPIPYTKSVAHTAGWRWKIPLQNRVGNGLVYCSNYMSDDEAKDTLLSAIEGETLNEPRIIRFTPGKRRLGWNKNCVALGLASGFIEPLESTSIHLIMTGIVRLMRLFPFDGITQSTVDEYNNKYNSEMAAILDFIVMHYKVTNRKDSPFWEHCNSMDIPPSLTHKINLFKQTGRVFLDDGDIFRVDSWTQVMMGQGVVPEQYHRVADEMSETELERFLAGLKQQVDKQVSALPYHQDFLKKYL

SEQ ID NO: 86823 - protein, 500 aa, Alteromonas sp.
  REGION 1..500: note = tr|A0A359KBJ7|A0A359KBJ7_ALTSX Tryptophan halogenase; OS = Alteromonas sp. OX=232 GN=DEH24_18720 PE=4 SV=1
MHSPLKKIIILGGGSSGWMTAAALGKILKNHPCEIQVIESEDIGTVGVGEATIPQILLFNDLIGLDEDTFIKRTKGTFKLGIQFKDWRKVGHSYYHAFGEVGKNMEGVHFYHYWLKMRQQGKAAPLDEYTLSSLACNEKRFMRPFDAGNSPLSNIAYAFHFDAGLYAKFLRESAEGHGVVRTEGKVSQVTQHPNGDIRSLILENGEEHQADFFIDCSGFRALLIEQTLKAGYEDWRHWLPCDRAVAAPSALTEEPWPFTRAAAQQAGWQWRIPLQHRVGNGHVYSSEFMSDHDAERTLRENIDGELLADPRLIKFVTGKRNKFWHKNCLAVGLAGGFMEPLESTSLHLVQVAISKFFSFFPFQTPTQSDIDEYNAQMDFEFTRIRDFLILHYHVTEREDTPFWRYCKNMSIPDTLQEKIDQFKANGRINRFNNELFNDLSWFEVMYGQGLRPEGYNALADIFPDDELAKRLEGIQRVVRKSVDYMPSHAEFIANTCPAKP

SEQ ID NO: 86824 - protein, 478 aa, unidentified
  source 1..478: note = Xanthomonadaceae bacterium
  REGION 1..478: note = tr|A0A4Q6GQ97|A0A4Q6GQ97_9GAMM Tryptophan 7-halogenase OS=Xanthomonadaceae bacterium OX=1926873; GN = EOP92_15270 PE=4 SV=1
MAAAAISRMLGKTLDIKLIESEEIGTVGVGEATIPTLFTFHRLLGINEQEFMAATQGTIKLGISFENWLRQGHAYIHSFGTSGKDHWMGGFQHFWRRGRALGVAGDYEDYCVELKAAQQGRFAHLPNNGINYAYHMDASLYAKFLRKFSEGHGAQRIEGKIVEVVTDHDSGYITSLKLDGGAEIEGDLFIDCTGFRALLIGKTLNVGYADWSHWLLNDSALATQTTAVRDAVPYTRAIAGTAGWQWRIPLQHRVGNGIVYSSRHIADDEAKNEFLSSLEGEIIKDPWPIRFRPGQRLKTWEKNCVALGLAGSFIEPLESTTIHLIQRGIVRLLQNFPQVVTPTAIAEYNRQLDEEIQHIRDFVVLHFKATERRDTPYWRTVGSMEIPPSLRHRIELFRETGTVFHVPNELFGENSWIQVMMGQGIVPRQHHAVADVMSEEELSRFLNLISENVSKTVAQLPSHQSYLASYCPAVPPQC

SEQ ID NO: 86825 - protein, 501 aa, Alteromonas sp.
  REGION 1..501: note = tr|A0A349Z442|A0A349Z442_ALTSX Tryptophan halogenase; OS = Alteromonas sp. OX=232 GN=DCW59_08105 PE=4 SV=1
MQTQLNKIIILGGGSAGWMTAAALGKILSKHPCDIQVIESEEIGTVGVGEATIPQIQLFNDLIGLDEDTFIKRTQGTFKLGIQFQNWRKPGHSYYHAFGEVGKNMEGVHFYQYWLKMRQQGKAAPLDEYTLSSLACNEKRFMRPFEAGNSPLSNIAYAFHFDAGLYAKFLREVAESHGVQRTEGKVTEVRQHPDGAIQSLILENGSEHGADFFIDCSGFRALLIEQTLKAGYEDWRHWLPCDRAITAPSSLTETPWPFTRAAAQQAGWQWRIPLQHRVGNGHVYCSEFMTDEDAEKTLRLNIEGDLLADPRQIRFVTGKRNKFWHKNCLAVGLSGGFMEPLESTSLHLVQVAISKFFSCFPFQQPCQNDIDQYNAEMDFEFTRIRDFLILHYHVTEREDTEFWRYCKHMAIPDTLQEKIDHFKANGRISRFNNELFNDLSWFEVMYGQGLRPEGYHALADIFPEEELARRLEGIQRVVRKSVDYMPGHAEFIAKTCAANRD

SEQ ID NO: 86826 - protein, 411 aa, Bibersteinia trehalosi
  REGION 1..411: note = tr|A0A179CVW0|A0A179CVW0_BIBTR Tryptophan halogenase; OS = Bibersteinia trehalosi Y31 OX=1261658 GN=F480_06450; PE = 4 SV=1
MQQFDVVIIGAGPSGSVSASLLKKQGFSVCVLEKQHFPRFVIGESLLPHCMEILEDAGLVEAVHAEPSFQFKNGAAFTWGNRYTYFDFTDKFTAGPGTTYQVRRGIFDKILIDETTKKGVEVRFGHEVLALDNSGDLAVISARTEAGETYQIQAKFVLDASGYGRVLPRLMQLDTPSHLPARLAHFTHIDDNITAEDFDRNKILITTHPVHRDVWLWLIPFADNRCSIGVVGLPNVLEGDSETVLKKFALECPMLNRILANANWNNEFPFRNIQGYSANVKSLHGKHFALLGNAAEFLDPVFSSGVTIALHSAQLAARLVTQQLNGQAVDWEQEFTKPLMVGVNAFRTYVNGWYDCAFQDVIYARNPQPEIRQMISSILAGYAWDENNPFVAKSESRLAALAEICGLATQD

SEQ ID NO: 86827 - protein, 367 aa, unidentified
  source 1..367: note = Xanthomonadaceae bacterium
  REGION 1..367: note = tr|A0A4Q2XPR4|A0A4Q2XPR4_9GAMM Tryptophan 7-halogenase (Fragment) OS=Xanthomonadaceae bacterium; OX = 1926873 GN=EOP89_06075 PE=4 SV=1
MIAKRRTVTIVGGGTAGWMAAALLSRLLIDGYDIRLIESDEIGTIGVGEATIPSIRTFCGLAGIDQVAMIRATQATFKLGIEFVDWRDRGHSYIHGFGKIGQDLMWLHPHQFWLKYAPRGEAKHFDTYALNCVAARLNRFALPDTRQPESPMAGIDYAYHFDASLFAQFLRTTCEARGVERIEGRIVSVEQRPDDGFVDHLVLADGRSVDGDLFVDCSGMRGLLIGQTLGVGYEDWSRWLLCDSALAVPCESVSPLTPYTRSTARDAGWQWRIPLQHRIGNGHVYSSSHVGDQAAADTLLANLDGKPLADPRPVRFRPGKRERAWEKNVVAIGLASGFLEPLESTSIHLIHTGLLRLISLFPRQDFD

SEQ ID NO: 86828 - protein, 524 aa, unidentified
  source 1..524: note = Xanthomonadaceae bacterium
  REGION 1..524: note = tr|A0A4Q2XNP7|A0A4Q2XNP7_9GAMM Tryptophan 7-halogenase OS=Xanthomonadaceae bacterium OX=1926873; GN = EOP89_07010 PE=4 SV=1
MQKQHTGTDSGTIRTIVVVGGGSAGWIAAARLAAKGARGADDIVVKLVESATVPTIGVGEGTWPTMRNTLAKIGIGETEFLRSCDAAFKQGARFVGWKDGSARDAYYHPLNPPAGASDLNLSPHWQQVAAESPDRDFADWVDFQQALCDAGLAPKTITAPEYGGVANYAYHLDAGKFATLLRDHAVGRLGVEHIIGDVTDVVMADNGDIASLDLADGGSVAGDLFIDCTGFAARLIGKVYGVPFRRCNDILFADRAIAMQVPYPDENTPITSHTVSTASDAGWIWDIGLWARRGTGYVYSSAHVDDDAAEAALRAYVGPQAEHLSTRRISIEAGHRERFWQNNCVAVGLSAGFLEPLEASALMLVEASMDAIADRLPRTRGAMDTAARQFNESFRHHWERIIEFLKLHYAITKRTDTAFWRDNAAPESIPDALKERLELWRQHPPAPQDFAHAREVFSWPSYQYVLHGMGFETQYPTVAASSPDAVLARRWVGRIERMRGDAVAQMPSHRSLLRAIREHGLQAV

SEQ ID NO: 86829 - protein, 500 aa, Alteromonas sp.
  REGION 1..500: note = tr|A0A359K7V8|A0A359K7V8_ALTSX Tryptophan halogenase; OS = Alteromonas sp. OX=232 GN=DEH24_15550 PE=4 SV=1
MTAAALANKLQGLAIDIELIESDSIGTVGVGEATLPHIRFFNSALGIDEAAFMRETEATIKLGIEFCDWGNVGESYIHPFGDFGLPINNVDFYQHWLKHFQSGAITTPLHEYAAGVMSAKHNKFRIPEPSSSNIEQHYGYAYQFDSSLYAKFLRRYAQAKGVIRTEGKIVEVKQHNDTGEVVSLALDNQAVIEGDFFVDCSGFRGLLIEQTLHAGYDDWSEWLPCNRAVAIPCENTNPLMPYTRATAKAAGWQWRIPLQHRTGNGFVYWSEHISDDEACSQLLSALDGKPLAEPNQLYFKAGRRNVCWEKNVVAIGLSSGFLEPLESTSIHLIQEGITTLIELFPQQRVQQQDADEYNRRMALNFERVRDFLLLHYVATKRDDSDMWRYFRNLTLPDSLQTKIELWLSRGYIQRYEFGVFLPPSWIAVLLGQNLMPTGFDPRVNNTSDAEFIQTSERMRKAILNSVNNTPLHREFLTGYGAASNSKPLKSAMASTTSGGN

SEQ ID NO: 86830 - protein, 307 aa, unidentified
  source 1..307: note = Xanthomonadaceae bacterium
  REGION 1..307: note = tr|A0A4Q2XS11|A0A4Q2XS11_9GAMM Tryptophan 7-halogenase (Fragment) OS=Xanthomonadaceae bacterium; OX = 1926873 GN=EOP89_05335 PE=4 SV=1
MAVGARTQVVIVGGGTAGWMTAATLAMSFAGRLADVTLIESDEIGTVGVGEATVPHIRFFNQRLGIDEADFIRRTNGTFKLGIEFRDWGRIGDSYIHPFGDFGHDIDGLPFHHHWAHATREGGETLPSLEDCSLPIVAARDNRFAPPLDDPRSIGSTYSYAYQFDATLYAAYLRDYAEARGVVRIEGRVDAVEQKDDCIGAVRLADGRRFAGDLFIDCSGFRALLIDGALKGGYEDWSHWLPCDTAWAVPTANAGPLTPYTRATAREAGWQWRIPLQHRTGNGHVFSSRFTDPERARDILLSNLEGE

SEQ ID NO: 86831 - protein, 510 aa, Sphingomonas sp.
  REGION 1..510: note = tr|A0A4R2TWI1|A0A4R2TWI1_9SPHN Tryptophan halogenase; OS = Sphingomonas sp. PP-CC-3A-396 OX=2135655; GN = C8J40_103157 PE=4 SV=1
MTDPNPGPIRKVVIVGGGTAGWMAAAAAARYLDDGQRQVVLIESDAIGTVGVGEATIPPILGFNALLGIDERDFLRATGATFKLGIEFVGWDTGDDRYMHAFGGHGRDIQGLAFHQLWLKLRDRPGIGALEEYAPSAVAAYLHKFGQPGGQPPLAYAYHFDAGLYAAFLRRRAEAGGVTRIEGRITGTDRDPRTGHVRAVRLEGGQSVDGDLFIDCSGFRSLLLGETMGVAFEDWSHWLPCDRAVAVPTEPSTPLLPYTRATARTAGWQWRIPLQHRTGNGYVYSSAHISDDEATATLLANLDSKPTAEPRQLRFKAGRRERLWEGNVVALGLAGGFLEPLESTSIHLIQTGISKLFALFPDRGFADVERDEYNRLMGDAYTSVRDFIILHYHATRRDDSAFWRHVRTMPIPDSLTRKLTLFRKNARIFRYDDELFGISSWVQVLLGQDVVPVGYDPIVDALDADRVADAVRQIRGATLRTAQALPGHGDFVAANGRFEGVPPMRSPVRT

SEQ ID NO: 86832 - protein, 501 aa, Alteromonas sp.
  REGION 1..501: note = tr|A0A3D0T0Q6|A0A3D0T0Q6_ALTSX Tryptophan halogenase; OS = Alteromonas sp. OX=232 GN=DEP76_10235 PE=4 SV=1
MQTQLKKIIILGGGSAGWMTAAALGKILSKHPCDIQVIESEEIGTVGVGEATIPQIQLFNDLIGLDEDTFIKRTQGTFKLGIQFQNWRKPGHSYYHAFGEVGKNMEGVHFYQYWLKMRQQGKAAPLDEYTLSSLACNEKRFMRPFEAGNSPLSNIAYAFHFDAGLYAKFLREVAESHGVQRTEGKVTEVRQHPDGAIQSLILENGSEHGADFFIDCSGFRALLIEQTLKTGYEDWRHWLPCDRAVTAPSSLTETPWPFTRAAAQQAGWQWRIPLQHRVGNGHVYCSEFMTDEEAEKTLRLNIEGDLLADPRQIRFVTGKRNKFWHKNCLAVGLSGGFMEPLESTSLHLVQVAISKFFSYFPFQQPCQNDIDQYNAEMDFEFTRIRDFLILHYHVTEREDTEFWRYCKHMAIPDTLQEKIDHFKANGRISRFNNELFNDLSWFEVMYGQGLRPEGYHALADIFPEEELARRLEGIQRVVRKSVDYMPGHAEFIAKTCAANRD

SEQ ID NO: 86833 - protein, 509 aa, Alteromonas sp.; identical to SEQ ID NO: 84295
  REGION 1..509: note = tr|A0A2E9PJY9|A0A2E9PJY9_ALTSX Tryptophan halogenase; OS = Alteromonas sp. OX=232 GN=CL602_11565 PE=4 SV=1

SEQ ID NO: 86834 - protein, 536 aa, Sphingomonas sp.
  REGION 1..536: note = tr|A0A4R2UB37|A0A4R2UB37_9SPHN Tryptophan halogenase; OS = Sphingomonas sp. PP-CC-3A-396 OX=2135655 GN=C8J40_1078; PE = 4 SV=1
MRKQGNRQQTMATNTGPEATSDHPITNIVIVGGGTAGWLAACLIAARTDRGAGHPLEVTLIESPDVATIGVGEGTWPTMRRTLERIGITETDFLLACDASFKQGSRFDGWRTGAPDDSYLHPFTAPVDGDPRDIVAAWAEHGGQFANSVGAQGEICHRDLAPRQRAMPDYAGTLNYAYHLDAGKLAALLTRHATERLGVRHIRDHVVGIDSTEHGDIAAVSTRASGAIAGDLFLDCTGHAALLIGGHYGIATIDRGGELFNDRALAVQMPVAPDSAIASQTNATAHAAGWIWDIGLPTRRGIGCVYSSAHLSDDAAAETLERYIRTTSPGVAPPIFRQLKFQSRHRERFWERNCLAVGLSAGFLEPLEASAIVLIELSLDALLDNFPSHRGAMDIHATRFNTLFRYRWDRIVEFLKLHYVLSERDEPYWLDHRDAASIPPRLAELLTLWRHQPPSRADFPMIDEIFPAASYQYVLYGMGFPVPTRGPIATADRTRTETLLAQVDQRKRMLAAGLPTNRAYLDALRHATAPAMELSA

SEQ ID NO: 86835 - protein, 505 aa, Sphingomonas sp.
  REGION 1..505: note = tr|A0A0Q4TZD4|A0A0Q4TZD4_9SPHN Tryptophan halogenase; OS = Sphingomonas sp. Leaf257 OX=1736309 GN=ASF14_06295 PE=4; SV = 1
MDKAITRIVIVGGGTAGWLAAARIAAATAGSVTVTLIESPDVPTLGVGEGTWPTIRRTLERIGITETELLVACDGSFKQGTRFDGWATGASDDRYYHPFVPPIDADPADLPRDIPYAFATCPQPLVCAEDLAPRQRGMPDYAGALNYAYHLDATKLAALLTRHATTRLGVRHVRDHVTGVERGRDGGIATVHTRGSGSVAGDLFLDCTGHAALLIGNALGVETVDASSILFNDRALAVQLPAAPGSRIASQTVATAHGAGWVWDIGLPTRRGIGCVYASAFMSDDEAEGVLAEYCRRISGDSPAPRRLTFRSAYRSRPWTANCLAIGQSAGFMEPLEASAIVMIELALDALLDDFPVDAGLMAIQARRFNALATYRWERIVDFLKLHYVLSRRNEPYWRAHRDPATIPDRLAEMLALWRYRSPSALDLPMQDELFPAASYRYILWGMGFPAPLPSPLPRPHRPDLPSQLRQIDQRGRALAASLPTNRAYLDALRAEQAPLSEKCA

SEQ ID NO: 86836 - protein, 517 aa, Saccharophagus degradans
  REGION 1..517: note = tr|Q21LR2|Q21LR2_SACD2 Tryptophan halogenase; OS = Saccharophagus degradans (strain 2-40 / ATCC 43961 / DSM 17024) OX=203122 GN=Sde_1105 PE=4 SV=1
MIKKIVVLGGGSAGWLTAAILAAEFQGNEDSMVSISVIESPDVKTIGVGEGTWPTMKATLQRIGISETEFINSCSASFKQGSKFVGWKTGVPEDSYHHPFTLPVGMGKVNLYAVWQDETVARRSFSSTFSAQPVVADRGLGPKLHTMPEYAGVFNYGYHLDAGKFSELLKNHCVKKLNVRHVSDHVVEVNCAEDGYIESLGTRASGDVQGDFFIDCSGTSGLLIGNYYEIKLIDKKKNSFNDSAITAHVPYFDECNDIGSTTVATAQSAGWVWDIALSSRRGCGYVYSSSHITDDEAENEFRAYLASSIGDKNASQLATGRINFCAGYREKFFHKNCVAIGMSAGFIEPLEASALALVELSANMIRDEMPFCKKSLQEVEKRFNRVFAYRWERIIDFLKLHYVFSERKGSDYWADAASADSIPDSLKYLLSVWQFRPPNVYDFMQGEELFPVASYQYILYGMGFEMAPNAVARESDNVALGRRLLKEQEGALDKYLTNLPTNRQLLDNILKFGMQKL

SEQ ID NO: 86837 - protein, 515 aa, Sphingomonas sp.
  REGION 1..515: note = tr|A0A0Q4U5R3|A0A0Q4U5R3_9SPHN Tryptophan halogenase; OS = Sphingomonas sp. Leaf257 OX=1736309 GN=ASF14_07035 PE=4; SV = 1
MGETEVRRVVVVGGGSAGWIAACRLAAQARRIGSGVRVTLVESRHVPTVGVGEGTWPTMRNTLAKIGITETDFIRSCDAAFKQGARFVGWTDGTPQDGYYHPLNPPAGATEIDLAPHWLHGAAENASFADWVDYQPMLCDAGLGPKTIVMPEYAGHANYAYHLDAGKFATLLREHGVGTLGIDHVLGDVVRPQMSDHGDIVHLELADGRTVAGDLFIDCTGFAARLIGGVYQVPFRRCGDVLFADRAMALQVPYADEGAPIICHTVSTAQDAGWIWDIGLWTRRGVGHVYSSAHTSDDAAETALRRYVGPAAEGLSARRITIDAGHRTRFWQNNCVAVGLSAGFIEPLEASALMLIEASMDAIADRLPRTRAAMDVMARQFNATFTHHWMRIIEFLKLHYVLTRRTDTDFWRDNVAASSIPDGLAERLELWRHHSPGPQDFDHAREVFSWPSYQYVLHGMGFDSRQPRIDAAAPDTVLAQRFVTRMARARDDLRARAPRHRDLLRAIREHGLQRV

SEQ ID NO: 86838 - protein, 515 aa, Sphingomonas sp.
  REGION 1..515: note = tr|A0A0Q4U405|A0A0Q4U405_9SPHN Tryptophan halogenase; OS = Sphingomonas sp. Leaf257 OX=1736309 GN=ASF14_10265 PE=4; SV = 1
MVQPVQNIVIVGGGTAGWLTAGVIAARHQGRRPHGFTVTLVESPNVPIIGVGEGTWPTLRTTLRKMGVSETAFFRECDASFKQGARFNRWTTGAADDGYYHPLMLPQSFAQVNLAPHWLTAEGEPVSFCDAVTPQGRICDAGLAPKTIATPEYEAIANYAYHLDAGKFADFLRRHCCEQLGVRHVLADVEEVLLTESGDIRAVRTAQAGEVTGDLFVDCTGFRSLLLGEAMGVPFKPLNDVLFCDTALAIQVPYDDPEAPIASHTISTAQSSGWIWDIGLPTRRGVGHVFSSSHIDRDGAERELRAYLGEAGRDLPVRELKIRAGHRTRFWERNCVGVGLAAGFLEPLEASAIVLIELSAKLIAEQMPACREVMDTVAKRFNDTTLYRWGRIVDFLKLHYSLTQRTDSDFWRDNCRPETMPDRLQELMELWRYQAPWMHDEFDRVEEVFPSASYQYVLYGMGQRTDIAPGSLIAETIVAQRARRENDVQTGRLLAGLPKHRDLIRKIVERGLPTI

SEQ ID NO: 86839 - protein, 123 aa, Alteromonas sp.
  REGION 1..123: note = tr|A0A3D0SC77|A0A3D0SC77_ALTSX Tryptophan halogenase (Fragment) OS=Alteromonas sp. OX=232 GN=DEO96_05445 PE=4; SV = 1
MTTHPKQIVIAGGGTAGWIAAAALARKMGPLVNIRLVESSTIGTIGVGEATIPPLRTFHKLLQIDEQAFMRATAATFKLGIRFENWGRIGEQYIHSFGMTGQQSWLAEFVHFYLSAKARGLEG

SEQ ID NO: 86840 - protein, 509 aa, unidentified
  source 1..509: note = Xanthomonadaceae bacterium
  REGION 1..509: note = tr|A0A4Q6CBT8|A0A4Q6CBT8_9GAMM Tryptophan 7-halogenase OS=Xanthomonadaceae bacterium OX=1926873; GN = EOP91_02450 PE=4 SV=1
MQQPDASPGKIRRVVIAGGGTAGWLAACALAHQFRERLDITLVESEQIGTVGVGESTVPPIRAFHRFLQIDEQEFLRAVAGTFKLSISFENWRRPGERYIHPFGITGQGTWAAAFHHFWLDSQRRGMPSELGDFCLETVASRDDLFSLDTQPQVNYAYHFDAGLYARFLRRIAESHGLVRVEGKIRQVEQDGADGSVTALVLEDGQRLEGDLFIDCTGFRGLLIEQTLHTGYEDWNQWLPSDRAVAVQTEPVGPPVPYTRAIAHQAGWRWHIPLQHRVGCGLVFSSRHMSDDEARAKLLHDVGAPPIREPWLVPFRTGRRLKAWNKNVVSLGLASGFIEPLESTSIHLAISAVVRLVQLFPYDGIAPSLVDLYNQVSREEMEHVRDFIILHYHATQRDEPMWTECREMELPESLAARLRAWRERAHAWQDGNELFRIDSWTHVLLGQGIAPGQPHPLARAVPDGDLGKLLAALREPIGRAVAQMPPQQEFINRYCKAGPEVWGIRRTPQ

SEQ ID NO: 86841 - protein, 522 aa, Colwellia sp.
  REGION 1..522: note = tr|A0A2N1I7Y0|A0A2N1I7Y0_9GAMM Tryptophan halogenase; OS = Colwellia sp. 12G3 OX=2058299 GN=CXF71_16135 PE=4 SV=1
MQQNNSQSHTQNKIQNVVIVGGGTAGWMTASLLAKTLGKALNITLVESDKIGIVGVGEATIPPIVNFNSAIGIDEKAFIKETQGTIKLGIEFNNWHQEGDSYMHAFGNIGKKFPFCDFHHFWLRAQLDKNASNQSIDSTNIDSTNISSKSFWDFSLNYQAAKQHKFAPIRNIPNTNLPGLAHAYHFDAGLYAKFLSKHAIGMGVKRIEGTITQVNQHNESGFIESVLLENDRCIKGDLFIDCSGLAALLIEKTLSTGYEDYSHWLPCDRAIAVPCEKVEPIEPYTRSTAHKVGWQWRIPLQHRTGNGLVYSSKHMSDDEAKELLLNNIDGKPLAEPRVIPFKTGRRRKQWHKNVIAIGLSSGFFEPLESTNIHLIQTAAIRLMKFFPHNGIQQEEVDEFNRQSKVELEGIRDFIILHYKLNNRGDSEFWRACQRMEIPESLLNKIELFKKTGKVFCKPDDLFTEIAWQQVMIGQGNIPDDHHPLVDTLTKEQLTDLMASLKTLINGTVNKLPSHDEFLQSLK

SEQ ID NO: 86842 - protein, 521 aa, Xanthomonas axonopodis; identical to SEQ ID NO: 85802
  REGION 1..521: note = tr|A0A443Z8M4|A0A443Z8M4_XANMN Tryptophan 7-halogenase OS=Xanthomonas axonopodis pv. manihotis str. CIO151 OX=1185660 GN=XANMN_20335 PE=4 SV=1

SEQ ID NO: 86843 - protein, 498 aa, Massilia sp.
  REGION 1..498: note = tr|A0A086W5P6|A0A086W5P6_9BURK Tryptophan halogenase; OS = Massilia sp. BSC265 OX=1549812 GN=JN27_21735 PE=4 SV=1
MGKPVRRVVIAGGGTAGWMAAACISKVLGKRLDIKLVESDEIGTVGVGEATIPTLLNFHNLLEINEQEFMAETKATFKLGISFENWRNVNEDYIHSFGMTGTDHWTAGFQHFWHKGRERGLAGDYGDYCLELRASQESKFAHLPQNGRNFGMNYAYHLDASAYGRYLRKFSERFGVQRIEGKIVDVTTSALTGHVRSITLDSGVDIEGDLFIDCTGFRALLIGQAMGVGYEDWSEWLFNDSAAALQTTSVGDAIPLTRSIAHPFGWQWRIPLQHRVGNGIVFSSRYVEEGAAIQTLLGNIEGEALMKPRVIKFTPGQRRQVWKHNVVAVGLSSGFLEPIESTSIHLIQRSIIRLMQMFPASGIAQADVDEFNKQAWTEVEHIRDFIILHYKVNNRIDAPYWADARNMEVPASLQHRIDLFRETGRVFRISNELFAENSWVQVMLGQGIMPYRHHQSADLMGDEELSHFLGSIKGQIDRTVASLPSHQSYVGRYCSAPK

SEQ ID NO: 86844 - protein, 530 aa, Kitasatospora sp.
  REGION 1..530: note = tr|A0A540VYS1|A0A540VYS1_9ACTN Tryptophan 7-halogenase OS=Kitasatospora sp. MMS16-CNU292 OX=2567942; GN = E6W39_06045 PE=4 SV=1
MSNRINKVVILGGGTAGWMTAAYLGKALQGTVDITVLEAPTIPRIGVGEATVPNLQRAFFDFLGIPEDEWMRECNASFKVAVKFLNWRTPGPGQATARSYQGRPDHFFHPFGLLPSHDNVPLSHYWEYRRLQGETDEPFDYACFTDTAVMDGNLAPRYPDGRKAVNYAWHFDAALVADYLRRFATDKQGVHHLSDEMTDVLKDGRGFITGLRTKAGRLVEGDLFVDCSGFRGLLINQAMAEPFLDMSDHLLCDSAVATAVPHDDEANGVEPYTSSIAMRHGWSWKIPMPGRFGSGYVYSSKFTEQGEATEEFCRMWGLDSNAKFNHIRFRVGRNRRAWVKNCVSVGLASCFLEPLESTGIYFTYAAIHQLAKHFPDRGFDQTLVDRFNREIQEMFDDTRDFLQAHFYLAPRTDSEFWRANKELALPDNIREKIAMFRAGVPINPPATDESNYYGNFDAEFRNFWTNGSYYCIFSGLGLSPDHPLPALTYRPESVQGSQRLFDRVKQRQRELTETLPTNLEYLKQLHGTRP

SEQ ID NO: 86845 - protein, 495 aa, unidentified
  source 1..495: note = Saliniradius amylolyticus
  REGION 1..495: note = tr|A0A2S2E2A7|A0A2S2E2A7_9ALTE Tryptophan 7-halogenase OS=Saliniradius amylolyticus OX=2183582; GN = HMF8227_00895 PE=4 SV=1
MKQSINKVIIAGGGTAGWMTAATMSKLLGNVLDVTLVESEQIGTVGVGEATIPPLLTLHQLLKLNEQEFMAATQATFKLGISFENWKDVGEDYIHSFGTTGKDCWACGFQHFWLKGHQKGIASRYGDYCPELLAAEQNKFAIQPKQGLNYAYHLDASLYAKLLRQMAEQHGVKRVEGKIASVQKHDNGYLKGLILDSGQTLEGDFFIDCTGFRGLLIEQALHTGYDDWTHWLPCDSAIAVQTQATRAPIPYTRSIAHESGWQWQIPLQHRVGNGLVYCSRYQSDDDAREQLLKNIQGELRTEPRVIKFQTGQRRQHWNKNCVAVGLSSGFIEPLESTSIHLIQRGIIRLLQMFPLNGISEHDIKEFNQQTEHEVENIRDFIILHYHVTERRDTPFWRHCASMPIPDSLKHRIELFKETGRVFKVPNELFAENSWVQVMMGQGLTPQAYHPIVDHMPDHELEAFLAQIKAQSAHRAQQLPEHADFINHYCKASEAM

SEQ ID NO: 86846 - protein, 526 aa, Saccharophagus degradans
  REGION 1..526: note = tr|Q21I28|Q21I28_SACD2 Tryptophan halogenase; OS = Saccharophagus degradans (strain 2-40 / ATCC 43961 / DSM 17024) OX=203122 GN=Sde_2391 PE=4 SV=1
MQTRPADQTAPLKNIVIVGGGTAGWLTAGRLAAQFNTGADAVKNTNNIRVTLIESPNIPTVGVGEGTWPTMRSTLIKMGIRETDFLTQCDATFKQGAKFARWTTGKQDDFYYHPLMLPQGFGKTDLAQHWQTVKQVTGQSFSEAVCIQQAICEKGLAPKTIRAPEFNGAANYAYHLNAGKFATFLQKHCTQNLGVNHILDDVSGVNIADNGDIASVITKANGNIEGDLFVDCTGFNALLVGKHYQVPFKDCSDVLFIDSALAVQLPYSKADSPIASHTISTAQDAGWIWDIGLTHRRGIGHVYSSRHTSESDALQALATYTQTDCDKLDVRKIPIKSGHREKFWVNNCVAVGLAAGFLEPLEASALVLVELSAQMIAEQLPANRATMNIVAKRFNETFLYRWDKIIDFLKLHYCISQRTDTAFWRDNCDPATIPQSLQDLLALWQHRAPSDLDFTSNNEVFPAASYQYVLYGMGFNTQFSNTGLYNAAVADAHFMRKQLNEDEALKALPSNRELLEKIAQFGLQPV

SEQ ID NO: 86847 - protein, 498 aa, Pseudoalteromonas tunicata
  REGION 1..498: note = tr|A4CBZ0|A4CBZ0_9GAMM Uncharacterized protein; OS = Pseudoalteromonas tunicata D2 OX=87626 GN=PTD2_18685; PE = 4 SV=1
MTPTKISNVVIVGGGTSGWITAALLVKVLGRVINITLVESDEIGTIGVGEATIPPIVQLNNALGISEKTFLAHTKGTFKLGIEFNDWGQLGDSYMHAFGGIGKSLPFCDFHHLWLQSKQQGGNSDFWDFSLNYQAAMAGKFGPSQKIASTNIQGLEYAYHFDAGLYAGLLSEFSQGLGVKRLEGKVTEVVVNQNNGDVSHLCLANGEHLYGDLFIDCTGLKALLIEQTLNTGFEDYSHWLPCDRAVAVPCEKVEPIVPYTRSTAHSCGWQWRIPLQHRTGNGLVYSSKYLSDEAAKAQLLNSLDGKPLGEPKIIAFKTGRRRKQWHKNVVAIGLSNGFFEPLESTNIHLIQTAATRLIKFFPHFGIKDAEVSEFNRQAQVEAEQMRDFIILHYKVNQKVDSPFWQACQRMEIPHTLAQKIALFAQSGKVFREQDELFTEIAWQQVMLGQNLVPADIHPIATMLSPLQLSELMENLKTLVDHNVAGIVSHSDFLAQIAH

SEQ ID NO: 86848 - protein, 533 aa, Xanthomonas axonopodis; identical to SEQ ID NO: 85887
  REGION 1..533: note = tr|A0A443Z915|A0A443Z915_XANMN Tryptophan 7-halogenase OS=Xanthomonas axonopodis pv. manihotis str. CIO151 OX=1185660 GN=XANMN_21580 PE=4 SV=1

SEQ ID NO: 86849 - protein, 502 aa, Saccharophagus degradans
  REGION 1..502: note = tr|Q21N77|Q21N77_SACD2 Tryptophan halogenase; OS = Saccharophagus degradans (strain 2-40 / ATCC 43961 / DSM 17024) OX=203122 GN=Sde_0588 PE=4 SV=1
MSETKKRVVILGGGTAGWIAANLMAKHWEQEAFEITLVESPNIGIIGVGEGSTPPLKVFLDLIGCKEEEWMPACNATYKVGIRFNDWSIKPGYESYFHPFYSKTDDHTIPAFFHNSFLIRQGVDLDGLPDHFFLGVELAKQKKAPLPAENFPFETSYGYHFDSNLLGQYLAKVAASRGVKYKKATVCEVVLKENGDVSHLLTDEGESIGGDLFVDSSGFKGQIIQQALKVPFISCVQSLFNDSAVVLPTDQVDEPNCQTTSTAMKNGWRWDIPLTNRTGNGYVYSSSFCDADAAETELRTTLNLLDSDVEARHLKFKVGRVQEHWVRNCLAVGLSQGFIEPLEATALDMVQETVVRFIEAYDKGQHTEQSRKDFNSRISHRFDAVRDYITAHFRIVSRTDTEYWRACGSNDKISASLYSILSSWMQGKNITQELEQQQLDAYFPNISWNCLLAGKGIYPDKSQLRKGNELAHKYKTTDINKFIKACALNYPTQADVLKRYTR

SEQ ID NO: 86850 - protein, 498 aa, Saccharophagus degradans
  REGION 1..498: note = tr|Q21DG9|Q21DG9_SACD2 Tryptophan halogenase; OS = Saccharophagus degradans (strain 2-40 / ATCC 43961 / DSM 17024) OX=203122 GN=Sde_4005 PE=4 SV=1
MRNITIVGGGTAGWITANILAKSWAHQNVNITVIESPTIPTIGVGEGSTPALKGFFDFLEIQESEWMNKCNATYKNGIRFNGWTNKPDFKSYFHPFPSALDYTYLPEYFNHIASRRAGYANATQSENYFLAAKLAAEKKSPYVIDNLGKLKSEVNYGYHFDAAKLAEFLQQQATNLGVIHTVAAVQGVTQGEQGIAKIHLSNGESHSADLYIDCTGFSAKLIEKTLGAKFISYADHLYNDAAVAIPSLHCENETLISSETVATAMENGWAWQIPLQNRVGNGYVYSSQYCSAEQAEQELRTKLGLMDSAVEAKHLTMRVGRRDKHWIKNCVAIGLSQGFIEPLEATALALVQFSAAKLVDYYSIESNIDNTKRDDYNRVINNQFDGIKDYIVAHYKTNSLTHTKYWCDNRAHLDKLSPSLQQIFKCWISGADLSAEIQRQNIQKYYPVVSWYCLLAGMGMFPEAIYQANAVAPSCTKMQAIAGSALSQLECMQHFKTL

SEQ ID NO: 86851 - protein, 525 aa, Massilia sp.
  REGION 1..525: note = tr|A0A086W5P9|A0A086W5P9_9BURK Tryptophan halogenase; OS = Massilia sp. BSC265 OX=1549812 GN=JN27_21750 PE=4 SV=1
MASTTIRHVVIVGGGSAGWLTAAVLASSFQSAGEGALRVTLIESPDVPTIGVGEGTWPTMRDTLRAAGLSESAFFRECDASFKQGSRFNRWVSGGDHDYYFHPFVLPQGWGDADMAGHWLARHADIPFADLVSYQPHLCVHGRAPKQAATPEFAAVANYGYHLDAGKFGLFLKKHCLEKLGVHYVPDHVTGIRSHDDGDIAALHTKAHGELAGDLFVDCTGMQSLLLGKHYGVPFLPQRGILFNDSALAVQVPYRLDDTPIASQTTSTAQEAGWIWDIGLPTRRGIGHVYSSAHTSDDAAERALRAYIRATGGPDDIPTPRKLSFEPGYRERFWHRNCVAIGLSSGFIEPLEASALAMVELSSAMLADEMPVTRAQMDLCAQRFNETFTYRWERVIDFLKLHYVLSRREGALDPNGYWRDNRNSETIPQRVADLLALWRHRPPSRYDFNRIQEVFPAASYQYILYGMGFRPEPGLSRRERVGEGNAAMADGFLRQAADLTRRMLPALPDNRTLIAHIVRHGLPVK

SEQ ID NO: 86852 - protein, 502 aa, unidentified
  source 1..502: note = Saliniradius amylolyticus
  REGION 1..502: note = tr|A0A2S2DZ46|A0A2S2DZ46_9ALTE Tryptophan 7-halogenase OS=Saliniradius amylolyticus OX=2183582; GN = prnA PE=4 SV=1
MAKIQHITILGGGTSGWLSAAILSYQFRHQPVRITLVESEQIGTIGVGEATIPPFLDVLSSIGIDQFDFIRQTQSTFKLGIRFSGWLEQTDAYMHPFGQLGQPLFHQDFYQCWLKSYQAGNNSPLMAHSPAAVLAEAGGFMMPAMVKNHPMQASAYALHIDATLAARYFRNHAEKLGVERVEGRVEQVLCHENGHVSQLLLSDGSAVGGQLFLDCSGFSALISGQTLGAEFEDWSEFLTVNEAVTIQSEPFPEPPSYTESKAQAYGWSWHIPLQHRTGNGYVYDNRYIDSESAAQTLLEQLPTPPLSDPRRIRFRTGIRPSPWLGNCVAIGLAAGFLEPLESTAIHMVTRGVKHLLRLLPDRAFNPVLQEEYNRRMRRDFEEIRDFLVLHYCKNQRSDSEFWCYYQRMNLPERLEKKLTLFEENGGLIPGEDDLFTANNWYAVLEGLRVRPRRMSPLSEDIPVTRLEPLLQQIRQSLTDGARAMPSHRAFIDQHCPATKPGM

SEQ ID NO: 86853 - protein, 510 aa, Pseudoalteromonas tunicata
  REGION 1..510: note = tr|A4CBD5|A4CBD5_9GAMM Putative tryptophan halogenase OS=Pseudoalteromonas tunicata D2 OX=87626; GN = PTD2_17660 PE=4 SV=1
MTDLRNVIVVGGGTSGWLSATYLASSFKKTGRNIKVTLIESANIPTIGVGEGTFPTIVNTLYEIGLSEKDFLASCDASFKQGALFKNWLHDPQERTHGYYHPFEPPEMPKGIDLSAYWVKRKKAGTMSHDFSHATCVQAQLCDHNLAPKTTETPEFSWLAKYAYHLDAAKLGKVLQKHGTEKLNIEHIFADIEDVNIDNDGYIASITSNEGKTFLADFFVDCTGFRSLLLGKALTVPFVSQSQYLSVDSAVTLQVSYEKDDSPIATHTISTAQEAGWIWDISLQSRRGTGYVYSSKHTTPERAEAVLKAYHNIDADTDISLRHIHFDVGYREKSWYKNCCAIGFSSGFVEPLEATAIAMVEAGVRSLAARFPQHRAAMDIRQQQYNEIFVSRWKNIIDFIKLHYCLSKRKDTAFWQEHTSSKTLPASLKARLEAWKYYGITDGDLPYKYDLFTLASWQYILYGLEFLPDYVESAPLPDTLIDKAFESIQIKGSNAKKQLKNNRDLIQNYL

SEQ ID NO: 86854 - protein, 514 aa, Pseudoalteromonas tunicata
  REGION 1..514: note = tr|A4CBD9|A4CBD9_9GAMM Putative tryptophan halogenase OS=Pseudoalteromonas tunicata D2 OX=87626; GN = PTD2_17680 PE=4 SV=1
MNHKSRIVIVGGGTAGWLSAAKLAKELAANQPNGVQVTLLESSDIPTVGVGEGTWPTIRKTLASIGIDEAEFIKETDASFKQATQFVNWKSDPISTNNTYYHLFSSVSDSAQFNLAPYWLLGDKHTSYAQAVSAQDILCDKGLAPKLITNKPYEGIQNYAYHLDAGKFATLLKRHCIEKLGVKHLIGNVVQVNTDEEGAIASLVTDTQGMLAADLYVDCTGFKSLLIGQALGVKFNSIADTLFVDNAIAIQMPYENDEADIASATLSTAQQAGWIWDIGLQSRRGTGHVYSSEFISHDEAEHTLRQYLGPKATDLPAKHIKMNCGYREKFWHKNCVAIGLSAAFVEPLEASAIFLIEASANMVAELFPINKALMQASAQTFNDSFNYRWRKTIDFIKLHYVLSNRSAPFWQANKRPESIPSSLSEMLNQWQHRPISKYDFAHVFEPFPQESYQYVLYGMGYHPDLAMSQSRYANLDTAENLFGQVSQMRSNFEKHLTTNRALLNKVKKYGFQKL

SEQ ID NO: 86855 - protein, 494 aa, unidentified
  source 1..494: note = Saliniradius amylolyticus
  REGION 1..494: note = tr|A0A2S2DZC9|A0A2S2DZC9_9ALTE Tryptophan 7-halogenase OS=Saliniradius amylolyticus OX=2183582; GN = HMF8227_00246 PE=4 SV=1
MLELKKGSEQGPHILIVGGGTAGWMSALLLNQQLSEYGVRVSLMESEQIGTIGVGEGTTPYIRQFFSAIGLSEREWMSECQATFKCGIRFPSWSDNPEHGSYFHPFYSGVDKEPGEAFFVNANLRRRGQMAEAQPDRFFLAHYLASQGKAPKVPDNAFHLDYAYHFDAGLLGQYLKKVGIQRGIRHRLNTIDAVRRHPSGDIASVITADGEAVAADFFIDCTGFASKLLQQNLGVPFCSFADNLLNDSAVAIQLPRDYEQVLVSETRSEALSNGWAWRIPLIRRTGFGYVFSSNYQSPDQAETELRRYLQVGDEIPARRLSMKVGRVEKHWQNNCLAVGLSQGFIEPLEATALMLVQFTVERFARALIKGSPEHCFNQEVNRMFDGVRDYIVAHYKTNGRQDTPYWRDNREQTPASDRLQAILDTWRTGAELEPVLTEMESELVYFRPSWYCLLAGSGLLPDVPAQPCVGTPASYAERFFRPLAERFTDQTDYL

SEQ ID NO: 86856 - protein, 501 aa, Saccharophagus degradans
  REGION 1..501: note = tr|Q21HS1|Q21HS1_SACD2 Tryptophan halogenase; OS = Saccharophagus degradans (strain 2-40 / ATCC 43961 / DSM 17024) OX=203122 GN=Sde_2498 PE=4 SV=1
MHSKQVKKIVIVGGGTAGWMAAAMLACRYSREDLAIQLVESDAIATVGVGEATVPGIIQLHQHLGIKESEFVSATNATFKLGIEFKNWSQLGATFFHPFAKYGAPIAGQAFFDCWLRLKQAGYTAKLDEFSLSIALAKANKFVQPDDNATNQLAMFGYAYHFDATLYAKFLRAYAEQRGVQRTEGLITQTYLQADGNIECVELASGEKIAGDLFFDCSGFRGLLIEEALQTGYQDWSHWLPCNKAVAVQTINEKPPTPYTRSTALAAGWQWTIPLQNRIGNGYVFCDRYISDDEAIATLTRNVEREMLTEPRVIGFNAGVRNKFWNKNCVAIGLASGFIEPLESTSISLIQTGVEKIMDAMPALEYSENTIASTNSLNQQEYERIRDFIVLHYKASAREDSAFWRDVREMDIPTTLQNKMSAYLKDATFLDYGQESFKDASWQTMYNGFNLYPQIPPSNVADLDVQQLMLVAEKMRAAIQAGVAHAPSHAEFLSTLADGKF

SEQ ID NO: 86857 - protein, 507 aa, Colwellia sp.
  REGION 1..507: note = tr|A0A2N1I812|A0A2N1I812_9GAMM Tryptophan 7-halogenase OS=Colwellia sp. 12G3 OX=2058299; GN = CXF71_16270 PE=4 SV=1
MTIKRIAIVGGGTAGWLTANHLGKTLCKKSELSITLIESPDIAPIGVGEGTVPDIKKTLASFGISETDFIRQCDVTFKQSIKFVNWLDQDKHGKDNFFHHLFDVPSREDSESLTAHWLTQNDGVPFAERVSSQYKVCEQGKAPKKITTPEYQGDLAYAYHLNAAKFSGLLADNAKAKYGVKHLLTHISDVSLADDGSIRSLVTREGEELAFDFYIDCSGFESLLISKAMKVPFVDVSDQLLVNTALVVQVPTEKDSAIPPYTIATAHQAGWIWDIALPTRRGVGFVYSNKHMSDEEAHTKLDKYLGGSNPELTYKKLPMKIGYREKFWHKNCVALGLAQGFLEPLEATSILLTDFSANFLAERFPSEKGELLTLEKRFNHAMGHAWKRVVDFIKLHYCLSDRHDSLFWSDNRDPNTMSEELKNKLAMWEKFIPISDDFFSQFEVFYLENFLFVLYGMKYKTQLKNIEVTNAEERISALKEITDNLMNNLPEHRVLLEKINKFGLQQF

SEQ ID NO: 86858 - protein, 497 aa, Xanthomonas oryzae
  REGION 1..497: note = tr|A0A0K0GP45|A0A0K0GP45_XANOP Tryptophan halogenase; OS = Xanthomonas oryzae pv. oryzae (strain PXO99A) OX=360094; GN = PXO_02202 PE=4 SV=1
MVIAGGGTAGWITACALSHQFRGLLDITLVESEQIGTVGVGESTVPPIRTFHRFLQIDEQEFLRAVAGTFKLSISFEHWRAQGERYIHPFGITGQSTLVCAFHHLWLESQRRGMPGSFGDYCLETVASRVDRFALYGEPAVNYAYHLDAALYAKFLRARSEACGVKRIEGKIQQVTVQPHSGDVASVVLEDGHVIEGDLFIDCSGFRGLLIEQTLHTGYEDWSHWLPCDRAVAVQTEAVGPPVPYTRAIAHEAGWRWHIPLQHRVGNGLVFSSKHLSDDQAHAKLLHDVAAPAVKDPWMVPFRTGRRRKAWNKNVVSLGLASGFIEPLESTSIHLTISAVVRLLALFPGEGIAPSQVQLFNDVSRAEMEHVRDFVILHYHATQRNEPLWQQCRAMELPESLALRLRAWRERAHAWQGADELFRVDSWTHVLMGQGIEPEQHHPLTRAFSDHDLRRLLDGIAQPIQHAVQQMPSQHAFIERYCKAGAQVWGMRSPVPA

SEQ ID NO: 86859 - protein, 496 aa, Saccharophagus degradans
  REGION 1..496: note = tr|Q21KW6|Q21KW6_SACD2 Tryptophan halogenase; OS = Saccharophagus degradans (strain 2-40 / ATCC 43961 / DSM 17024) OX=203122 GN=Sde_1401 PE=4 SV=1
MNNKIKNVVIAGGGTAGWMAAAAIAKLLGKNLSITLVESEEISTVGVGEATIPPLQTFHRLLGIDEAEFMRAVRGTFKLGINFESWRDVGEDYFHSFGTTGRDCWASTFQHFWQRGLAEGYKADYGSYCPEVLAAKQNKFAHGGGQPLKYAYHMDASQYAVYLRGLAERHGVKRVEGKIDRVNVDPESGNIFSLALAGGETLAGDLFIDCTGFRALLVEGALHAGFDDWSHWLPCDSAVAVQTKGGSDLPPYTRSIAREAGWQWQIPLQHRVGNGLVYCSKYLSDENAKHTLLNNLDGEPLTEPKIIKFKTGQRRKSWVKNCVAIGLSSGFLEPLESTSIHLIQRGIIRLLQLFPVNGIAPTLRDEYNKQSKSEIEFIRDFIILHYKVTNRADQPFWRYCKAMDVPSSLAHRIELFKQTGRVFRTEGELFSENSWIQVMMGQGVMPQEYHPIANQMTEDEQAHFLNGLRNSTEISVKALPAHKDYIAQYCAAFAQE

SEQ ID NO: 86860 - protein, 509 aa, Erythrobacter sp.
  REGION 1..509: note = tr|A0A547PA18|A0A547PA18_9SPHN Tryptophan 7-halogenase OS=Erythrobacter sp. JBTF-M21 OX=2584124; GN = FGU71_03405 PE=4 SV=1
MRTDEPKPKPMRVVVLGGGTAGWMTAAGLAKLLPGLANVHLIESEDIGIVGVGEATLPHIRGFVERLGIDEAAFMKATHATYKLGIDFRDFGSIGTSYIHPFGSFGEEVNGVAFHHYWLELQRQGMAGAIGEYSLAVQAAQANRFTPPAQDTSLASSYGYAYQFDATLFGPFMRDFGMANGVDRTEGRVTEVQRDSETGDVSALIMESGERIEGDLFVDCSGFRSLLLGDALDEEWEDWTHWLPCDRAAAMPCSHTSDEIAPYTTATAMPAGWRWRIPLQHRIGNGYVFASSFISEDEACNTIAKVAEGTQLADPRVLRFRPGRRKKSWSHNVIGVGLASGFLEPLESTSIYLAQMAITYLIELFPSGRQIDPRDRDEFNRLVDMEYDRVRDFLILHYNATTRDDSEFWNHVRTMELPDSLAGKMELWRDAGRIEKYSDGLFYDASWIAVYLGQGVLPQHHDPRAALPKPEQVAGALTQLQKAIGEIVVGMPGHTDYLNQQAARMADPL

SEQ ID NO: 86861 - protein, 374 aa, unidentified
  source 1..374: note = Myxococcaceae bacterium
  REGION 1..374: note = tr|A0A4Q6A903|A0A4Q6A903_9DELT Tryptophan halogenase; OS = Myxococcaceae bacterium OX=2484252 GN=EOO72_03530 PE=4; SV = 1
MSDTHCDVAVLGGGPAGAGVALALRAQTRLSVTLVERTTHDAPRIGETLPPDARLPLARLGVWGGFLRDGHLPSRGTASCWGSATVGYHDTLMSPFGSAWHLDRSRFDASLCAQVAERGGSVRTGTTVEGCEALGPEGFRLRLSHPVEGPTTLWVRFVVDATGWKAAFATSQGARRQVVDRCFALYGDFRLRQGAAFSTQALVESRPEGWWYSALLPGGRVVVGLMGDGESLRGVRGQETWLSLLARTTATRERLEACDFSGEPPRAVPAAVACLDRVHAEHWLAVGDAACAFDSLSSQGISKALGSALLAAESLEQHLRGRADALGAYAARVRQGFVEHLRTRDHYYREERRWPDAPFWRNRRKALASGALAA

SEQ ID NO: 86862 - protein, 506 aa, Rhodanobacter sp.
  REGION 1..506: note = tr|A0A0Q9P6D9|A0A0Q9P6D9_9GAMM Tryptophan halogenase; OS = Rhodanobacter sp. Soil772 OX=1736406 GN=ASG75_11310; PE = 4 SV=1
MTDLRIRNIVIVGGGTAGWMAAAAFAKVLGAAYSIRLVESEEIGTVGVGEGTVPHLKLFNNLLGIDDVEFVKNTQGTFKLGVQFNDWGRLGDSYVHGFGTIGHDVGLLPFHQYWIKAHRAGKAQDIGAYSLNTVAAPRGRFMPSASDAPPGSPLANVAYAYHFDAGKYARFLRGYAEQRGVRRTEGKVAQTVLHPDSGFVEAIVLESGERIEGELFIDCSGFRGLLIEQALHTGYLDFSHWLPCDRALAVACEKVGPPTPYTRASARPAGWQWRIPLQHRTGNGYVYSSAHVSDDEAAATLLGHLDGKPMGEPRLLRFTTGVRRQAWNRNVVALGLAGGFMEPLESTSIYMIQSGIARLLNLFPQRDFSSVLIERYNTQSRFEYERIRDFLILHYHATERDDTPFWNQCRTMSIPPQLADNIRLFRDSGRFFRDGEEMFAVVSWVQVMLGQHIMPQSYHPLVDQMPDAELAEFMASVGRVVASCVDVMPPHQAFLDRCCTAPALVA

SEQ ID NO: 86863 - protein, 506 aa, Pseudoalteromonas tunicata
  REGION 1..506: note = tr|A4CBD4|A4CBD4_9GAMM Tryptophan halogenase, putative OS=Pseudoalteromonas tunicata D2 OX=87626; GN = PTD2_17655 PE=4 SV=1
MDIKKVAILGGGTAGWLTANHLGKALIGQGISITVIESPDIPTIGVGEGTVPMMRETLKYFGISESQFIKECDATFKQSIKFVNWLDKTAHGEGNFYHHLFDFPFPNNRDLTPFWLRTQHKSFAQTVSFQANVCEAKKAPKKISTPEYVGETTYAYHLNAKKFAELLQNHAVNKFSVAHQVSTVIDATVNNTDIELIVTDTHGEQVFDFYVDCSGFNCYLLGKKLNIPFVDMSHKLPIDKAITAQIPTEDDAEIPPYTIATAHEAGWIWDIALKNRRGTGFVYSSNYLSDEEAKQKFERYLGQSLEGIVSRVIPMKIGYREQFWQGNCVAIGLSQGFVEPLEATAILVTDFCARHLAERFPRSKSELPACQSRFNRNVKYAWDRVIDFIQLHYYLSDRQDSAFWLDWKNVDRLSDELKQKLAIWQNNPPLSTDFFSKFEVFDVENYLYVLYGMHYLTKPSYIDAKSFEQDQILAQQVEDHSQKLIASLPSHRELIDKLARFDFSKL

SEQ ID NO: 86864 - protein, 524 aa, Saccharophagus degradans
  REGION 1..524: note = tr|Q21LA5|Q21LA5_SACD2 Tryptophan halogenase; OS = Saccharophagus degradans (strain 2-40 / ATCC 43961 / DSM 17024) OX=203122 GN=Sde_1262 PE=4 SV=1
MSMSKSSTSKPVTSIVIVGGGTAGWITAGTLAAHLNSNSQATVTVTLVESPTTPTIGVGEGTWPTMRNTLKKMGVRETDFIRECNATFKQGAKFCGWTTGEQNDGYYHPLVLPQGYADINLAPHWLASNKATPFAQSVCVQAALCETGLAPKLISTAEYAAIANYAYHLDAGAFTRFLTKHCTQNLHVQHVLADVTSVQAKENGDIESVNTLQAGNIYGDLFIDCTGFEALLIGKHFKVPFISCKHTLFIDTALAVHLPYTDDQSNIASHTISTAQTSGWIWDIGLQNRRGIGHVYSSAHTTDAQAEKALRQYIAKLSPNTQDLTVRKIPIEPGHRQTFWQNNCVAIGLSAGFLEPLEASALVLIEMSATMLAEQLPTTRASMAIIAKRFNQTNTYRWQRIIDFLKLHYTLSKRTDSDFWIDNRAPNTNPDSLKELLELWKYHYPWHSDFDRAAEVFPSASYQYLLYGMQYPTQSSHLGMSDKNIALANKLFTQNKALTQKLLSSLPSNRELINKIKTYGLAQI

SEQ ID NO: 86865 - protein, 520 aa, Sphingomonas sp.
  REGION 1..520: note = tr|J8W309|J8W309_9SPHN Tryptophan halogenase; OS = Sphingomonas sp. LH128 OX=473781 GN=LH128_05595 PE=4; SV = 1
MTIDNPPSGRVVILGGGTAGWLAAAYLSRTLGMTGITLVESSEIGIIGVGEGTFPTIRSTLAGLGISEAEFLVRADATFKQGVLFEGWATGTDSYFHPFNMPIGGEDEALLPHWLADTSPQRAAWADAATVQEQVIRAGRAPKRPEDPDFSGPMNYAYHFDAARFADYLRDISIAAGVVRIEGTVGNVQRKADGDIAALELTDGRIVEGDFFLDCSGFRALLIGQTLGADFTSCSDSLFNDRALAMQVPYDRPDAPVRPYTLATAHEAGWTWDIGLTERRGIGYVYSSRHCSDDEAEATLRRYVGPQGAALNPRQLRFETGYRQQQWIGNCVAVGLSAGFFEPLESTGIMLIEAALRMVGDFLGPDLLAGADHDARDAAARSFNRLMSARFERIVHFLKLHYCITRRTDTAYWRDNADPATIPEPLRDMLAQWRRRPPSRFDFVVDLETFLPPSYHYILYGMGFETTLAGARYPGAAQAREVFARVRAAHAGARGGLPDHRALLNHYHARTRVPSSKVSR

SEQ ID NO: 86866 - protein, 510 aa, Sphingomonas sp.
  REGION 1..510: note = tr|A0A4R2TTK0|A0A4R2TTK0_9SPHN Tryptophan halogenase; OS = Sphingomonas sp. PP-CC-3A-396 OX=2135655 GN=C8J40_10554; PE = 4 SV=1
MTVTRPGKITKVVIVGGGTAGWMTAAALSRLVASGVSVTLVESEEIGTVGVGEATIPSLLDYNRMLGIDEDAFVRATGATFKLGIEFRNWTRLGDSYLHPFGTHGRDIDGVSFHQLWLRQAASGNADPGPIGDYCLSSVAARRGRFTRPSANPQSVLSTLSYAFHFDAGLYATFLRDIAEQDGVVRVEGRVIAVDRNAETGFIEAVRLEGDRRIEGELFIDCSGFRSLLLGDTLGVPFASWKQWLPCDRAWAVPSERQGPLTPYTRATADSAGWRWRIPLQHRVGNGYVYSSAHIDDDDAKQALLAGLDGAALGEPRQLRFEAGRRKRLWDRNCVAIGLSGGFLEPLESTSIHLIQSGIARLMTLFPDRGFDPVEIDEYNRVMLREYEQVRDFIILHYHATERSDSPFWDHCRTMALPESLQGKLALWRGKARVFREQGELFTPDSWIAVLLGQNVQPASFDPLTGGLPLGEATRFMAHIREMIGMTAEAMPTHEDFIAQHCAAPIFRQA

SEQ ID NO: 86867 - protein, 346 aa, Alteromonas sp.
  REGION 1..346: note = tr|A0A3D5F4V8|A0A3D5F4V8_ALTSX Tryptophan halogenase (Fragment) OS=Alteromonas sp. OX=232 GN=DGF36_04610 PE=4; SV = 1
MSTKPLHVVIAGGGTAGWMTANLLAKRWLNQPVTITLVESPDIGIIGVGEGSTPTLKRFFSDMGIAEQDWMSECNATYKVSIRFEGWSPGANIPAYSHPFISQLDTFSERSFYVNCFHRRMGQDVTTRPDEFLFNGWLAKHQRSPVTPPNFPFRIEYGYHFDSGLVGEFLKRHAQGLGVIHKALNITDVECHPNGDIAALHSKEGERVEGDFFIDCTGFQSLLLQKTLGVNFKSFKDNLFNDSAVVCPTPAQSELPVETRATALSAGWAWQIPLTNRTGNGYVYSSDFISDEQAASELCRHLGVDEDSAALRKLTMKVGQVERHWANNCLAVGLSQGFIEPLEATA

SEQ ID NO: 86868 - protein, 501 aa, Sphingomonas sp.
  REGION 1..501: note = tr|A0A0Q4LAA9|A0A0Q4LAA9_9SPHN Tryptophan halogenase; OS = Sphingomonas sp. Leaf38 OX=1736217 GN=ASE88_00190 PE=4; SV = 1
MTEQRVKKVVIAGGGTAGWLAAAALSRQLGQLLDITLVESDEIGTIGVGEATIPTMRSFHAILGLDEREFMRATQATFKLGISFENWARDGDRYIHSFGDLGKSTWMGDFHHFWLAAKAAGDPSEIGDYCLELQAAKAERFALPSEGEIHYAYHLDAGLYARFLRARSEANGLKRIEGRIASVDRDGETGFIRALVLDSGERVEGDLFIDCTGFRGLLIEGTYAAGYEDWSHWLPTNSALAVQSAATGPAHPYTRAIAHDAGWRWRIPLQHRVGNGLVYASDHLSDDEAHARLLSAIDGAPLTEPRLIRFRTGRRRQVWMGNCVALSLASGFVEPLESTSIHLVMTGVTRLMQAFPFGGIAPAAVTRFNEQAQAELERVRDFIVLHYHLNERTEPFWAARRDMPIPATLVERIALFAEAAQAYQGGEDLFRVASWVQVMLGQRLAPRDHHRLGSIMGGAQLAGVLTNIRSTIADAVAGMPMHQQFLDRYLPAPAVSAAQIR

SEQ ID NO: 86869 - protein, 496 aa, Alteromonas sp.
  REGION 1..496: note = tr|A0A349Z1E1|A0A349Z1E1_ALTSX Tryptophan halogenase; OS = Alteromonas sp. OX=232 GN=DCW59_03260 PE=4 SV=1
MPDAIKKVVIAGGGTAGWMTAALLNKVLGKSVAIELVESEQIGIVGVGEATIPPIQIFNRFLGIDEKAFLRETQGTIKLAIKFENWRVPGESYYHTFGAPGTTMGFCSFHHYWLKAKEAGLDKSFWDFDLNYLACQQGKFNKINTQNPLYDMPYAYHFDSALYGQFLRRFAEQGGVKRTEGIIEHVQQNTESGFITGLQLTDGRQIEGDLFIDCTGLSGLLIRKTLGVNYEDWSHWLPADSALAVPSGRFDKTLPYTRSIAHSYGWQWRIPLTHRNGNGIVYSSQFTTDEQANKTLLGNLDTEALGEPRTIRFNTGRTDQQWCKNVVAIGLSSGFLEPLESTSIHLIQSGIIRLMKMFPNQGISPTMVGMYNAESKDEFETIRDFIILHYHVNERDDSEFWRAMREMTIPERLAQKIEAFKETAAIFNEQNDIFRDASWVQVMMGQGLSPRDYHAAVNAMDNQTLLSAMQQIQQAKMQPVAKLLGHDEFIERYTSA

SEQ ID NO: 86870 - protein, 194 aa, unidentified
  source 1..194: note = Xanthomonadaceae bacterium
  REGION 1..194: note = tr|A0A4V1S671|A0A4V1S671_9GAMM Tryptophan halogenase (Fragment) OS=Xanthomonadaceae bacterium OX=1926873; GN = EOP89_15885 PE=4 SV=1
LAGEATLHRRPHAWAGNCVGIGHAAYVLEPLTPAPMMLLERDLDRLLSLIPNTGSMAVERGEYNRRYQEDTQNAALFACAMFATNGLPDTPYWRAAQGESRPDALVRKLEMFETRGLLVAYDLEPFHPEDWTILHLGMGRRPTRHDRLADRANPAQVTAFLANLERSVAQSVSTLPDCDTYRLQLEQYLLRNRR

SEQ ID NO: 86871 - protein, 323 aa, Alteromonas sp.
  REGION 1..323: note = tr|A0A359K7S5|A0A359K7S5_ALTSX Tryptophan halogenase (Fragment) OS=Alteromonas sp. OX=232 GN=DEH24_16005 PE=4; SV = 1
MNQPDKQHVVIAGGGTAGWMAAAAISRLLHGRVEVTLVESSDIGTVGVGEATIPTLLFFHKLLKIDEQAFMAATNATFKLGINFENWRSLNHAYLHAFGATGKDCWAAGFQHFWRRGLDLGLSEDFGQYCLERVAAEAEKFAHLPGNGLNYAFHIDATRYAGFLRELAGQAGVTRIDATIERVNVREQDGFIESLTLNNGQTLSGDLFIDCTGFRGLLIEKALHTGYEDWSQWLLCDSAVAMQTESVEAPLPYTRCIAREAGWQWRIPLQSRVGNGLVYCSNYLSDERATEILQQNINGNPLNSPRVIKFRPGRRLKQWNRNC

SEQ ID NO: 86872 - protein, 506 aa, unidentified
  source 1..506: note = Xanthomonadaceae bacterium
  REGION 1..506: note = tr|A0A354YC00|A0A354YC00_9GAMM Tryptophan halogenase; OS = Xanthomonadaceae bacterium OX=1926873 GN=DDZ67_07085; PE = 4 SV=1
MQNQGRIRRVVIAGGGTAGWIAGCALAHQFRDLLDITLVESEQIGTVGVGESTVPPIRAFHRFLQIDEQEFLRAVAGTFKLSISFENWRRPGDRYIHPFGITGQGTLVCAFHHFWLESQRRGMQSEFGSYCLETAASLQDRFALVEQPALNYAYHFDAGLYARFLRARAERLGLKRVEGKIQRVRQRADGGVEALLLEDGQLIEGDLFIDCTGFRGLLIEQTLGTGYEDWSHWLPSDRAVAVQTESVGAPVPYTRAIAHEAGWRWHIPLQHRVGCGLVFSSRHMSDDEACAKLLRDVAAPPIREPWLVPFRTGRRRQAWNRNVVSLGLASGFIEPLESTSIHLTIAAVVRLISLFPAEGIAQSSVDIYNDISRAEMEHVRDFIILHYHANRRDEPMWRQCREMELPASLAVRLRAWRERAHAWQGSDELFRVDSWTHVMLGQGIVPRQQHPLARALSDADLRRLFDGIRAPIERAVAQMPSQDRFIERYCRAAPEVWGGRKPKVVA

SEQ ID NO: 86873 - protein, 501 aa, unidentified
  source 1..501: note = Sphingomonadales bacterium
  REGION 1..501: note = tr|A0A124IHM1|A0A124IHM1_9SPHN Tryptophan halogenase; OS = Sphingomonadales bacterium BRH_c42 OX=1734407; GN = APF82_04825 PE=4 SV=1
MAIDRIIIVGGGTAGWMAAAVLSRLKSGRPLEITLVESEAIGTIGVGEATIPPFVEFNQMLEIDEREMLAEVRGTFKLGIQFVNWGRQGESYIHPFGAYGYTMGGIAFHQVWHRFRQEGDRRPLQAFNLETMAAYFGKFARTQDYQRDDLPPINYAYHLDAGRYAQFLRKYAEKRGVARQEGHVTDVALHPETGFVTSIRLASGEEIAGDLFIDCSGFRGLLIEQALATGYEDWTHWLPCDRAVALPCARDDSSPPPPFTRATAHSAGWQWRIPLQHRTGNGHVYCSAYMSDDEAHAILVANMAGKPSADPNFLRFVTGRRKKFWNRNVVALGLAAGFMEPLESTSIHLINTGLNKLVAMLSLEGITQAQEDTFNRLTAREYARIRDFLILHYNATARDDSEFWNYCRTMSVPETLTQKIELFRSNGQIFREEDELFTESSWTAVMMGQGIEMAGHSPVADTLDPAKTRKEFDEMEKSIRHVVEHMPGHGDYLRSYCPAPM

SEQ ID NO: 86874 - protein, 503 aa, Sphingomonas sp.
  REGION 1..503: note = tr|A0A4R2TMF0|A0A4R2TMF0_9SPHN Tryptophan halogenase; OS = Sphingomonas sp. PP-CC-3A-396 OX=2135655 GN=C8J40_1075; PE = 4 SV=1
MKNTPVRRVVIAGGGTAGWMAAAAIARTMGSTIELTLIESDAIGTVGVGESTIPPMITFNRLLGINEAEFMRETQATFKLGILFDDWKDRGESYFHSFGITGKDHWSAGFQHFWLHGLTKGHDQPYDDYCLELRAALQGKFAHLPDDRMNYAFQLDSTRYAKFLRRMAEADGTRRLEGKIAQVELNGESGDIAALVLESGARIEGDLFLDCTGFRALLIEGALHAGFDDWTHYLPCDSAIAIQTESVRPALPYTRAMAHDAGWQWRIPLQHRTGNGLVYCSRYLDRDAALDRLLGNIEGKTLTEPNVIRFVTGARRQQWHRNCIAIGLSGGFMEPLESTSIHLIQRAVLRLLRLFPSGAVSPRDVAEFNDQQHTDMLQIRDFLILHYKATERRDSAFWRHCAAMPIPASLEQKIELFRETGRVFRKNEELFAENSWVQVMLGQGIVPQSYHPIATKLRDEELARLLGGLRENTNATVAGLPEHAAYVARYCGTAPAPSPAIAA

SEQ ID NO: 86875 - protein, 500 aa, Alteromonas sp.
  REGION 1..500: note = tr|A0A359K2K8|A0A359K2K8_ALTSX Tryptophan 7-halogenase OS=Alteromonas sp. OX=232 GN=DEH24_06865 PE=4; SV = 1
MKQTHPASVIIVGGGTAGWMCAAYLAKQWGAKSHITLIESSQIGTVGVGEGSTPFLKQFFTDLGWQEQDWMPHCDATYKTGIEFANWTNSQRFSQYFHPFFTPLDQQTGELFFDSCQTLRSSRGNADVKPEHYFCAAEMVRKRVTPQSTKLPGDIDYAYHFDASKLALSLKSFSTQLGVQHKEGKVAEVYTEEGNIRGLRMEQGETLSADLYVDCSGFVGLLMKKALNAPFRSYRETLFNDAAVALPTQHNSNEPIAPQTRSVGMDNGWMWQIPLTSRIGNGYVYSSDFCSADEAEGALRKALNVDDLVPARHLKMQVGRLDEHWQGNCVAIGLAQGFIEPLEATALMLVQYALYQLVDGVESAKPLASAQQVYNREMNRMFDGIRDYIAAHYYLNTRTDSAYWQACRHEMCVPDNLQYLLDKWDSGACFETALDHLDSELVYLRPSWYCILAGMGRFNSPEAHQKAPVHQASLAHLAKLTAHYFSQQQRPRSGELTCGM

SEQ ID NO: 86876 - protein, 495 aa, Alteromonas sp.
  REGION 1..495: note = tr|A0A359JZI4|A0A359JZI4_ALTSX Tryptophan halogenase; OS = Alteromonas sp. OX=232 GN=DEH24_00895 PE=4 SV=1
MPQTIQNVVIAGGGTAGWMTAALLRRVLSPTIRIELVESEQIGIVGVGEATIPPIQTFNQFLGIDEKAFLRETHATIKLAIKFENWKTQGDSYYHTFGAPGTTMGFCSFHHYWLKAKQAGLAQSLWDFDLNYLSCLQGKFNKINTPNPLYEMQYAYHFDSALYGQFLRKTAEQAGVVRTEGIIEHVQQDPDSGFITALQLTNGKQIQGDLFIDCTGLRGLLIQQALGVSYEDWSHWLPADSAQAVPSERFDKTLPYTRSIAHRVGWQWRIPLTHRNGNGIVYSSQYLSDDEAGQTLLNNLDTKALDTPRTIRFKTGRTDQQWCKNVVAIGLSSGFLEPLESTSIHLIQSGIVRLMKMFPNQGISQAMVDLYNAESKDEFETIRDFIILHYHVNQRDDSDFWRDMRNMAIPDRLAQKIAAFEDTAAIFNEQSDIFRDASWVQVMMGQGLDPKDYHPAADAMDNAQLMDAMQQIYKAKQQPLDKLMSHDEFIKRYTA

SEQ ID NO: 86877 - protein, 519 aa, Alteromonas sp.
  REGION 1..519: note = tr|A0A2D5LIT8|A0A2D5LIT8_ALTSX Tryptophan halogenase; OS = Alteromonas sp. OX=232 GN=CL592_05100 PE=4 SV=1
  VARIANT 503: note = Xaa can be any naturally occurring amino acid
MRKSVLIVGGGTAGWITAAYMARMLAADTPGGVSITLVESEEIGILGVGEGTFPIIRKTMGRIGLDESDLIKHADATFKQGIRFNNWKKNPADDPNDSYFHPFQVASQHTDMDLLPYWLLGVAGDVPWSECCTVQERAVEAKLAPKLISHPNYEAPLNYAYHFDATKLAALVRRRAMEMGVKLLIDTIDDVKLDEDGAIAAVTARQHGDLTADLFIDCTGFRATLIGETMGSEFTSYKNELFCDRAVALQVPYEQAGGPIPSCTYTTAKDYGWIWDIGLHERRGLGYVYSSKYCDEETAVATLKAHIGPAADKLQHRLLKFEPGYRKTQWHKNCVGIGLSVGFIEPLEATGISFAEVAALMLCNLFPWSGDYERSATQFNNAMSKRFEHVKDFIKLHYYLTERDDTAFWRDNQDPATASEYLKGKLEQWRHRPPSFLDIDASHDIFDENSWQYILYGMGFKTDISAREGALRFFDDARNEFASIRQQSENAKRAVPTHRDLVXEVCQSGFKPQPRRARR

SEQ ID NO: 86878 - protein, 368 aa, Alteromonas sp.
  REGION 1..368: note = tr|A0A3D0S9T9|A0A3D0S9T9_ALTSX Tryptophan halogenase (Fragment) OS=Alteromonas sp. OX=232 GN=DEO96_02660 PE=4; SV = 1
LACNEKRFMRPFEAGNSPLSNIAYAFHFDAGLYAKFLREVAESHGVQRTEGKVTEVRQHPDGAIQSLILENGSEHGADFFIDCSGFRALLIEQTLKTGYEDWRHWLPCDRAITAPSSLTETPWPFTRAAAQQAGWQWRIPLQHRVGNGHVYCSEFMTDEDAEKTLRLNIEGDLLADPRQIRFVTGKRNKFWHKNCLAVGLSGGFMEPLESTSLHLVQVAISKFFSYFPFQQPCQSDIDQYNTEMDFEFTRIRDFLILHYHVTDREDTEFWRYCKHMAIPDTLQEKIDHFKANGRINRFNNELFNDLSWFEVMYGQGLRPEGYHALADIFPEEELARRLEGIQRVVRKSVDYMPGHAEFIAKTCAANRD

SEQ ID NO: 86879 - protein, 254 aa, Alteromonas sp.
  REGION 1..254: note = tr|A0A359K3N2|A0A359K3N2_ALTSX Tryptophan halogenase (Fragment) OS=Alteromonas sp. OX=232 GN=DEH24_08660 PE=4; SV = 1
LPFTRSTAKTAGWQWRIPTQQRVGNGHIYCDRFMGHDLARQILLDGLDSKPISEVRTIQFKTGCQEAFWEKNCIGIGLSAGFLEPLESTSLFLIQQGISRFISLYPDAGLHPVIRNEYNRLMTREFEQVRDFIILHYKATTRDDSPFWRYVRDMEIPDSLTHKMTLFQQGGRVFRDDHELFTRSSWVAVMVGQGIFPKTFDPILANIPVADIQRSLNSMKQAMEQSVARLPDHAMFIEKYTAMQPNPTFSMGRQ

SEQ ID NO: 86880 - protein, 277 aa, unidentified
  source 1..277: note = Xanthomonadaceae bacterium
  REGION 1..277: note = tr|A0A4Q2XKZ9|A0A4Q2XKZ9_9GAMM Tryptophan 7-halogenase (Fragment) OS=Xanthomonadaceae bacterium; OX = 1926873 GN=EOP89_10290 PE=4 SV=1
LIGETLGVGYEDWSHWLPMNRALTVQTAAVGPALPYTRAIAHEAGWQWRIPLQHRVGNGIVYAAEHLSDDAARALLIGSVAGNTLTEPRLIRFTTGRRKRAWEKNCVALSLSSGFIEPLESTSIHLMMIALTRLLQLFPFGGATAAVADRFNAMAQREMEGVRDFVILHYHLNARDEPFWRQCREMSIPDTLAARLALFAEEAQAYQGADELFRVSSWLQVMLGQGLTPHRHHLMARMMPPGQLAEALTNLSRGIAARVATLPPHQQFVDTLAGART

SEQ ID NO: 86881 - protein, 255 aa, unidentified
  source 1..255: note = Xanthomonadaceae bacterium
  REGION 1..255: note = tr|A0A4V1S915|A0A4V1S915_9GAMM Tryptophan halogenase (Fragment) OS=Xanthomonadaceae bacterium OX=1926873; GN = EOP89_00535 PE=4 SV=1
VPSAHTGPLPPYTRSTARTAGWQWRIPTQRRVGNGHIYSSAFLSDDAAADILLAGIEGPALGDPRQLRFTAGCRQRFWTGNCIAIGLAAGFLEPLESTSIYLIQEGISRFISLFPAAPIPDIVRTEYNRHMRTEFEQVRDFIILHYCATERDDSAFWNHCRTMPLPDTLNHKIALFRETGRIFRYEEELFARPSWVAVMLGQGIVPSTCDPIVATLPSGDVAHSLLSMQRAIHTAAEQMPTHQQFIAHYCAAQAA

SEQ ID NO: 86882 - protein, 244 aa, Alteromonas sp.
  REGION 1..244: note = tr|A0A349Z746|A0A349Z746_ALTSX Tryptophan halogenase (Fragment) OS=Alteromonas sp. OX=232 GN=DCW59_13480 PE=4; SV = 1
MSHSANPVNTPEVKRVVIVGGGTSGWMCAAAIARIAPPDTRITLVESEDIGVIGVGEATIPTLMEFNDFLGIKEHDLLRECQGTYKLGIDFVDWYQKGQSYFHPFGFYGRDTPEFSFHQLWLRLNAMAAKGEIPADAPGIISDYNLCTVAAMQGRFAPPQGGADTILSTMRYAYHFDSARYGQMLRRYAEQRHVERIEGIVNSVEQDHNTGLLQSVTLNSGQVLQGDLFVDCSGFKALLIDGAM

SEQ ID NO: 86883 - protein, 270 aa, unidentified
  source 1..270: note = Xanthomonadaceae bacterium
  REGION 1..270: note = tr|A0A3C0HID8|A0A3C0HID8_9GAMM Tryptophan halogenase (Fragment) OS=Xanthomonadaceae bacterium OX=1926873; GN = DCM32_05395 PE=4 SV=1
VAVPCASAAPLTPYTRATARKAGWQWRIPLQHRTGNGHVFDINAISEDEATATLLANLDGEPLAEPRTLRFTTGIRREPWKRNVVSMGLASGFLEPLESTSIHFIQSALARLVEWLPDRGFDPASTAKYNALTRFEYERCRDFLVLHYRANRRVGEPFWDARRHAPVSDELAEKLALFASHGRIHRFADELFTETGWLQVMVGQGLMPRRPNPMALGGDPMPMIEDVRRVLAAAAQAMPTHEAFIARHCRAPGAAALSLSNVNPPSGTPA

SEQ ID NO: 86884 - protein, 528 aa, Alteromonas sp.
  REGION 1..528: note = tr|A0A2D5BWK7|A0A2D5BWK7_ALTSX Tryptophan halogenase; OS = Alteromonas sp. OX=232 GN=CL593_00325 PE=4 SV=1
  VARIANT 253: note = Xaa can be any naturally occurring amino acid
  VARIANT 317: note = Xaa can be any naturally occurring amino acid
MNKLVKHVVIVGGGTAGWLSAGILAAKLKPDYKVTLIESPNVPTIGVGEGSWPSLRDTLLDIGINEREFLTACKGTFKQGSSFVNWRACAANSQTFAHQYHHPFTVPTAYNELDIHACWQSIAKHESYENSFSLQSLMCTQGKAPKQATTPDYAHVLNYGYHFDATALANLLKKHCLESLGVHYVSAHVSKVEEHPNGYIRQLLTDNGQAISGDLFIDCSGKSGLLIQQHFNVPWLSLETTMLNNRAMAVQAXYAPDDQAISSTTVATAQRVGWTWDIGLQHRRGVGLVYASEFCNEDAAIDILFKQVSQRLRHAKXQDLSVRTLSFEPGYRKDFWVKNCLSLGMSSGFVEPLEASAIAMVELGLRMLCESFPHNAEHMEHVSQRYNQRFEYRWQRVVDFLKLHYVLSERNEPYWLAQRHESRTPPSLSTLLEIWKYQSPSRLDLIENEEIFPSASYQYVLYGMGYNTALPAIALSDADLSKAKAIRSKMTQMKQAYLHALPNNRALLDELCGLNEEKGNKEHNHVHI

SEQ ID NO: 86885 - protein, 502 aa, Pseudoalteromonas sp.
  REGION 1..502: note = tr|A0A410CP58|A0A410CP58_9GAMM Tryptophan 7-halogenase OS=Pseudoalteromonas sp. R3 OX=1709477; GN = ELR70_13960 PE=4 SV=1
MNKKRIVILGGGTAGWMAANLMAKSWQDQPIEVALIESPDIGIIGVGEGSTPQFKGFMDFMGISEAQWMPACNATYKNGIRFIDWSTRPGFSSYFHPFPSQPDDYSAPAFFHNSFVRRKAIDVAGHPDPFFLTTYLAEQAKAPIAAHHFPFEINYGYHFDAGKLGLFLAQTARDLGVEHIQANIIDVRKHTDGDIAALVAEQGTEITGDVFIDCSGFRSLLMQQHLDVGFDSFANNLFNDAAVVLPTEQGDVISSETQSIARKFGWSWHIPLTNRIGNGYVYSRRYCDPDKAETELRAALGLLDSDVEARHLTMKVGQVKKHWHKNCLAIGLSQGFIEPLEATALHIVQETVQSFIECYQDGEFTDKFKTRHNQSLDARYQAIRDYIVAHYRVNSRTDTQYWRDNANNNQLSRSLYDVLQTWVSGKNLSDELHRQDIDKYYPSVSWHCLLAGYGIYPEQSQLIAGNEEANKYDLSQIQDYIARCGLNFDDHRVQLERLAQKR

SEQ ID NO: 86886 - protein, 501 aa, Alteromonas sp.
  REGION 1..501: note = tr|A0A2D5BWN7|A0A2D5BWN7_ALTSX Tryptophan halogenase; OS = Alteromonas sp. OX=232 GN=CL593_00330 PE=4 SV=1
  VARIANT 348: note = Xaa can be any naturally occurring amino acid
MSTFDSATLPPVKNVVIAGGGTAGWMAAIALVKLLGKSLNITLVESKDIGIIGVGEATIPPIRTFHKLLNIDEKAFMKATQATFKLGIEFEGWREENHSYIHSFGVTGRECWAGEFHHFWLRAQKLGFGGEFGDYCPELQAAKANKFFTNESMPLNFAYHFDAVAYGRYLRTLATEAGVHHIVGNITNVSKCSQTGNITSLEVDESQEVNGDFFIDCTGFKGLLIEQALHTGYDNWSHYLPCDSAVAMQTETVAAPVPYTKSSAHKAGWRWQIPLQHRVGNGLVYCSKYMSDDEAKSTLVQQVEGEPVNDARFIKFTPGKRRLGWNKNCVALGLASGFIEPLESTSIXLIMTGIVRLMRLFPFDGVTQSAIDEYNTKYDSEMAAILDFIVMHYKVTNREDSPFWQHCKNMPIPPSLTHKLNLFKDTGRVFLDDGDIFRVDSWTQVMLGQGLTPNQYHKVADEMSEAELERFMMGLKQQVDNQVSRLPSHEAFLDKYLAVNS

SEQ ID NO: 86887 - protein, 516 aa, Sphingomonas sp.
  REGION 1..516: note = tr|A0A4R2TR17|A0A4R2TR17_9SPHN Tryptophan halogenase; OS = Sphingomonas sp. PP-CC-3A-396 OX=2135655 GN=C8J40_10555; PE = 4 SV=1
MTKRILIVGGGTAGWLTAGYLAKRLGADLPGGVAITLVESRDIGILGVGEGTFPTIRRTLATIGIDEADLIRRCGATFKQGAKFVHWRHAPGQGATDHYSHPFQVADASDGLDLLPYWLLGLGGTENWDEVSNPQKKAADRHRAPKLPTHPDYVGPLNYAFHFDAVALAGLLREQGVKNGVRHLTDTVSEVLLDADGAIGGVRTERNGILDADLYIDCTGFRAELIGKAMKIPFRSCRDVLFCNRAIAAQLPYTRPDEPIASYTISTAQEAGWIWDIGLDRRRGIGHVYSSDHSEDDAAERVLRGYLGAAGETADVRHFKFEAGYREVNWYKNCVAVGLSSGFFEPLEATGIAFAEVSAGMIANLFPWGGDYETSARQFNANMLRRYERALDFIKLHYCISERRDTAFWRDNVADASVPDRLLEMLDRWRFRPPNELDIDGQVDIFTEASWQYVLYGMGWKTDLSAKAGALRYGEDARRAFAEVQRQARYAIANLPSNRDLVSYAQSHSFGARAAA

SEQ ID NO: 86888 - protein, 496 aa, Alteromonas sp.
  REGION 1..496: note = tr|A0A3D5F5E7|A0A3D5F5E7_ALTSX Tryptophan halogenase; OS = Alteromonas sp. OX=232 GN=DGF36_04605 PE=4 SV=1
MPDAIKKVVIAGGGTAGWMTAALLNKVLGNSVTIELVESEQIGIVGVGEATIPPIQTFNRFLGIDEKAFLRETQGTIKLAIKFENWRKPGESYYHTFGAPGTTMGFCSFHHYWLKAKEAGLDKSFWDFDLNYLACQQGKFNKINTQNPLYDMPYAYHFDSALYGQFLRRFAEQGGVKRTEGIIEHVQQHPQSGFITGLQLTDGRQVEGDLFIDCTGLNGLLIRKTLGVNYEDWSHWLPADSAQAVPSERFDKTLPYTRSIAHSCGWQWRIPLTHRNGNGIVYSSQFTTDEQANETLLGNLDTQALGEPRTIRFNTGRTDQQWCKNVVAIGLSSGFLEPLESTSIHLIQSGIIRLMKMFPNQGISPAMVDMYNAESKDEFETIRDFIILHYHVNERDDSEFWRAMREMTIPERLAQKIEAFKETAAIFNEQNDIFRDASWVQVMMGQGLSPRDYHAAVNAMDNQTLLSAMQQIQQAKMQPVAKLLGHDEFIERYTSA

SEQ ID NO: 86889 - protein, 331 aa, Alteromonas sp.
  REGION 1..331: note = tr|A0A3D0SC90|A0A3D0SC90_ALTSX Tryptophan halogenase (Fragment) OS=Alteromonas sp. OX=232 GN=DEO96_06785 PE=4; SV = 1
SEAAGVTRCEGKIQSVDTDPQSGNLTRLSLDTGITIEGDVFIDCTGFRGLLIGEHLGVGYEDWSHWLAADRAIAIQTQSTEAPKPYTIATAHKAGWQWRIPLQSRVGNGIVYSSRYLSDEDALATLKQNLDGEMLTEPRYLKFKTGRREKAWHKNCIAVGLASGFLEPLESTSIHLVTTALIRLMKLFPFSGDHQLLAEQYNRETQKEMETIRDFIILHYNLTKRTDSDFWEHYRTMEIPEPLAHRMAIFASNGYVWPDDVALFRVDSWVQVMMGQGLMPAQHHGASRMLPTDSLKQQLSAFKQSVNNALGQLPAHADFIARYCPASEQVK

SEQ ID NO: 86890 - protein, 513 aa, unidentified
  source 1..513: note = Xanthomonadaceae bacterium
  REGION 1..513: note = tr|A0A4V1S8F3|A0A4V1S8F3_9GAMM Tryptophan 7-halogenase OS=Xanthomonadaceae bacterium OX=1926873; GN = EOP89_05575 PE=4 SV=1
MQTVSNIVIVGGGTAGWLTAGIIAARHQGRMHAGFTVTLVESPNTPIIGVGEGTWPTLRSTLSKMGVSESDFFRECNASFKQGARFARWTTGEPDEGYYHPLMLPQGFTRVNLAEHWIADPKGQSFCDMVSPQGLLCDDGLAPKTIATPEYEAVANYAYHLDAGKFAGFLQRHCCEKLGVRHVLADVQHATQAENGDILTVVTEQAGEIPGDLFIDCTGFAALLIGKTLGVPFKSCADTLFCDTALAVQLPHEDPEGPIASHTISTAQTAGWIWDIGLPTRRGVGHVFSSSHISDDAAEQELRAYLGPAGKDLPVRKLAIRAGHRETFWKNNCVAIGLAAGFLEPLEASAIVLIELSAKLVAEQMPVCREVMDILAARFNATTHYRWGRIIDFLKLHYVLTKRTDSDFWRDNVRPETIPDRLQDLMTLWRYQPPWFHDEFDRVEEVFPAASYQYVLYGMGFHTEVAHDAIAGDRRIAEQARREAATQTERMRHGLPRHRDLIRKIVERGLPTI

SEQ ID NO: 86891 - protein, 508 aa, unidentified
  source 1..508: note = Xanthomonadaceae bacterium
  REGION 1..508: note = tr|A0A4Q2XV39|A0A4Q2XV39_9GAMM Tryptophan 7-halogenase OS=Xanthomonadaceae bacterium OX=1926873; GN = EOP89_01045 PE=4 SV=1
MAGNDVEPIRVVVLGGGTAGWMTAAALVGLIGSGCKVELVESAEIGVVGVGEATLPHLRGFLRTLGIVEAEFMAATHATYKLGIEFCDFAKLGDRYVHPFGTFGRPFGGVDFHHYWLRQYCGSTASTVGMTPSIPIGEYCLSAMAAKHRRFAHPQSDADDPTTSYGYAYQFDATRFAPFMSTWAQTRGARRTEGIVTTVERNDRGDVASMVLADGRRVEGDLFVDCSGFRSLILGSTMAEPWEDWSHWLPCDRAVAVPSASPDGPIEPFTQATAMSAGWRWRIPLRHRVGNGYVYASRFLNDEGARDALLATLDMPPLAEPRLLRFSAGRRRRSWVGNVVAIGLASGFLEPLESTSIHLVQMAITQLIERFPERVIEAMDRDGFNAAVDADYDRIRDFLILHYHATTRSDSPFWNHMRTMPIPDTLADRIALWRRSAHMPRYGFGLFLEPSWVAVLLGQNIVPEGWDQRADLPDGAALDRAFERLRRSIDDRVAAMPEHAAYLHRATA

SEQ ID NO: 86892 - protein, 501 aa, Alteromonas sp.
  REGION 1..501: note = tr|A0A3D5F4C7|A0A3D5F4C7_ALTSX Tryptophan halogenase; OS = Alteromonas sp. OX=232 GN=DGF36_02560 PE=4 SV=1
MQTQLNKIIILGGGSAGWMTAAALGKILSKHPCDIQVIESEEIGTVGVGEATIPQIQLFNDLIGLDEDTFIKRTQGTFKLGIQFQNWRKPGHSYYHAFGEVGKNMEGVHFYQYWLKMRQQGKAAPLDEYTLSSLACNEKRFMRPFEAGNSPLSNIAYAFHFDAGLYAKFLREVAESHGVQRTEGKVTEVRQHPDGAIQSLILENGSEHGADFFIDCSGFRALLIEQTLKAGYEDWRHWLPCDRAITAPSSLTETPWPFTRAAAQQAGWQWRIPLQHRVGNGHVYCSEFMTDEEAKKTLRLNIEGDLLADPRQIRFVTGKRNKFWHKNCLAVGLSGGFMEPLESTSLHLVQVAISKFFSCFPFQQPCQNDIDQYNAEMDFEFTRIRDFLILHYHVTEREDTEFWRYCKHMAIPDTLQEKIDHFKANGRISRFNNELFNDLSWFEVMYGQGLRPEGYHALADIFPEEELARRLEGIQRVVRKSVDYMPGHAEFIAKTCAANRD

SEQ ID NO: 86893 - protein, 545 aa, Alteromonas sp.
  REGION 1..545: note = tr|A0A349Z5P0|A0A349Z5P0_ALTSX Tryptophan 7-halogenase OS=Alteromonas sp. OX=232 GN=DCW59_10905 PE=4; SV = 1
MIKKRRLVIVGGGSAGWMAAAYLNGALNDKGMSSNVDIHLIESPDTPRISVGEATIPSMRHLLAVVGVDELDFMRATEATFKQSIKYTNWVTNNNTFYHHPFSRLTMQPVDNMGMRWLQSDQSIPFMETCSAQPIICEMGLSPQALGDSRMGQPLSYAYHMNAQKFADYLRDFSVQRGVKHTFANVVDIQLRDQDHIHSVTTDQGQVCEADLFVDCTGFRANLIEKTLGVGFEDCSQWLLCDRAITMHVPYDEYYPGLVRPYTTATALSNGWIWDIPMQTRRSIGYVHSSDFIDEESAEREMRAYQGGNNEALDARLIKFKVGRRHRTWHGNCIAIGLAGGFIEPLESTGLYLSDMGAVMLAEHFPWHDEGMDLLATRYNRMMSNRFYEILDFINMHYCLTQRTDTDFWLEVQKPERINDRLAAKFEYWKVKPPSPSDFDDMWLPGQSLTAVAKDYAGADRRPAVDTAGLWNYQSYECILYGMAFLKKQSAQWFGESRPPTRVSQTILQRLQMARNQLPPHAHWLQQRLGMQQYPTAAKPAGWVA

SEQ ID NO: 86894 - protein, 500 aa, Shewanella sp.
  REGION 1..500: note = tr|A0A0C3MP24|A0A0C3MP24_9GAMM Tryptophan halogenase; OS = Shewanella sp. cp20 OX=1521167 GN=DB48_16980 PE=4 SV=1
MTSEIKHLVIVGGGSAGWMAAAMLSRMMGPQLEITLIESDQIATVGVGEASIPPLQLFNRALGINEHDFLRATQGTYKLGIEFEHWLKQDQAYMHAFGTQGKDLALTPFRHLWLKSKPESASDYWRYSLNYQAAKANRFQPLAHLPGTDLPGINHAYHFDAGLYGKLLAHYSQQNGVNRKEGKITRVLLDGDSGDIDCLELENGERIRGDLYLDCSGFHGLLIKQALNVEYLDYRQWLLCDRAIAMPTMATRPRRPYTRASAHKAGWCWQIPLQHRTGNGIVYSSQYMSDDEALSLLEKHIDGAPIGEPRKIQFIPGRVAKQWHKNCVSLGLSSGFLEPLESTSLHLIQSGIIRLLKLFPNPLNMDALRDEYNRQSAEEFEQIRDFIILHYKLNQRDNDEFWQHCREMSVPDTLTAKMALFSATGVIDCPQESLFSENAWTQVMLGQGLMPASAHPLASALTTEQTTELLRNLNRIITKTTDAMASHDDYLKQHCAAQSE

SEQ ID NO: 86895 - protein, 499 aa, Alteromonas sp.
  REGION 1..499: note = tr|A0A349Z232|A0A349Z232_ALTSX Tryptophan halogenase; OS = Alteromonas sp. OX=232 GN=DCW59_04485 PE=4 SV=1
MTTPPKQIVIAGGGTAGWIAAVALARKMGPLVNIRLVESSTIGTIGVGEATIPPLRTFHKLLQIDEQAFMRATAATFKLGIRFENWGRIGEQYIHSFGMTGQQSWLAEFVHFYLSAKARGLEGDYGDYCFELEAARQHKFATSAQSNIQYAYHLDAGNYVAFLKRFCSNLGVTHCDGVISQVLQHDNGDIKALRLASGELIEGDFFIDCTGFKGLLIEETLHTGYEDWSHWLLCDSACAVQTTSTEPAAPFTRSAAHHAGWQWEIPLQHRTGNGNVYSSAFMDDNAASEQLMQNVKGEAITTPRTLRFKTGRRNKAWHRNCLALGLASGFVEPLESTSIHLVIMGITRFMQLFPHGGNDQALADEYNQQTQLELERIRDFIILHYHVTQRDDSPFWEHCKNMTVPDSLQTRIVLFQEQAHAFQKQNELFRVDSWAQVMLGQGVTPDYHHPAATMLSDVQLNQSMQQQRQRVLQAVAQLPAHEDFIRGYCATPQKAEALL

SEQ ID NO: 86896 - protein, 504 aa, Sphingomonas sp.
  REGION 1..504: note = tr|A0A4R2TWV6|A0A4R2TWV6_9SPHN Tryptophan halogenase; OS = Sphingomonas sp. PP-CC-3A-396 OX=2135655; GN = C8J40_103319 PE=4 SV=1
MVEQRIRKVVIAGGGTAGWLTAAALSRQLGQLLDITLVESEEIGTIGVGEATIPTMRSFHAILGLDEREFMRATQATFKLGIAFENWAHEGDRYIHSFGDLGKSTWMGDFHHFWLAAKAAGDPSEIGDYCLELQAAKAERFALPSEGEINYAYHLDAGLYARFLRARSEANGLKRIEGRIASVDRDGETGFIRALVLDSGERVDGDLFIDCTGFRGLLIEGTYAAGYEDWSQWLPTNSALAVQTASTGPAHPYTRAIAHDAGWRWRIPLQHRVGNGLVYASEHLSDDEAHARLLGAIGSAPLTEPRLIRFRTGRRRQVWKGNCVALSLASGFVEPLESTSIHLIMTGVLRLMKSFPFGGIAPAVVTRFNDQAQAELEHVRDFIILHYHLNNRPEPFWAARRDMPIPDTLVERIALFAEGAQAYQGGEDLFRVASWVQVMLGQHLVPHDHHRLGSIMGGPQLASVLTKIRSDIAGMVSGMPTHQQFLDRYLAPPIAAGSGIRSMN

SEQ ID NO: 86897 - protein, 244 aa, Alteromonas sp.
  REGION 1..244: note = tr|A0A3D5F5V0|A0A3D5F5V0_ALTSX Tryptophan halogenase (Fragment) OS=Alteromonas sp. OX=232 GN=DGF36_06160 PE=4; SV = 1
IATAHKAGWQWRIPLQSRVGNGIVYSSRYLSDEDALATLKQNLDGEMLTEPRYLKFKTGRREKAWHKNCIAVGLASGFLEPLESTSIHLVTTALIRLMKLFPFSSNHQLLAEQYNRETQKEMETIRDFIILHYNLTKRTDSDFWDHYRTMDIPEPLAHRMEIFAQNGYVWPDDVALFRVDSWVQVMMGQGLMPAQHHGASRMLPTDGLKQQLSAFKQSVDNALGQLPAHADFIARYCPAGEQVK

SEQ ID NO: 86898 - protein, 471 aa, Alteromonas sp.
  REGION 1..471: note = tr|A0A3D2Y3F4|A0A3D2Y3F4_ALTSX Tryptophan halogenase (Fragment) OS=Alteromonas sp. OX=232 GN=DHW66_15030 PE=4; SV = 1
TANLLAKRWLNQPVTITLVESPDIGIIGVGEGSTPTLKRFFSDMGIAEQDWMSECNATYKVSIRFEGWSPGANIPAYSHPFISQLDTFSERSFYVNCFHRRMGQDVTTRPDEFLFNGWLAKHQRSPVTPPNFPFRIEYGYHFDSGLVGEFLKRHAQGLGVIHKALNITDVECHPNGDIAALHSKEGERVEGDFFIDCTGFQSLLLQKTLGVNFKSFKDNLFNDSAVVCPTPAQSELPVETRATALSAGWAWQIPLTNRTGNGYVYSSDFISDEQAASELCRHLGVDEDSAALRKLTMKVGQVERHWANNCLAVGLSQGFIEPLEATALHLVQTSVEIFLDHVDEGGFADTQRNAYNQLITERFERVRDYIVAHYRLNTRSDSEYWLANQQNENLSDSLLHLLNVWYRRGDLGQEIQRQQLDSHFGNTSWHCLLAGYGAFPPLEKSVTTTDLYKQNQLAAFFEGCLLNFRSQ

SEQ ID NO: 86899 - protein, 510 aa, unidentified
  source 1..510: note = Xanthomonadaceae bacterium
  REGION 1..510: note = tr|A0A4Q6GX73|A0A4Q6GX73_9GAMM Tryptophan 7-halogenase OS=Xanthomonadaceae bacterium OX=1926873; GN = EOP92_03925 PE=4 SV=1
MNDKPIRRIVIVGGGTAGWMAAAPLAQRLARRLEAPCEVILVESPDIGTIGVGEATLPTIRYYNAALGLDPDDFVRRTKASYKLGIEFKDWGHLGNRFFHGFGDFGPSLDRHPSHLFWLRMSAQFKDMPALENWSVSSIMARNNKFVPPHEGTPSITTAYSYGFHFDAGLYAEYLRDYAVAHGAQRIEGTVVEVEQHPESGFITAVKLRDGRRVAGDLFVDCSGFRGLLIEGALKAGYDDWSEQLPCNSALAVPCASAAELTPYTRSTAKEAGWVWRIPLQHRTGNGHVYSNAFTSDGRAREVLLGSLDGAALDEPRQLRFVTGRRRKSWVKNCVAVGLSAGFVEPLESTSISLIETAVGKLVELFPDRDCRPELADEFNRYMGVRYESVRDFIILHYKLTKRDDSEFWRYCASMPIPDSLRHQIELFRETGRVAILDRDGFAEPSFVAMLMGLGAMPKRYDPFVDGVDIREVHGHFAGVRDMIVQAVARMPTHDAFIAGQLGAASPRAA

SEQ ID NO: 86900 - protein, 183 aa, Alteromonas sp.
  REGION 1..183: note = tr|A0A3D5F3D8|A0A3D5F3D8_ALTSX Tryptophan halogenase (Fragment) OS=Alteromonas sp. OX=232 GN=DGF36_01780 PE=4; SV = 1
MTIPPKQIVIAGGGTAGWIAAAALARKMGPLVNIRLVESSTIGTIGVGEATIPPLRTFHKLLQIDEQAFMRATAATFKLGIRFENWGRIGEQYIHSFGMTGQQSWLAEFVHFYLSAKARGLEGDYGDYCFELEAARQHKFATSAQSNIQYAYHLDAGNYVAFLKRFCSNLGVTHCDGVISQVL

SEQ ID NO: 86901 - protein, 452 aa, Alteromonas sp.
  REGION 1..452: note = tr|A0A3D0Q566|A0A3D0Q566_ALTSX Tryptophan halogenase (Fragment) OS=Alteromonas sp. OX=232 GN=DEP33_11380 PE=4; SV = 1
RLLGIAEKQFLSECDASFKQASKFVGWQQGGEDKYYHPFTAPAGFGAVNLVEAWHDEGCPGDFESWVCAQGMACERYQAPKMPQLPEYAYNFNYGYHLSADKFVALLHRHCTEQLGVQYKSAHVAGIQSHPDGAIAAIELAQGEPLAGDLFIDCSGFSARLIGQHYNVPFVSKRHILFNDTAVAAQVNHVGDQTPIASCTVATARPHGWVWDIALQSRRGIGHVFASELTTESQAEDALRAYISSDQSLSQKAIMPRTIRFDPGHRARFWEHNCVAIGVSAGFVEPLEATALVLIEKSAEWIADQLPRSRAAMAVLGKRYNEMTDARWSEIIDFIKLHYVLSERRDSHYWQAHADPASWTDSLQDALQLWQSQPPGLLETNLRQELFSSASKQYVLYGMGFRSQDWQPGGITSLRKPLIERVRREFLHNGDKLLAQLPTNREYFNRLKAASA

SEQ ID NO: 86902 - protein, 504 aa, unidentified
  source 1..504: note = Xanthomonadaceae bacterium
  REGION 1..504: note = tr|A0A4V1S8W0|A0A4V1S8W0_9GAMM Tryptophan 7-halogenase OS=Xanthomonadaceae bacterium OX=1926873; GN = EOP89_01955 PE=4 SV=1
MTGANLGPIRKVVIVGGGTAGWMAAAAAARYLDDGQRQVVLIESDAIGTVGVGEATIPPILGFNALIGVDEREFVRATGATFKLGIEFVGWDTGDDRYMHAFGGHGRDIQGLAFHQLWLKLRDYPGVGGIEAYAPSAVAAYLHKFGLPTGQQSQPLAYAYHFDAGLYAAFLRRRAEAGGVTRIEGRITGADRHSDTSHVSAVRLDDGRSVDGDLFIDCSGFRSLLLGETMGVPFEDWSHWLPCDRAVAVPTEPSSPLLPYTRATARSAGWQWRIPLQHRTGNGHVYSSAHISDDEATSMLLANLDARPTAEPRQLRFKAGRRTKMWEGNVVALGLAGGFLEPLESTSIHLIQTGISKLFALFPDRGFSTVERDEYNRLMGDAYTSIRDFIILHYHATRRDDSAFWRHARTMPIPDTLTRKIALFREKGRIFRYDDELFGISSWVQVLLGQNVIPTGYDPIVDALDADRVADAVRQIRAATLRGVQALPDHAAFIASHAAAGRKI

SEQ ID NO: 86903 - protein, 513 aa, unidentified
  source 1..513: note = Sphingomonadales bacterium
  REGION 1..513: note = tr|A0A101VDT0|A0A101VDT0_9SPHN Uncharacterized protein OS=Sphingomonadales bacterium BRH_c42 OX=1734407; GN = APF82_07750 PE=4 SV=1
MISQVADPREERIRDVVIVGGGSAGWMAATMLATALSREIRIRLVESDAIGIVGVGEATIPPIKKFNRFCKVDEQAFLRETNGTFKLGIEFHNWGMPGDRYLHQFGFVGRELDAMVKLHNWWLTGRLAGQADYPAWEDVFIAKAAARANRFALPAHRQGDPLGRFTYAYHFDALLYGKHLRRLAEARGVERVEGTIVDVERADGHEGVTALLIEDGRRIEADLFIDCSGFRSLLMGEALNEPFDDWSHWLPADRAMVVPSAPAKDGITPYTKGIAHPVGWQWRIPLQNRIGNGHVFSSSFSSESEAEQRLMATLDTTPLDTPRLLKFRTGRRRRAWAGNVVALGLSSGFLEPLESTSIHLVQSGLERLIELFPTRRMDAVLRDRYNAQSEREWMQVRDFIIVHYKLTQRTDSEFWKYTAAMDIPDSLSAVLDLWKERAILGVDGGHLFQLGSWSSILIGQNFLPQGVHALADRAEPAAVAADIRRIVDEVNRAASQLPQHHEFIARYCAAPAS

SEQ ID NO: 86904 - protein, 490 aa, Alteromonas sp.
  REGION 1..490: note = tr|A0A2D5LHM4|A0A2D5LHM4_ALTSX Tryptophan halogenase; OS = Alteromonas sp. OX=232 GN=CL592_02920 PE=4 SV=1
MSTKPLHVVIAGGGTAGWMTANLLAKRWLNQPVTITLVESPDIGIIGVGEGSTPTLKRFFSDMGIAEQDWMPACNATYKVSIRFEGWSPGANIPAYSHPFISQLDTFSERAFYVNCFHRRMGQDVITRPDDFLFNGWLARHQRSPLTPSNFPFRIEYGYHFDSGLVGEFLKRHAQGLGVVHKALNITDVECHPNGEIAALHSKEGERIEGDFFIDCTGFQSLLLQKTLGVNFKSFKDNLFNDSAVVCPTPAQTTLPVETRATALSAGWAWQIPLTNRTGNGYVYSSDFISDEQAASELCRHLGVDEESAALRKLTMNVGQVERHWAKNCLAVGLSQGFIEPLEATALHLVQTSVEIFLDHVDEGGFSDTQRNAYNQLITERFERVRDYIVAHYRLNTRSDSEYWLANQHNENLSDSLLHLFNVWYRRGDLGQEIQRQQLDSHFGNTSWHCLLAGYGAFPPLEKGATTTDLYKQNQLAAFFEGCLLNFKPQ

SEQ ID NO: 86905 - protein, 515 aa, Saccharophagus degradans
  REGION 1..515: note = tr|Q21LS3|Q21LS3_SACD2 Tryptophan halogenase; OS = Saccharophagus degradans (strain 2-40 / ATCC 43961 / DSM 17024) OX=203122 GN=Sde_1094 PE=4 SV=1
MYKIKKIMIVGGGTSGWMTAAALAKFLIPHGIDIELIESSAISSVGVGEATIPHIRVFNDMLGIDENEFIRETGATYKLAIRFDGWGEKNSSYFHPFGVSGFPINGIDFHHYWLRLKQEAEVSEYGAYSFAAVAANLKRFGYPASNPNSPAHDFSYAFHIDASKYASFLKSRALAAGVTYIDGKVTEVTRDKEGAINAVQLDSGEFFVADFFIDCSGFRSLLLGESLGVEFESWAKWLPCDSAYAVPSEALSSPPSYTLSSAQLSGWQWRIPLQHRTGNGLVFSSSHQTNESALSTLLGNVSEPITADPKLLRFEAGKRKQSWEKNCVAIGLSAGFLEPLESTSLYLVQVAVQKFLELFSCEAAIGTTEMNAFNYLINIEYERIRDFLVLHYYANNRKDSDFWADCREVAIPSSLEEKLEIFRCGAGVVEYRHGLFMPASWLAVYLGQGVVPVTYDPRLKKMPLGKMKAFLAQVEWDVQRAVERYESHSLFVLRANSKASGAYPPASMSLYGAPR

SEQ ID NO: 86906 - protein, 501 aa, unidentified
  source 1..501: note = Xanthomonadaceae bacterium
  REGION 1..501: note = tr|A0A4Q2XWW3|A0A4Q2XWW3_9GAMM Tryptophan 7-halogenase OS=Xanthomonadaceae bacterium OX=1926873; GN = EOP89_02665 PE=4 SV=1
MAEQRISKVVIAGGGTAGWLAAAALSRQLGQLLDITLVESEDIGTIGVGEATIPTMRAFHTILGLDEREFMRATQATFKLGISFENWARDGDRYIHSFGDIGKSTWMGDFHHFWLAAKAAGDTSEIGAYCLELQAAKAERFALPSEGQINYAYHLDAGLYARFLRARSEANGLKRIEGRIASVDRDGETGFIRALVLDSGERVEGDLFIDCTGFRGLLIEGTYAAGYEDWSQWLPTNSALAVQTAATGPAHPYTRAIAHDAGWRWRIPLQHRVGNGLVYASDHLSDDEAHGRLLSTIGGAPLTEPRLIRFRTGRRRQVWMGNCVALSLAGGFVEPLESTSIHLIMTGLTRLMQTFPFGGIAPSMVKRYNDQAQAELERVRDFIILHYHLNERPEPFWAARRDMPIPDTLVERIALFTESAQAYQGGEDLFRVASWVQVMLGQRLMPRDHHRLGSIMGGPQLTSVLTNIRNTIADAVAGMPTHQQFLDRYLSPPVATPTKMR

SEQ ID NO: 86907 - protein, 204 aa, Alteromonas sp.
  REGION 1..204: note = tr|A0A359K1Z4|A0A359K1Z4_ALTSX Tryptophan halogenase (Fragment) OS=Alteromonas sp. OX=232 GN=DEH24_05845 PE=4; SV = 1
QFNDLSVKQIQIQSGHREHFWHNNCVAVGLSAGFLEPLEASALVLVELSATMLAEQLPVNRATMPIIAKRFNQTFQYRWQRIIDFLKLHYMLTKRTDTAFWRDNCDPATIPDSLQELLDLWRYHPPYDHDFTSNNEVFPAASYQYVMYGMGFESDLSFGQQQVAKAFAQQQLQMNQQARQKVLSALPTHRDLLNKINQYGLQPV

SEQ ID NO: 86908 - protein, 541 aa, unidentified
  source 1..541: note = Xanthomonadaceae bacterium
  REGION 1..541: note = tr|A0A4Q6FH33|A0A4Q6FH33_9GAMM Tryptophan 7-halogenase OS=Xanthomonadaceae bacterium OX=1926873; GN = EOP93_14475 PE=4 SV=1
MSDGRIRRVVIAGGGTAGWVAAVALSHQFRDLLDITLVESDQIGTVGVGESTVPTIRTFHKLLKIDEREFMSEVAASFKLSISFEDWLRPGHRYFHPFGHTGMGTWSTEFHHFWLDSLRRGMTSELGDYCLETVASRGNRFALLDRNDAGPQEWSTRWARSPMSPGRLEVNYAYHFDAALYAAYMRRKCEGFGVTRVEGKIQEVRQHPESGFVQALVLDNGTVVEGDLFIDCTGGRAVLSEQTLKTGYEDWNQWLPCDRAVAWQTESNGPAVPYTRAIAHEAGWHWSIALQHRIGCGTVFSSAHMSDDEARARLVAANPARPLRDPWIIPFRTGRRRKAWNKNVVALGLASGFIEPLESTSIHLTISAVTRLLQLFPADGIDDSLVQRYNEVSRAEMEHVRNFIIMHYHLNQRDEPLWRDMRAMSLPPELALRIQAFRDRAHAWQGEDELFRLDSWTHVMLGQGVMPKQHQQVVRGLPDADMRRLFEAIREPIDRAVAAMPTHQQFLDSYCKAPQSAWDLMHQRAQMHARVTAQSQAPSAG

SEQ ID NO: 86909 - protein, 504 aa, Sphingomonas sp.
  REGION 1..504: note = tr|A0A4R2TKM6|A0A4R2TKM6_9SPHN Tryptophan halogenase; OS = Sphingomonas sp. PP-CC-3A-396 OX=2135655 GN=C8J40_10961; PE = 4 SV=1
MADQPLRIAIAGGGTAGWMAAATFARFLETGYEIDLIESDDIGTVGVGEATIPQIHLFNDALGLDEDAFLRATGGTFKLGIEFVDWFKPGHRYMHAFGDVGRDVGLLPFHQYWLRARSLGLAGDLGAYSLNTHAALAERMQRGPARTSRVLPSMPYAYHFDAGLYARYLRRYSETRGVNRIEGKIVRVTRDGESGDVSGLVLENGTTVAADLYIDCTGFRGLLIEEALGTGYEDWTHWLPCDRAIAVPSARSKAFTPYTRSTAHAAGWQWRIPLQHRTGNGVVFSSAHMSEDEATATLLSGLDTPAMADPRTITFRTGRRKQMWNRNVVALGLAAGFMEPLESTSIHLIQSAIARLLKLLPGRVIADADRSEFNRQSDFEYERIRDFIILHYKATTRDDPPFWRQCRDMAVPDTLAAKIELWRGSGHIVREHEELFTEVGWLQVLAGQGIAPHGHHPLADAISTADLAEFMDTIDKLNAREAGQMQDHAAFVAQHCAAAAGLAA

SEQ ID NO: 86910 - protein, 497 aa, Alteromonas sp.
  REGION 1..497: note = tr|A0A359KAY6|A0A359KAY6_ALTSX Tryptophan halogenase; OS = Alteromonas sp. OX=232 GN=DEH24_21710 PE=4 SV=1
MTQSKTRVVIAGGGTAGWLSAFSLVTRLGALLDITLVESDQIGTVGVGEATIPTMCNFHRLMGLDEREFMAATQATFKLGIQFDNWGNQGDSYVHSFGEIGQRSWMAEFHEFWMEAVANGQQDTLEDYCLELKAAKQNKFALKVGNRPLNFAYHLDATAYAAYLRNKAEQAGVTRIEGKITTVNKHPDSGNLRELVLDNDARIEGDVFIDCTGFRALLIGEALGVGYDDWSHLLAADRAIAVQTTAVEPPRPYTIATAHKAGWQWRIPLQSRVGNGIVYSSRFSDDETALATLMSNVTGEAVTEPRYLKFKTGMRQQAWAKNCVAIGLSSGFLEPLESTSIHLVTTALIRLMKLFPFEGECGLLAERYNRETQKEMETIRDFIVLHYHLTQRDDSAFWDFYRNMEIPESLQHRMAMFAEHGYVWPDDVALFRVDSWVQVMMGQGLMPKRHHGASRMLPTASLTQQLTAFKQSVNNALAQLPEHEAFIKQYCPADKSA

SEQ ID NO: 86911 - protein, 505 aa, Sphingomonas sp.
  REGION 1..505: note = tr|A0A0Q4TYZ5|A0A0Q4TYZ5_9SPHN Tryptophan halogenase; OS = Sphingomonas sp. Leaf257 OX=1736309 GN=ASF14_13245 PE=4; SV = 1
MTKVTNDVVRVVIVGGGTAGWMAGAALTRLLSGQCTVRLIESEAIGVVGVGEATLPHIRSFNERLGIPEAEFMARTRATFKLGIEFRDWGRIGDSYIHPFGTFGRGAGAIDFHHYWSRLARERQDLPPLDQLSYACTLAREARFEHPDQGRGGLTSTFGYAYQFDALLFAPYLRSLAEEAGAVRTEGMVVDVERDGESGLIRSVTLADGERVEGDLFIDCSGFRSLLLGQTLDEPFEDWSKWLPTDRAVAMPCRTETAVTPYTSAIAMPAGWRWRIPLQHRTGNGYVYASDFISDSDAARALEEAVEGEKLAEPRLLRFKAGRRRRSWVGNCVAIGLASGFLEPLESTSIYLVQQAITALIELFPGRQMDASDRDEFNRVIDLEYDRIRDFLILHYHATSRDGSPFWTYVRTMAIPDSLGEKLELWRRRGRVVKYREGVFLDASWIAVYLGQGIVPEGWDPRADVARTSDLVQAVRSLRSEIAAEVAKRPDHRAFLERYCPMVAA

SEQ ID NO: 86912 - protein, 503 aa, unidentified
  source 1..503: note = Xanthomonadaceae bacterium
  REGION 1..503: note = tr|A0A4Q2XY17|A0A4Q2XY17_9GAMM Tryptophan 7-halogenase OS=Xanthomonadaceae bacterium OX=1926873; GN = EOP89_00665 PE=4 SV=1
MTAGPVRRVVIVGGGTAGWMMAAAAARFLDDGQRTITLVESEAIGTVGVGEATIPPILAFNRLLGISEADFLRATGGTFKLGIEFVGWDTGDDRYFHPFGTHGRPFEGLNFHQIWLKLRDRKGIGGIEDYAMSSVAAAHDRYVPPASDPRSPQSGLAHAYHFDAGRYAAFLRERAEAQGAVRIEGRIATVDRDETTGHVVAVRLDDGRALQGDLFIDCSGFRSLLLGGTMDVPFENWSHWLPCDSAIAVPTARTEPIHPFTRSTARPAGWQWRIPLQHRTGNGYVYASRFTSDAEAEALLLANLDAPPVAAPRQLRFTAGRRIRLWEGNVVALGLAGGFLEPLESTSIHLIQEGISKLFGLFPDRRFTSVERDEYNRHMGNAYLRVRDFIILHYHATRRRDSAFWQHVGTMMVPDSLAAKIALFREKGRVFRYDDELFAIPSWVAVMLGQNIMPTGYDPIVDALDEDRLAEALRQMRAANLAAARAMPTHAAALAALGDAPGR

SEQ ID NO: 86913 - protein, 250 aa, unidentified
  source 1..250: note = Xanthomonadaceae bacterium
  REGION 1..250: note = tr|A0A4Q2XWD5|A0A4Q2XWD5_9GAMM Tryptophan halogenase (Fragment) OS=Xanthomonadaceae bacterium OX=1926873; GN = EOP89_01495 PE=4 SV=1
DEAEAQLLASLEGKPLADPRRLQFTAGRRRDCWNRNVVALGLSSGFIEPLESTSIHLVQAGIQRLIALFPDKRFDPVERDEFNRQMHDLYEDIRDFIILHYKATRRDDSPFWNQVRTMDVPESLQRKIDLFAGKGRLFREGYDLFSNPSWVAVCLGQGITPQGWEPAADALDEHKVASALEQMRRGYLDTAQRLPTHGDFLRRTALSPLAPQATSSPSASVPAQTASDDVPFFAFTAESPFDVGGGGSPL

SEQ ID NO: 86914 - protein, 503 aa, Novosphingobium sp.
  REGION 1..503: note = tr|A0A0N1AK13|A0A0N1AK13_9SPHN Tryptophan halogenase; OS = Novosphingobium sp. AAP1 OX=1523413 GN=IP65_11870 PE=4; SV = 1
MDDRKIRKVLIVGGGSAGWMTAAMLSQALARDCAITLVESEEIGTIGVGEATIPPIRVFNQTLGIDEREFLARTKGSFKLGIEFVGWGAENSRYFHPFGPYGRNFDMVPMHQYWLQARRQGETAPLDEHAMAWHLARAGRFAHPSPDPRSVMSTFDYAYHFDAGLYARFLRTIAEQRGVTRVEGRIADVALHGETGFVEAVTMADGRRIEAELFIDCSGFRGLLIEGALKTGYEDWSHWLPCDRAVAMPCAHPAADPNPTPYTRSTARAAGWQWRIPLQHRIGNGYVFCSAFLGEDRAAEDLASTLDGTALGDPRAVRFQAGRRKLHWNRNVIAVGLASGFLEPLESTSIHLIQANISKILALFPDRDFDPATRDEFNRVAHGEMERIRDFIILHYKLTQRQDAELWRHVAAMDIPDSLALKIAHFRRHGRLIARELDLFAPPSWLAVHIGQNNLPEGHDPLIDYRGVDGREWLGRLRGAMAAEAAQQPMHGAVLAGLAPQPA

SEQ ID NO: 86915 - protein, 513 aa, Pseudoxanthomonas sp.
  REGION 1..513: note = tr|A0A4Q9TGG3|A0A4Q9TGG3_9GAMM Tryptophan 7-halogenase OS=Pseudoxanthomonas sp. NML171590 OX=2527958; GN = EYC45_04890 PE=4 SV=1
MGSAHVASESIASIVVVGGGAAGWSAAAALIRHLPHCRVQLVESEEIGIVGVGEATVPNVRYFNLQVLGLEEGEFVRRTQGTFKLGIEFRDWRRPGDAYMHGFGAVGYDMGPLAFHQLWLHEVRAGRADADIGRYVLQNLAARQGRFMTAPADAPAGSPLADIAYAYHFDATLYAGYLRERAERQGVVRVEGRVVEATLRAQDGFVEAVVLADGRRIEGDLFIDCSGFRSLLLGEALQVPWVDWSHWLPCDRAVAVPCAPAGPPEPFTRSTARTAGWQWHIPLQHRVGNGHVYSSAFMDDATATEQLMSSLEGPARAEPRLLRFATGRRARFWERNVVAMGLASGFMEPLESTSILLVHNAVLRLLDVFPDKRFDPALLRRYNETTVFEWERIRDFLILHYKATERDDSAFWRHCAAMAIPDSLQQVIDLFAGSGRYHRNGEEFFSTSSWVQVLIGQGIVPQREHPLLAAIPEPQIQQFVGRVAQVLDNCVAAMPPHDQFIARTCAAPPPRLS

SEQ ID NO: 86916 - protein, 499 aa, Sphingomonas sp.
  REGION 1..499: note = tr|A0A4R2TRI0|A0A4R2TRI0_9SPHN Tryptophan halogenase; OS = Sphingomonas sp. PP-CC-3A-396 OX=2135655; GN = C8J40_105228 PE=4 SV=1
MIVGGGTAGWMAATLLARKLDRQSVTITVVESSDIRTVGVGEATVPGIRDFFREIGVSEQEVMAGAQGTVKLGIEFVDWKREGERFFHPFGLYGMRSRGVAFHHYWRKLNAAGQTTPLSDFCLATALAERNLFMRPTDSPVHDLLFFDWAVHFDAGLFAKFLSKKAGEWGVKHIDATITDVLVDQSTGFISSVDTQCGKTISGDLFIDCSGFRSLLLGDALGVPYEDWTNLLPCDRAVAMPCERAGPLTPYTRSTALTAGWQWRIPLQHRVGNGYVYASRHISDDEAVATLKGRLEGEALAEPNIIRFRTGRRTAFWQGNCVALGLAAGFMEPLESTSITLIQTGLEKLLALLPDRSFDPALADEYNRTTGLEYARIRDFLVLHYFANGRQGEPMWDRCRGTALPEQLERKLTLFKARGHLVRYEWESFQDPSWLSMYAGFGIDAAAHDPLADHFSLSDLEAAFERMKGSIRDAVALAEPHETFLKSFAPRQLISHPGR

SEQ ID NO: 86917 - protein, 515 aa, Alteromonas sp.
  REGION 1..515: note = tr|A0A359KD73|A0A359KD73_ALTSX Tryptophan halogenase; OS = Alteromonas sp. OX=232 GN=DEH24_21715 PE=4 SV=1
MNTASKKTRVVIVGGGTAGWLTAGIIAARHPLLVENSNTELVLLESPDVKNLGVGEGTWPTMRDTLKQIGLSERAFLSCCDASFKQASKFAGWRQDPAQHYYHPFTAPAGYGVLSLADAWIEAGYPQDFESWVSAQGHACERQLSPKLPQLPEYAFTYNYGYHLNAGKFVALLQAHCTEKLGVTYRQGHVAHIVSHDSGAIKALQLEDGNTVEGDLFIDCSGFAAVLMGKHFQIPFVSQRGVLFNDTAIAAQVNHAAPQTPIASATVATAQTSGWIWDIALQHRRGIGHVFASEFCAVEDAEQTLRNYIANDPNLQQDEVTTRVIKFDPGHRKYFWHHNCVAIGVSAGFVEPLEATALVLIEKSAEWVAEQLPRSPSAMPVLAKRFNQLTNERWQEIIDFIKLHYVLSDRTDSAYWRAHQQHESWTDSLSEALQLWQSQPPGLYESSNRQELFSSASKQYVLFGMGFRAEQWQSCGRLALQQPLIERFRREVQQQVNRVNAQLLTNREYLQKLRK

SEQ ID NO: 86918 - protein, 84 aa, unidentified
  source 1..84: note = Xanthomonadaceae bacterium
  REGION 1..84: note = tr|A0A4Q2XWA7|A0A4Q2XWA7_9GAMM Tryptophan halogenase (Fragment) OS=Xanthomonadaceae bacterium OX=1926873; GN = EOP89_01550 PE=4 SV=1
MTGPIEAPRTRVVVAGGGTAGWIAAAAIVRQLGPLVDVTLVESNEIGTVGVGESTIPTARSFHAFLGIDEAAFMRATQATFKLG

SEQ ID NO: 86919 - protein, 517 aa, Alteromonas sp.
  REGION 1..517: note = tr|A0A359K8S6|A0A359K8S6_ALTSX Tryptophan halogenase; OS = Alteromonas sp. OX=232 GN=DEH24_13940 PE=4 SV=1
MIVGGGTAGWLCAGMLAAKLGKQGERHRGVEITLIESPDVSTIGVGEGSWPSLRDTLREIGLSESAFITHCQASFKQGSTFVGWRDGSEHDRYHHPFTNPAGYTEIDVHACWQALHSNKPYDRAFSVQPELCEQHKAPKQLATPDYAYVLNYGYHFDATRLAEMVSDHCVNQLGVRHVQAHIEHVVSHHNGDIKALTTQCGQTLEGDLFIDCSGQSALLAGQHYNVPWNSVKDILLNDSAMAVQVPYHEQDNTIASTTLATAHPQGWSWDIGLQHRRGVGMVYSSDFASAEDIEQSLKQYLTKRLPHDVVEQATCRQLKFSPGYRSEFWTHNCLSLGMASGFIEPLEASAVAMVELGVRMLCEQFPQNRDHMRILAARYNERFAYRWARVIDFVKLHYAINQRTNDAYWNAHRDPATWPDSLKSLLSLWQYQPPSRYDVVQNEEIFPSASYQFVLYGMGFKTESPALADSSDMLKRAGAISQKLQATLMQFGQGLPDNRALLNAIRERHKHSSGATL

SEQ ID NO: 86920 - protein, 530 aa, unidentified
  source 1..530: note = Xanthomonadaceae bacterium
  REGION 1..530: note = tr|A0A4Q2XVV9|A0A4Q2XVV9_9GAMM Tryptophan 7-halogenase OS=Xanthomonadaceae bacterium OX=1926873; GN = EOP89_00385 PE=4 SV=1
MTGRTPGPASARGPLRSIVIVGGGTAGWMAATLLARRLERQPVKITVIDSSAIGTVGVGEATVPGIRDFFREIGVTEQEVMAATQGTVKLGIEFVDWKREGERFFHPFGLYGMRSRGVAFHHYWRKMNVAGHASPLADFCLATALAERNLFMPPTDRPVHDLLFFDWAVHFDAGLFARFLAQKAIAWGVEHIDATITDVRVDGRTGFISGVDTSCGKAIDGDLFIDCSGFRSLLLGGALGVPYEDWTNLLPCDRAVAMPCTRSGPLTPYTRSTALEAGWQWRIPLQHRVGNGYVYSSRHISDDEAVATLKGRLEGEALGEPNMIRFRTGRRTAFWQGNCVALGLAAGFMEPLESTSITLIQTGIEKLLALLPDRGFDPALAEEYNRTTGLEYERIRDFLLLHYFANVRRGEPMWDRCRDTALPEALAHKLRLFKARGHLVRYEWESFQDPSWLSMYAGFGIDAAAHDPGADHFSIPDLESAFARMKESIEQAVALAQPHDAFLGLSARHPARAQAAEPGGAPDRLMMPAR

SEQ ID NO: 86921 - protein, 501 aa, Pseudoxanthomonas sp.
  REGION 1..501: note = tr|A0A4Q9TFS5|A0A4Q9TFS5_9GAMM Tryptophan 7-halogenase OS=Pseudoxanthomonas sp. NML171590 OX=2527958; GN = EYC45_08375 PE=4 SV=1
MTDSSQPRPVKRVVIAGGGTAGWMAAAALSRTLGKVLDITLVESEEIGTVGVGEATIPTLVTFHRLLDIDEQAFMAATGATIKLGIQFEGWREPGQDYIHSFGTTGKDHWTAGFQHFWMKGRQRGLARDYGDYCLELRAAQEQRFAHLARTGMNYAFHLDAGLYARFLRRFSEGFGARRIEGKIATVQTSAQGDIAALVMEDGTRVEGDLFIDCTGFRALLLGQTLGVAFEDWSHWLFADSALAVQTESVAPPVPYTRSMAGPAGWQWRIPLQHRVGNGIVYSSRFMDQEAARAALLDNLEGPPLFEPRPLRFTPGQRQVTWKRNCVALGLASGFLEPLESTNIHLVSRNLTRLLQSFPHVIRQVDIDEYNAQTEAEMVHIRDFVILHYHVTRRRDTPFWQACAQMDIPATLRHRIDLFAQTGRVFHVPNELFAENSWIQVMLGQGIAPAQYHPVADLMDDAELARFLDGIHQQVEQTVARLPTHADYLRSYCAQPRPAMA

SEQ ID NO: 86922 - protein, 513 aa, Alteromonas sp.
  REGION 1..513: note = tr|A0A3D5F5S8|A0A3D5F5S8_ALTSX Tryptophan halogenase; OS = Alteromonas sp. OX=232 GN=DGF36_06165 PE=4 SV=1
MITRVVVVGGGTAGWLTAGIIAAKNPLVGENSHTEVILVESPDVKNLGVGEGTWPTMRDTLRLLGIAEKQFLSECDASFKQASKFVGWQQGGEDKYYHPFTAPAGFGAVNLVEAWHDEGCPGDFESWVCAQGMACERYQAPKMPQLPEYAYNFNYGYHLSADKFVALLHRHCTEQLGVQYKSAHVAGIQSHPDGAIAAIELAQGEPLAGDLFIDCSGFSARLIGQHYNVPFVSKRHILFNDTAVAAQVNHVGDQTPIASCTVATARPHGWVWDIALQSRRGIGHVFASELTTESQAEDALRAYISSDQSLSQKAIMPRTIRFDPGHRARFWEHNCVAIGVSAGFVEPLEATALVLIEKSAEWIADQLPRSRAAMAVLGKRYNEMTDARWSEIIDFIKLHYVLSERRDSHYWQAHADPASWTDSLQDALQLWQSQPPGLLETNLRQELFSSASKQYVLYGMGFRSQDWQPGGITSLRKPLIERVRREFLHNGDKLLAQLPTNREYFNRLKAASA

SEQ ID NO: 86923 - protein, 506 aa, Sphingomonas sp.
  REGION 1..506: note = tr|A0A4R2UDG1|A0A4R2UDG1_9SPHN Tryptophan halogenase; OS = Sphingomonas sp. PP-CC-3A-396 OX=2135655; GN = C8J40_103155 PE=4 SV=1
METGGTRIVVVGGGTAGWMTAAALVRLLPTACSVHLIESAEIGIVGVGEATLPHIRAFVERLGLDEADFMRATHATFKLGIDFRDFGAIGDSYIHPFGTFGRPLDDVGFHHYWLRLAAEGRAGPIGDYSVAVAAAKAHRFAIPDGPADDLAASFGYAYQFDATLFGPYLRRFAEAHGARRTEARIVSVDQDPVSGDVRAVRLDNGETVEGDLFVDCSGFRSLLLGNAMAEPWEDWSRWLPCDRAVAMPCTSPEGPIEPYTRATAKPAGWQWRIPLQHRVGNGYVYSSAHIADQAAADALVASVEGTPLADPRFLKFRAGRRSNSWVGNVVAIGLASGFLEPLESTSIYLAQMAITQLIELFPQRAGSEGISATDRTEFNRMVDMEYDRIRDFLILHYHATTRDDSDFWNHVRTMEVPTTLADKMELFRRAGRVTQYSEGLFLEPSWIAVYLGQGIIPKAWDQRADRPGLDGLDRAVASLRDHVAATATAMPDHAAFIARRNATIAA

SEQ ID NO: 86924 - protein, 399 aa, unidentified
  source 1..399: note = Xanthomonadaceae bacterium
  REGION 1..399: note = tr|A0A4Q6GWR6|A0A4Q6GWR6_9GAMM Tryptophan 7-halogenase (Fragment) OS=Xanthomonadaceae bacterium; OX = 1926873 GN=EOP92_05810 PE=4 SV=1
WAAAFHHFWLDSQRRGMPSEFGDFCLETVASRGDLFTLDTQPQVNYAYHFDAGLYAKFLRRIAESHGLVRVEGKIREVVQDPGDGSVTALVLEDGQRLEGDLFIDCTGFRGLLIEQTLHTGYEDWNQWLPSDRAVAVQTESVGPPVPYTRAIAHEAGWRWHIPLQHRVGCGLVFSSRHMSDDEARAKLLRDVGAPPIREPWLVPFRTGRRLKAWNKNVVSLGLASGFIEPLESTSIHLAISAVVRLIQLFPIDGIAPSLVDLYNEVSRDEMEHVRDFIILHYHATQRDEPMWKECREMELPESLAVRLRAWRERAHAWQDANELFRIDSWTHVLLGQGIAPGQPHPLTRAVTDNDLGKLLTALREPIGRTVAQMPSQQAFIDRYCKAGAEVWGTRKPPQ

SEQ ID NO: 86925 - protein, 508 aa, Sphingomonas sp.
  REGION 1..508: note = tr|A0A0Q4TR79|A0A0Q4TR79_9SPHN Tryptophan halogenase; OS = Sphingomonas sp. Leaf257 OX=1736309 GN=ASF14_11865 PE=4; SV = 1
MDAAPSADHIAQRVVIVGGGTAGWMAAAALARFAPASTRITLIESDAIGTVGVGEATIPGIRLFNQMLGLDEAEFLRATNGSFKLGIRFEGWSGEGSGYLHAFGSIGRGLGLVPFHHYWLRGGGAANPASLWGHMPSAQAAMAGRFAPDPGRPDLPSGLAWAYHFDASLYATLLRRHAEAAGVVRVEGRIASVAREPGGRVDHVVLDGGQAHAGDLFIDCTGFRALLIGETLAEPFDDWSEFLPCDRALAVAGERTSPLPPYTRAIAHGAGWRWRIPLQHRTGNGLVYDSRHLSEDEAAHRLLTALNGEAMGEPRRLRFTTGRRRRAWVGNCVALGLAAGFLEPLESTSIHLIQSGIARLLDYWPGTIPPAVEIDAYNRETAAEWLAIRDFLILHYHANTRPEPFWTERRAVPLPESLAARIALFRANGRFRREGEELFAEPAWVQVMIGQGIIPAAHHALADTLSADELDDFLSLTRRHAAQVAARLPTHDAFLAAHCAAPAPKVFA

SEQ ID NO: 86926 - protein, 255 aa, unidentified
  source 1..255: note = Xanthomonadaceae bacterium
  REGION 1..255: note = tr|A0A3C0HKL3|A0A3C0HKL3_9GAMM Tryptophan halogenase (Fragment) OS=Xanthomonadaceae bacterium OX=1926873; GN = DCM32_09180 PE=4 SV=1
MSLDNALRRIVVVGGGTAGWMAAALLATVLGRRIGITLVESEQIGTVGVGEATIPMIRLFNATLGLDEDEFVRETNGSFKLGIEFRDWLQPGQSYMHAFGPVGGPDRGLVHFWHHWARARLEGRAGALGDYVFNSVAGFAGRFMRPVAAAANSPLARLSYAFHFDATLYAAFLRRLAEARGVTRVEGRIVEVPLHPDTGFVEAVRTEAGVRVEGDLFIDCSGFRGLLIEEALASGYDDWSAMLPCNRAVAVPCAS

SEQ ID NO: 86927 - protein, 508 aa, Fulvimonas soli
  REGION 1..508: note = tr|A0A316IIF8|A0A316IIF8_9GAMM Tryptophan halogenase; OS = Fulvimonas soli OX=155197 GN=C7456_102241 PE=4 SV=1
MNAPPIKHIVIVGGGTAGWMAAAALAKVLGRDYAIRLVESEEIGTVGVGEATMTHLKLFNNLLGIDEIDFIRKTQSTFKLGIQFRGWARPGDAYIHGFGAIGHDLGLLPFHQYWLKARQQGWAQDIGAYSLNTAAAVQNKFMAPATDVPPNSPLASIAYAYHFDAALYARYLRDYAERHGVRRTEGKIAQVLLRPDDGFVEAVALESGERIEGELFIDCSGFRGLLIEQALHTGYVEFTQWLPCDRAVAVASENAGPPMPYTRATARPAGWQWRIPLQHRTGNGYVYSSAHVSDDEAVATLLKNLDGRALGEPRPLRFVTGMRKRCWNRNVVALGLASGFMEPLESTSIHLVQTGIARLLQLFPRKDFAPVLSERFNAQTAFEVERVRDFLILHYHATERADTAFWTQCRTMSIPDSLADNIRLFRDSGRFFRNAEEIFAQLSWVQVMLGQRIVPQGYHPMVDQVPDADLRRFVTGVGQVIANCVEAMPTQAAFIERYCAAPPIPVPA

SEQ ID NO: 86928 - protein, 504 aa, unidentified
  source 1..504: note = Xanthomonadaceae bacterium
  REGION 1..504: note = tr|A0A4Q2XTT9|A0A4Q2XTT9_9GAMM Tryptophan 7-halogenase (Fragment) OS=Xanthomonadaceae bacterium; OX = 1926873 GN=EOP89_02335 PE=4 SV=1
MRPTHVVIVGGGTAGWMTAAAVTRLLPNVCTVQLIESTEIGIVGVGEATLPHIRAFVERLGLDEADFMRATHATFKLGIDFRDFGAIGDSYIHPFGTFGRPLDDVGFHHYWLRLAAEGRAGPIGDYSLAVAAAKRHRFAIPDGAPDDLAASFGYAYQFDATLFGPYLRRFAEAHGARRTEARIVGVEQDAISGDVRTLRLDSGETVEGDLFVDCSGFRSLLLGDAMAEPWEDWSRWLPCDRAVAMPCTSPDGPIEPYTRATAKSAGWQWRIPLQHRVGNGYVYSSAHITDQAAAEALVASVEGTPLADPRFLKFRAGRRRNSWVGNVVAIGLASGFLEPLESTSIYLAQMAITQLIELFPQRARSEGISAIDRVEFNRMVDMEYDRIRDFLILHYHATTRDDSEFWNHVRTMDVPTTLADKMELFRRAGRVTQYSEGLFLEPSWIAVYLGQGIIPQAWDQRADRPGLNGLDRALASLRDTVASTANAMPDHAAFIAHRNATIAA

SEQ ID NO: 86929 - protein, 526 aa, Dyella japonica
  REGION 1..526: note = tr|A0A0G9H2D1|A0A0G9H2D1_9GAMM Tryptophan halogenase; OS = Dyella japonica DSM 16301 OX=1440762 GN=Y882_08985 PE=4; SV = 1
MARLKKVLIVGGGTAGWLAACYLAKAVNAADPNSVQVHLVESPDIGLLGVGEATFPSIRGTLAAIGLDERRFLVGATATYKQGIHYRHWVRPPGTPGADHFFHPFNAPSQRPGGPELLPYWLLGAAPEGMPFADAVSMQSTLVDHSKGPKRYKDPDYQGPLNHAFHFDAACFARVLAEHGQETLGVQRHVATVERAELDEHGAIARIVTKELGELTADLYVDCTGLKGMLIGNVMQSPFRSRADVLFADRAVAIQVPYAQPDSPIPSYTISTAQEAGWIWDIGLQKRRGAGYVYSSRHTDVERAEAVFRNYLGPVADGLKAFHIKFETGYRPEHWRKNCVAVGLAGGFVEPLESTGIALIELATYLLTHLLPNDTDTMEQAARHFNEMMIARYDRIIDFIKMHYCLSQRRDSKFWIDNADPVSIPQSLQDKLAQWKHRPPHRLDFVSDLEMFLVSSWQYVLYGMEFKTDLSPMRNLYPRVDEARQEFRNIQLAASQALHDLPDHRALVEQMCKEYRERAGIEAALV

SEQ ID NO: 86930 - protein, 535 aa, unidentified
  source 1..535: note = Tropicibacter phthalicicus
  REGION 1..535: note = tr|A0A238JEL5|A0A238JEL5_9RHOB Flavin-dependent tryptophan halogenase RebH OS=Tropicibacter phthalicicus; OX = 1037362 GN=rebH PE=4 SV=1
MAKPITSITIVGGGTAGWLAATFLRTKLARKIKVTLVESPNVPTVGVGEATVPNMPATLREMGLDDQEFFRRCNASIKMGVMFRNWNVDHKGDFISYMNPFITPPMIDGMEAGYFYHAYGAGKRDFIQSFCPLIDLLEAWKCPLSLGGKEDPMPKVGYAYHLDAVKFAGMLAEVGRERGVTHILDDVDDIELDERGHVAALQLRERGRHDVEFVIDCTGFQGFLLQKALGEPFESYADYLGNDRAMALQIPHQDPSKIPAATSSTALGAGWSWSVPLFNRVGTGYVFSSTHRTDDQARDEFMAHLGDKAPEGAEPRVIPMRVGRTRRAWVKNCVALGLSGGFIEPLESTAIHMIDMGLRWLLMYFPSQDFDEATQNRYNQIVDSMYNEVRDFICLHYQLGNRTDDPYWIDARTQLKIPDRLAENLELWKHRLPGPLDLPTSFLFTHTTFQAVLLGKRVYEMGYGDGAFSRPYAMNEKSWREFLRKSAAHTRATVAYKGAHRTILLALRGELGPKATVTKKLGQVEEDLSLEPGLF

SEQ ID NO: 86931 - protein, 503 aa, unidentified
  source 1..503: note = Sphingomonadales bacterium
  REGION 1..503: note = tr|A0A124II82|A0A124II82_9SPHN Tryptophan halogenase; OS = Sphingomonadales bacterium BRH_c42 OX=1734407; GN = APF82_08985 PE=4 SV=1
MSERIKSILVVGGGSSGWMAAALFAHLFQGLYRIRLVESEDIGTIGVGEATIPAIKKYNELLELDEAQFMRLTQGTFKLGIQFNDWDRIGSSYIHGFGVIGQDMGWLRCHQYWLKMHLQGETSDFANLSINTAAALQNRFMPARPDMGDSPIAHIAHAYQFDAALYARFLRGYAEDRGVTRTEGRIVDVSLKAEDGFIEAVTLESGERIEADLFIDCSGFRGLLIEQAMQTGFEDWSHWLPCDRALAVPCTRSENFTPYTKSTAHGAGWQWRIPLQHRTGNGHVYSSKFMDEAEAERILIANLDGEQLAEPNRIRFTAGKRRKVWNRNCVAVGLASGFLEPLESTSLYLIQSALIRLIRLFPDGRLDQANIDEFNRQTDFEYERIRDFIILHYKATERDDSEFWRYCRDMDVPATLERKIDLFRANGRIFREDEELFSEESWIQVMLGQGIIPKGYDPLVDVKSEPQIVQYLGNIENVIGKCVAVMPSHADFVEKYCKAEQRA

SEQ ID NO: 86932 - protein, 490 aa, Sphingomonas sp.
  REGION 1..490: note = tr|A0A0Q4L091|A0A0Q4L091_9SPHN Tryptophan halogenase; OS = Sphingomonas sp. Leaf38 OX=1736217 GN=ASE88_11680 PE=4; SV = 1
MTACLIAHRWRARGMRVTLVESPEIGIVGVGEGSTPQLKHFFDTLGIAEDAWMPACDATYKLGIGFDGWSDRAGYERYFHPFPTALDGHTASQFFYNTRALRTGRYVEAHPDRFLLPARLAAAYCAPQPAASFPFEVSYGYHFDAYKVGAFLAAHASGTLGVDHVQRRIACVERTPTGQIAALIDTDGGRIAGNFFVDASGFRSTIFTALDVPFVSYATALFNDRAVVMPTAHAPGAPIPSQTRATALSAGWAWHIPLTSRIGNGYVYSSRHLTEAQAEAELRAHVGTEAGDARHLKMRVGRVRESWSHNALAVGLAQGFLEPLEATALHLVIATVEAFLDGADAGGATDAVRSAFNTRIAARYDGVRDYIVAHYRLNQRRDDPTGYWAHARGIEALSDELKMLMSAWFTGADMVAAIERAGLARYYSAISWHCLFAGYGTFPEPARLIPPGADIDPVDMTRIDDFLTRCAMNFGSHASRLRPADLKDIA

SEQ ID NO: 86933 - protein, 513 aa, Alteromonas sp.
  REGION 1..513: note = tr|A0A2G2PK04|A0A2G2PK04_ALTSX Tryptophan halogenase; OS = Alteromonas sp. OX=232 GN=COB03_01390 PE=4 SV=1
MTPVNSVVIVGGGTAGWLTAGLLAATHSKQGSTGARLSVKVIESDSIHPIGVGEGTWPTMRSTLAKIGIEEAALVQQASATFKQASKFVNWHTEGQRTGYYHPFSAPQGSASVDITPYWLYNNALKEYASDVCFQPTLCEQGLAPKLTANSKQSFSANYGYHLDAGKFISVIREHCKKVLGVEHIIDDVTDVATDDAGIKHVVTKNNDHIRGDIFVDCTGFSARLIEKALDVPMEDASSVLFSDSALVHQIAYSDEHQPIACHTLSTAQEAGWIWDIGLQNRRGTGYVYSSEFQSDDEATQTFMAYLKSINPNEELPSTFRKINYKTGYRKRFWEKNCVAIGLSSGFLEPLEASSLMLIEQSAIQLAEQLPAYTQVMPHVASRFNRALTNKWQSTIEFLKLHYVLSNRNEDFWLANRSPQSIPQRLASLLEEWQYRPILDSDFTDTDEVFSAQSYRYILYGMSHKTNLSQYVRSMSKYEGADKQLQLNKALIAQLKARLPSHRGLIDTMLNKH

SEQ ID NO: 86934 - protein, 505 aa, Alteromonas sp.
  REGION 1..505: note = tr|A0A359K3N6|A0A359K3N6_ALTSX Tryptophan halogenase; OS = Alteromonas sp. OX=232 GN=DEH24_08665 PE=4 SV=1
MSEHRIKKIVIVGGGTAGWMAAAAMSKLLHDDSITIELIESEQIGTVGVGEATIPHILYFNRLLGINENDFVKFTNGTFKLGIEFVDWGQTGESYIHPFGPYGMDMEGIHFHHMWLRQQKMGQAKPIDEFNLQILAAQANKFQRAQVELQGSPLSTIAYAFQFDAMLYARHLRGIAEANGVVRTEGKITRVNQHPENGHIASVDTDNGHHIEGDLFIDCSGFKGLLIEQTLNSGYEDWSHYLPCNRAIAVASNKLDELTPFTRATAKSAGWQWRIPLQSRTGNGHVYCSKFMDDDTALQSLYADLNSEPISEPNYLRFKAGIRKKPWNKNVVSLGLASGFLEPLESTSIHLIQTAIARLMTNFPDKLFNQHDIDYYNERTRLEYEQVRDFLILHYKATRRNDSPFWHYCRTMDIPDSLHKRIEIYKQNARLYRHDNELFNHVSWFAVMHGQGIHPERYHPIADMLPDDELHRRMEEIHTVTGKCLQVMPGHEDFIAQHCKASSSG

SEQ ID NO: 86935 - protein, 497 aa, unidentified
  source 1..497: note = Xanthomonadaceae bacterium
  REGION 1..497: note = tr|A0A4Q6GU55|A0A4Q6GU55_9GAMM Tryptophan 7-halogenase OS=Xanthomonadaceae bacterium OX=1926873; GN = EOP92_09010 PE=4 SV=1
MSSMGKPVRRVVIAGGGTAGWMAAACMSKVLGKRLDITLVESDEIGTVGVGEATIPTLLNFHSLLEINEQEFMAETKATFKLGISFENWRNVNEDYIHSFGLTGTDHWTAGFQHFWHKGRERGLAGEYGDYCLELRASQENKFAHLPQHGMNYAYHLDASAYARYLRKFSERFGVQRIEGKIVDVTTSTMTGQVRSITLDSGVDIEGDLFIDCTGFRGLLIGQAMGVEYENWSEWLFNDSAAAVQTASVGDAVPLTRSIAHPFGWQWRIPLQHRVGNGIVFSSRYVEEDAAVQTLMGNIAGEPLMKPRVLKFTPGQRRQVWKGNVVAIGLSSGFLEPIESTSIHLIQRSIIRLMQIFPTSGIVDSDVAEFNKQAAAETQHIRDFIILHYKVNNRIDAPYWTDARNMAVPASLQHRIDLFRETGRVFREPTELFAENSWIQVMLGQGIMPYRHHQTADLMGDEELSQFLGAIKGRIDRTVASLPQHQAYVERYCAAPK

SEQ ID NO: 86936 - protein, 532 aa, Streptomyces sp.
  REGION 1..532: note = tr|A0A5B7V503|A0A5B7V503_9ACTN Flavin-dependent tryptophan halogenase RebH OS=Streptomyces sp. YIM 121038; OX = 2136401 GN=rebH PE=4 SV=1
MDDNRIRNLVILGGGTAGWMSACYLGKALGPQVNITLLEAPAIPRIGVGEATIPNLHKVFFDFLGLAEEEWMRECNASFKAGIRFINWRTPGAGESAARPAADGRGDHFDHLFGLLPDHENLPLSHYWTHRRASGATDESFDRACYVQPPVLDHNLAPRHLDGTRWTNYAWHFDANLVADYLRRFATGKLGVAHVKDRYTHAEMDHRGFVTAINTETGNRLEADLFVDCSGFRSLLMNQVMREPFLDMSDYLLNDSAVATAVPNDDEKDGIEPYTSAIAMSSGWTWKIPMLGRFGTGYVYSSRFQSVDSATAEFCRMWNLDPETQPLNQIKFRVGRNRRAWVRNCVGIGLSSCFVEPLESTGIYFIYASLYQLVKHFPDKNFEPILVKRFNTEVEKMFDDTRDFIQGHFGFAPRNDTPFWRACKELEFSDDFVEKVNMYKAGLSVETPVVDESNYYGNFEAEFRNFWNNSSYYCIFTGLGMLPDHPLPSLSLRREAVEASGAVFADIKRRQAELVDTLPSTYEYLRRLHHGQ

SEQ ID NO: 86937 - protein, 79 aa, Alteromonas sp.
  REGION 1..79: note = tr|A0A3D0Q0R9|A0A3D0Q0R9_ALTSX Tryptophan halogenase (Fragment) OS=Alteromonas sp. OX=232 GN=DEP33_01795 PE=4; SV = 1
MSHSANPVNTPEVKRVVIVGGGTSGWMCAAAIARIAPPDTRITLVESEDIGVIGVGEATIPTLMEFNDFLGIKEHDLLR

SEQ ID NO: 86938 - protein, 524 aa, Alteromonas sp.
  REGION 1..524: note = tr|A0A2D5C090|A0A2D5C090_ALTSX Tryptophan halogenase; OS = Alteromonas sp. OX=232 GN=CL593_07025 PE=4 SV=1
  VARIANT 84: note = Xaa can be any naturally occurring amino acid
  VARIANT 154: note = Xaa can be any naturally occurring amino acid
  VARIANT 305: note = Xaa can be any naturally occurring amino acid
  VARIANT 396: note = Xaa can be any naturally occurring amino acid
MSEVNRIVIVGGGTAGWLTAGLLAATHSGADNNGQRLSVTVIESDAVPPIGVGEGTWPTMRRTLATIGISEAELVTQASATFKXASKFVNWYSDNGRNQDNSYYHPFSAPQGSATLDITPYWLTTAQTHSHYAQDVCFQPALCDAGLAPKLTAXGKQSFTANYGYHLDAGQFISLLRRHCVNRLGVTHLVDKVTQVNTQADSPEAGIVSLQTQQSGKIEGDLFVDCSGFSGLLINKALGVKLKDASHHLFANSALVCQAPFENETAPIPCHTLSTAQEAGWIWDIGLQHRRGTGYVFSREHQDVXRAADTLSRYLSQVAPSMATPDAFREIQFKTGYRETFWHNNCVAIGLSSGFLEPLEASSLMLIEQSAMLLAEQLPANTTIMSKVSQRFNSRXTYLWERTIEFLKLHYVLSNRPEAFWQDNKQRGSIPERLADLLEEWRYRPILDSDFPQANEAFSAQSYRYILYGMGPKTDFNWDMSTTERSLKHHNFATKQGQLNQTLIGQLKERLPSHRGLVESFFQS

SEQ ID NO: 86939 - protein, 525 aa, unidentified
  source 1..525: note = Xanthomonadaceae bacterium
  REGION 1..525: note = tr|A0A4Q6GTB3|A0A4Q6GTB3_9GAMM Tryptophan 7-halogenase OS=Xanthomonadaceae bacterium OX=1926873; GN = EOP92_08995 PE=4 SV=1
MASTTIRHVVIVGGGSAGWLTAAVLASSFQALEAGGLRVTLIESPDVPAIGVGEGTWPTMRDTLRAAGLSESAFFRECDAAFKQGSRFNGWVTGSDSDYYFHPFVLPQGWGDADVAGRWIERHADVPFADLVSYQPHLCVHGRAPKQAATPEFAAVANYGYHLDAGKFGLFLKKHCLEKLGVHFVPDHVTGIRSHDNGDIAALYTKAHGELAGDLFVDCTGMQSLLLGKHYEVPFLSQRGVLFNDSALASQVPYAREDDPIASQTTSTAQQAGWIWDIGLPTRRGIGHVYSSAHTSDEEAERALRAYIRATGGPEDIPTPRKLSFQPGYRERFWHRNCVAIGLSAGFIEPLEASALAMVELSAAMLADEMPVTRAQMDISAARFNETFTYRWERVIDFLKLHYVLSRRSGAEDATGYWRDNRSSATIPGRLADLLALWEHRPPSRYDFNRIQEVFPAASYQYVLYGMGFQPAPGLARRARPGEPDSEMADGFFRQAADLTRRMLPALPDNRTLIAHIVRHGLPRG

SEQ ID NO: 86940 - protein, 130 aa, unidentified
  source 1..130: note = Xanthomonadaceae bacterium
  REGION 1..130: note = tr|A0A4Q2XLN2|A0A4Q2XLN2_9GAMM Tryptophan halogenase (Fragment) OS=Xanthomonadaceae bacterium OX=1926873; GN = EOP89_10285 PE=4 SV=1
MSEPAARRLVIVGGGTSGWMAAAAFGKTIGRSARITLVESGAIGTIGVGEATIPIIDTFHRVLGLSPLDIVRHTKATFKLGILFDDWQRIGASYFHPFGKYGVDHAGISFMRQWLRLNADGGLPDYGRFN

SEQ ID NO: 86941 - protein, 341 aa, Alteromonas sp.
  REGION 1..341: note = tr|A0A349Z8C7|A0A349Z8C7_ALTSX Tryptophan halogenase (Fragment) OS=Alteromonas sp. OX=232 GN=DCW59_15700 PE=4; SV = 1
MAQKKTRVVVAGGGTAGWLTAFSLVTRLGNVLDITLVESDQIGTVGVGEATIPTMCNFHQLMGINEQEFMAATNATFKLGIQFVNWANEGDSYIHSFGEIGQRSWMAEFHEFWMEAVANGQQDSLEDYCLELKAAKANKFATKIGNRPLNFAYHLDATAYAAYLRKKSEAAGVTRCEGKIQSVDTDPQNGNLTRLTLDTGIAIEGDVFIDCTGFRGLLIGEHLGVGYEDWSHWLAADRAIAIQTQSTEAPKPYTIATAHKAGWQWRIPLQSRVGNGIVYSSRFLSDDDALATLKQNIDGEMLTEPRYLKFKTGRREKAWHKNCIAVGLASGFLEPLESTSI

SEQ ID NO: 86942 - protein, 520 aa, Pseudoalteromonas sp.
  REGION 1..520: note = tr|A0A269PI66|A0A269PI66_9GAMM Tryptophan halogenase; OS = Pseudoalteromonas sp. NBT06-2 OX=2025950 GN=CJF42_23290; PE = 4 SV=1
MNKPIKNIVIVGGGSAGWITAGLLAAEHKTNNDNAITITLIESPEIKTIGVGEGTWPSMRNTLDKIGIKESEFIAQCNASFKQGSKFVNWQGIQNNDIYYHPFMTPEGYTQVNLHHGWQHSNSNKSFADTINMQSHICHRGLAPKQASTPEYASVTNYGYHLDAGKFSHMLQTHCTKVLGVKHVIAHINQIHNDENDYITHIEISPKGRISGDLFIDCSGLNALLIDKHYKIPFIDKNHILFNDSALAVQAPYCDPDEDIASATVSTAQSAGWVWDIGLSNRRGIGYTYSSKHTCDTEAEKTLKAYLSETINDQKIQNLNIRKLNFKPGHREKFWHKNCIAVGMSSGFLEPLEASSLALVELSANMISEELPANFEHMNIIAKRFNERFEYRWQRVIEFLKLHYVISKRTDSQYWLDNKTPESIPKRLKELLTLWQYQPPNINDFVQNQEVFPSASYQYVIYGMGFNTTAYPTDKAFNNIALAQRYFAHNQETKLKYLNALPSNRELLNHIKNNCLQNTG

SEQ ID NO: 86943 - protein, 172 aa, unidentified
  source 1..172: note = Xanthomonadaceae bacterium
  REGION 1..172: note = tr|A0A4Q2X5U2|A0A4Q2X5U2_9GAMM Tryptophan halogenase (Fragment) OS=Xanthomonadaceae bacterium OX=1926873; GN = EOP89_15880 PE=4 SV=1
MQQYLKNIVIVGGGTAGWMTAAALSSLLEPRDVTITVVESDTIGTVGVGEATIPDILAFNQMLGIDEAEFMAATDATFKLGIEFVGWGRADSRYFHPFGQHGADMRGIDFHQYWMRSRLDGNPAPIDTYSLCAVAAQADRFTLPDPNPRSVRSQIRYAYHFDATRYARFLRH

SEQ ID NO: 86944 - protein, 224 aa, Alteromonas sp.
  REGION 1..224: note = tr|A0A3D0SFH0|A0A3D0SFH0_ALTSX Tryptophan halogenase (Fragment) OS=Alteromonas sp. OX=232 GN=DEO96_05450 PE=4; SV = 1
VAFLKRFCSNLGVTHCDGVISQVLQHDNGDIKALRLASGELIEGDFFIDCTGFKGLLIEETLHTGYEDWSHWLLCDSACAVQTTSTEPAAPFTRSAAHPAGWQWEIPLQHRTGNGNVYSSAFMDDNAASEQLMQNVKGEAITTPRTLRFKTGRRNKTWHRNCLALGLASSFVEPLESTSIHLVIMGITRFMQLFPHGGNDQALADEYNQQTQLELERIRDFIIL

SEQ ID NO: 86945 - protein, 350 aa, Alteromonas sp.
  REGION 1..350: note = tr|A0A3D0T2G0|A0A3D0T2G0_ALTSX Tryptophan halogenase (Fragment) OS=Alteromonas sp. OX=232 GN=DEP76_09335 PE=4; SV = 1
MTTPPKQIVIAGGGTAGWIAAAALARKMGPLVNIRLVESSTIGTIGVGEATIPPLRTFHKLLQIDEQAFMRATAATFKLGIRFENWGRIGEQYIHSFGMTGQQSWLAEFVHFYLSAKARGLEGDYGDYCFELEAARQHKFATSAQSNIQYAYHLDAGNYVAFLKRFCSNLGVTHCDGVISQVLQHDNGDIKALRLASGELIEGDFFIDCTGFKGLLIEETLHTGYEDWSHWLLCDSACAVQTTSTEPAAPFTRSAAHPAGWQWEIPLQHRTGNGNVYSSAFMDDNAASEQLMQNVKGETITTPRTLRFKTGRRNKTWHRNCLALGLASGFVEPLESTSIHLVIMGITRFM

SEQ ID NO: 86946 - protein, 511 aa, Sphingomonas sp.; identical to SEQ ID NO: 83728
  REGION 1..511: note = tr|A0A0Q4FW04|A0A0Q4FW04_9SPHN Tryptophan halogenase; OS = Sphingomonas sp. Leaf16 OX=1735681 GN=ASE65_00690 PE=4; SV = 1

SEQ ID NO: 86947 - protein, 187 aa, unidentified
  source 1..187: note = Xanthomonadaceae bacterium
  REGION 1..187: note = tr|A0A4Q2XS35|A0A4Q2XS35_9GAMM Tryptophan 7-halogenase (Fragment) OS=Xanthomonadaceae bacterium; OX = 1926873 GN=EOP89_04195 PE=4 SV=1
MTGQGERLHGERAIRSIVIVGGGTAGWMAAAMLARRLENQPVRITVVESSAIGTVGVGEATVPGIRDFFRELGVTEREVMAATKGTAKLGIDFVDWKRPGHRFFHPFGLYGMRSRGVAFHHYWQKLRSAGDPVELADYCLATVMAKRNLFMLPTDRPVHDLLFFDWAVHFDAGLFARFLAARSTAQG

SEQ ID NO: 86948 - protein, 535 aa, Massilia sp.
  REGION 1..535: note = tr|A0A430HLW4|A0A430HLW4_9BURK Tryptophan 7-halogenase OS=Massilia sp. SOD OX=2495579 GN=EJB06_13025; PE = 4 SV=1
MKAFHNVLIVGGGTAGWLTACYLARTLGAAGVGAAGVGAAGVGAASVGAASAGASGVSITLVESPEIGIIGVGEGTFPSIRSTLAAIGIDEARFVRDCEATFKQGVRFNDWVRPAGAPGADHYFHPFSQPSQRQGGPELLPHWLQGTAGAGVAFAQAATMQKRVADAAHGPKRLADADYSGPMNYAYHFDAGRFAALLAEHGRSLGVRHVQANVERVELDAGGAIACVHTREHGALGADLFVDCTGFRAALIGEALGSPFRKMDDVLFVDRALALQVPYPAPDTLIPSYTISTAHEAGWTWDIGLQRRRGIGYVYSSRHTTDERAEQVLRRYIGAAADGLAPRQLKLNIGYREVQWVKNCVAVGLSGGFLEPLESSGIGLIETAAYLIGHLFPFNGDTAPVAAQYNRLMRERYERVVDFIKLHYCLSQRTDSAFWTDNTDPRSIPQSLRDKLAMWRCRAPHRLDFVADVEMYPTSSWQYVLYGMEFATSLHPSACHPARREEAAAEFAMIAKLASHALADLPPHRALVEHLCQRR

SEQ ID NO: 86949 - protein, 193 aa, unidentified
  source 1..193: note = Xanthomonadaceae bacterium
  REGION 1..193: note = tr|A0A4Q2XYQ0|A0A4Q2XYQ0_9GAMM Tryptophan 7-halogenase (Fragment) OS=Xanthomonadaceae bacterium; OX = 1926873 GN=EOP89_00070 PE=4 SV=1
MRDGTRRLMQQDRLERVLVAGGGITAWSAAAALKRRAPFLDVTILNCAPSPDALADRIACTLPSLLGFHDDLGIGPADGIVRTGSGYRLGTLFSGWATGLPDFVHAYGRYGRAFGPTAFHLHWARSAQEGSTAPFDSHSPAAVLARAGRFAPPIPETPFADHEYGLTLDLPRYRTMMRAFALHVGVREIVGEI

SEQ ID NO: 86950 - protein, 510 aa, Sphingomonas sp.
  REGION 1..510: note = tr|A0A4R2U836|A0A4R2U836_9SPHN 2-polyprenyl-6-methoxyphenol hydroxylase-like FAD-dependent oxidoreductase OS=Sphingomonas sp. PP-CC-3A-396 OX=2135655 GN=C8J40_10963PE=4 SV=1
MIDGRGQHIVILGGGTAGWMTACLIAHRWRDRGVRVTLVESPEIGIVGVGEGSTPQLKHFFDTLGIAEAEWMPACDATYKLGIGFEGWSDRAGYEQYFHPFPTALDGHTAPQFFYNTRARRTGRDVAAHPDQFLLPARLAAAHCAPQPAANFPFEVSYGYHFDAYKVGAFLAAHATETLGVVHVQRRIASVERASTGDITALIDTDGERIAGNIFVDASGFRSTIFSALDIPFVSYADALFNDRAVVMPTAHAPDASIPSQTRATALSAGWTWHIPLTSRNGNGYVYSSRHLTEAQAEAELRAHIGADAGEARHLEMRVGRVRDSWSHNALAVGLAQGFLEPLEATALHLVIATVQAFLDMVDQDGATDAVRAAFNTRIAARYDGVRDYIVAHYRLNQRHDDPTGYWAEARGIESLSDDLKMLMSTWFTGADMVAAIDRAGLGRYYSAISWHCLFAGYGTFPNAARLIPPGADIDLIDLPKIDDFLTRCASNFGSHASRLRHLADHKDTV

SEQ ID NO: 86951 - protein, 498 aa, Alteromonas sp.
  REGION 1..498: note = tr|A0A359K9D5|A0A359K9D5_ALTSX Tryptophan halogenase; OS = Alteromonas sp. OX=232 GN=DEH24_18700 PE=4 SV=1
MNSTQPATKPHVVIAGGGTAGWMTAAALARKLGPLVRITLVESSDIPTIGVGEATIPPLRVFHQLLGINEAEFMRATSATFKLGIEFADFGQLNQRYIHSFGQTGQSSWLAEFIHFWREGLDRGIATDYGSYCLELEAAKANKFYTSAQNAPLNYAYHLDAGAYATFLKHISVQAGVNHVVDTIEQVTLNDTGNIDALQLRQSGSLHGDLFVDCTGFRARLLGESLDVGYEDWSHWLFCDRALAVQTELTPPLKPYTIASAHSAGWRWEIPLQHRMGNGFVYSSQYLDETTAHDTFTALLRNKPLQDVRSLQFTTGRRLKAWHKNCVAIGLSSGFVEPMESTSIHLIVMGITRLMQLFPYSGDYQHLQDEYNAQTQIELERIRDFIVLHYNVTQRDDSAFWRACKDMVIPDSLSERIELFKEHGHAFQKANELFRVDSWSQVMLGQGLLPKNWHPAAKMMSDEQLAGALKKGQMEISQRVAQLPDHEAFVAQYCGQNR

SEQ ID NO: 86952 - protein, 208 aa, Alteromonas sp.
  REGION 1..208: note = tr|A0A3D0SI78|A0A3D0SI78_ALTSX Tryptophan halogenase (Fragment) OS=Alteromonas sp. OX=232 GN=DEO96_08200 PE=4; SV = 1
MSHSANPVNTPEVKRVVIVGGGTSGWMCAAAIARIAPPDTRITLVESEDIGVIGVGEATIPTLMEFNDFLGIKEHDLLRECQGTYKLGIDFVDWYQKGQSYFHPFGFYGRDTPEFSFHQLWLRLNAMAAKGEIPADAPGIISDYNLCTVAAMQGRFAPPQGGADTILSTMRYAYHFDSARYGQMLRRYAEQRHVERIEGIVNSVEQDH

SEQ ID NO: 86953 - protein, 495 aa, unidentified
  source 1..495: note = Thalassotalea sp.
  REGION 1..495: note = tr|A0A1Y5GMK7|A0A1Y5GMK7_9GAMM Tryptophan halogenase; OS = Thalassotalea sp. 42_200_T64 OX=1856287 GN=A9Q98_11590; PE = 4 SV=1
MNNSKLQNVVIAGGGTAGWMAAAALSKLLGKNLNVTLVESDEIGTVGVGEATIPPIRTFHKLLGINEQEFMQATNATFKLGIGFENWGQKNDSYVHSFGVTGKECWAGEFHHFWLHGLNKGIQSDFGDYCFELQAAKAGKFALSKQMPINYAYHLDATVYAQYLRKFCEKLGVNRIEGKISKVNKNPSSGEITSLTLESGATINGDFFIDCTGFKGLLIEQALHTGYEDWSHWLPCDSAVAVQTKAVEAPIPYTKSIAHDMGWQWRIPLQHRVGNGMVYCSRYESDQSATEKLLANIEGELITEPRVIKFKTGRRRKGWNKNCVALGLSSGFIEPLESTSIHLIMSGIIRLMRLFPFEGINQSAIDEYNSKLNSELEAIRDFIVLHYHVTKRQDSEFWNYCRNMEIPASLAHKINLFKETGRVFLDDGDIFRVDSWTQVMLGQGLMPEQYHQIANIMSDDELNRFLHGIKASISNAVQQLPSHDEFIQSYCKSAS

SEQ ID NO: 86954 - protein, 777 aa, Methylobacterium sp.
  REGION 1..777: note = tr|A0A0X1SHU1|A0A0X1SHU1_9RHIZ Tryptophan halogenase; OS = Methylobacterium sp. AMS5 OX=925818 GN=Y590_11615 PE=4; SV = 1
MAALYLKRVLRRAGWTVTLVGSAPAAGASAALATRPAFTRFLTGFGIDEAIFMRRCAATYRLASRYDDWFAEGQGHWHPFGACGPRIAGRDLFHYWMKLRQESTEEGAEVEAGSYADYAPQALMAAAGRGPRPMADRSSLTESGDYGYHLDRTALVRFLRDLALSEGVRGVAGRVREIERDLYGDVGALVLDGGQKVEGDIFLDCTGATGQLIGTALGEAWVAGSGPGNRVARLSLPRSPEVPPFTAYRGRAEGWTASLPLADRTEHLYVYDSRTTPPDAAAATLRCAFDSEAGIVDAELRHGRRASPWQRNVVALGAAAGAVEPLLGFDLDLVLAGLETFLATLPRQGDGGDVLRRAYAARLNRFHDDAAEAVAAHYVLGRRSEPFWAAARAVTIPDRLADRLDLYELAGHVALSEEAPFSEGDHYLLFSGADFLPRRPFAPVDVADGREIARLLASIRAQSAQIAEAMAPHGRLMDALHGKVPVAGPSVRIAAASAPVGPAGLRRTPEGARLADLVAGLGQPFGYERSVKASPAGLQTDRFLMSLHRASLGLKPETTLDRLAAGLGLPERERAEAAGLIGGADILHLGYEDGPPGALYKLYVEWSSRTDAAWTGADEAGAEPMLVHRAYKWTPGGTHPPVVTLYHWPRVRGPEEIGARLNRMAGEWGAAGAPARDTAHAILRLAQERGRGAVHYLEAREEPGRRLSYDLNLYACGLTVADAEPLLGQAFVDLGVPREAAARVLRERLQETLGHVAGGVGRDGQPFITVYSGVAGG

SEQ ID NO: 86955 - protein, 513 aa, unidentified
  source 1..513: note = Xanthomonadaceae bacterium
  REGION 1..513: note = tr|A0A354YCW6|A0A354YCW6_9GAMM Tryptophan halogenase; OS = Xanthomonadaceae bacterium OX=1926873 GN=DDZ67_11465; PE = 4 SV=1
MHEDFETTSIATAPIRRVVIAGGGTAGWMAAAALSKVLGKTLEITLVESEEIGTVGVGEATIPSLATFHRLLEIDEREFLSATQGTIKLGISFENWRTAQHRYIHSFGTTGKDHWTAGFQHFWLKGRERGLAGSYDDYCIELQAALQDRFAHLPNHRMNYAYHLDASYYARFLRQLAERHGCRRVEGKIVEVTTDPASGFIGALRLERGEVIEGDLFVDCTGFRALLIGQTLGVGFEDWSHWLLNDRAIATQTTAVRDAVPYTRAIAEPWGWQWRIPLQHRVGNGVVYSSKYVADDEAKQRFLASVEGEVIKDPWPVRFRPGRREQCWAKNCVALGLAGSFIEPLESTTIHLIQRGITRLMQSFPAVISQVGIDEYNRQLNDELQHVRDFVVLHYHATERRDSPYWEYVANMPLPATLQHRIDLFRETGTVFHVPNELFAENSWIQVMMGQGIVPQQRHRTPDLMGDAELSHFLGSIKATVDRSVEQLPSHMDYLRRYSPATPPARPAAPVAG

SEQ ID NO: 86956 - protein, 503 aa, unidentified
  source 1..503: note = Xanthomonadaceae bacterium
  REGION 1..503: note = tr|A0A2W4TMC8|A0A2W4TMC8_9GAMM Tryptophan halogenase; OS = Xanthomonadaceae bacterium OX=1926873 GN=DCF27_09870; PE = 4 SV=1
MEGQVRDVVIVGGGTAGWMTAAALSKVLGPQHRIRLIESEEIGTVGVGEATIPMIKLFNQALEIDESDFIRETKGSFKLGIEFVNWGRLGDSYLHGFGKIGQDLGVIPFYQHWLKLHQAGQAGPLDDYSINTAAARANKFMPPLTDRPNSPMADIAYAYHFDASLYARYLRGYAEARGVRRTEGKVAEVKQRAEDGFVEAVVLEGGERVDGQLFVDCSGFRGLLIEQALHTGYQDWTHWLPCDRAMAVPCANGGPLTPYTRSTARSAGWQWRIPLQHRVGNGYVYSSQFISDDEAASTLLANLGGEPLATPKPLRFTTGKRNKFWNKNVVAIGLASGFMEPLESTSIHLIQSGIARLTAFFPHGGFDQVDVDEFNAHSHFEFDKIRDFLILHYHATERSDTPFWDYVRTMSIPDSLQNKMELFRSNGRVFREHTEMFAEPSWVQVMHGQRVHPRGYHPLVDNLGDDKLREHCDTVRGVIANCVRAMPTHDDFIAKHCAKPKAA

SEQ ID NO: 86957 - protein, 277 aa, unidentified
  source 1..277: note = Xanthomonadaceae bacterium
  REGION 1..277: note = tr|A0A4Q2XXP3|A0A4Q2XXP3_9GAMM Tryptophan 7-halogenase (Fragment) OS=Xanthomonadaceae bacterium; OX = 1926873 GN=EOP89_01950 PE=4 SV=1
YLDCSGPVAALRSALDTQWDDWRTWLPVDRLLLGTTSAQLPTPTDDLIAVPVGWRFVIPLRDRTLTGLAFAADQTPDSSARRILPAGEVIVPISPGTRREPWRHNVLALGDAAVMLDPLADANLHLAHAAILRAIRLLPGTDFAPTELAEYNLHAHRQAERVRDFQAAHFLSTGRTRGPFWKRASRLARPASLAHTLEQFAHRGRLPFYEDESFDKDDWHGLLLGLGMIPRTPDPIASAIAPEMIAGTLARLASATATVPTQLPPYPAYLAQLERGR

SEQ ID NO: 86958 - protein, 208 aa, unidentified
  source 1..208: note = Xanthomonadaceae bacterium
  REGION 1..208: note = tr|A0A4Q2XTI6|A0A4Q2XTI6_9GAMM Tryptophan 7-halogenase (Fragment) OS=Xanthomonadaceae bacterium; OX = 1926873 GN=EOP89_02970 PE=4 SV=1
MRKRILIVGGGTAGWLTAGYLAKRLGADLAGGVSITLVESQDIGILGVGEGTFPTIRRTLATIGIDEAELIRRCGATFKQGAKFVHWRHAPGQGRPDHYSHPFQVADASDGLDLLPYWLLGHGGTENWDEVTNPQKKAADRHRAPKLASNPDYVGPLNYAFHFDAVALAGLLREQAVKNGVRHLTDTVNEVLLDADGAIGGVRTERNG

SEQ ID NO: 86959 - protein, 506 aa, Massilia sp.
  REGION 1..506: note = tr|A0A430HRK6|A0A430HRK6_9BURK Tryptophan 7-halogenase OS=Massilia sp. SOD OX=2495579 GN=EJB06_03110; PE = 4 SV=1
MTDQRIKQIVIVGGGTAGWMSAAALSQLLPVGHQYRLIESDQISTIGVGEATIPSIRNFNLHLGIDENDFIRATQGTFKLGIEFVDWGRQGSNYIHGFGSVGRDQPTANFFHYWLKMHQAGQADSLEPYAINTMAARLGKFSRGRPDLPNSPLSDLSYAFHFDAGLYARYLRGYSEARGVRRTEGRIVETMLHPDGSIAALLMENGERIEGDFFLDCSGMAGLLIEQALHTGYEDWSGWLPCDRAIAVPCESHGPLAPLTRSTARSAGWQWRIPLQHRTGNGHVFSSKFMSADEAQAILMSNLDGQPLAEPRLLKFTTGKRKRAWNKNCVAIGLSGGFMEPLESTSIHMVKTALMRLISFFPDRGFDQVDIDTFNRLCDKEYEQIRDFLILHYKVSTRDDSAFWRYCRDMDVPLTLQRKLDLFASHGRILRENEELFPEDSWLQVMHGQGLRARGYNPVVDQRAPDEIADFLQGTQAVIRKCVDAMPSHEDFIKANCQAAPMRRAA

SEQ ID NO: 86960 - protein, 515 aa, unidentified
  source 1..515: note = Thalassotalea sp.
  REGION 1..515: note = tr|A0A1Y5GM40|A0A1Y5GM40_9GAMM Tryptophan halogenase; OS = Thalassotalea sp. 42_200_T64 OX=1856287 GN=A9Q98_11595; PE = 4 SV=1
MDKAIKKIVIVGGGSAGWITAGVIGAQHPGIDVTLIESPEVNSIGVGEGTWPSMRNTLSKIGISEIEFLSQCCASFKQGSKFVGWCNGQKDDFYYHPFMTPDGYTQVNLHAAWKARNDNKAFADTVNVQSQVCQAGLAPKQMSTPQYAAVTNYGYHLDATKFAALLQQHCTTKLKVKHILDHVERVIPADNNDIKAIHSKHNGDIEGDLFIDCTGTSSLLLGKHYGVKFIDKKHILFNDCALAVQVPYPQPNSPIASATISTAQSAGWIWDIGLPTRRGIGHTYSSAHMDDDNAEKLLRDHIAKTTSKEISKQLVPRKLTFRPGHREIFWHKNCVAVGMSAGFLEPLEASALALIELATTMISEQLPVTRAHMDIVAKRYNERFQYRWNRVIEFLKLHYVLSARDDSQYWRDNKLAASIPGHLQELLQLWQHQAPSRYDFIQNEEVFPSASYQYVLYGMHFNTQTRNYNSAIDNTEMADKILDDGQVKLQKYLAGLPTNRELVDYLCQQYTLKQA

SEQ ID NO: 86961 - protein, 310 aa, Alteromonas sp.
  REGION 1..310: note = tr|A0A3D0Q4V1|A0A3D0Q4V1_ALTSX Tryptophan halogenase (Fragment) OS=Alteromonas sp. OX=232 GN=DEP33_07210 PE=4; SV = 1
LLNKVLGNSVTIELVESEQIGIVGVGEATIPPIQTFNRFLGIDEKAFLRETQGTIKLAIKFENWRKPGESYYHTFGAPGTTMGFCSFHHYWLKAKEAGLDKSFWDFDLNYLACQQGKFNKINTQNPLYDMPYAYHFDSALYGQFLRRFAEQGGVKRTEGIIEHVQQHPQSGFITGLQLTDGRQIEGDLFIDCTGLNGLLIRKTLGVNYEDWSHWLPADSAQAVPSERFDKTLPYTRSIAHSCGWQWRIPLTHRNGNGIVYSSQFTTDEQANETLLGNLDTQALGEPRTIRFNTGRTDQQWCKNVVAIGLS

SEQ ID NO: 86962 - protein, 121 aa, unidentified
  source 1..121: note = Xanthomonadaceae bacterium
  REGION 1..121: note = tr|A0A4Q2X3Z3|A0A4Q2X3Z3_9GAMM Tryptophan halogenase (Fragment) OS=Xanthomonadaceae bacterium OX=1926873; GN = EOP89_16670 PE=4 SV=1
MQKQQTGTKSDIIRTIVVVGGGSAGWIAAARLAAKGARGSDDIVVKLVESATVPTIGVGEGTWPTMRNTLAKIGIGETEFLRSCDAAFKQGARFVGWKDGSARDAYYHPLNPPAGAADLNL

SEQ ID NO: 86963 - protein, 802 aa, unidentified
  source 1..802: note = Methylorubrum populi
  REGION 1..802: note = tr|B1Z9B9|B1Z9B9_METPB Tryptophan halogenase; OS = Methylorubrum populi (strain ATCC BAA-705 / NCIMB 13946 / BJ001) OX=441620 GN=Mpop_2363 PE=4 SV=1
MLRSERSVPPRLVIAGGGPAGSIAAAYLRRILRRAGWSVTLVAPEPAAGPSVALATRPAFTRFRQGFDIDEAIFLRRCAGTYRLASRFEDWFAGGRGHWHPFGACGPRIAGRDLFHYWLKLRESGARREAGDYADYAPQTLMAAEGRGPRPQAGTSSLVQSGDYGYHLDRAGLVRVFREIALSEGVRAVPGRVRGIERDPYGDVAALLLDGGERIEGDVFLDCTGAAAQLVGTALGEPWIAEGGAGDRIAYLSTAREPEPAPFTLYRGRPEGWVAALPLAGRSDHALVYDGRTTPPETAQALLRAASGCENGVCDAELRRGRRRAPWQRNVVAVGAADGAVEPLMGFGLDLVLAALEAFVAYLPRGGRAAEVLRRAYVARMNRLHDDAEQAVAAHYVLGRRPEPFWAAARAAAVPERLADRLDLYELAGHVEPEADAVFGEGDHYLLFAGADFLPRRPFAPVDVGDGREIERLLAGVRARSAQVAQTMAPHADLLEGLHGRAPAGPTVQVAAAAAKDSAARHGPQSLRRSPEGARLADLVAGLGQPFGYERSVKATPAGLQTERFLVSLHRTSLGLDPAKTLDALAEVLGLPAPERSEAAGLIAGADLLHLGYEAGPSGALYKLYVEWSARADAAWHETDAAGAAGAEPILVHRAYKWRVEGSASPVVTLYHWPRVRTPGEIEARLARLGESWDGAGTSLLGTARDILRLAREHGRGAVHYLEAREEPGPRLSYDLNLYACGLTMGEAEMVIGQAIVDLGVPPPDAAAVLAERRGEALGHVAGGVGRDGIPFLTVYSGMAEA

SEQ ID NO: 86964 - protein, 517 aa, Alteromonas sp.
  REGION 1..517: note = tr|A0A2D5LIV4|A0A2D5LIV4_ALTSX Tryptophan halogenase; OS = Alteromonas sp. OX=232 GN=CL592_05095 PE=4 SV=1
  VARIANT 48: note = Xaa can be any naturally occurring amino acid
  VARIANT 57: note = Xaa can be any naturally occurring amino acid
MSHSANPVNTPEVKRVVIVGGGTSGWMCAAAIARIAPPDTRITLVESXDIGVIGVGXATIPTLMEFNDFLGIKEHDLLRECQGTYKLGIDFVDWYQKGQSYFHPFGFYGRDTPEFSFHQLWLRLNAMAAKGEIPADAPGIISDYNLCTVAAMQGRFAPPQGGADTILSTMRYAYHFDSARYGQMLRRYAEQRHVERIEGIVNSVERDHNTGLLQSVTLNSGQVLQGDLFVDCSGFKALLIDGAMQSEFVDWHHYLPCDRAIAVQTKLAGAPDPFTRSTADDAGWRWRIPLQTRLGNGHVYSSDFMEHDEALQKLLAGVEGEPVTQPLPLKFRTGHRKAFWDKNCVAIGLAGGFIEPLESTSIHLTQMGIQRLVNLWPGRGCNRSEIAQYNALMTADYERLRDFIVLHYNATEREDTEFWRYVKHMAIPDSLAAKLEIFRSSGRVIPSPEDLFTPHSWLAVMLGQGIYPQNYDVLVDRVPAQALLKNMQMLRMSVAKTAGSMPTHEEFIRRYCQAAAA

SEQ ID NO: 86965 - protein, 315 aa, Alteromonas sp.
  REGION 1..315: note = tr|A0A3D2XUI2|A0A3D2XUI2_ALTSX Tryptophan halogenase (Fragment) OS=Alteromonas sp. OX=232 GN=DHW66_00640 PE=4; SV = 1
VLQHDNGDIKALRLASGELIEGDFFIDCTGFKGLLIEETLHTGYEDWSHWLLCDSACAVQTTSTEPAAPFTRSAAHPAGWQWEIPLQHRTGNGNVYSSAFMDDNAASEQLMQNVKGEAITTPRTLRFKTGRRNKTWHRNCLALGLASGFVEPLESTSIHLVIMGITRFMQLFPHGGNDQALADEYNQQTQLELERIRDFIILHYHVTQRDDSPFWEHCKNMTVPDSLQTRITLFKEQAHAFQKQNELFRVDSWAQVMLGQGVTPDSHHPAAAMLSDAQLHQSMQQQRQRVLQAVAQLPAHGEFIRRYCATPQKAE

SEQ ID NO: 86966 - protein, 516 aa, Alteromonas sp.
  REGION 1..516: note = tr|A0A3D0SC74|A0A3D0SC74_ALTSX Tryptophan halogenase; OS = Alteromonas sp. OX=232 GN=DEO96_06790 PE=4 SV=1
MQENITRVVIVGGGTAGWLTAGIIAAKNPLVGENSRTEVILVESPDVKNLGVGEGTWPTMRDTLRLLGIAEKQFLSECDASFKQASKFVGWQQGGEDKYYHPFTAPAGFGAVNLVEAWHDEGCPGDFESWVCAQGMACERYQAPKMPQLPEYAYNFNYGYHLSADKFVALLHRHCTEQLGVQYKSAHVAGIQSHPDGAIAAIELAQGEPLAGDLFIDCSGFSARLIGQHYNVPFVSKRHILFNDTAVAAQVNHVGDQTPIASCTVATARPHGWVWDIALQSRRGIGHVFASELTTESQAEDALRAYISSDQSLSQKAIMPRTIRFDPGHRARFWEHNCVAIGVSAGFVEPLEATALVLIEKSAEWIADQLPRSRAAMAVLGKRYNEMTDARWSEIIDFIKLHYVLSERRDSHYWQAHADPASWTDSLQDALQLWQSQPPGLLETNLRQELFSSASKQYVLYGMGFRSQDWQPGGITSLRKPLIERVRREFLHNGDKLLAQLPTNREYFNRLKAASA

SEQ ID NO: 86967 - protein, 504 aa, unidentified
  source 1..504: note = Xanthomonadaceae bacterium
  REGION 1..504: note = tr|A0A4Q2XVJ7|A0A4Q2XVJ7_9GAMM Tryptophan 7-halogenase OS=Xanthomonadaceae bacterium OX=1926873; GN = EOP89_00540 PE=4 SV=1
MENARIRKVVIVGGGTAGWMAAAALSRVLAGGNIDIRVIESEAIGTVGVGEATIPHIQYFNRLLGIDENDFVRRTAATFKLGIEFVDWGRIGQRYIHPFGSYGQEMEGIHFHHFWYRQSQAGGALPLDRYSIGVGAARANKFQRPDPSLVNSPLATIAYAFQFDAALYARYLRELAEAAGAQRTEGRIVDVRLDGETGHVDTLLLEDGSVVAGDLFIDCSGFRGLLIEGALGTGYDDWSHYLPCDRAVARACERVGDPLSYTRATAKAAGWQWRIPLQSRTGNGYVYCSDHIDDAEALRTLDAGLDGKPVTDPNFLRFTAGVRRKAWNRNVVSLGLASGFLEPLESTSIHLIQSGIARLLTNFPDRNFNAPDIDYYNRRTRLEYEQIRDFLILHYKATERDDTAFWDRCRTMPIPASLEERIAIFRENARLYRHDNELFSETSWLAVLHGQNIVPKSHHPIADFLSEDELAARMTRIAAAMDGSVARMPSHQAFIDHYCAIDRR

SEQ ID NO: 86968 - protein, 511 aa, unidentified
  source 1..511: note = Xanthomonadaceae bacterium
  REGION 1..511: note = tr|A0A3C0HIG9|A0A3C0HIG9_9GAMM Tryptophan halogenase; OS = Xanthomonadaceae bacterium OX=1926873 GN=DCM32_05390; PE = 4 SV=1
MSDTRVERIVILGGGTAGWMAAAALSKTLGPRYSIALVESEDIGTVGVGEATIPMIQQYNQALQLDEPDFVAHTQGSFKLGIEFVDWGRKGDSYIHGFGKIGQSMSLAPFYQFWLKQRAAGAAGPLDEYSLNTAAARVNRFLPPSDRHPGSPLADIAYAYHFDAGLYARYLRGYAEQRGVRRVEGKLASVERHPDTGFVTALTLENGQRVDGQLFIDCSGFRGLLIGEALGTGYVDWSHWLPCNRAAAVQCERREALTPYTRSTAREAGWQWRIPLQHRVGNGYVFCADHVSEDEASARLLQRLDGPALMTPKILKFTTGKRKRFWSKNVVAVGLASGFMEPLESTSIHLIQSSIARLTTFFPHAGFDAVDIDAFNAQSHVEFDRIRDFLILHYKATTRDDTPFWRQVREMPIPETLRAKIDLFRSNGRFFREQEELFGEMSWVQVMIGQGIVPRRWHALVDSFDDAAVAKHVEDTRRIIQNCLRVMPDHADFIARHCAAPPATVVAPKVA

SEQ ID NO: 86969 - protein, 264 aa, Alteromonas sp.
  REGION 1..264: note = tr|A0A359K7L6|A0A359K7L6_ALTSX Tryptophan halogenase (Fragment) OS=Alteromonas sp. OX=232 GN=DEH24_15540 PE=4; SV = 1
MKDSTPNILKQITIVGGGSAGWMTAAALSRMLPTGDVKITLVESEQIGTIGVGEATIPDMINFNKLLGISESEFIKATNGTFKLGIEFNDWGKLGDSYFHPFGGHGVDMNGVDFHQYWLHTLAAGNTCDLEDYSICAVAAKQNKFVLPEQNPNSVLSHLRYAYHFDATAYAAYLRKYAEQRGVKRIEGKIASVQQHTDTGNIAGLTLEDGTTVGGELFFDCSGFRSLLLGDTLGVKFRDWSHWLPCNTAQTVATEQTDKVLPFT

SEQ ID NO: 86970 - protein, 196 aa, Alteromonas sp.
  REGION 1..196: note = tr|A0A3D0QCE1|A0A3D0QCE1_ALTSX Tryptophan halogenase (Fragment) OS=Alteromonas sp. OX=232 GN=DEP33_16015 PE=4; SV = 1
MAQKKTRVVVAGGGTAGWLTAFSLVTRLGNVLDITLVESDQIGTVGVGEATIPTMCNFHQLMGINEQEFMAATNATFKLGIQFDNWANEGDSYIHSFGEIGQRSWMAEFHEFWMEAVANGQQDSLEDYCLELKAAKANKFATKIGNRPLNFAYHLDATAYAAYLRKKSEAAGVTRREGKIQSVDTDPESGNLTRLT

SEQ ID NO: 86971 - protein, 275 aa, unidentified
  source 1..275: note = Xanthomonadaceae bacterium
  REGION 1..275: note = tr|A0A4Q2XPF7|A0A4Q2XPF7_9GAMM Tryptophan 7-halogenase (Fragment) OS=Xanthomonadaceae bacterium; OX = 1926873 GN=EOP89_08075 PE=4 SV=1
NRSANGDVAGVTFADGRSLDADFFVDCSGFRGLLIEEALATGYEDWRHWLPCDSAIALPTTRTGAPLPYTRSIAETAGWQWRIPLQHRAGNGHVFCSAFLDADSAEAQLRASVVGTPLADARRLRYTTGRRRKAWNRNVLAIGLSAGFLEPLESTSLHLVQSAITRLLALFPDRAFAAPDVDYYNRTTALEYERIRDFLVLHYHATARDDSPFWQHCRTMTIPDTLSARMDPLATLQSERLAALLPRIRNAIAQGVAAMPDHAAFITATCAAPTP

SEQ ID NO: 86972 - protein, 491 aa, Sphingomonas sp.
  REGION 1..491: note = tr|A0A0Q4UA06|A0A0Q4UA06_9SPHN Tryptophan halogenase; OS = Sphingomonas sp. Leaf257 OX=1736309 GN=ASF14_16925 PE=4; SV = 1
MTDKRIRRIVILGGGTAGWMTAAALSRALAGQGVAITLVESDAIGTIGVGEATIPTIHWFNQIIGLDERQFMAETKATVKLGIEFVGWNGEGSRYFHPFGTYGPPGDGAMFLHRLIRARADGDHAPTEAYSLTAQAARAGRFARPVADRRSLLSTLGYAYHFDAGLYARYLRGLAERAGVRRIEGVVASVEQDGESGFVRSLTLDGGQVVAGDLFIDCSGLRALLIGQALDVGFDDWSHWLPCDRAWAAPSAAESDRTPYTRATAAEAGWRWRIPLQHRVGNGYVFSSRFQDEEEARASLIAGMDGPPLAEPRLIRFTPGMRREAWRANVVAIGLSSGFLEPLESTSIHLIQSGIAKLLSLFPAADCSPLLARQFNRVFGQEMLDVRDFLILHYHATTGRDEPMWRERQAMAIPDTLAEKLGHFRSSGRIVLSSDELFRDASWFAVLDGQGERPGDHNPLVEVLGREDNLRQLAALRADIVKTTAAMPPLP

SEQ ID NO: 86973 - protein, 168 aa, unidentified
  source 1..168: note = Xanthomonadaceae bacterium
  REGION 1..168: note = tr|A0A4Q2XD78|A0A4Q2XD78_9GAMM Tryptophan halogenase (Fragment) OS=Xanthomonadaceae bacterium OX=1926873; GN = EOP89_12795 PE=4 SV=1
MQAVRNIVIVGGGTAGWLTAGIIAARHQGRMPGGFTVTLVESPNTPIIGVGEGTWPTLRSTLSKMGVSESDFFRECNASFKQGARFARWTTGEPDEGYYHPLMLPQGFTRVNLASHWIADAKGQSFCDMVSPQGQLCDDGLAPKTIATPEYEAVANYAYHLDAGKFAG

SEQ ID NO: 86974 - protein, 283 aa, Alteromonas sp.
  REGION 1..283: note = tr|A0A359K0V7|A0A359K0V7_ALTSX Tryptophan 7-halogenase (Fragment) OS=Alteromonas sp. OX=232; GN = DEH24_03805 PE=4 SV=1
MHTSAIHHYVIAGGGTAGWMTAALLGKLLNGTGARITLVESPDQPGVGVGEATVPSFVDFIKLLGIDEQTFVKATQATFKLGIQFSHWQTLGHSYWHPFGHVGARIDGKPFFQQWLHAHRSGLTQTYTDFSASARMAQENKFYIPNPQQPNNLSQMGYAYHFDAQQVAVFLRDFAVSKGVVHKKALIEHVQMCPDNSVIQRLITRTGEHIDGDFFIDCTGTQARLMGQALNTGFTDWQRYLPVDHAWVVQTQNTDEPVPYTKAIAEPMGWRWQIPLQHRTGNG

SEQ ID NO: 86975 - protein, 501 aa, Alteromonas sp.
  REGION 1..501: note = tr|A0A2D6HXG3|A0A2D6HXG3_ALTSX Tryptophan halogenase; OS = Alteromonas sp. OX=232 GN=CL591_14940 PE=4 SV=1
MSTFDSATLPPVKNVVIAGGGTAGWMAAIALVKLLGKSLNITLVESKDIGIIGVGEATIPPIRTFHKLLNIDEKAFMKATQATFKLGIEFEGWREENHSYIHSFGVTGRECWAGEFHHFWLRAQKLGFGGEFGDYCPELQAAKANKFFTNESMPLNFAYHFDAVAYGRFLRTLATEAGVHHIVGNITNVSKCSQTGNITSLGVDESQEVNGDFFIDCTGFQGLLIEQALHTGYDNWSHYLPCDSAVAMQTETVAAPVPYTKSSAHKAGWRWQIPLQHRVGNGLVYCSKYMSDDEAKSTLVQQVEGEPVNDARFIKFTPGKRRLGWNKNCVALGLASGFIEPLESTSIHLIMTGIVRLMRLFPFDGVTQSAIDEYNTKYDSEMAAILDFIVMHYKVTNREDSPFWQHCKNMPIPPSLTHKLNLFKDTGRVFLDDGDIFRVDSWTQVMLGQGLTPNQYHKVADEMSEAELERFMMGLKQQVDNQVSRLPSHEAFLDKYLAVNS

SEQ ID NO: 86976 - protein, 508 aa, unidentified
  source 1..508: note = Xanthomonadaceae bacterium
  REGION 1..508: note = tr|A0A5C7RFH0|A0A5C7RFH0_9GAMM Tryptophan 7-halogenase OS=Xanthomonadaceae bacterium OX=1926873; GN = E6Q88_08750 PE=4 SV=1
MSAAPVGNTGRVTEVVIVGGGTAGWMTAAALAKILSPEYKVCLIESDEIGTVGVGEATIPMIKLYNNALELDENEFIRETKGSFKLGIEFVNWGRLGDSYIHGFGKIGQDLGLLPFYQYWLKMHQAGKAGGLDDYSINTLACRYDKFIPAVTDRPNSPLADIAYAYHFDAGLYARYLRKYAEARGVRRIEGKIASVEQHPHSGFVEAVTLESGERVGGQLFVDCSGFRGLLIEQTLQTGYVDWTHWLPCDRAVAVQCTSGDTITPYTRSTAREAGWQWRIPLQHRVGNGYVFSSPHISEDEATAVLMRNLEGQPLTEPRVLRFVTGKRKKFWNKNVVAIGLSSGFMEPLESTSIHLIQSGIARLSAFFPHAGFDQVDIDEFNDHANFEFDKIRDFLILHYHATERDDTPMWNYCRTMSIPESLTRKIELFRSNGRVFREGNELFAEPSWVQVMYGQRIHPQSYHALVDVYSEAKIAEYMAGIRGVIANCVKVMPRHEAYIAKYCAASM

SEQ ID NO: 86977 - protein, 497 aa, Novosphingobium sp.
  REGION 1..497: note = tr|A0A0N0JI33|A0A0N0JI33_9SPHN Tryptophan halogenase; OS = Novosphingobium sp. AAP1 OX=1523413 GN=IP65_07560 PE=4; SV = 1
MNEAAIRSITILGGGTAGWMAATLLAKACDGQPLRIILVESEEIGIIGVGEATVPLFRLFNDRLGLDEHAFLQATMGSYKLGIEFCDWGQVGNTHFHGFGDYGEPIGGIAPHHHWLRLARSGEAAPIDDYSAPYALAQRGKFTPADPRQPRYAHAYHFDAVLYARYLRTLAESWGVTRVEGRVVDVPLDPQTGHIRALHLADGQVVDGEFFIDCTGFAAELIGKRLGAGYVDWSHWLPCDSAIAVPSARQDPPAPFTRSTALAAGWQWRIPLQHREGNGIVYASAHMSDAAAEEALLGSLGGAPLANPRRFRFTAGRREAFWQRNCVALGFASGFLEPLESTGIQLIQNGIGRLIEFFPDRHFDPRVAAEYNRVCQVEWDRIRDFIIAHYCVSQRPEPFWQAARAMDLPDTLQQKLDSWHATGKIPLLDGESYQEPSWAAILLGNGVWPQRHDPLIDALPIDMLRAHMARRREDLARMGRSAPDHRFYLARHCQAAA

SEQ ID NO: 86978 - protein, 491 aa, Novosphingobium sp.
  REGION 1..491: note = tr|A0A0N1APG1|A0A0N1APG1_9SPHN Tryptophan halogenase; OS = Novosphingobium sp. AAP1 OX=1523413 GN=IP65_08490 PE=4; SV = 1
MSGAPIASIAILGGGTAGWMTAAALSKALAPQGVAIALIESDAIGTIGVGEATIPTIHWFNQLIGLDEAAFMQATGATWKLGIEFRGWQGDGSAYFHPFGTYGLPGDAQMLPHRLIRAWNGGHPIDIEAVSLTTQLARAGVFARSSGDPRSLLSTLGHAYHFDAGLYAAFLRRMAEERGVRRHEGRVTAIDRDGETGFIRALTTERGERLAVDLFIDCSGLNGLLIEGQMAAGFEDWSHWLPCDSAWAAPTAADPAAPLFTTATAAAAGWRWRIPLQHRVGNGYVFSSRFETADAARDSLIAAIGTPTADPRLIRFTPGRRRRAWIGNVVAIGLASGFLEPLESTSIHLIQTGIGKLLSLFPRQDCAPLLAEQYNRVFAQEMEDVRDFLVLHYHFTQGRSEPLWQHCQATALPESLAYKVDQFTTSGRLMLRGEELFRDASWFAVMTGQGLRAGDHNPMLDGMSDMENLRHLDAVKAAVAKSLAQLQAGRA

SEQ ID NO: 86979 - protein, 504 aa, Sphingomonas sp.
  REGION 1..504: note = tr|A0A0Q4L3X5|A0A0Q4L3X5_9SPHN Tryptophan halogenase; OS = Sphingomonas sp. Leaf38 OX=1736217 GN=ASE88_10535 PE=4; SV = 1
MTDRALRSIAIIGGGTAGWMAAAALAHVLGTRNVAITLVESEEIGTVGVGEATIPPIQAFNALLGIDEDAFVAATMGSFKLGIEFVDWLRPGACYFHPFGVYGTDVGAVPFEGLWHRLRAVGDAASLDAYSICAAAAQDGRFMRPLTDGGNTPLHRIGYAYHFDASLYARFLRRHAEATGVVRREGRVVDVAVRGADGFVETVTLASGERIAADLFVDCSGFRALLLGETLGTGYEDWSHWLPNDRAVAVPSAPVGPPTPYTRSTARAAGWQWRIPLQHRTGNGYVFASGHLSEDEAIATLLASLDGEPLAEPRALRFRTGRRDAFWVKNCVGLGLSSGFLEPLESTSIHLIQAGIARLLEMLPTRDFEAADIRRYNRLMIAEYDSIRDFIILHFHATQRDDTPYWDHVRTMAVPETLAERIRIYQATGRVFREADDLFTKTSWLAVMDGQGLCANGFDPLAASLSADEARTRLARMAAVTAAAATRMPPHEQFIARHCARSIA

SEQ ID NO: 86980 - protein, 519 aa, Novosphingobium sp.
  REGION 1..519: note = tr|A0A0N0JIT3|A0A0N0JIT3_9SPHN Tryptophan halogenase; OS = Novosphingobium sp. AAP1 OX=1523413 GN=IP65_06780 PE=4; SV = 1
MTDMPAAQHAKPIRQIVIAGGGTAGWMAACYFSGRLARQGVAITVVESSAIGTVGVGEATVPGIRDYFRAIGVEDIDVLRATGGTVKLGIEFRDWAQPGSRFFHPFGLYGVPSRGVPFHQYWLKLQHAGEPTDLAAYSLCSALAQRGAFMLPPDKPVNDLAVFDWAVHFDASRFAAMLRDRALAQGVRHIDDVINDVALDAQTGHIAHLVTKEHGSVAGDLFIDCTGFRSLLLGKALGVGWTDWTDLLPCDRAVAIPCAADATRDWSYTVSTAQEAGWQWRIPLQHRVGNGYVYSSAMLSDDEATAKLLSRLEGEALAEPNLIRFGAGHRQRFWVGNCVGMGLAAGFLEPLESTSITLIQTAIERLAEFFPDATFDPALADEFNRATTLEYARIRDFLILHYLGNRRVGEPFWDRLRQADVPEMLAHKLRLFRARGRLVRYEWESFLDPSWLSMYAGFDWLPSAHDPMADHFTNAEISEALRRMRETVAGAVAEARPHRDFIAHIAGIAGSPPAGPLAA

SEQ ID NO: 86981 - protein, 501 aa, Pseudoalteromonas sp.
  REGION 1..501: note = tr|A0A410CP30|A0A410CP30_9GAMM Tryptophan 7-halogenase OS=Pseudoalteromonas sp. R3 OX=1709477; GN = ELR70_16680 PE=4 SV=1
MVGGGTAGWLAANHLAVDVAEDVTITLVESPNIPTIGVGEGTVPVIVDSLKKFGIRESDIFRLCDATFKNGIHFVGWNKSVNGQPHRYFHPFDDPNVNGVNLLPYWLHQLPEARARFDQSVSIQTHIALENKAPKLITDAEYDRMINYAFHLDAGKFSALLAEHAVKNRRVNHIKDDVESVQIAPDGFISGLQLKQGDVLKGDLFIDCSGFQSLLLGKALNTPFIDKSDVLFANHAVVTQVPYEHAQEVPPYTISTAQQAGWIWDIGLQSRKGVGHVYSDQFTTHEQAHRDLCAYLGKSENAVESRLIKMQVGFRAEAWVKNCIGIGLSQGFVEPLEATGLLVFDLAARMLSKRLPTQRQEMPAIAKQFNQHMAHVWQSIVDFIKLHYCISNRDDSEFWRMNRAAETIPDSLQQKLALWRNDIPNEYDFVSSLDVFRLENHLYVLYGMGYPSRCKYPSPQQVSQQEAMLKLVAQRQIQAGTMLDTHSNLVAKASRYGFQRI

SEQ ID NO: 86982 - protein, 256 aa, unidentified
  source 1..256: note = Xanthomonadaceae bacterium
  REGION 1..256: note = tr|A0A4V1S8F6|A0A4V1S8F6_9GAMM Tryptophan halogenase (Fragment) OS=Xanthomonadaceae bacterium OX=1926873; GN = EOP89_05500 PE=4 SV=1
AFAVQSETPEGLLPYTRAIAHGEGWRWKIPLQHRTGNGLVYSSAHLSDDVARDRLLAGIDGKPLFEPRQIRFTSGMRRRVWNHNCLSLGLASGFVEPLESTSIHLVMIAVTWLVQNFPFGDDSAALAERFNARTRREWEQVRDFIILHYVLTERDDTPFWQSRRTLPIPDSLAGRIALFRESAMAYQDKDELFRIESWVEVMLGQGVSPRSHHRLPATMPTAQLQGAMNDLRNGIATAVERLPGYETFLARFRQPA

SEQ ID NO: 86983 - protein, 508 aa, Pseudoalteromonas sp.
  REGION 1..508: note = tr|A0A0W1KUC1|A0A0W1KUC1_9GAMM Tryptophan halogenase; OS = Pseudoalteromonas sp. H103 OX=1761893 GN=ATS74_08525; PE = 4 SV=1
MNKAIKTVAVIGGGTAGWLSAAIIASYHQGKNGDGLKVMLVESSDIPTIGVGEGTWPTMKNTLQQIGLREVDIFKACNATFKQGGKFVNWTHGNNDFYYHPFTVPLGYGRIDLAPYLDNVEDYAQQTNFQHDICEASLAPRGIAQGEYQGNCNYAYHLDAGAFAELLKQHCKSKLGIEHVIGTVEQVKLDDNGAIDTLTLKEQTRTINADLYIDCTGFSSLLLGQALNVPFKKMDHVLFNDSAFAMQVPYDENDNSLASHTIATAQNAGWIWDIGLTHRRGVGHVYSSKFLSDEEAEQNLRNYLGDAANGLTARKISFESGYREKFWHKNCVAVGMSAGFVEPLEATAIMLVEISSRFVAEHMPADTQVMPIVAKRFNEQMDYRWQRIIDFLKLHYMLTKRTEPYWQAHVQPETIPQSLQEDLLLWGTRGPLIQDFHGALELFPAASYQYVLYGMGFKPDFTKQAYLYSQDAQAKQIIERNSQLTQQMLQTLPPHRAYIEQWLAANPV

SEQ ID NO: 86984 - protein, 502 aa, Sphingomonas sp.
  REGION 1..502: note = tr|A0A0Q4LD48|A0A0Q4LD48_9SPHN Tryptophan halogenase; OS = Sphingomonas sp. Leaf38 OX=1736217 GN=ASE88_03760 PE=4; SV = 1
MKRVQRLVILGGGTAGWMTAAAMSATFGDLVNISILESDAIGTIGVGEATIPTIHWFNQLIGLDEEAFVAATKASFKLGIEFVDWARPGTRYFHPFGRYGVDLGPVPFHQHWLRGKGDGLDRPLSVYSLAAQLAADGRFAKPVDDPRSILSTLGYAYHFDAGLYARHLRQLAEKRGVVRHEGLLRDIERHPKTGFVTALTSDRGERLEGDLFIDCSGFRALLIGETMGARFEDWSHWLPCDRAVAVPCARIAATTPFTRSTLRPAGWQWRIPLQHRTGNGYVYASSFVSDDEAVATLLSNLDGEALADPRMLRFTAGFRREAWRGNVVAIGLSSGFLEPLESTSIHLIQSGIAKLITLFPDSDCDPVLARQFNTLFARDMDGIRDFLILHYHATQGHDAPLWQHTRHMTPPPTLVDKIAQYTRAGRLMLSADDLFREASWLAVLEGQGVGALGHAPLADTLDAATNRRQLNQIETVIARATPTLPLHDAAIAALVAPQVAGR

SEQ ID NO: 86985 - protein, 508 aa, Brevundimonas sp.
  REGION 1..508: note = tr|A0A1S6EYL0|A0A1S6EYL0_9CAUL Tryptophan halogenase; OS = Brevundimonas sp. LM2 OX=1938605 GN=BZG35_16770 PE=4; SV = 1
MGDRIRRIVILGGGTAGWMTAAALSKTLARDVSITLLESDDIGTVGVGEATIPTIHWFNDLIGLDEEDFVRVTKASFKLGIEFVDWTRAGSRYLHPFGTYGVPGSGLPFHQRWLKARNDGLERPLRDFSLASQLAQQNRFAKPVSDPRSILSTLGYAWHFDASLYAGYLRSLCTRRGVTRVEGRMANVERDGETGRVSALTTDKQERLEGELFIDCSGFRALLIAAELGSGFEDWSHWLLCDRAAAVPCERVAETTPFTRSTARTAGWQWRIPLQHRTGNGYVYSSAHISDDEAAATLLAHLDGAALAEPRLLQFKAGRRKTVWSKNVVAIGLASGFLEPLESTSIHLIQSGIAKLLSLFPDRHVDPALARRFNLLFEADMDNIKDFLILHYHANERVGEPLWDHCRTMPIPDTLQARIDDYRRSGRLMLGSDDLFRDASWLAVLNGQDVVAEGFTPLADRLDAQVNREQLEQLAQLIERAAPTLPAHDTVIQQILARQPVEALAAAG

SEQ ID NO: 86986 - protein, 493 aa, Sphingomonas sp.
  REGION 1..493: note = tr|A0A0Q4TY43|A0A0Q4TY43_9SPHN Tryptophan halogenase; OS = Sphingomonas sp. Leaf257 OX=1736309 GN=ASF14_06310 PE=4; SV = 1
MSTPRRIVIAGGGTAGWMAAAAMARTLGRAVTVTLVESDAIGTIGVGESTIPPIITFNRLLGINEAEFMAATQATFKLGIQFDGWKGPEDRYFHSFGLTGKDHWAAGFQHFWLDGLRRGHDAPYDDYCLELIAAREGRFAHLPDERMNYAYQLDSTLYGRFLRGMAEGDGVTRIEGRIAEVALNPDSGDIAALVLDDGRRVEGDLFLDCTGFRALLIDRALHVGFDDWSHYLPCDAAVAVQTESVRPPVPYTRAIAHEAGWQWRIPLQHRAGNGIVYCSRYMDHDAARERLLSTVEGQVLTEPNMLRFQTGARRKQWHRNCIAVGLSGGFLEPLESTSIHLIQRAILRLIRLLPGGPISAYDVAEFNDQQMTDMLQIRDFLILHYKVHERRDSAFWRQCADMEVPDSLAHRIALFRETGRVFRRNDELFAENSWVQVMMGQGIKPESHHPITARLSDEELDRLLTTLRQNIATTVRGLPPHADYVAHHCGTAA

SEQ ID NO: 86987 - protein, 526 aa, Sphingomonas sp.; identical to SEQ ID NO: 83715
  REGION 1..526: note = tr|A0A0Q4EV38|A0A0Q4EV38_9SPHN Tryptophan halogenase; OS = Sphingomonas sp. Leaf16 OX=1735681 GN=ASE65_12780 PE=4; SV = 1

SEQ ID NO: 86988 - protein, 515 aa, Shewanella sp.
  REGION 1..515: note = tr|F7RRK5|F7RRK5_9GAMM Tryptophan halogenase, putative OS=Shewanella sp. HN-41 OX=327275 GN=SOHN41_02949; PE = 4 SV=1
MHSESIKSVVVVGGGTAGWLTAANLARAFNSANPNNIQVCVIESPDIPTIGVGEGTWPTMRATLAKLGIDEADFLTQCNATFKQGTKFINWQTDVEPNQYHHLFTSIFDPTQFNLAPYWLKGCAGNSLSYAQAVSAQIKTAELGLAPKKITSKPYEGLQNYAYHLDAGKFADLLKRHAINKLGVKFIAANVTDVRLESDGYIAEVQTDNSGAIAGDFFVDCTGFKSLLIGETLGIGFTSVADTLLTDHAVTIQVPYDSDDAPINACTHSTAQDAGWIWDIALTNRRGVGYVYSSKHVSHEEAEATLRRYIGDAATGLSARKIKIDLGYRNKFWHKNCVAVGLSAAFIEPLEASAIFLIEAAGNMIADQLPSRRQGLLFAEQKFNESFMFRWQKTIDFIKMHYLLSQRSTPFWQANKCKSTIPESLTTLLGNWQEHCISAYDFAHVYEPFPMESYQYVLYGMGFKPQSVAEYRYTEDVKAAEHFNKVQQVTEYLAKELPGQRALLQKVAQFGFSSI

SEQ ID NO: 86989 - protein, 502 aa, Sphingomonas sp.; identical to SEQ ID NO: 84313
  REGION 1..502: note = tr|A0A0Q4FY92|A0A0Q4FY92_9SPHN Tryptophan halogenase; OS = Sphingomonas sp. Leaf16 OX=1735681 GN=ASE65_00620 PE=4; SV = 1

SEQ ID NO: 86990 - protein, 505 aa, Sphingomonas sp.; identical to SEQ ID NO: 83716
  REGION 1..505: note = tr|A0A0Q4FR91|A0A0Q4FR91_9SPHN Tryptophan halogenase; OS = Sphingomonas sp. Leaf16 OX=1735681 GN=ASE65_17635 PE=4; SV = 1

SEQ ID NO: 86991 - protein, 516 aa, Novosphingobium sp.
  REGION 1..516: note = tr|A0A0N0JJ35|A0A0N0JJ35_9SPHN Tryptophan halogenase; OS = Novosphingobium sp. AAP1 OX=1523413 GN=IP65_06965 PE=4; SV = 1
MSGTSPRAIRSVCIVGGGSAGWLTAGLIAARHGRDLAVTLVESVSRGTIGVGEGTWPTMRNTLRKIGIAETDFMRACHASFKQGAKFARWRTGAADDFYYHPLVLPEGFPDLDLAPYWNSAAQGNGNGGPSFSDAVCFQEYLCEQGLAPKLMTSPDYAGIANYAYHLDAVKLGELLATHCTGKLGVNHIDDEIVGVTRRDDGDIAAVIGRDSGAIAADLFVDCTGFSSRLLGEALEVPFIDRSDVLFIDRALAVQLPVEEDSPIASHTISTAQKHGWIWDIGLPTRRGIGYVYSSRHAGADRAEEELAAYVGPGFAKLTPREIPIRSGHRAQFWKNNVVAVGLAAGFLEPLEASALVLIELSADYIATSMPATRQAMDFVARRFNSMTRYRWDRIIEFLKLHYVLSERSDTAFWRDNRDPATIPQDLQDQLELWRDTPLGEHDFASAHEMFPAASYQYVLYGMGFRTRPRAGQLAQRDMADDAFARNAAMKRKLGQMMPTNRALLDKLAQHRFPPL

SEQ ID NO: 86992 - protein, 355 aa, unidentified
  source 1..355: note = Alphaproteobacteria bacterium
  REGION 1..355: note = tr|A0A3M1PPN6|A0A3M1PPN6_9PROT Tryptophan 7-halogenase (Fragment) OS=Alphaproteobacteria bacterium; OX = 1913988 GN=D6740_09520 PE=4 SV=1
LKLFNRRLGIDEGAFLRAVRGSIKLGIEFLGWGAPGERYIHPFGRYGADFDIVPLHHYWLRARALGRDVGGIEEYALAAVAARMGRADRPLADPRRIQSTFDYAYHLDATRYAAFLRRYAEARGVRRIEGRVARVVRDGETGLVDALVLEDGRRLAADFFIDCSGFRSLILGEALDVPFHDWTQWLPCDRAIAVPSRAGGAFTPHTQSFAHRAGWRWRIPLQHRIGNGIVYQSAEMTDDEAERILLGSLDGEALAEPRLIRFRAGRRARPWEKNCVAIGLAGGFLEPLESTSIHLIQSALFRLLALWPLSPQDRISAHEFNRLSAEEYARIRDFIILHYHANRREEPFWRQLAAM

SEQ ID NO: 86993 - protein, 439 aa, unidentified
  source 1..439: note = Alphaproteobacteria bacterium
  REGION 1..439: note = tr|A0A3M1GE43|A0A3M1GE43_9PROT Tryptophan 7-halogenase (Fragment) OS=Alphaproteobacteria bacterium; OX = 1913988 GN=D6782_02880 PE=4 SV=1
MTQAGTRKKVIIAGGGTAGWMTAAAIGKVLEKVVDVTLVESEQIGTVGVGEATIPTLVTYNRLLRIDEAKFMRAVGATFKLGISFENWTDLNHRYIHSFGVTGKDHWTAGFQHFWRRGHEMGIAKEFGQYCLELVAAERTRFAHLPDLGLNYAFHIDSTAYAAFLRQIAEGHGVKRKEGIIKDIARSDEGDLKSLTLDDGTVLEGDLFIDCTGFRALLIGDTLGVGYDDWTHWLPCDRAIAVQTKSVRPPVPYTRSIAHGAGWQWQIPLQHRTGNGIVFCSRFMSEDEAKAFLLSNIEGDILTEPRVIRFRTGTRRAHWHRNCIAIGLSSGFIEPLESTSIHLIQRSVIRLMKMFPHGAVQPSDIDEFNKQTFYELEHIRDFIILHYHLTNRTDTPFWRHCRTMDVPEGLRHRMRLFKQTGRTFRANDELFAENSWTQV

SEQ ID NO: 86994 - protein, 516 aa, Sphingomonas sp.
  REGION 1..516: note = tr|A0A3M0FQQ3|A0A3M0FQQ3_9SPHN Tryptophan halogenase; OS = Sphingomonas sp. PP-CE-3A-406 OX=2135659 GN=C8J44_0062; PE = 4 SV=1
MRKRILIVGGGTAGWLTAGYLAKRLGADLAGGVSITLVESRDIGILGVGEGTFPTIRRTLATIGIDEAELVRRCGATFKQGAKFVHWRHEPGQGRTDHYLHPFQIADASDGLDLLPYWLLGYGGPDNWDEVSNPQKKAADQMRAPKLATNPDYVGPLNYAFHFDAVALAGLLREQGVKNGVRHLTDTVTEVLLDGDGAIGGVRTEQNGLLDADLYIDCTGFRAELIGKAMKIPYRSCRDVLFCNRAITAQLPYARRDEPIASYTISTAQESGWIWDIGLDRRRGIGHVYSSDHSDDETAERVLRGYLGAGGDEADVRHFKFDAGYREVNWYKNCVAVGLSSGFFEPLEATGIAFAEVSAGMIANLFPWGGDFETSARQFNANMLRRYERALDFIKLHYCISERRDTAFWRDNVADSSVPDSLLELLDRWRFRPPNELDIDGQVDIFTDASWQYVLYGMGWKTDLSAKAGALRYHNDARRAFAEVQRQAQYAIANLPSNRALVDYAQTHRFGARAPA

SEQ ID NO: 86995 - protein, 275 aa, Streptomyces sp.
  REGION 1..275: note = tr|A0A3D9WY95|A0A3D9WY95_9ACTN Tryptophan halogenase; OS = Streptomyces sp. Ag82_O1-9 OX=1938856 GN=BX279_8632; PE = 4 SV=1
MRATLDIDPYVKVNPTLPTNGPWHGFQVDRQRLDALLLDRARQAGAEVRLGCRALEPVVAGGAVTGVRFSGGAWPPLRTRTVIDATGRARWLSRALDLTAPPCSPRLLIWYGYASGACAQRDAAPAIVADDTGWTWTARVGPARYQWMRLDFVPRRGRKYGPPREFAGLESEAPARAADVSWRLCPEPAGPGWFVTGDAGVLLDPASSHGVLRAPLSGWTAGSLTAAAAARALDPGRAAGIYRQWLHEGAERDMIHLSARYATLGARGFGRAEGA

SEQ ID NO: 86996 - protein, 519 aa, unidentified
  source 1..519: note = Alphaproteobacteria bacterium
  REGION 1..519: note = tr|A0A3M1G5B3|A0A3M1G5B3_9PROT Tryptophan 7-halogenase OS=Alphaproteobacteria bacterium OX=1913988; GN = D6782_08925 PE=4 SV=1
MTEKAVRDVVIVGGGTAGWLTAGILAADHRAAFEDGLRVTLVESPTIPILGVGEGTWPSLRDTLRRIGIGETDFIRQCNASFKQGSRFDGWVNGAADDVYFHPFEAPPSFDDIDPLALWRAAPAGTPFAEAISHQAALCLAGRAPKQIVTPEYAAVANYAYHLDAPAFAAMLRAHCTQKLGVRLITDDMVDVVIGDDGTVESLVTKASGHVAGDLFVDCTGTRALLIGKALGVEAKSVGNFLFNDRALALHAPYEGEQAPIASQTTATAMPAGWIWDIALQTRRGIGYVYSSAYTSEDAARADLSTYLHRAAPASGVSGADARLIKFSGGYRETPWVGNVVAIGMAQGFVEPLEASAIVMIELSAMMLSDTLPAWRGAIETASARFNQRFAYRWSRIVDFLKLHYVLSRRPGQYWADNRKIASWPERLRRLVAQWKFEAPSREDFPQILEIFPAVSYVYILYGMGFETAPRRTHRRKDSPAIAERHLRDMALKRKKFLDGLPSNRELIGHIQSRGLTRI

SEQ ID NO: 86997 - protein, 484 aa, unidentified
  source 1..484: note = Alphaproteobacteria bacterium
  REGION 1..484: note = tr|A0A2N3BXF7|A0A2N3BXF7_9PROT Tryptophan halogenase; OS = Alphaproteobacteria bacterium HGW-Alphaproteobacteria-3; OX = 2013666 GN=CVT81_16415 PE=4 SV=1
MSDSRIRSVVIVGGGTAGWMAAAMSEEIGIVGVGEATIPQIRLINSFLGVDENEVLRASQGTFKLGIEFNDWRRVGDSYLHAFGETGMPLGPLSFHHYWLRSQQAGGKTRLWDYSLNTSAAEGLRFARMDKVGDTPVGGIRYAYHFDAGLYGQFLRRYAEQRGVRRSEGKVVDVHLRATDGFIESVQMDSGERIEGDLFLDCSGFRGLLIEGALKAGFDDWSRWLPCNRAVTVASARVEPMRPYTQSNARPAGWQWRIPLQHRTGNGHVYCSDFMSEDEASALLLANLDGEALAEPRALRFTSGIRNTLWQRNCVALGLASGFVEPLESTAIHLVQSCINRLLTLFPDRHCDAALRDEFNRQTRYEFESVRDFLVLHYKATERDDTPFWRHCAQLQLPERAARKVALFRASGQIVRENEELFTEGSWLQVMLGQGIEPERYHPSADAISAAQLDGFLRGIRGTVAQAAAMLPSHSEYVAGHCRA

SEQ ID NO: 86998 - protein, 502 aa, unidentified
  source 1..502: note = Alphaproteobacteria bacterium
  REGION 1..502: note = tr|A0A2W4SVA2|A0A2W4SVA2_9PROT Tryptophan halogenase (Fragment) OS=Alphaproteobacteria bacterium OX=1913988; GN = DCF29_21830 PE=4 SV=1
MDEIDDPRIRSVVIVGGGTAGWMTAAALVQHFRTAPLKITVVESSDIGTIGVGEATIPTLRRFYAQLGLRDDDVMRATQATCKLGIRFIDWSGPGSDFIHPFGLYGQDVKGIGFHHYWLKQRRAGDAAPLAAYSLGASLAAGGKFTLPSPNPPSQLSVFDWALHLDAGLFAQHLRAYAEAGGCARIDARIRAVELRPEDGFVRALTLDDGREVEGDLFVDCSGFKGLVIGEALGVGFEDWGRWLPCDAAYAVQSANRPGDAPAPFTRVTARSAGWQWGIPLRHRAGNGLVFSSAHLSDDQALAELMPHLLGDPLTEPRRIPFRPGRRTQAWARNCVAIGLSAGFLEPLESTSIALIETGIERLKALFPDRRFAQPILDEFNDQTAREMERVRDFIILHYKLNRRTDTDFWRDCREMAIPETLERKIALWTARGQFVRYRWEMFHPASWLAIYDGFGLYPDGYDPAVDAMDPAYLSRSLAEMRANIADLVARTPDHAHFLAGL

SEQ ID NO: 86999 - protein, 477 aa, unidentified
  source 1..477: note = Massilia armeniaca
  REGION 1..477: note = tr|A0A2R4CHE0|A0A2R4CHE0_9BURK Tryptophan halogenase; OS = Massilia armeniaca OX=2072590 GN=C9I28_01550 PE=4 SV=1
MVAAGLSKSLGKLLDIKLIESDEIGTVGVGEATIPTLMNFHHLLEIDEREFMAETMATFKLGISFENWRNVGEDYIHSFGTTGTDHWTAGFQHFWHKGRERGLAGDYGDYCLELKASLHNRFAHLPKNGMNYAYHMDAGRYARFLRRFSERYGVQRVEGKIAEVRKDLIHGDIRALRLDSGLELEGDLFIDCTGFRALLIGETMGVGYEDWSHWLFNDSAAALQTKSVGDAIPLTRSIGRESGWQWRIPLQHRVGNGIVYSSRYTDDDTAIRTLQANVEGEPLMTPRIIRFKPGQRRQTWKGNCVAIGLASGFLEPIESTSIHLIQRGIIRLMQMFPTDGISQADVDEYNKQAETEIHHIRDFIILHYHVTNRRDTPYWRDAASMPVPASLRHRIDLFRETGRVFRIPNELFAENSWIQVMLGQGIHPRQHHQTADLMGDDELAHFLGSMATSIERTVAQLPSHQQYVQQYCAGTGW

SEQ ID NO: 87000 - protein, 579 aa, unidentified
  source 1..579: note = Metarhizium guizhouense
  REGION 1..579: note = tr|A0A0B4HAW6|A0A0B4HAW6_METGA Tryptophan halogenase; OS = Metarhizium guizhouense (strain ARSEF 977) OX=1276136; GN = MGU_06090 PE=4 SV=1
MAVPPSCTVLVIGGGPAGSYAAAALAREGIETVVLEADKFPRYHIDESTLPSLRHFFKFIDFYDTVDAYGFYHKNGAVFRLAQAQPDACKSPSPAYTDFLEAGGPNGYAWNLIRSEFDDLLFKHAGTCGAQTFSETRVDMIQFEPVANGLKPDMNRNLEDHLTPGRPVSATWVRKDGTSGSITYKYLVDASGRHGILSTKYLKNRKFNNNFKNAATWAYWKSDNVYGPGTHMEGSPYFEALDDASGWAWFMPLHDGTRSVGIVQDQKMATEKKHELGRPSTLDFYKQCLEMAPRIKELLSEAEFIPHVRAACDWSYTASTYHLPNARICGDAGSFIDPLFSSGVHLAITGGLSAAATISASIRGDCSEAAAGSWHSKKTVESYTRFFLAVSSATKQIRTQHEPIIKDMDEEGFQRAFDLFRPIIQGTADADAAGKVSQLEISKILQFCFKAFTYVPPEKKDALFDKLRKLDSKALQDDAKQVQTLDAIEKHLTADELQILEILRSRRMIREDPFEMDSFTLDTIDGMAPRLVRGSLGLVNYEQAKIDKAHFYSQDFLDGNYPGIREGSVHLPTSRVQLG

SEQ ID NO: 87001 - protein, 782 aa, unidentified
  source 1..782: note = Aspergillus oryzae
  REGION 1..782: note = tr|A0A1S9DYJ5|A0A1S9DYJ5_ASPOZ Tryptophan halogenase; OS = Aspergillus oryzae OX=5062 GN=OAory_01027160 PE=4 SV=1
MDIPDRCTVLVVGGGPGGSYAASVLAREGIDTVLLEADNFPRYHIGESLLRTTGSFLEFVDAYGKFESHGFRQKNGAAFKFNSKPAAYSNFLQHGQHAWNVDRSQCDDLMFKHARECGARTFDGVKVQSVKFSQTFCLDEKESGEQAHLGKPVSASWVRKDKTTGSIKFQYLVDASGRAGLISTKYMKNRKFNEGLKNVASWGYFEGFEMYGVGTVAEGCPYFASFPDGSGWVWFIPLGENKVSVGVVMEQKSATAKKKLMESPSSREWLLTQAKEAPGIGDLLAKATLVSDVKSASDWSYTASTYATTNIRIVGDAGCFIDPLFSSGIHLALTGAFSAAATICSSIRGDCSEKSAADWHSKRIQEAYARFLLVVASTYGQITGKEAAILNDEGESDFDSAFELIRPIIQGSAEESTGKAGPEDATEAVSFCMRVIRKAQNRLEDISIGDKIIRAAMQPDTGSIGGSDIDRIVIHAERGALGLVKIMPSKVVHLPCSHGSMGSEKTNIPVAESPRDVQTTLTFSKQNEDCSAPPPMYIGKPQSYNRPTTTLPATIHDISGHELEYTLDSHGFQFYSHESKVKDFLDEERVRAEYYPETEQLLHDVTGATRFCVFDHTVRQASQDWTTERDARGPVQRVHIDSSYAGAEARVRYHFPDEATELLKHRYQMISVWRPIKTILKDPLAVADAHSTPESDLFPVKIHFPDREVEGWAVKADPQLKWYYRYKQPPDMVTLIKLFDSKLDGRARRVPHTAFVNPATEHEAPRESIELRALIFHPDDPN

SEQ ID NO: 87002 - protein, 500 aa, unidentified
  source 1..500: note = Sphingomonadaceae bacterium
  REGION 1..500: note = tr|A0A2A5YVH9|A0A2A5YVH9_9SPHN Tryptophan halogenase; OS = Sphingomonadaceae bacterium MED-G03 OX=1986231; GN = CNE89_03145 PE=4 SV=1
MKQPSLPRRIVVAGGGTAGWMTAAALARTLGPVAQVTLVESEQIGTIGVGESTIPPLVAYNRILGIDEADFMRATQATFKLGINFEHWRVPGESYFHSFGGTGKDHWSAGFQHFWMHGRAQGHDAPYGDYCLELQAAQANRFSHLPDDRMNYAYQLDSGLYAKFLRSMAEGDGTTRIEGRIVAVDLDGTSGDIAALRIDGDRRIEGDLFIDCTGFRALLIEGALHAGYDDWTHWLPCDGAVAVQTASVRPPVPYTRAIAHDAGWQWRIPLQHRQGNGIVYCSAFMTPDAALQMLLDSVEGETLVQPNPIRFRTGARRRQWHRNCVAVGLSGGFMEPLESTSIHLIQRAVLRILRMLPAGAISPRDIAEFNDQQMADMEQIRDFLILHYKATDRRDTPFWRHCASMSVPDSLTHRIELFRETGRIFRKNEELFAENSWVQVMMGQGVTPQSYHPVAAKLRPQELEHLLATLREQVSRTVAALPDHGAYIARYCGAQDVAAA

SEQ ID NO: 87003 - protein, 496 aa, Shewanella decolorationis
  REGION 1..496: note = tr|A0A5B8QXM8|A0A5B8QXM8_9GAMM Tryptophan 7-halogenase OS=Shewanella decolorationis OX=256839; GN = D0436_12405 PE=4 SV=1
MSQIKDIVIVGGGTSGWMTAALLAKLFKHTLNITLVESEDIGTIGVGEATIPPLQLFNSVLGIPENEFIQATHATFKLGIQFEHWGKQGDSYMHAFGNIGKDIGYTQFHQYWLSTQPEMMASFWDYSLNYQAALNNKFQSLEQIPHSPLSGLTHAYHFDAARYAWLLRQYSEKSGVKRIEGKIESVNCAANGHITNLTLVSGNSVQGDFFIDCSGFAALLIGKTLNVGYESYQDWLLCDSAYAVPSEKACEIKPYTRAIAHEAGWQWRIPLQHRTGNGIVYSSRYMKDEEAKAKLLSTLEGKPLAEPKKISFIPGRRLKQWQHNCVAIGLSSGFLEPLESTSIHLVQSAIIRLTKLFPHQGVVQATVDEFNRQSQLEFEQIRDFIILHYYLNRRSDSDTDTLWSACQQMQIPESLQQKISLFSETGAIFRHKDELFTEAAWVQVMLGQGIIPTDYNPLANTVAPEALTEFLSNIKVIIKNTVSNMPTHEQYLAQLV

SEQ ID NO: 87004 - protein, 493 aa, Alteromonas sp.
  REGION 1..493: note = tr|A0A385N0M8|A0A385N0M8_9ALTE Tryptophan 7-halogenase OS=Alteromonas sp. RKMC-009 OX=2267264; GN = DS731_16505 PE=4 SV=1
MCAAALARTAQPETQVTLLESDQIGTIGVGEATIPLLAEFNAFLGIDEHDMLKECAGTFKLGIEFIDWYRKGHAYFHPFGFFGKDTPEFPFHQLWLKLNSLVRNGELPEELCGNICEYNLCTVAAKLGRFSQAQGGANTILSTMRNAWHFDSGAYGKLLRRYAEQRDVQRIEGKIVDVSVEPKSGDITSVRLENGLVVAGDLFIDCSGFRGLLINEHLQSEFNDWTHYLPCDRAIAIQTYENIHAPPYTRAYAKEAGWRWQIPLQSRFGNGYVYSGQFQEQQEALTSLLSDLHGEPVTGPNFLRFRTGHRRTFWKNNCIAIGLAGGFIEPLESTSIHLVQTGIQLLISLWSASGSNDELRSRYNKMMTDEYEDIRDFIILHYKATLRDDTAFWRFVRDMSVPDSLSEKMEQFARNGNIATRPDALFTSHSWLAVMLGQGIVPMHYDSRVDRIPGDILIKNMHGLREAVKRTAASLPSHQQYINKHCAFSNTHG

SEQ ID NO: 87005 - protein, 517 aa, Cellvibrio sp.
  REGION 1..517: note = tr|A0A1Y0FXE0|A0A1Y0FXE0_9GAMM Uncharacterized protein OS=Cellvibrio sp. PSBB006 OX=1987723; GN = CBR65_10230 PE=4 SV=1
MINDSVRHVVVVGGGTAGWITAGVLAAKCVKEQGRDLTITLIESPTIGNVGVGEGTWPSMRTTLQAMGISEAEFIQQCDATFKQGARFNRWVDNAETDFYYHPLMLPFNLGPISTVTHWLDNAPNAEGLSYSAAVCHQEAICEAGLAPKSITTPEYQGNLNYAYHLDTNKFAAFIKDHCINKLGVHHVVNDIIGTRAGEDSEIAVLQLADNTELVADFYIDCSGFAGLLIDKHFKVPFIDKSDVLFCDRAVAVQCPYGINGKSVIASHTISTATGSGWIWDIGLQSRRGIGHVYSSRYIDDEEAAQGLRDYVGEAVRDLPLRFIKYTPGHREKFWRKNCVAVGLSAGFVEPLEASSILLVEISAYWIAEKLPQYKSGFARCEQQFNEIFRYRWDTIIEFLKLHYCLSKRRDTPFWRDNTSPESIPDTLLEKLAMWQEHCPSVLDFLNRADVFPFESYCYILYGMKFKTATHRPDEKNLQRLEHKVTNQRRHLTALMSALPANRALIDAIRKHGLQKI

SEQ ID NO: 87006 - protein, 511 aa, unidentified
  source 1..511: note = Sphingopyxis indica
  REGION 1..511: note = tr|A0A239JAR3|A0A239JAR3_9SPHN Tryptophan halogenase; OS = Sphingopyxis indica OX=436663 GN=SAMN06295955_109148; PE = 4 SV=1
MKDSVTEIADVVIVGGGTAGWMAAAALSRFLANGRRRITLVESDAIGTVGVGEATIPPILNFNRMLDINENDFLRATRGTFKLGIEFVNWGRAGDRYIHPFGSFGHDLHGIAFHQLWLRERVRGEAGDIADYSMSAAAAARGRFGRPGREAKPPLSELFYAFHFDASLYARFLRGLAERQGTIRREGRITGVERDGESGDVAAVRLESGERIAGDLFIDCSGFRGLLIEEQLGAGYEDWSRWLPADRAIAVPTANVGPPDPFTRSTAHGAGWQWRIPLQHRTGNGHVFSSAFMDEDEARRILLANLEGEPLADPRTIPFRTGRRKLSWSHNVIALGLSSGFLEPLESTSIHLIQNGIQRLLALFPDKPVSPVERDEYNRGMRDLYEDVRDFIILHYKATQRDDTPFWRHVRDMDIPDSLARKIELWRLHGRIFRENAELFGVTSWVAVLLGQNIRPERYDPVADTLDEAKVAAAMAEMRAAYARAAERLPAQDEFLKVAGAWAAEAAEAAA

SEQ ID NO: 87007 - protein, 507 aa, Cellvibrio sp.
  REGION 1..507: note = tr|A0A1Y0G039|A0A1Y0G039_9GAMM Tryptophan halogenase; OS = Cellvibrio sp. PSBB006 OX=1987723 GN=CBR65_16715 PE=4; SV = 1
MGEQTIKNIVIVGGGTAGWMAAAAISKTVGCQTVNITLIESEEIGTVGVGEATIPMISLFNNVLGLDENEFVRETNGTFKLGIEFVDWRKPGHSYFHPFGLLGVDMDGISFMHYWLRWKKAGGNLDYAKFNAETEAAAALKFMRTNHESGPMLMPKINYAFQFDAGLYAAFLRRYSEKRGVVRKEGKIVDIKQDATTGHIDCVVLQNGETIRGDFFIDCSGFRGLLIEQVLQAGYHDWSHWLPVNRAVAVPCESAGKLLPYTRSTAREFGWQWRIPLQHRTGNGYVYCDQYISDDEAASQLLAHLDGRAQAEPKTLRFLTGMRKKCWIKNCLAIGLAGGFLEPLESTSIHLTQVAISKLLAMFPRDEFNEALIKRFNEEMETEYDTVKDFLIAHYKVTEREDTPFWQYVKNMSIPDSLQERLNIFKKRGEVLARQTELFKEVNWFVVLVGQGLFPEGYHPVADAISADELRLRLTKIRTGIQNRINIMPGHADFIAANCRSPMSKIG

SEQ ID NO: 87008 - protein, 512 aa, unidentified
  source 1..512: note = Sphingopyxis indica
  REGION 1..512: note = tr|A0A239G833|A0A239G833_9SPHN Tryptophan halogenase; OS = Sphingopyxis indica OX=436663 GN=SAMN06295955_10374; PE = 4 SV=1
MQVIQRIVIVGGGTAGWLTAGVIAARHRGRMPHGFEVTLVESPNVPIIGVGEGTWPTLRTTLRRIGVSETDFFRHCDAAFKQGARFNRWTTGADDDGYYHPLMLPQGFAQVNMVPHWLADGDGSFCDTVTPQGRLCDAGLAPKTIATPEYEALANYAYHLDAGKFSAFLQRHCCETLGVRHILADVTEVRMTESGDVAALETEQGPVIEGDLFVDCTGFRALLIGDAMQVPFRPCGDTLFCDTALAVQVPYADPADPVVCHTISTAQSAGWIWDIGLPTRRGIGHVFSSSHISADEAERELRAYIGPAADGLTVRRIPIRSGHRETFWKGNVVAVGLAAGFLEPLEASAIVLVELSAKMIAEQLPPNRAVMDVLARRYNATTHYRWGRIIDFLKLHYALTRRDDSDFWRDNRQPETIPGRLLDLMELWKFQPPWLHDEFDRAEEVFPAASYQYVLYGMGHQTRTPQGEGATDAELARRARRETEVQTARLMAGLPRHRELLDKIAQHGMQPI

SEQ ID NO: 87009 - protein, 514 aa, Sphingobium sp.
  REGION 1..514: note = tr|W1S8X7|W1S8X7_9SPHN Tryptophan halogenase; OS = Sphingobium sp. C100 OX=1207055 GN=C100_12085 PE=4 SV=1
MVQPVRNIVIVGGGTAGWLTAGIIAARHRSRIGSGFTVTLIESPNTPIIGVGEGTWPTLRTTLSRMGVSETDFFRECDAAFKQGARFARWTSGAADDGYYHPLMLPQNFGQVNLAPHWLAQDDPDSFCDAVCAQGRICDDGLAPKTMATAEYDALANYAYHLDAGKFAPFLQRHCCEKLGVRHILADVEQVLMHDNGDIRAVRTTQAGEVEGDLFVDCTGFKALLIEGAMGVPFRDCNDILFCDTALAMQVPYAAPDCPIASHTISTAQSAGWIWDIGTQARRGVGHVFSSSHISDDHAERELRAYIGPAADGLNARRIKIRSGHRETFWKGNCVAVGLSAGFLEPLEASAIVLIELSAKIIAEQMPACREVMDIVAARFNATAHYRWGRIIDFLKLHYVLTKRTDSDFWRDNVRIESIPDRLQELLLLWRYQSPWFHDEFDRAEEVFPAASYQYVLYGMGFRTEVDPPALARDAHLADRARRENAAATAKLCAGLPRHRELIDRIVAHGLQPV

SEQ ID NO: 87010 - protein, 578 aa, Kordia sp.
  REGION 1..578: note = tr|A0A345GV27|A0A345GV27_9FLAO Tryptophan halogenase; OS = Kordia sp. SMS9 OX=2282170 GN=KORDIASMS9_00355 PE=4 SV=1
MNPKKRKYDVIICGGGLAGLTLARQLKVEFPQLSTLVIEKRTFPKPVATYKVGESTTEIASFYFKEDLQLSDYFKNAHFKKLGFRFILGDGRDEWTSRPEIGLSKYPPYDSLQMDRGVLENDLCEINKVSGVEIIDDTAIIDIEINEKAQDNIVKIKKDDQTFDLQCRWVIDSMGRRLFFHNKYNLTKKMETPHNAAWFRVKGRFDVEDMVNKDNATFRNHVPHKNRYYSTFHIMGQGYWVWLIPLNSGHTSIGIVTSEAYHDFSTYNTKAKAKAWLEQYEPTIAKHLENFKMEDFLRNKNYSHSATRVASIDRWACTGEAAVFADPLYSPGSNMIGYENTCIVDMLRKDLSNNLEEKHVDRLSQFIISQNEWLIDHIQGSYPYFGHQQVYTLAYLWSVVIGWSLDCPQMFNKTFLDIEVKTRLDKENANIIFALGRMKKLFLDWHKVAKNTFTFDFIDYLNIPFILDIFKRNLVPNKSLETLIEDRIHTVERLEEFAQAIFLIVVKDVMPEQLERFQEPIWLNVNAISLNPDAWDEEGLFEPKTKPRDLTIVQHQILKVIQYKDQLKEKIDLDISIF

SEQ ID NO: 87011 - protein, 492 aa, Alteromonas sp.
  REGION 1..492: note = tr|A0A385MZP8|A0A385MZP8_9ALTE Tryptophan 7-halogenase OS=Alteromonas sp. RKMC-009 OX=2267264; GN = DS731_20235 PE=4 SV=1
MNNKKQRVVIAGGGTAGWMAAAALTRLLHNRVDVTLVESSDIGTVGVGEATIPTLVFFHQLLKIDEKAFMAATNATFKLGINFENWRTTRDSYLHAFGATGQDCWAAGFQHFWTRGRQLGLSGDFGQYCLERVAAEAHKFAHLPKNGLNYAFHIDAGRYAGFLRQLAEEAGLKRIDARIEKVVTRPADGFITQLQLDNGDRIDGDLFIDCTGFRGVLIEETLHTGYTDWSHWLLCDSAVAVQTESHAPPLPYTRCIAHEEGWQWRIPLQNRTGNGLVFCSKYLSDDAATQRLTGNIDGAALNDPKVIKFRPGRRVKQWNRNCVSLGLASGFIEPLESTSIHLIQQGIVRLLRMFPHGEVQQSVVDEFNRQSVDEIEHIRDFIILHYHVTERTDSAFWRHCKQMDVPDSLARRLTIFRESGQIHRKNNELFDDSWQQVMIGQGLLPEAYHPIADMMSEQELQNLLTHIKSNIDRTVAGLPTHRQYLNSLFNRA

SEQ ID NO: 87012 - protein, 514 aa, unidentified
  source 1..514: note = Sphingomonadaceae bacterium
  REGION 1..514: note = tr|A0A2A5YRY8|A0A2A5YRY8_9SPHN Tryptophan halogenase; OS = Sphingomonadaceae bacterium MED-G03 OX=1986231; GN = CNE89_07575 PE=4 SV=1
MVQPVRNIVIVGGGTAGWLTAGVIAARHKTLIGRDISVTLVESPNMPIIGVGEGTWPTLRTTLSRLGISETDLFRECDAAFKQGAFFARWTDGTARDGYYHPLMLPQNFGQVNLAPHWLAQDGGDSFCDAVCAQGRICDDGLAPKTMATAEYDALANYAYHLDAGKFAPFLQRHCCEALGVRHVLADVEHVVMHDNGDIAAVRTTQAGMVEGDLFVDCTGFKALLIEGAMGVPFRDCSDILFCDTALAMQVPYAAPDSPIASHTISTAQSAGWIWDIGIQTRRGVGHVFSSSHLSDDQAERELRAYIGSASEGLDVRKIKIRSGHRETFWRGNCVAVGLAAGFLEPLEASAIVLIELSAKIIAEQLPACREVMDIVANRFNATTHYRWGRIIDFLKLHYVLTKRSDSDFWRDNVRTESIPERLRELLLLWRYQSPWFHDEFDRAEEVFPAASYQYVLYGMGFRTEVAPAALARDAHLASRAMRENIAATDRLRAGLPRHRDLIDRIVAHGLQPV

SEQ ID NO: 87013 - protein, 506 aa, Porphyrobacter sp.
  REGION 1..506: note = tr|A0A2Z2PFY5|A0A2Z2PFY5_9SPHN Tryptophan halogenase; OS = Porphyrobacter sp. CACIAM 03H1 OX=2003315; GN = CBR61_15110 PE=4 SV=1
MTGQSAPLSSIVIVGGGSAGWMTAAALADAVGRSCAITLIESEAIGTVGVGEATIPPIRHFNKRLGIDEATFVRETQGSYKLGIEFIDWGRQGHRYFHPFGQYGAEFDSVPFYHHWMHEHLAGRVDGPIDDFSMCWAMAKAGKFSHPSPDRRLIQSTFDYAYHFDAGLYAAFLRRYAESRGVTRIEGKVVDVALRGEDGFIESVTLDNGEQIAGQFFIDCSGFRGLLIEDALHAGYDNWQAWLPCDRAVAVPCERGEFTPYTRSTAREAGWQWRIPLQHRTGNGYVHCCEFISEDEAAATLLANLDGMALADPRPLRFVTGKRRKFWEKNCVAIGLSAGFMEPLESTSLHLIQYGILRLIALLPDAAISPLLAREYNAQTSREYELIRDFLILHYKATTRDDSELWRYCAAMPIPDSLQYKIDHFREAGMLVADGQELFANPSWIAVYLGQGIVPRQAPALAAMRTGVPVAERFRQIRQAMDEAVAAMPSHGDFIARHCPAPPLAA

SEQ ID NO: 87014 - protein, 507 aa, Shewanella decolorationis
  REGION 1..507: note = tr|A0A5B8R1H3|A0A5B8R1H3_9GAMM Tryptophan 7-halogenase OS=Shewanella decolorationis OX=256839; GN = D0436_16960 PE=4 SV=1
MTIRKIAIIGGGTSGWLAANHLGRVLQGGSELSITLIESPDIPIIGVGEGTVPSIRKSLQSFGISESEFIRACDVTFKQSIKFVNWLDKARHGKDNFYHHLFDIINLQGVDTVSAWLVEKQGDFADYVSPQHLVCEAAKAPKLITTPEYAGVLGYAYHLNAAKFAKLLAKNAIEKFNVEHIFSTVQDVRLGDDGAISSLQTEQGTLSFDFYIDCSGFESILLAKALKVPFISKAHQLFIDTALVAQIPTQPTDIIPPYTQATAHQAGWIWDIALTQRRGTGFVYSSAHMAQSEVERKFDHYLGGKLADVPHRKIPMTVGHRQQFWVKNCVALGLAQGFLEPIEATSILLTDFSARFLAERFPANIDDVDYLAKRFNDTVGYAWERVVEFAKLHYCLSDRTDSAFWLDNQRQETIPEGLKQRLELWKSYSPIAEDFPSKFEVFNLDNYLYVLYGMKYQTNLRGGSSATQASLNMYMNKMSKVKQQMLDGLPEHRELLDKICIYGLQSI

SEQ ID NO: 87015 - protein, 503 aa, Cellvibrio sp.
  REGION 1..503: note = tr|A0A1Y0G3G3|A0A1Y0G3G3_9GAMM Tryptophan halogenase; OS = Cellvibrio sp. PSBB006 OX=1987723 GN=CBR65_16130 PE=4; SV = 1
MQKKPVSKIIIVGGGTAGWMTAASLSKHFRKTSVAITLVESSEIGTVGVGEATIPTLRRFYAELGMKDLDVMRATRATCKLGIQFRDWHSTGSQFIHPFGLYGQRANGVDFHHYWMKLREHGEGAGELPEYSLGVQLAEHHKFIEPSPNPPSELSVFDWALHFDASLFAKLMREYAEQQGVKRIDARIHEVRQDSIDGSLASLMLENGDEVNGDLFIDCSGFRALLIEQTFKTGYEDWSEWLLCDSAVAVQSELAGDPPPYTISQAHEAGWQWRIPLQHRQGNGHVYCSRYMTEDEAIAILKKNIDGHLLHEPRRFSFTAGRRKQAWNKNCIAVGLASGFLEPLESTSIALVETAIEKIRHSFPYPYYTQAAVDEFNHLTAQEYERVRDFIILHYKANQRHGEPLWDQCRTTAVPEPLQNKIDAFVTRGELIRYPIEIFGPPSWLAIYHGFGILPQTYNSRVDQLDENYLKQSLAEMRKSIQRAVNSVPTHKEFIAANCSVNA

SEQ ID NO: 87016 - protein, 497 aa, Cellvibrio sp.
  REGION 1..497: note = tr|A0A1Y0FX77|A0A1Y0FX77_9GAMM Tryptophan halogenase; OS = Cellvibrio sp. PSBB006 OX=1987723 GN=CBR65_11890 PE=4; SV = 1
MKELKLKRVVIAGGGTAGWISAALLAKSFGKSIDLTLIESDAIPTVGVGEATIPPIINLHKVLELSEKEFMSRVNGTFKLGISFENWRDVGENYVHSFGFAGKSNWAAGFQHFWLAGQKRGIDSTEYGNYCAEHLACRKEKFAVMPKNGVNYAYHLDAGLYAKFLREFSEKYGAVRKEGKITGVNLHPDTGYIQSLSLESGEVVEGDLFVDCSGFRGLLIGDALKTEYEDWSHWLPCNSAIAVQTETVRPPLPYTRSIAREFGWQWRIPLQSRVGNGLVFCSEYGSDDEAKELLVKNLEGKLLNEPRVIKFTTGTRKQHWTKNCVAIGLSSGFLEPLESTSIHLIQKSITRFIQLFPYDGIKQSEVDEFNRQTREEVQNIRDFIILHYHVTDREDTPFWRYCKYMDVPESLTHRIKLFRETGKVFKKEMDLFAEESWIQVMLGQGVTPESYHPVVDSMTDDALRELLMELKQSTEQKVDRLPAHHEFIDYYCKSNVM

SEQ ID NO: 87017 - protein, 493 aa, unidentified
  source 1..493: note = Planctomycetes bacterium
  REGION 1..493: note = tr|A0A518IE13|A0A518IE13_9BACT Tryptophan halogenase; OS = Planctomycetes bacterium Enr17 OX=2527976; GN = Enr17x_33880 PE=4 SV=1
MQQFDVVILGAGFGGSLTALLLDRIGLSVALIDRGTHPRFAIGESSTPAAGYLLRSLSEQYDLPQFQPFCKYGTWQERYPGLACGIKRGFSYFCHEPQQNFEAKPHHGSELLVTANVSDSLADTHWYRADVDTFFAEEVQKSKVVYLDQAEVMLDRVDGWEITGTRQGEPIALRAAFVIDATGAAGIVPNKLGIKRQTEFQTNSTAVYGHFENVVPWAEVLDQRQIDRSDYPFDCDHAALHQVLREGWMWQLRFNHGITSAGFVLKGGPQTGVSEDVWSGLLERYPSLAAQFAGASLVAPESGLVSTSRLQRGWKLCAGENWALLPHTAGFIDPLHSTGSAHTLCGIERLVAALERFWGKVELTSAMADYSDSIQAELSLIDTLIAGCYHSLPDFDLFTASTLFYFAAATGFEHLRCCEGKQPLFLCADDSEFRPVVKEWSELVGQLEKNEYEIPRAIERAEMLLKPWNRVGLFQPAIPNMYYYTAAPESEPR

SEQ ID NO: 87018 - protein, 510 aa, Cellvibrio sp.
  REGION 1..510: note = tr|A0A1Y0G0I7|A0A1Y0G0I7_9GAMM Tryptophan halogenase; OS = Cellvibrio sp. PSBB006 OX=1987723 GN=CBR65_16125 PE=4; SV = 1
MQCHACWRADLNERVNKIVIVGGGTAGWMAAASLARFFDGKPSHIVLIESEQIGTVGVGEATIPGIRAFNLSLGIDEIDFIRKTNATFKLGIEFRNWYQNNTTFFHPFAAYGLPLHGVEFHHYIARMRAAGETVDIADYSFPIQLARRGHFAQPHEKPPTPLADYGYAYHFDAALYASYLRDYAMARGVVRIEGKIASVKLHPDDGFIESVIMDNNAEIAGQLFIDCSGFRGLLIEEALHTGYDDWRCWLPCDRAVAVQSQLTGEPTPYTRTTAHEAGWQWRIPLQHRTGNGYVYASRFISDEQARQTLLTHLDGEPIKQPRQFDFVTGRRKKIWNKNCFALGLASGFLEPLESTSISLIQTGISKLLQFFPDVSFNAHDMAEVNRLHHHEFERIRDFLILHYKATTRSDTAFWRFCQEMPVPDSLAHKMQVYESRGHLVMYDPEAFEKESWVTMYMGFHRYAERYDERADNINLDELKNQLAKMRQMIQIAADQAMRHGDFIARHCAAE

SEQ ID NO: 87019 - protein, 491 aa, unidentified
  source 1..491: note = Flavobacteriales bacterium
  REGION 1..491: note = tr|A0A2D8WDP5|A0A2D8WDP5_9FLAO Uncharacterized protein OS=Flavobacteriales bacterium OX=2021391; GN = CMD04_00645 PE=4 SV=1
MKLDRICIIGGGSAGWMTASMLSRHFEGTGKEITVVEADIPRIGIGESTTQFFNTFIRYLGLKDEDWMPYCNATYKHSVKFTNFNQDGSFHYPFGPRGTDIPLTEYYNWRRGRNIDSMTFCRVFSDVIDPIEVNRLYPPFLERYVGYHVDALLFGDFLRDHYAIPKGVKHIKGTVTNIQSCVDGVSRVFLGTDDRYVDGDLFIDCTGFRALLMNELNVKWEDWSTLLKNDSTWAVRKPYTDKKTEMQPYTECTGLSSGWVWNVPTWDRIGTGYNYCSQYITDEDALAEFKEHLGVDIPENMFRLLKWPTGIREKVWSHNVVSIGLSAGFIEPLESGGLYSVHEFLFKLIQVLPKASNKWNGFQREQFNHSVRKKFTSFRDFVVKHYTMGYRDDTPFWKDYTDMDALGEFPDLLTQDWEQIQNINYISEGEAYLLGGYEYDIMPEHYEMLSKRNGYNIPDFEEPILRRTFMDQTLGRYPNAYEYYEKYLYNE

SEQ ID NO: 87020 - protein, 498 aa, Cellvibrio sp.
  REGION 1..498: note = tr|A0A1Y0FXW0|A0A1Y0FXW0_9GAMM Tryptophan halogenase; OS = Cellvibrio sp. PSBB006 OX=1987723 GN=CBR65_12890 PE=4; SV = 1
MIGNQTVKHLVIVGGGTAGWMAAAAFSKLLGKSISVTLVESDEISTVGVGEATVPPLILFNRYLGINEQELMAFVKGTIKLGISFENWKNINESYIHPFGQTGKDTWAASFQHFWRKGLELGVDYPLGEYTVEYQAAVQSKFSHMPGSPLTYAYHIDAGLYAKFLRGIAEKAGATRIEGTVQDVVLDDGGYIRSIQLASGEIIDGDFFIDCSGFRALLIEQALHSGFEDWSHWLPCDSALAVQTESVREPVPYTRSIAHTAGWRWQIPLQHRVGNGLVYCSRYMSDDEARKTLLDNLEGRVISEPKIIRFKAGQRLKHWNKNCVALGLASGFIEPLESTSIHLIQRGITRLLQMFPSNGIFSGDIDEYNAQMKTEILSIRDFIVMHYHLTEREDSDFWRYCKNMPIPASLVHRINLFKETGKLFVESPYKLFAEPSWLHVMVGQGVVPERYHAVANEMTDAELKQFLEGIRSSVQKAVQKMPSHHDYLQYYCKAPEWS

SEQ ID NO: 87021 - protein, 499 aa, Pseudoalteromonas sp.
  REGION 1..499: note = tr|A0A0W1LG49|A0A0W1LG49_9GAMM Tryptophan halogenase; OS = Pseudoalteromonas sp. H105 OX=1348393 GN=ATS75_03580; PE = 4 SV=1
MQNKQIKQVVIAGGGTAGWITAALLNKVLGKVVNITLVESEQIGTVGVGEASIPPILHLNAALGIRESEFIKATQATIKLGIEFENWRAQDHTYMHAFGDIGKDFPFCEFYHFWLRAKQQGTTADFWDFSLNYQAAKQHKFTHLQHIPNTQLTGLNYAYHFDATLYGEYLKSLAISRGVNRIEGKIANVEQCENTGFITALALEDGQTISGDLFIDCTGLRALLIEQTLNTGFEDWSHWLPCDSAIAVQTQSANDPVPYTRSIAHDAGWQWQIPLQHRVGNGLVFSSRHITDEQAKQQLLANLPGEPITEPRVIRFKTGRRRKQWHKNVVSVGLSSGFLEPLESTSIHLIQTAAIRLIKLFPHNGIDDSLVETFNQQSQTEIECIRDFIILHYKLTDRTDSAFWRQCKQMSIPDSLQKKIDLFKATGKIIRQDDELFAEIAWQQVMIGQGLEANDYSVLAGALTDDQLNDLFSSLKTLINGTVEQLPSHSEFLARMKNN

SEQ ID NO: 87022 - protein, 497 aa, Pseudoalteromonas agarivorans
  REGION 1..497: note = tr|N6V235|N6V235_9GAMM Uncharacterized protein; OS = Pseudoalteromonas agarivorans S816 OX=1307437; GN = J139_10692 PE=4 SV=1
MKPIKHVVIAGGGTAGWITAALLNKVLGKVIKITLIESSTIGTIGVGEATIPPIIQLNNALGINEQDFINATNASIKLGIEFENWKTPSHSYMHAFGSFGKDLPFCDFYNFWVKGHISGAKESLWDFSLNYQAAKQHKFAPLNTLPNTQLPGLSYAYHFDATLYAEFLKNLATSRGVEHIDAKIEQVEQCPLSGNIKSLTLSNTQQINGDLFIDATGQRALLIKQTLNTGFVDWSHYLPCDSAVAVQSQGTSELKPYTRSIAHSAGWQWQIPLQSRIGNGLVYCSRYLSDDAATQLLLNNLPAEPMTEPRVIKFKTGRRLKQWHKNVVSVGLASGFLEPLESTSIHLIQSAVTRLIKLFPHNGISEALVTEFNKQSVIEIEHIRDFIILHYTLTAREDSPFWRQCKQMDIPDSLAHKLKLFKQTGKVVRENDELFAEVAWQQVFIGQGLIPEDYNSIVDSLSSEQLNDLFSTLKTLITSTVDQLPTHKNFLAKIKKA

SEQ ID NO: 87023 - protein, 499 aa, Cellvibrio sp.
  REGION 1..499: note = tr|A0A1Y0G073|A0A1Y0G073_9GAMM Tryptophan halogenase; OS = Cellvibrio sp. PSBB006 OX=1987723 GN=CBR65_16025 PE=4; SV = 1
MKPIKKIVVVGGGSSGWIAASMLSFHLKNDLCQIELVESTEIGTIGIGESTVPPFVGLIQRLGIDEQDFVRETQATYKLGIKFVDWHQRNENYFHPFGVIGKKIGNHDFYQCWLKARMQGEASSLQDFSPCNVMAENGRFFLPNKAQNTPIGGANYALHVDARLVAQYLRRYAEARGVRRTEGVVQQVSQRDNGFIDKVVLTDGREIQGDFFIDCTGFKALLIDKTLGVDVEDWSNFLPCDRAIAIKTEQTEPTLPYTLATARKAGWTWRIPLQHRIGHGYVYASRFCSDADAKSTLMRAIDSPMVEEPRVIPFVTGRRREMWKHNCLSLGLASGFIEPLESTAIHLIARGMDFFLRYFPDQDCEPGLIREYNRRMAGDYEEVRDFIVLHYCTTQRQDTPFWRWCQHMPLPDSLNERIELFRGHGALREGVDELFRSASWQSVFEGMGIRPRKHCPRVDNVDFAQIGETLTRARAAIHGMVKTLPTHDEFLRHQLKLEP

SEQ ID NO: 87024 - protein, 507 aa, Cellvibrio sp.
  REGION 1..507: note = tr|A0A1Y0G0J3|A0A1Y0G0J3_9GAMM Tryptophan halogenase; OS = Cellvibrio sp. PSBB006 OX=1987723 GN=CBR65_17790 PE=4; SV = 1
MKIKRIAIVGGGTAGWLAANHLGFELRKDPEIEITLIESKDVPSIGVGEGTVPYIKKALEKFGISEAELIASCDVTFKQGIKFVEWLNSAIHGEKHYYYHPFESPFPSGIDIIPYWLNHRSRENFHEITAQSYACEAKLCPKKISSPPYQGEMNYAYHFDAIKFAKLLSRNAISKYRVKHKIATVVGAQKDDAGNIDSLMLGSGESSKFDFYIDCSGFSSLLIEKELSVPFVDKSNQILTDTALALQVQTEADEEIPPYTIATAHKAGWVWDITLTGRRGTGFIYSSQHMSETEAVEGFSKYLGVDVEMLSPRKISMPVGYREEFWVNNCVAIGLSQGFVEPLEATSILITDFSAEYLARAFPVNVEDISLLKKRYNKVVEYSWARILDFIKLHYCISDRDDSDFWRENRDMSNVSDVLVERLSIWEKFHPKKSDFFSKFEVFDVENYLYVLYGMKFYTVPPHASAYDVESGQGKMAQVRQDAERLAVELLGHREWLDKLKKAMQPG

SEQ ID NO: 87025 - protein, 505 aa, Cellvibrio sp.
  REGION 1..505: note = tr|A0A1Y0G0V9|A0A1Y0G0V9_9GAMM Tryptophan halogenase; OS = Cellvibrio sp. PSBB006 OX=1987723 GN=CBR65_16740 PE=4; SV = 1
MSDNRIEHIVIVGGGTAGWMTAAAMAKVLKNQYCNIHVIESEDIGTVGVGEATIPQIQLYNRLLGLDEDDFVRRTQGTFKLGIQFVNWSHIGSSYIHAFGDVGKDMDAIQFYHYWLKLYQAGEVPDIGEYTLTAIAARKGKFMRSIDAGNSPLSNIAYAFHFDAGLYARYLREYSEQLGVVRTEGKITHANLNHDNGFIESVALENGAVIKGDLFIDCSGFRGLLIEQALKTGYEDWTDWLPCDRAWAVPCESAGDPTPYTRSTAHAAGWQWRIPLQHRIGNGHVYSSRYMSDDEAVNILLNNLDGAPLAEPRLLTFTTGKRHKFWNKNCVAIGLASGFMEPLESTSIHLVQSSIARLMSLFPNKHFDQEDIDEFNRQAHFEYDRIRDFLILHYHATTRDDSPFWNYCRTMSIPEELQQKINQFKKNGRIYRNSVEMFNDLSWLEVMHGQGIQPRAYHPIVDVMPKDELMKRMAGIKSVIDRSVEVMPSHAEFIAEHCKAEKLMM

SEQ ID NO: 87026 - protein, 490 aa, unidentified
  source 1..490: note = Sphingopyxis indica
  REGION 1..490: note = tr|A0A239JDP5|A0A239JDP5_9SPHN Tryptophan halogenase; OS = Sphingopyxis indica OX=436663 GN=SAMN06295955_109157; PE = 4 SV=1
MGGGAAGWIAAALLAKRIGRHQARITLVESEEIGIIGVGEATVPLLAQCNALLGIDEFDFIRKTQGTFKLGIEFCDWGTAGNRHFHAFSDYGHPVEGVQTHHYWLRLRQSGDDTPIDDYSFAYAVAKNNNFAPSDPNDARYHHAYHFDAALYARYLRDVATDLGVQRIEGKMTHVDLDSESGDIAAIHLADGQTVPGNLFLDCTGFASELLGKALDTPFVDWSHWLLCNRAIAAPSGPAGAPAPFTRSTAHAGGWRWTIPLQHRTGNGMVYNSDFWSDDAARSALLDSIDGEPLAEPRVFRFTSGHRREFWRRNCVGIGFSSNFLEPLESTGIQLIVMGVLKLLKCFPQGTIDPVLRDEYNRLSTREIERIRDFIIAHYYLSRRPEPLWSACRNMEIPDSLRHKLDVWKASGQIALGDSESYMEPSWIAILLGNGVVPRRYAVSADLYPLEQIRDGMKLRREEIMRSAQAVTSHRDFINSHCKAAQMALA

SEQ ID NO: 87027 - protein, 496 aa, Cellvibrio sp.
  REGION 1..496: note = tr|A0A1Y0G0T6|A0A1Y0G0T6_9GAMM Tryptophan halogenase; OS = Cellvibrio sp. PSBB006 OX=1987723 GN=CBR65_18440 PE=4; SV = 1
MKNFIKKVVIVGGGTAGWIAAALLSKLMGNALTIELVESDAIGTIGVGEATIPPIRHLNEALGIDEADFMRETGATIKLAIKFEGWHRPGQDYFHAFGAVGQDFAFCPFHHFWLRAQQTNIHSELWDYNLNYQCIQANKFAPVSTKDPNLEVPYAYHFDASRYALYLRRYAEQRGVKRVEGMVEQVQRDTTSGDIAQLILKDGTVLAGDLFLDCSGLRGLLIHETLGTAFEDWSHWLPCDRAVAVPSEPLTAALAYTRSIAHPMGWQWRIPLQHRNGNGLVYSSRHCSDDEAAHQLLTQLDSTATDEPRLIRFTTGRRVENWRHNVVAIGLSSGFLEPLESTSIHLIQSAVVRLLKLFSRQRIEPATVAEYNRQSALELEQIRDFIILHYHANQRVNDPFWDELRHMKIPNSLAQKIHLFQQTGALFKTQDELFVESSWLQVLIGQGVVPQDYHPMADQVTEAQLRSLLNNMKKIKQAPLQQMLDYREFLARINNK

SEQ ID NO: 87028 - protein, 498 aa, Sphingobium sp.
  REGION 1..498: note = tr|W1RWR6|W1RWR6_9SPHN Tryptophan halogenase; OS = Sphingobium sp. C100 OX=1207055 GN=C100_19615 PE=4 SV=1
MYNDPVRNVVIVGGGTAGWMCAAGLSRMLDMRGLSVTLIESDEIGTIGVGEATIPSLHVFNQLLGLDEADFMRQTRATIKLGIEFTDWGKLGDHYIHPFGDYGLDRPDVKFHQMWLKLLHAGADVGAIGDYNMCLMAARLNRFGIGQMRRGLPDLRHAYHLDAGLYARYLRRYAEQRGIVRREGRVTNVNQREDGFVSSVTLRDGQVVEGDLFVDCSGFRALLIGQTLGVGFEDWGRWLPCDRAVAMPCENTGPLIPYTRATADAAGWRWRIQLQHRIGNGHVYSSAYIDSDTAEARLRATLDGAAMSDPLHIRFKPGHRHRLWDRNVIAIGLSGGFIEPLESTSIHLIQTGVSRLLLLFPDMRFTPALIDEFNRSSLLEYEQIRDFIILHYKATRRDDTPFWRYCRDMEVPDSLRHKMELFRAGGRIFRFSDDLFTESSWLAVLLGQGIVPECHDPVADAIPAGDMERALLSLRAAVLDAAKALPDHTDFIRSYCAI

SEQ ID NO: 87029 - protein, 569 aa, Alteromonas sp.
  REGION 1..569: note = tr|A0A1Z9XFC7|A0A1Z9XFC7_9ALTE Tryptophan halogenase; OS = Alteromonas sp. TMED35 OX=1986603 GN=CBB95_07040 PE=4; SV = 1
MRDNESHNNINRVVVIGGGTAGWLAAGVLAAKLSAENSVTLIESPAIPTIGVGEGSWPSLKDTLLDIGISELEFLSVCHGSYKQGSSFANWRKGEHKYYHPFTEPAGYREIDIHACWQAIAPTEAYENAFSIQAAMCEAGKAPKQATTPDYAHVLNYGYHFDATALATLLKKHCINKLNVTHVVGHIASVNSHQNGYIKSVVGDNGHVTEGDLFIDCSGSNGLLIDKHFKVPWVSVEHIMLNNRAVALQVPYSDNDSAIESTTLATAHPCGWTWDIALQHRRGVGLVYSSQLASDEQAYKTLINYVSRRYPKALAEALTPRTLAFEPGHREHFWVKNCLSLGMSSGFVEPLEASAIAMVELGLRMLCEGFPQTQEHMTIVSKRYNQRFRYRWRRVIDFLKLHYVLSDRDEPYWRAQRDMATVPESLRELLTLWKYQSPSRLDLIENEEIFPSASYQYVLYGMGYRTLPNSLRLSEEDRQKASNIREKLQKTKPSYFQALPSNNALLKSLAERYATSDLVNSQCPSGQTDKASSANDASKDNGNINNNVESYRDGTPNKKDTQYDRIGFR

SEQ ID NO: 87030 - protein, 503 aa, Shewanella colwelliana
  REGION 1..503: note = tr|A0A1E5IQN8|A0A1E5IQN8_SHECO Tryptophan halogenase; OS = Shewanella colwelliana OX=23 GN=BEL05_11290 PE=4 SV=1
MSDKPISSITIVGGGSSGWMTAMYLQKLYNQSGGDVKITLIESQDIGTIGVGEATVHTIRFFFAAMGLDETELLRETNATLKSGIMFRNWMKPKVGNTHEYFHPFEQQRPLGPIDNASTWVHSPEAELSYADATSISAELIKHQRCPKAPNSPPYQGVVPYGYHLDATLMGRYLRKKACEAGVIHVESIVTDVNTDGESITSVTTPKGEFSSDIFIDCTGFKGLLIEKLRSDNWQSFEKELPCNKAVAIQRKYPQDMPPKSYTVATALSNGWVWEIDLSNRQGTGYVYDGNRLTKEQAEAELRAHLGDELEILRTVHLDMRIGCRKAFWVGNCIAIGLSGGFIEPLESTGLHIVNVGARLLATHLSSANPPQAVRDSYNRTLNGVYEDLRQFIILHYCLTDRDDTEFWREAAKTAKYAKGLQDRIDIWKHKTCEYMDLAGSFNTIFTDENYRFVLYGMDHVPAITLPTTREALTATLARLKAQQQQALDASMSHEVFLAKLAK

SEQ ID NO: 87031 - protein, 511 aa, unidentified
  source 1..511: note = Sphingopyxis indica
  REGION 1..511: note = tr|A0A239DC42|A0A239DC42_9SPHN Tryptophan halogenase; OS = Sphingopyxis indica OX=436663 GN=SAMN06295955_101198; PE = 4 SV=1
MDQMIGSVVILGGGTAGWLSACRVAAARPDLDVTLIEAPDIPTIGVGEGTWPTMRATLAAIGIDEAEFLTACDGSFKQGSRFDGWVDGGADDSYLHPFTPPPAMPAGDLIAAWRDAGDGADFAHAMTPQAAVCARNLAPRQRTMPAYQGALNYAYHLDAGKFAALLRRHAVQRLGVRHIADQVIEVCAGEAGDVAALVTRDLGAVAGDFFIDCSGHAAMLIGGHCGVGWIDRSDVLINDRALAAQVPTAPVAPIASQTVATAHRAGWVWDIALPSRRGIGCVYASRFMGDDAAEAELRAYIARNVPGAPEVPVRRLAFPTGHRARFWRGNCVAIGLSAGFIEPLEASAIVMIELSLDALIDNFPARRAVLPVLAERFDALFRYRWDRIVEFLKLHYLLSRRDEPYWRTQRDPAHVPERLAGLLALWRDQAPSRWDFPQIDEIFSAESHQYILYGMGYPVPGRLVASDRARAAIAENMRRARALAAALPANRDYLDALLADRGAANVQMEGF

SEQ ID NO: 87032 - protein, 509 aa, unidentified
  source 1..509: note = Sphingopyxis indica
  REGION 1..509: note = tr|A0A239J9T0|A0A239J9T0_9SPHN Tryptophan halogenase; OS = Sphingopyxis indica OX=436663 GN=SAMN06295955_109149; PE = 4 SV=1
MIADPVRRIVIVGGGTAGWMAAAAISRIMGALPGLEIELIESEAIGTVGVGEATIPQICLFNAMLGIDEDEFVRETHATYKLGIEFVDWTRIGHRYVHPFGFYGLDMMGIEFHHHWLKGQRLGDTSRLDDYAIAAVAAATNRFLRPRPDQPKSPLSKLGYAFQFDAGRYARYLRARAERQGVTRTEGRIVSVEQDGASGFVTGVTLDGGARVEGDFFIDCSGFRSLLLGQTLGVDFVDWTDWLPCDRAVAIPCTLGGDRQPITRSTARPAGWQWRIPLQHRIGNGHVYSSRHMSDDEAVALLLANLDGEPLAEPNMLRFTGGHRARAWEKNVVALGLSGGFLEPLESTAIHLVQSGIARLMTLFPTRAFGDAERERYNRETVREYVDIRDFLVLHYKATTRDDTDFWTYCRTLEPPEGLAEKIAMFRSSGRVFREHNELFTETSWLAVLVGQGIEAGGYHPAADLLPDAETLRRLTHIRRIVAETAEAMPTQEQFLRDHGSAIAAEAVM

SEQ ID NO: 87033 - protein, 500 aa, Cellvibrio sp.
  REGION 1..500: note = tr|A0A1Y0G004|A0A1Y0G004_9GAMM Tryptophan halogenase; OS = Cellvibrio sp. PSBB006 OX=1987723 GN=CBR65_16705 PE=4; SV = 1
MSEPIDIVIVGGGTAGWMCAAALVSVAPAAIRRVRLIESDEIGSVGVGEATLPQMKDFNDYIGINEADMMQKTQATFKLGIEFVDWGYKGSSYIHPFGTFGEKIGGIDFHQQWSRIRHFSEIEAIEKYSYAIEACRQHRFEFPVEEKSAINSTYAYAYHFDAGLYAQFLRKFAENKGLERIEGKITNVKQDVDSGFIKSVVMASGEEITGDYFIDCSGFRSLLLGKTLNTPFEDWSPWLPCDRAAAVPSDRLESLAPYTRSTAKSAGWQWRIPLQHRTGNGYVFSSQFIGEDEAIANLLKDLDASALAEPRVIHFQSGRYKYSWQKNCIALGLASGFLEPLESTSIYLIQVAIFNFLKLLPNRNPDTALIDEFNRLVDVEYERVRDFLILHYHLNSRDDKDLWRYCKNMPIPDSLALKMEMFRLRGHIDVYRYGLFAPPSWLSVYLGQGMMQDNVDPYVNNIPVDYVKGKFQELSAAIRQRVELMPTHAEFIADFCPSKL

SEQ ID NO: 87034 - protein, 525 aa, Cellvibrio sp.
  REGION 1..525: note = tr|A0A1Y0FY62|A0A1Y0FY62_9GAMM Tryptophan halogenase; OS = Cellvibrio sp. PSBB006 OX=1987723 GN=CBR65_11905 PE=4; SV = 1
MGKPVKSIVIVGGGTAGWLTAGTLAAAHAQGRGRNLSITLVESPTVKILGVGEGTWPSMRDTLKTMGIAEVDFIRHCDASFKQGSCFVGWQSGARESYYHPFTLPEAWGDMNLARIWPAFRDQVAFAEAVCPQSLVCDSQLAPKEVSTAEYDYLLNYGYHLDAGKFAAFLKRHCCERLGVHYISADVAAIESDDDGYITALKTEAAGSIEGDLFIDCSGFAALLLGQHYQVPFINKSDVLFNDTALAVQVPYKDDASPIKSYTQSTAQSAGWIWDIGLQSRRGIGHVYSSRFTTEAEAEQALLAYLQATDSPEARTDIRKISFTPGYREKFWVKNCVAVGVSAGFIEPLEASALVMIELAAKMLAEQMPASFDMMLPLAKRYNDKFSYHWQRVIEFLKLHYVLSSRTDSVYWQENKNPSTIPESLQDLLCLWRFQPPWAYDCPQREELFSSASFQYVLYGMGFPPDITAGYQKPGNKELQLAQHYFEKNAKQTRRLLGRLPGHRELLMHLSKISHHTDTVKQLIN

SEQ ID NO: 87035 - protein, 493 aa, unidentified
  source 1..493: note = Flavobacteriales bacterium
  REGION 1..493: note = tr|A0A3C1YBR5|A0A3C1YBR5_9FLAO Uncharacterized protein OS=Flavobacteriales bacterium OX=2021391; GN = DCR01_02360 PE=4 SV=1
MKVVVVGGGTAGWLAALMISKIRPEHDVTVIESSKIGIIGAGEGSTGSLTNIVQNEMWNLGCVEEDFIRECDATIKLGIKHIGWNKDTKSHYYGPIDGSPTSGDVVDVVFQNALGYREQDMLHVSTELGYKIHHNRNSFVEDKGNHAYHFDAHKVGQYFKKVCNTVKHIDSEVDDVVKDPENGWVTELKLSNGSTVKGDMFIDASGFNQVLMKAVGSKWKSYKENLPVNSALPFLLPYEEDEKIEPVTNAWAQKNGWCWQIPTLNRRGCGYVFCDDFVTPEKAQEELEQNIGKKVEPIRLLKFDSGRQEKLWIKNVLSVGLCAAFAEPLEATSIHTTIFQLKHFVFGCLGKDRDETCNIGQVDDYNNKNAHLYDTLKDFLVAHYTCGRNDTEFWKYIDSGKTMTDFVRTMHEVCKNRVPNHTMFPRHEGCAGWPLWSYVLAGTGKLTDKICRRELHFNNDVDISDTAYVYHVGQHDFKTMHLPDNTNYIRDMQ

SEQ ID NO: 87036 - protein, 496 aa, Pseudoalteromonas sp.
  REGION 1..496: note = tr|G7EMP4|G7EMP4_9GAMM FADH2 O2-dependent halogenase I OS=Pseudoalteromonas sp. BSi20652 OX=388384 GN=prnA PE=4; SV = 1
MKPIKHVVIAGGGTAGWITAALLNKVLGKVINITLIESSAIGTVGVGEATIPPIIQLNNALGINEQDFINATNASIKLGIEFENWKTPGHSYMHAFGSLGKDFPFCDFYNFWLKGQITGCEDDLWGFSLNYQAAKQHKFAPLNTIPNTQLPGLSYAYHFDATLYAEYLKKLAISRGVKHIDAKISHVEQCDTGNVKSLALDNDSQISGDLFIDCTGLRALLIEQTLNTGFIDWSHYLPCDSAVAVQTKSTHELKPYTRSIAHSAGWQWQIPLQNRIGNGLVYCSRYLSDDDAKQLLLKSLPAEPITEPRIIKFKTGRRLKQWHKNVVSVGLSSGFLEPLESTSIHLIQTAVTRLIKLFPHNGISDALVTKFNKQSVIELEHIRDFIILHYKLTEREDSPFWRQCMQMDIPNSLTHKLNLFKHTGKVIREDDELFAEVAWQQVMIGQGLIPDDYNSIVDSLSDDQLSDLFSTLKTLISSTVTQLPTHQNFLASIKKV

SEQ ID NO: 87037 - protein, 498 aa, Alteromonas sp.
  REGION 1..498: note = tr|A0A385MSR8|A0A385MSR8_9ALTE Tryptophan 7-halogenase OS=Alteromonas sp. RKMC-009 OX=2267264; GN = DS731_05125 PE=4 SV=1
MSENKKTKVVIAGGGTAGWLTAFSLATRLGNLLDITLVESDQIGTVGVGEATIPTMRSFHQLMGINEQEFMSATQATFKLGIQFENWGCKDENYLHSFGEIGQRAWMAEFHAFWMAAKENGYSAGLDDFCLELKAAREGKFALAAGKKPLNYAFHLDATAYAAWLRKKSEAAGVKRIEGKIATVDLHSETGNITALKLEKGKVIAGDVFIDCTGFRGLLIGEHLGVEYEDWSHYLAADSAIAVQTESVEPPLPYTRAIAHDAGWQWRIPLQTRTGNGIVYSSRFLSDEEAEKTLLANLDGKPLTQPRKLKFKTGRRVKAWHKNCVAIGLSGGFLEPLESTSIHLVTTALIRLMKLFPFSDNFGILAERFNEETAVELETIRDFIILHYHQTTRDDSPFWNHYRTMDVPGSLKHRLSIFRENGYVWPDDVSLFRVDSWVQVMMGQGLMPGSYHQAGKLLPPEGLKQQLTALKNQIDNQLAQLPPHAQFIEKYCPAGKVG

SEQ ID NO: 87038 - protein, 508 aa, Pseudoalteromonas sp.
  REGION 1..508: note = tr|G7EE97|G7EE97_9GAMM Uncharacterized protein; OS = Pseudoalteromonas sp. BSi20652 OX=388384 GN=P20652_1079; PE = 4 SV=1
MNKAIKTVAVVGGGTAGWLSAAIIASYHQGKNGDGLKVMLVESSDIPTIGVGEGTWPTMKNTLQQIGLREVDVFKACNATFKQGGKFVNWTHGNNDFYYHPFTVPLGYGRIDLAPYLDNVEDFAQQTNFQHDICEASLAPRGIAQGEYQGNCNYAYHLDAGAFAEMLKQHCKSKLGVEHIIGTVDQVKLDDDGAINELTLKDQTRTINADLFIDCTGFSSLLLGQALNVPFKKMDHVLFNDSALAMQVPYDESDNSLASHTIATAQNAGWIWDIGLTHRRGVGHVYSSKFLSDDEAEQNLRNYLGDAANGLTARKISFESGYREKFWHKNCVAIGMSAGFVEPLEATAIMLVEISARFVAEHMPADTQVMPIVAKRFNEQMDYRWQRIIDFLKLHYMLTKRPEPYWQAHVQPDTIPQTLQEDLLLWGSRGPLIQDFHGALELFPAASYQYVLYGMGFKPDFTKQAYLYSQNAQAKQIIERNSQLTQQMLQTLPPHRAYIEHWLAANPV

SEQ ID NO: 87039 - protein, 503 aa, Cellvibrio sp.
  REGION 1..503: note = tr|A0A1Y0FW45|A0A1Y0FW45_9GAMM Tryptophan halogenase; OS = Cellvibrio sp. PSBB006 OX=1987723 GN=CBR65_07545 PE=4; SV = 1
MQKNPLSSICIVGGGTAGWMAASLLSSALQGSNIKITLIESPDIATIGVGESTVPSIMDFLYTCQINIREFVEATSATFKLGIRFDDWLKPGEQFFHPFGRVGQDVNGFEFYQLWLKNVMDGKSTRWLDHSPCAIMAENQRFMLRQPPQKNWVLNSYSHALHLDALLAARYLRDFSQKRGIERVEATVNKVVMDERQFIHSLELDNGQTVASDFFIDCTGFKGLLIEGALNIGYEEWTHYLPCDRAVAVQTENASGLHPFTIATAREAGWTWKIPLQHRTGNGYVFSSQYCTDDQAIDTLCKAVTGKLLGEPRVIPFTTGRRNKIWHNNCLALGLASGFLEPLESTAIHLVHKTLVHFIRHFPDRDFESYTEQAFNQKINIDYQEIRDFIILHYCTSGRDDTEFWRWCQTMPVPDSLHEKISLFRERGQIEHVPGQLFTIDSWCSILEGMKVRPKKYHPLIDAFNEQYLAALMQESSRNVRETVINMPRHDDFIRQHCAVKLR

SEQ ID NO: 87040 - protein, 499 aa, Alteromonas sp.
  REGION 1..499: note = tr|A0A385MZ59|A0A385MZ59_9ALTE Tryptophan 7-halogenase OS=Alteromonas sp. RKMC-009 OX=2267264; GN = DS731_16555 PE=4 SV=1
MDSNTQSEKTRVVIAGGGTAGWLTAAALAKKLGPLVDITLVESSDISTIGVGEATIPPLRVFHQLLGINEAEFMRATSATFKLGIQFTDFGDKQTEYIHSFGQTGQSGWLAEFFHFWREAHERGIPGEYGEYCLELEAAKANKFFTSTQNSPLNYAYHLDAGAYAAYLKKLAVNSGITHIVDNIDAVNCAPSGDIYALLLRQHGLLTGDLFIDCTGFKALLIGEALNTGYEDWSHWLFCNRALAVQTELAPPLKPYTVASAHEAGWRWEIPLQHRMGNGFVYSSQFLTDEQAELQFQKTLNSAPLQTIRRIEFKTGRRDHAWQNNCVAIGLSAGFVEPMESTSIHLIVTGITRLMQLFPYRGDATRLRNEYNNQTRAEIEKIRDFIILHYHVTERDDSEFWKMCKKMNIPDSLAERIELFKEHGHAFQKNGELFRVDSWTQVMLGQGILPGSWHPAAKMMSSGQLSAAMEKGKQEIKQRVAQLPGHEAFVSQYCASVKH

SEQ ID NO: 87041 - protein, 520 aa, Alteromonas sp.
  REGION 1..520: note = tr|A0A385MSB3|A0A385MSB3_9ALTE Tryptophan 7-halogenase OS=Alteromonas sp. RKMC-009 OX=2267264; GN = DS731_05130 PE=4 SV=1
MTNRVVIVGGGAAGWLTAGILAAKNGEKSGCTHPVRIELVESPNVKNLMVGEGTWPTMRDTLRQIGISEKDFMQFCNAGFKQASKFVGWQYGNGEHYYHPFTAPAGYGAVNLSQYFLKNRPGSDFETLVCAQGAVCEQSLAPKTLATPEFAFALNYGYHLNAGKFTEMLRLHCTQKLGVVHTTGHVEQVNGAPDGDIASVTLSDGRVIEGDLFIDCSGFKALLLNGFYNVPMVCRRDQLFNDAALALQVPYRDENAPVASATVATAQKHGWIWDIALSGRRGIGHVFSRQYCSADQAQDALMQYVKNDPHLDASKAEPRLITFEPGHRSVFWHRNCVAIGVSAGFVEPLEATALVLVEKSVEWISHQFPRCRNAMTVLAKRYNEITHSRWEEIIDFIKLHYVLSSRDDSEYWRAHRDAASVPQSLKDSLALWQTQPPWLYESDRRLELFSSASKQYVLMGMQSTFGEACTGLSQHEMRVADKALNDVRRSTEQLLNGLPTNREFLSRLAGAVKKDCRASA

SEQ ID NO: 87042 - protein, 520 aa, Cellvibrio sp.
  REGION 1..520: note = tr|A0A1Y0FUU4|A0A1Y0FUU4_9GAMM Tryptophan halogenase; OS = Cellvibrio sp. PSBB006 OX=1987723 GN=CBR65_07160 PE=4; SV = 1
MQNNSIKNIVILGGGSSGWLTAGVIAAEHKSYQPEGIQVTVIESPDVAPIGVGEGTWPSMRITLSKMGVSETDFFRECDASFKQGIKFAKWVNGKDDDFYYHPLVLPQGFNEADLVLPWQSIRDEVSFADAICFQGHLCERGLAPKQITTPEYASVANYSYHFNSLKFGQFLAKHCGERLGVKHVIDHVLEVKSADNGDIAALSTKQSGDIEGDLFIDCSGSAALLLGKHYQIPFISKKHILFNDAALAVQVPYPSEDSPIASHTVATAQSGGWIWDIGLPTRRGVGYVYSSAHIDEETVADELRRYIEPSIGREKAASLSFRKIPYDPGHRATFWHRNCVAVGMAAGFLEPLEATALVLVEASAAMISNDLPATKDVMQIVAKRFNQRFSYYWDTIIDFVKLQYVLTKRTDTQYWIDNVKPESVPVRLQELLELWRHQVPNKYDFPLAEEMLPAASWQYILYGMGFVTENRSTQKRSSDFAIFQRYRREVKALTERYTAHLPTNRDLINKICQVGLRRL

SEQ ID NO: 87043 - protein, 501 aa, Cellvibrio sp.
  REGION 1..501: note = tr|A0A1Y0G450|A0A1Y0G450_9GAMM Tryptophan halogenase; OS = Cellvibrio sp. PSBB006 OX=1987723 GN=CBR65_19585 PE=4; SV = 1
MNADHIKSILIVGGGAAGWLTAGILAARYGQSLEITLIESSDVPIIGVGEGSWPSLRNTLRDMGISETEFFKECDASFKQGVKFISWRSEDEPNFYYHPFSLPIGFLERNLAAWWVASRQQGAFADAVCAQEYLCEKNRAPRTADTPEYKSHVNYGYHLDAGKFVTFLSRHCKTVLGVKHVIGTIDKVNQDENGITSIETREQQHLHADLFIDCSGLKSLLLGETLGAKFIDKSDQLFIDSAVAVQAPYASDTSPILPYTVAHAQDAGWIWDIGLYSRKGIGHVYSSRHMSEDEATAILANYVGKDFETLTPRKLTIPCGHRERFWVKNCVAIGMAAGFIEPLEASALVMVELAANYIRDQLPQHTSVMPIVAKRFNDLQTYRWNNIVDFLKLHYVLSQRNTNFWKDNRDPATLSDSLKESLQLWQYHVPYKKDFLHKEEVFPAASYQYILYGMGLRPELQFSFNDNEQATFNRMRQDNEKMKEGLGRLLPDTRGLLEGIR

SEQ ID NO: 87044 - protein, 518 aa, Cellvibrio sp.
  REGION 1..518: note = tr|A0A1Y0G1U1|A0A1Y0G1U1_9GAMM Tryptophan halogenase; OS = Cellvibrio sp. PSBB006 OX=1987723 GN=CBR65_19605 PE=4; SV = 1
MSKRVLIVGGGTAGWITAAYMARMLAADTSGGVSITLVESDEIGILGVGEGTFPIIRKTMSRIGLDESELIREADATFKQGIRFNHWKKNPADHPHDTYFHPFQVCSQHTDMDLLPYWLLGVAGDVPWAEACTVQERVVDAKLAPKLITHPNYNAPLNYAYHFDAGKLAEVVRRRAMAMGVKRLIDTIDAVTLDEHGAIASVQGRAHGELTADLYIDCTGFRARLIGETLGSEFTSYKNQLFCNRAVAMQVPYDQPNAPIPSCTYATAQAAGWTWDIGLHDRRGIGYVYSSDHCSDEAALENLKRYIGPAANALTHRQLKFEAGFRKIQWYKNCVGIGLSVGFIEPLEATGISFAEVAALMLCNLFPWSGDTERSARQFNEAMTKRFEHVIDFIKLHYFLSQRTDTDFWRDNRAPASASDYLQGKLEQWRHRPPSFLDVDASHDIFDENSWQYILYGMDFKTDITARAGALRFYEDAKQEFEKIRQQSKNAMTAVPTHRDLINDVVVHGFRKASGGQR

SEQ ID NO: 87045 - protein, 506 aa, Pseudoalteromonas sp.
  REGION 1..506: note = tr|A0A0W1LFN9|A0A0W1LFN9_9GAMM Tryptophan halogenase; OS = Pseudoalteromonas sp. H105 OX=1348393 GN=ATS75_00190; PE = 4 SV=1
MIKKIAIVGGGTAGWLTANHLGQSLLGTDIEITLVESPTIPSIGVGEGTVPSIRNSLQKFGISETDFIRECDVTFKQSIKFVNWLDKHKHGENFYHHLFDHPHIFGEELTDQWLSSDRHQQYADNVSKQAICCEKMRAPKSISTPEFVGLNGYAYHFDAKKFASFLMNHAQKTFAIQHLYAEIIDVNCDQDGFVTHLIDNEKNELSFDFIIDCSGFSAAILGEKLNVDFIDRSNELLTDTAITLQVPTSVDDEIPPYTIATAHQAGWIWDIALTERRGVGFVYSSKHMSEEQAKKKLHHYLGNKFTHLKPRKIPIKVGRREKFWHKNCVAIGLSQGFVEPLEATAILITDFSGNLLSKRFPRNKEDIDIIATDFNKQVEYVWDSTFDFIKLHYFISDRDDSLFWVDNKQPSTLSEKLKSNVLKWQSFSPIREDFDSKFDLFDLENYLYVLFGMNYLPKTEQLSEQASLLAQQQVDLKKRRVEQLLIELPSHRGLINKIAKFGLQKL

SEQ ID NO: 87046 - protein, 498 aa, Cellvibrio sp.
  REGION 1..498: note = tr|A0A1Y0FW29|A0A1Y0FW29_9GAMM Tryptophan halogenase; OS = Cellvibrio sp. PSBB006 OX=1987723 GN=CBR65_07165 PE=4; SV = 1
MSSDVVRKKVVIAGGGTSGWLAAAALGKLLGKNLDISLIESEEIGRIGVGEATIPPLRTFHKLLGIDERELMSAIQGTFKLGIEFINWGRLGDNYIHSFGVTGKDCWACDFQHFWLSAQKKGIGESFGEYCLELMAAKQGKMLGSDESGVNYAYHLDAGLYAGFLKKHALKHGVNWIEGKITTVNIDPSNGYIQSLLLEDGRTIDGDLFIDCTGFSARLIEGALNTSYEPYGHYLPCDSAVAIQTELAGPPRPYTQAIAHNFGWQWRIPLQHRVGNGMVYSSRHVSDDEALATLMSNLESPAITEPRAFRYRTGRRSKVWNKNCVAVGLASGFLEPVESTSIHLAMSAILRLLKLFPLDEIRQSTVDEYNRQSREEMDRVRNFIVLHYHATERTDTAFWRYCKDMEIPEALAHRIKLFKDTGAVPLLEKELFLVDSWTQVMFGQHIMPERYHPIVDLMEERELDRFLKGLKAMVDKKLGQMPSHQAFIDSYCKAPKIS

SEQ ID NO: 87047 - protein, 505 aa, unidentified
  source 1..505: note = Sphingopyxis indica
  REGION 1..505: note = tr|A0A239J9W9|A0A239J9W9_9SPHN Tryptophan halogenase; OS = Sphingopyxis indica OX=436663 GN=SAMN06295955_109152; PE = 4 SV=1
MSGGSKIRIVVLGGGTAGWMSASALAKLLGPRVTVTLIESEDIGIVGVGEATLPHIRGFVERLGIDEADFMRATHATYKLGIDFRDFGRIGESYIHPFGTFGEKVAGVPFHHYWLELAARGMAGPIGDYSLAVEAAKANRFAPPAEDDSLRSTYGYAYQFDATLFGPYLRDFALPLGVTRIEGLVTEVRQDAESGDVTALKLADGREIAGDIFVDCSGFRSLMLGATLGEDWEDWSHWLPCDRAAAMPTAHVDQEIAPYTTAVAMPAGWRWRIPLQHRMGNGYVFASAFLSEDEACEAIRAAASGDRLAEPRVLRFRPGRRRRSWSRNVVGVGLASGFLEPLESTSLYLAQIAITYLIELFPTGGRIDARDRDEFNRLIDMEYDRIRDFLILHYHATTRDDAPFWDHVRTMTVPDTLERKLELWREAGRVELYSEGLFYDASWIAVYLGQGVVPERHDPRAAIPDPGRMCGAMDALKAAIAGEVAAMPGHRAYLTARAERLAAAP

SEQ ID NO: 87048 - protein, 503 aa, Shewanella baltica
  REGION 1..503: note = tr|B8EBX1|B8EBX1_SHEB2 Tryptophan halogenase; OS = Shewanella baltica (strain OS223) OX=407976; GN = Sbal223_3181 PE=4 SV=1
MTTAIKRVVIAGGGTAGWMAAAALTKLMGKHLEIVLVESDEIGTVGVGEATIPTLHIFHRLLGLKEQEVMAATNATFKLGISFENWQDINKNYLHSFGFLGKDCWACGFQHFWLKGKQLGMVSEIGDYCAEHLAARQGRFAVLPNQDYNHAYHMDASLYAKYLRKMAEQHGIHRIEGKIKQVLQHHDSGNIKALVLENDETIEGDLFIDCTGFRALLIEQTLNTGFEDWSHYLPCDSAIAVQTQSVGAPIPYTRSIARDSGWQWRIPLQNRTGNGLVFCSKFISDEDATELLLANLEGEPLNKPRVIKFKTGTRRLHWHKNCVAVGLSGGFLEPLESTSIHLIQRSIIRLMQLFPSAGIVQSDIDEFNQQTKLEMDNIRDFIILHYKATEREDSRFWRYCKNMDIPASLKHRIEMFADSGKVYKYGSELFGESSWIQVMMGQGIMPKHYHPIVDVMEEPELEAFLNNIKSTVKRKVESLPAHIDFIQHYCPAEVLANTKPMAM

SEQ ID NO: 87049 - protein, 522 aa, Alteromonas macleodii
  REGION 1..522: note = tr|K0EPF6|K0EPF6_ALTMB Putative tryptophan halogenase OS=Alteromonas macleodii (strain Balearic Sea AD45) OX=1004787 GN=AMBAS45_18850 PE=4 SV=1
MATATPITHIVVVGGGSAGWLTAGRIAAQHQCATRKDIKVTLVESPNVPIIGVGEGTWPTMRSTLIALGISETTFIKECDATFKQGAKFAKWTTGEEHDFYYHPLMLPQGFSQTNLGPYWQTVAPELNESFSQAVCVQEAICEAGCAPKSIRHAEFAGTANYAYHLDAGKFTAFLTKHCTEKLGVHHVLADVNRVESNDIGDIKALHTEQGVTVEGDLFVDCTGFKSMLLGEHYKVPFIPCDDVLFIDRALAVHVPYDTPQSPIASHTISTAQDAGWIWDIGLQSRRGVGHVYSSRHQSKDDAYARLDTYVRQTSTLNGIDGINVKDITIQSGHRQRFWQNNCVAVGLAAGFLEPLEASALVLVELSASMIAEQLPANRAVMDIVAKRFNDTFSYRWQRIIDFLKLHYMLSKREDSAFWRDNRDSHTIPDSLKELLALWQYHPPSDKDFTSNNEVFPAASYQYVLYGMGFISDLGAHQQWVNADFAKQQLMQNRKARGMAVEKLPKHRELINKIHQFGLQAV

SEQ ID NO: 87050 - protein, 506 aa, Alteromonas macleodii
  REGION 1..506: note = tr|K0EFJ9|K0EFJ9_ALTMB Putative tryptophan halogenase OS=Alteromonas macleodii (strain Balearic Sea AD45) OX=1004787 GN=AMBAS45_09685 PE=4 SV=1
MQDPHNKPIKRVVIAGGGTAGWLAASLMKKVLGKAVDITLVESEAIGTVGVGEATIPPIRLVNQVLGIDEAQFLHDTKATIKLAIRFENWKTKGESYYHTFGAPGKSMAFCHFHHYWVKARQQGLKDDLWDFDLNYHAAEAGRFAQINAKDPVVELPFAYHFDASLYAQYLRKLSENMGVVRKEGKISRVQRFTDSGFIQALHLESGDVVEGDLFVDCTGFKGLLIEEALGAGYDDWSHLLPCDSAIAVPSERHEKTAPYTRSIAHDAGWQWRIPLQHRNGNGHVYSSRYISDDQACDTLLSNLDTKPLGDPKLIKFTTGRRRKQWYKNVVAVGLSSGFLEPLESTSIHLIQSAIVRLIQLFPHNGFAPSLETEYNKQSELEFEQIRDFLILHYTVNERTDSAFFNDMRNITLPDSLAHKIALFKESGNLLREQNDLFLESSWLQVLYGQGITPKDYHGLVNSVPEVQLNQMLTRLLEIKKEPIAKLPTHDEYINGMVAKYKRAMS

SEQ ID NO: 87051 - protein, 486 aa, Lysobacter sp.
  REGION 1..486: note = tr|A0A0Q7PDA2|A0A0Q7PDA2_9GAMM Tryptophan halogenase; OS = Lysobacter sp. Root494 OX=1736549 GN=ASD14_14695 PE=4; SV = 1
MAAAALATYLGKGTSIRLIESEEIGIVGVGEASIPFMQYFNTKMLGIKEADFVTHTQGTFKLGIQFNDWGRIGDSYIHGFGTISQGIGPLPFHQFWLKLFLAGRAPDIGAYSLHTAAAPLGRFMVSPANVPADSPLANLAYAYHFDASLYARFLRTLSEKRGVTRTEGKIVDVIQRGEDGFIEAVVMEGGERIEGELFIDCSGFRGLLIEQTLKTGYVDWTQWLPCDRAMAVPCEVVGPPTPYTRSTALASGWQWRIPLQHRVGNGYVYSSRHISDDEAAATLLANLDGKALADPRPLRFTTGRRNKVWNRNVIAMGLASGFMEPLESTSLYLVQSALNRLLGLFPDRNFDPLLSDRFNRECTAEAERARDFLILHYNATERDDTPFWDQCRTMAVPDSLREAIGLFRHDGRYFRADSDLFALPSWVQVMLGQRIVPRGYHPIVDEMPDDHLVEFVDRARAMVAKCVQAMPMHQDFIDQNCKAPAL

SEQ ID NO: 87052 - protein, 540 aa, Idiomarina sp.
  REGION 1..540: note = tr|A0A2S0IJS6|A0A2S0IJS6_9GAMM Tryptophan 7-halogenase OS=Idiomarina sp. OT37-5b OX=2100422; GN = C5610_03930 PE=4 SV=1
MQNNNKKTQRVVIVGGGSSGWIAAAYLNGALNQRGEKPRVDITVIESPDIPRISVGEATIPAIQHVLSVIGLNEAEFLQQTDATFKQSIKYCNWVKKDNTFYHHPFSSMRVQPLDFAAQRWLASDRSIPFMETCSAQPIICEWGLAPKMMGEWRMGPPLTYAYHMDAQKFADYLRDFSKARGVRHIAANMTDVSLTAEGSVSSVNTDCAGEIEGDLFIDCTGFRAKLIEEQLQVGWDDCSQWLLCDRAVTMHLPYDRFYPGEVRPYTTATALSNGWVWDIPMQSRRSVGYVHSSAYISKQDAEAELRAYQGGDSSSQDVRFIDFKVGRRRQNWVNNVVAVGLSGGFIEPLESTGLYLSELGVVALAEYFPWQASSMQAMSERYNRVLQNRYYEILDFINMHYCLTQRDDTEFWREVRKPQRINPRLQQKLALWQHKPPTFHDFQDQCFGSPTAAATTLSGDARAPIDTAGLWNHESYQCILYGMHYDGSFSKGDQPPRVPKAIIQRLQMARQMLPPHAYWLQQKVGMANYATAHRPPGWV

SEQ ID NO: 87053 - protein, 500 aa, Sphingopyxis sp.
  REGION 1..500: note = tr|A0A0W1F0P9|A0A0W1F0P9_9SPHN Tryptophan halogenase; OS = Sphingopyxis sp. H038 OX=1759066 GN=ATE68_04940 PE=4; SV = 1
MNEDKRIQRIVIAGGGTAGWMAAAAIARTLGQAVDLALVESEAIGTIGVGESTIPPLVNFNRILRINEADFMRATQATFKLGILFDDWKDLGTQYFHSFGLTGKDHWSAGFQHFWLYGRTKGHQQPYDDYCMELKAAIAGKFAHLPEDRMNYAYQLDSGLYARFLREMAEADGAKRIEGKIARVELDGTSGDIAALVLDGDRRIEGDIFIDCTGFRALLMEGALHAGFDDWSNWLPCDSAIALQTPNVHPPVPYTRVMAHDAGWQWRIPLQHRTGNGIVYCSRYLGKDAALDRMLGNIEGDVLTEPNFLRFTAGTRRKQWYRNCVAVGLSAGFMEPLESTAIHLIQRSVLRFIRMLPAGRVSERDVAEFNEQQMQDMLQIRDFLVLHYKVTNRRDSPFWRHCAAMPIPDTLAQKIELFRETGRVFRKNEELFAENSWVQVMMGQGIEPQSHHPIAEKLRDDELDRLLEAIRSEVRQTVAGLPAHQDYVARYCGAAVPQAA

SEQ ID NO: 87054 - protein, 505 aa, Shewanella baltica
  REGION 1..505: note = tr|B8EFA9|B8EFA9_SHEB2 Tryptophan halogenase; OS = Shewanella baltica (strain OS223) OX=407976; GN = Sbal223_3216 PE=4 SV=1
MNNSPLKSITIVGGGSTGWMTALYLSKLYNHSSNIIDIRLIESKEIGIIGVGEATVHSLRFFFAAMGLDENELLRETNATLKTGILFRNWMKPVDGKMHEYFHPFEQQKPSGKIDNASAWILNNQINESNSTPFAEATSLSFSLMQNNLSPKTQYLNQYQGIVPYGYHLDATLMAAFLKRKATQAGVEHVEANVTDVLVNDGNITEVVTDQGSFKSDIFIDCTGFKGLLIQSLNNDNWQSFETELPCNKAVAMQREYLPHQLPRAYTTATALSHGWAWEIDLTNRQGTGYVYDGNSLTREQAEAELKAYLGDEQEIIRTVHLDMKIGCRREFWVGNCIAMGLAGGFIEPLESTGLHLINLGARLLATHLTSSNPSQAIRTSYNTAMNGLYTDLRQFIVLHYCLTDRNDNEFWQKAAQSSAFIPALEQKITLWKDKVCEYVDLANGYSSVFTDENYRYVLYGMQHIPEIHIPCPKTEITKILDNLKTQQFRAKEQSLSHQEFLAKI

SEQ ID NO: 87055 - protein, 494 aa, Microbulbifer yueqingensis
  REGION 1..494: note = tr|A0A1G9DEJ2|A0A1G9DEJ2_9GAMM Tryptophan halogenase; OS = Microbulbifer yueqingensis OX=658219; GN = SAMN05216212_2763 PE=4 SV=1
MTQPIKKIVIAGGGTAGWMTAAALSKLMGKDLDITLVESESIGTVGVGEATIPTLLFFHRLLGIDEKEFLAATQATYKLGISFENWRDVGKDYIHAFGVTGKDCWACGFQHFWLRAKQLGLAGDFGDYCLERRAAEAEKFTHLPNNGLNYAFHFDASLYAKYLRQFSESNGAKRVEGKIDQVMLHPENGHIRALKLDSGRELDGDFFIDCTGMRALLIEKTLHTGFESWSHWLPCDGAVAVQTEAVAPPIPYTRSIARESAWQWRIPLQHRVGNGLVYSGAYQSDESAKRQLMDNIEGKPLADPRIIKFQTGRRRKQWHKNCLAVGLSSGFLEPLESTSIHLIQQNIVRFLRLFPHREIRQIEVDEYNRQADFEMERIRDFIILHYKVTERDDTEFWRYCRQMDVPDSLAAKIDMFRETGHVYREGNELFVDSWQQVMIGQGLMPERYHPLVDTMPEQELRDFIAHVKAGVDGDLSRLQDHNTYLASLMSGQGQ

SEQ ID NO: 87056 - protein, 390 aa, Corallococcus sp.
  REGION 1..390: note = tr|A0A3A8RM02|A0A3A8RM02_9DELT Tryptophan halogenase; OS = Corallococcus sp. AB032C OX=2316717 GN=D7X99_19595 PE=4; SV = 1
MSEDSCDVAVIGGGPAGAAVAVALRRKAPSLSVTLVERTTYDAPRLGETLPPDVRLPLSRLGVWEGFLRDGHLASRGTASCWGRAEPGFNDTMMSPWGSAWHLDRTRFDERLSVEAARQGARVLRATTLVDSESLGRNGYRLRLSHGAADPSTLRARFVVDATGGKASFASARGARRFVSDRCFAVYGAFHLQGGATFPTHALVESCPEGWWYSALLPSGRVVVALVGDGDSLRGLRWATPEPWMNLLKQAPVTWARLDACDFAGEALIAVPVLVGQLVRPRGEQWLAVGDAACTYDPLSSQGITKSLDSALLAADALERCLSGDADALQAYESTLNARFQDHQRTRGVYYRQEQRWPQAPFWRNRWEALPAPAASPAQFRRSHSTEVNP

SEQ ID NO: 87057 - protein, 558 aa, Amycolatopsis thailandensis
  REGION 1..558: note = tr|A0A229S553|A0A229S553_9PSEU Tryptophan halogenase; OS = Amycolatopsis thailandensis OX=589330 GN=CFP71_20235; PE = 4 SV=1
MFSLRIAEGAKPGSPAENDFRPSFPPLAKEPAVARPVEKIVIVGGGTAGWLSAAYLNRAFGDKVDITLVESERIGRIGVGEATVPTLRTTFAFLGMKEEDWMPRCNAAFKSAVRLNDWRKPHPGKKSHTYFHPFFTVPEPAVPNYEKPFHKRFGRGVSLAHFWLKQKLSGDTRLRETFGDAGMPLQGLCELNKAPRPLPGTDGPNPGFRYAYHFDAALMAGYLKELATGRGVHHVIADVESVALDTRGHIEKVVTETGAELTADLFLDCSGFRGLLINQTLKEPFVSEKDVLLCDSAIALSADHHPGGLRPYTSATARKEGWIWEIPLFKREGSGYVYSGQMTTPDKAEKELRDFLGTRAHDVEGNHIKMRVGHNRRSWVNNCVAVGLSSCFVEPLESTTIALIEYQLALLVLHFPDSDLDERRAKRYNETMVSAFEDVRDFIVMHYCLTDRDDTEFWRAVREAPIPDSLAEKLTEYAESVIIPDGSELRLFETRSLWAILSGMDFDFKKAPPSVELMNDAAAWEMFEQIDKEREIYSASLPDHMEYLKALHALGAKG

SEQ ID NO: 87058 - protein, 84 aa, Xanthomonas fragariae
  REGION 1..84: note = tr|A0A1Y6HHU0|A0A1Y6HHU0_9XANT Tryptophan halogenase; OS = Xanthomonas fragariae OX=48664 GN=prnA_1 PE=4 SV=1
MTAAGDVPADPRPLRFATGRRKHCWNRAAATCRSPRSCNPCWTCSAIVSGRFYRNAEEMFAEISWVRVMVGQGVLPQGYHPLVD

SEQ ID NO: 87059 - protein, 506 aa, Caulobacter henricii
  REGION 1..506: note = tr|A0A0P0P4B6|A0A0P0P4B6_9CAUL Tryptophan halogenase; OS = Caulobacter henricii OX=69395 GN=AQ619_12820 PE=4 SV=1
MTDNRIRSVVIVGGGTAGWMAAASLQRHFQGSPLKITLIESSEIGTIGVGEATIPTIRSFYQTLGLSDLDVMRATGATCKLGIRFKDWLKPGSSFIHPFGLFGQDLRGVPFHNYWLRLRAEGETAEIGEYSLGAALAKGGKFTQPSRNPPSSLSVFDWALHFDAGLFAGLMRQVAEAAGVQRIDARITKVNLRPEDGFIASVTLDSGASVEGDLFIDCSGFRGLLIEEALQTGYEDWGQWLLCDRAYAVQSEGHGAPPPYTDVTAQTAGWRWRIPLQHRYGNGYVYSSRHISDDEALRELQASVPDPLLHAPRQIRFTPGRRRKAWNRNCIALSLASGFLEPLESTSIALIETGIEKIKQLFPDRSFNPAVSDEFNEMSRLEMERVRDFIILHYKANQREDTAFWRDCRAVDVPDTLKHKIEMFRERGHFIRYRWEMFQPASWLAIYTGFDILPKTWDPSLDGLDVASLRRGMDEMRKAVRAAVDGAPTHSDFLEKYARPTPLAAQ

SEQ ID NO: 87060 - protein, 84 aa, Xanthomonas fragariae
  REGION 1..84: note = tr|A0A1Y6HC72|A0A1Y6HC72_9XANT Tryptophan halogenase; OS = Xanthomonas fragariae OX=48664 GN=prnA_2 PE=4 SV=1
MFHQANELFAENSWVQVMLGQGIMPRHHHPVADLMGDAELRHFLENIRTRVEAALLRLPAHADFLRRYCPARVPADAAIAPLAG

SEQ ID NO: 87061 - protein, 493 aa, unidentified; identical to SEQ ID NO: 83649
  source 1..493: note = Citromicrobium sp.
  REGION 1..493: note = tr|A0A0N8H0N7|A0A0N8H0N7_9SPHN Tryptophan halogenase; OS = Citromicrobium sp. RCC1885 OX=1647104 GN=AAJ72_11680; PE = 4 SV=1

SEQ ID NO: 87062 - protein, 497 aa, Microbulbifer yueqingensis
  REGION 1..497: note = tr|A0A1G8Y8I0|A0A1G8Y8I0_9GAMM Tryptophan halogenase; OS = Microbulbifer yueqingensis OX=658219; GN = SAMN05216212_1398 PE=4 SV=1
MSDKIIKDVVVLGGGTAGWMTAALLAKVLGKSINITLVESDKIGTVGVGEATIPPILNFNQALGLDEREFLQATKGTIKLGIQFEDWWRKGESYMHAFGSIGKNFPFCDFHHFWNRSRKQGNDASLWEYSLNYQAARHNKFAPLAQIPGTSLPGISYAYHFDAGLYARFLRRYAESKGVKRIEGTVSEVKVDPHSGFVDGLVLENGQLVESGLYVDCSGMAALLIEKTLGTGYEDWSHWLPCDRAIAVPSAALTPLVPYTRSIAHEAGWQWRIPLQHRTGNGMVYSSRHWSDEEAQGALLENLDAEPLDEPRLIRFRTGRRRKQWNRNVVSIGLSSGFLEPLESTSIHLVQSAATRLIKCFPHAGIRPQEVAEFNRQSRVEMERIRDFIILHYKANQRRDSDFWRDCERMDIPASLEEKIELFRHTGKVFRDYDDLFTEVAWQQVLIGQGVIPEDHHTIADSLTGEQLADLMSSLKTLVDGTVRKMPEHEKFLPPEV

SEQ ID NO: 87063 - protein, 514 aa, Sphingomonas sp.; identical to SEQ ID NO: 86335
  REGION 1..514: note = tr|A0A430CDU4|A0A430CDU4_9SPHN Tryptophan 7-halogenase OS=Sphingomonas sp. S-NIH.Pt1_0416 OX=1920123; GN = BRX36_16435 PE=4 SV=1

SEQ ID NO: 87064 - protein, 483 aa, Sphingopyxis sp.
  REGION 1..483: note = tr|A0A0W1EZW5|A0A0W1EZW5_9SPHN Tryptophan halogenase; OS = Sphingopyxis sp. H038 OX=1759066 GN=ATE68_07960 PE=4; SV = 1
MAAAALARTMDNLSIRLVESDEIGTVGVGEATIPAIRLFNALIGIDENEFIRETGGTFKLGIQFHDWGRIGDVYMHAFGQIGRSLGMLPFQQYWLRGRNEGVVGRLGDYSLNESAGRKNRFARLPQIPNTSLDGIAYAFHFDAALYAAYLRKVSEAAGVERTEGKIASVRRGGESGHVEAVVLEDGTAIEGELFIDCSGFRALLIEGALETGFEDWTQWLPCDRAIAVPSENAGPARPYTQAIAHKAGWQWRIPLQHRTGNGHVFCSDFISEDEATAILLANVEGRPLADPRTLRFRTGMRRRAWNGNVVALGLASGFLEPLESTSIHLIQNGIAKLLAHFPGRDFEAANIDAYNRRVSFDYERIRDFVILHYHANQRTDAPFWIRCREMGIPETLAQKIALFQSQGQIVREGDELFVEIGWFQVLTGQNIMPGSHHPMADQLTHDELAGFFADIETIVARTASHLPTHEDFIAQHCAAGVPA

SEQ ID NO: 87065 - protein, 498 aa, Sphingomonas sp.
  REGION 1..498: note = tr|A0A430CQS8|A0A430CQS8_9SPHN Tryptophan 7-halogenase OS=Sphingomonas sp. S-NIH.Pt1_0416 OX=1920123; GN = BRX36_05175 PE=4 SV=1
MPDGSGGVTVEGPIRHILVAGGGLTGYYAAAALKRRAPFLDVTLLATPVAPEALADQIACTLPSLCGFQADLGIGEDDGITRAGAGYRLGTRFTGWAEGLPDYVHAYGSYGHPIGPAGFPLHWVRAAKAGPVTPFDAFAPAAQLARAGRFVPPTPGTVFAGHEYGLTLDIARHRAMIRAFALHVGVREITGEIAEVSSDAPGFLSEVRTASGETLSADLFIDATGPAARLRGTIDDERDDWSRWLPCQRLLLGDRPQVENAPVLTPVEAHGAGWGWSSGRQMGLAYASAYLSDGDAAAMLGSLNVTPAAPIAIRAGTRPKPWRGNCVAIGDAATEVEPLEWCNLHLALSAVDRLITMLPDRAMAPIEAADFNRQTLAEAERVRDFLAMHYRTATRPEPMWRAVAQAAPPPSLAHTLAQFEERGRLPFYEEETFTRDSWAAVLLGQGHLPRRVDPLVHAVPPAEAQAAMTRMTGAIAAALPQAPAHAEWRAAQTRRLAR

SEQ ID NO: 87066 - protein, 417 aa, unidentified
  source 1..417: note = Planctopirus limnophila
  REGION 1..417: note = tr|D5SSY0|D5SSY0_PLAL2 Tryptophan halogenase; OS = Planctopirus limnophila (strain ATCC 43296 / DSM 3776 / IFAM 1008 / 290) OX=521674 GN=Plim_3116 PE=4 SV=1
MIQSLDPEVIVIGGGPAGATAATLLAQAGHRVQLFEREVFPRFHIGESLIPCTYGVFARTGLLERLKDSHFVKKYSVQFVSDTGKVSAPFFFTQYKPVESSQTWQVRRADFDLMLLDHAREAGVQVHENHRVLEAIFEDDRCVGVRVKNEATGEERQVRAQVVIDGSGQSSVLLDRLQLRTWDSELKKAAVWTYYKNAWRDEGENGGATSVIQTEGKKGWFWYIPLHDNITSVGVVADFSHLFNKQRTKDLGELFQEEVDHCPGVKVRLEGAERCDQYRAAKEYSYRAKQAAGQGWVLIGDAYGFLDPLYSSGVLLAVKSGELAADAVHQGLVTNDLTRTTLGAWEPEYVLGMERMRKLVLAYYKGMNFGKLIMKYPETKDDITDLLMGDLFRAELDLTLDKVDSMLEEMAAQPVVA

SEQ ID NO: 87067 - protein, 135 aa, Buttiauxella brennerae
  REGION 1..135: note = tr|A0A1B7IV43|A0A1B7IV43_9ENTR Tryptophan halogenase; OS = Buttiauxella brennerae ATCC 51605 OX=1354251; GN = M975_0379 PE=4 SV=1
MFDNLKESWFISKVETVIQTEINSLPLMFRNHTEGLAHAIVLKQYQVRCFVFSKMDGTRLNPKIAAVESVLTFIGLYGGQGQILVNAQDCLGALKIIIVQLLKHLEMESTTAYEDGYIEMFIAPLLRRALPELDT

SEQ ID NO: 87068 - protein, 509 aa, Caulobacter henricii
  REGION 1..509: note = tr|A0A0P0P1X5|A0A0P0P1X5_9CAUL Tryptophan halogenase; OS = Caulobacter henricii OX=69395 GN=AQ619_12815 PE=4 SV=1
MQDANQNGIRKVVIVGGGSAGWICAAMASHYFHKTGVAVELIESEEIGTIGVGESTIPPFLQLIRSLGIDEQDFIQKTQASFKLAIRFENWRNKGETYYHPFGQIGGPIGRHEFYQCWLRAKANGHPSNLQDFAPATVMADQWKFIPPVRAQKSLLSGANYALHIDAKLVAQYLRDFAEARGVKRTEGIVTDVVSRPDGFVERVIMKNGTEVSGDLFIDCSGFRALLIGKTLDEEYRDWSDVLMCDRAVVAQTENVKDPHPYTVAQAQDAGWRWRIPLQHRAGNGYVFCSKYLSEDEAAATLLSQIEGEVLLGPNFIPFKTGMRKRLFRNNVVAIGLAGGFIEPLESTALHLIYRGMDFLLRYFPDKDFDPGLAAEYNRRMTMDYEEIRDFIVLHYVTTQRDDTPFWRDYQAVVPPESLRERLELFRASGLLRDGVDDMFRAPSWQSVMEGMGVRPRRYQQLVDAVPYAVIQQTLDQSAPILKAQVAALPSHGEFLAEHCPAAPFQRSA

SEQ ID NO: 87069 - protein, 482 aa, Brevundimonas sp.
  REGION 1..482: note = tr|A0A0Q5LK48|A0A0Q5LK48_9CAUL Tryptophan halogenase; OS = Brevundimonas sp. Leaf168 OX=1736283 GN=ASF81_14215; PE = 4 SV=1
MAAAALAHAFAGAGKTVTLVESEAIGIIGVGEATIPEILKFNARLGIDEPDFLRGTKATFKLGIEFDGWRREGERYFHPFGAFGLDMEGIAFHHFWLKACAEGGSEPLETYSMAWQAARRGRFVHPQGGPQSPLSSLGYAYHFDAALYAAFLRLFAEGLGVVRREGRVVEVQQAADGDITGVRLDDGRVVEGDFFIDCTGFVGLLIEQALTSGYEDWSSWLPCDSAVAVPCVREGALSPYTRSTAREAGWQWRIPLQHRVGNGYVYSSAHISHQEAEDALMSRLEGAALAEPRRLRFATGRRKDCWKRNCVAVGLSSGFLEPLESTSIHLIQSAITKLITLFPSHKNSEGLRREFNALMEEEFVTVRDFLILHYKVNQREGPFWSQVRDMPIPDRLAAKIALFEDTGRIVRRDHDIFSESSWLAVAVGQGLTPHGRHPISDVINHDANLGRLSAIRDSIWRTADALPTHEGILTTTMNRKAF

SEQ ID NO: 87070 - protein, 518 aa, Microbulbifer yueqingensis
  REGION 1..518: note = tr|A0A1G9DEB4|A0A1G9DEB4_9GAMM 2-polyprenyl-6-methoxyphenol hydroxylase OS=Microbulbifer yueqingensis OX=658219 GN=SAMN05216212_2761 PE=4 SV=1
MQQAPLSILVLGGGAAGWLTAAVLAAEHSRARGGDCEITLVESPDLPTVGVGEGTWPSMRETLRRIGLSELRLFTECDASFKQGSLFSSWRSDSKDDRYYHPFSLPHGYFELDLAAYSGQDNYAYTVTPQAAICDASLAPKQLSTPEYAGVLNYGYHFDAVKFGKCLRDHCVEQLGVRHLQAEVERVEGDSDGSVAALVTRDGQRLAADLFIDCSGSAGLIIGEHLGVGWESKASVLFNDRALAAQVPHPSPEAPIASVTRSTGRPHGWIWDIGLPTRRGMGYVYSSEFTNEEEVEADFRRFLADEAAVPLDSDLPVRKLRFSPGHRTIFWQGNCVAVGMAAGFIEPLEASALALIEQSAGLIRDLLPAQASEMEMAAKRFNRQMLSHWDNIIEFLKLHYVLSVRTDSDYWQAHRELSSIPESLRENLALWRHRPPGRQDFPEAQPLFPPASYRYVLNGMGHPCDFARAPRADRNSERARSLLGELERQLASFRQGLPDNRQLIEQLLAREPGRDGAR

SEQ ID NO: 87071 - protein, 522 aa, Sphingomonas sp.
  REGION 1..522: note = tr|A0A430CU69|A0A430CU69_9SPHN Tryptophan 7-halogenase OS=Sphingomonas sp. S-NIH.Pt1_0416 OX=1920123; GN = BRX36_03005 PE=4 SV=1
MTERAEQGDGSVRHVVVVGGGSAGWIAACRLAARVRRTGDAVRVTLVESRTVPTVGVGEGTWPTMRNTLAKVGITESDFIRSCDAAFKQGARFVGWTDGTPQDGYYHPLNPPAGATEIDMAPHWQHRPEGDAAVFADWVDYQAMLCDAGLAPKTIVMPEYAGHANYAYHLDAGQFATMLRDHGVDVLGVEHVVGDVVCPHMTGHGDIAQLELADGRLIPGDLFVDCTGFAALLIGGVYDVPFRRCGETLFADRAMALQVPYDDEDAPITCHTVSTAQKAGWIWDIGLWSRRGVGHVYSSAHISDDAAEAALRDYVGPRAADLNVRRITIDAGHRERFWQNNCVAVGLSAGFIEPLEASALMLIEASMDAIADRLPRTRSAMDVMARQFNATFTHHWMRIIEFLKLHYVLTRRTDSDFWRDNVAAASIPDGLAERLELWRHHSPAPQDFEHAREVFSWPSYQYVLHGMGFDGACPPIDPAAPEAVLAQRFAARTARAKDELRDRAPRHRDLLRAIREHGLQRV

SEQ ID NO: 87072 - protein, 479 aa, Caulobacter henricii
  REGION 1..479: note = tr|A0A0P0P3Z8|A0A0P0P3Z8_9CAUL Tryptophan halogenase; OS = Caulobacter henricii OX=69395 GN=AQ619_03595 PE=4 SV=1
MAAALLARALGRRCAITLVESAEIGTVGVGEATIPPIRGFNQTLGLNEAEFVRETKGTYKLGIEFRGWTRPGEAYFHPFGVYGTAPDPGYFHQYWLKLSGLGKAGALEDYSLCAQAARRGRFGQQSQDPRSPLSTFGSAFHFDAGLYARYLRTYAERLGVNRIEGKVVSVDQRGEDGFIEALRLDGDRRVAGDFFIDCSGFRGLLIEEALKTGYEDWSHWLPCDRAMAMPCTREGEPSPFTRSTAQAGGWIWNIPLQHRDGNGYVYSSRYIDDDTAEATLRASLGGTVLAEPNRLRFVTGRRRKAWNKNVLSLGLASGFIEPLESTSIHMIQAGLLKFLSAFPGKAWDPVQADDYNDRIQLDFERIRDFIVLHYHANQRDEPLWRDRREMVLPETLTRRLALFRACGRLSQHPEEMFTATSWQAVLEGQGIRPRTYDPLVDLHDIDRVATEFEQIRRELRQTAEAMSPHAAALPGLVSA

SEQ ID NO: 87073 - protein, 496 aa, Sphingomonas sp.; identical to SEQ ID NO: 86305
  REGION 1..496: note = tr|A0A430CI72|A0A430CI72_9SPHN Tryptophan 7-halogenase OS=Sphingomonas sp. S-NIH.Pt1_0416 OX=1920123; GN = BRX36_12565 PE=4 SV=1

SEQ ID NO: 87074 - protein, 499 aa, unidentified
  source 1..499: note = Streptomyces viridifaciens
  REGION 1..499: note = tr|A0A1L9DIS0|A0A1L9DIS0_STRVF Tryptophan halogenase; OS = Streptomyces viridifaciens OX=48665 GN=BOQ63_14475 PE=4; SV = 1
MTSTDQETFDVVVVGGGPGGSTVATLVAQQGHRVLLLEKETFPRYQIGESLLPSTIHGIGALLGVTDEIEKAGFMRKRGGTFRWGANPEPWSFSFAISPRIAGPTSHAYQVERMKFDQILLDNARRKGVEVREQCAAVEVIEDGGRVQGLVYTGPDGTRRSVRSAFVVDASGNKSRLHQGVGGERVYSDFFQNIALFGYFTGGDRLPEPNRGNIFCAAFDEGWFWYIPLTDDLTSVGAVINRESASEVQGDPRQALARLIDRCEPIRDLLKNSAGVTEGPYGQVRVRKDYSYLNTRFWRPGMVLVGDAACFVDPVFSSGVHLATYSATLAARSINTALDGLVDEERSFQEYEARYRHEYGLFYEFLMSFYDMNADDTSYYWQAKKVTRCADSELESFVGLVGGVASGESAVLGAESLRAKLAATSGELAQSVAAVGAAATADDATPLFQSSIVSEVMREGARTQARAQFGEAFGDAGPMFPGGLMPTADGTRWTAADAQ

SEQ ID NO: 87075 - protein, 504 aa, Sphingomonas sp.
  REGION 1..504: note = tr|A0A430CVY0|A0A430CVY0_9SPHN Tryptophan halogenase; OS = Sphingomonas sp. S-NIH.Pt1_0416 OX=1920123; GN = BRX36_01785 PE=4 SV=1
MPDMPDAIRSVLIVGGGTAGWMTAAALAHACPRGLTITLVESDEIGTVGVGEATIPPIRLFNQTLGIDEAEFLRETKGSFKLGIEFVGWGREGHRYFHPFGTHGKSFDLVAVHQHWLAAGGAEGVVPPLDDLSMAWGAAKRGRFAAPMADPHSVASTFDYAYHFDAGLYARFLRRYAEARGVVRVEGRIAGHALEGERGHVASVMLDDGRTLAADLFVDCSGFRGLLIEGALHTGYEDWTHWLPCDRAVAVPCATGGDGLTPYTRSSARAAGWQWRIPLQHRTGNGYVYCSRHISDDEAAATLLAHLDGPALGDPRFLRFTTGRRRLFWNRNVVAIGLSSGFMEPLESTSIHLIQAGVAKLLAYFPTKAFEPPAIEEYNRVAITEYERIRDFLILHYKLTERTDAPLWRECAAMPIPDTLAMKIAHFRDHGRLIARDMDLFGPASWAAVHVGQFNLPRATDPLLAYADPAQSRAFVGKLAGAIGQMAESMPTHADWLRRIGAMA

SEQ ID NO: 87076 - protein, 503 aa, Brevundimonas sp.
  REGION 1..503: note = tr|A0A0Q5MSD3|A0A0Q5MSD3_9CAUL Tryptophan halogenase; OS = Brevundimonas sp. Leaf168 OX=1736283 GN=ASF81_14510; PE = 4 SV=1
MSDQPEPVRHIAIVGGGTAGWMAAAALGRAFTRAQGLALMITLIESESIGTVGVGEATIPPIRQFVQTIGLSEEDFIRSTAATAKLGIAFKDWIAPGSEYFHGFGDYGPTVAGQAWRQYLFRLKAAGRIDGLDPWSMPTAMARAGKFAPPVEDSRSVLSHYSYAYQFDAGLFARRLRTLAEKLGVVRREGRITGVDRDGETGLVRAVTLEDGGEVEADLFIDCSGFRGLLIEQTMQAGYEEWTHWLPCDRAVAVPCSSSLAPEPITTARAREAGWQWRIPLQHRVGNGYVYSSDHVDDQTALDDLLGQIESEPLAEPNRLRFVTGRRREAWKGNVVSLGLASGFVEPLESTSINLIQTGIGRLLEMFPDRSFDPALIREYNRRSAQEFERIRDFIILHYHLAGRAGAMWDRCRETAPPDTLMEKIELFHARGEVGLLEDESFREDSWAAVFTGLGTWPKQPSPLVCIDDLETVDRQARQFAQLIARAAAALPDHSTTFTGYAR

SEQ ID NO: 87077 - protein, 510 aa, Lysobacter sp.
  REGION 1..510: note = tr|A0A0Q7Q8I1|A0A0Q7Q8I1_9GAMM Tryptophan halogenase; OS = Lysobacter sp. Root494 OX=1736549 GN=ASD14_01230 PE=4; SV = 1
MVDGSNEGRVRNIVIVGGGTAGWMAAAALSKALTRDYSIRLIESEEIGTVGVGEGTIPLIKLFNHALELDEADFVRRTKGSFKLGVNFVDWGRLGDSYVHGFGKIGQDLGLVPFYQYWLKMHQAGKARPLDDYSINTVAARQNKFMPAVTDRPNSPLADIAYAYHFDAGLYARFLREYSEARGVQRIEGKVTGYQLRGEDGFVESVTMEDGTLIDGQLFIDCSGFRGLLIEQALKTGFEDWTHWLPCDRAVAVPCASAPGGITPYTRSTARKAGWQWRIPLQHRIGNGHVFCSRYTSEDEATATLMANLDGEALAEPRVLRFATGKRNKTWNKNVVAIGLSSGFMEPLESTSIHLIQSTIARLTAFFPHVGFDQADIDEFNAHSDFETVRIRDFLILHYHATERDDSPFWNYCRTMDIPDTLRQKMDLFRSNGRVFREHTEMFAEPSWVQVMHGQRVHPRGYHALVDLQPEERIAEFLENVRGVIGHCATQMPTHDAFISRLVAKESQAA

SEQ ID NO: 87078 - protein, 538 aa, Burkholderia sp.
  REGION 1..538: note = tr|A0A1K1NAB5|A0A1K1NAB5_9BURK Tryptophan halogenase; OS = Burkholderia sp. NFACC33-1 OX=1566269; GN = SAMN03159384_01348 PE=4 SV=1
MSNPIKNIVIVGGGTAGWMAASYLVRALQQQANITLIESAAIPRIGVGEATIPSLQKVFFDFLGIPEREWMPQVNGAFKAAIKFVNWRKSPDRSRDDYFYHLFGSVPNCDGVPLTHYWLRKREQGFQQPMEYACYPQPGALDGNLAPCLADGTRQMSHAWHFDAHLVADFLKRWAVERGVKRVVDEVVDVHLNERGYISSLSTKEGRTLEADLFIDCSGMRGLLINQALKEPFIDMSDYLLCDSAVASAVPNDDARVGIEPYTSAIAMNSGWTWKIPMLGRFGSGYVFSSKFTSRDQATADFLDLWGLSDKQPLNQIKFRVGRNRRAWVNNCVSIGLSSCFLEPLESTGIYFIYAALYQLVKHFPDTSFDPRLTDAFNAEIVYMFDDCRDFVQAHYFTTSREDTPFWLANRHDLRLSDAIKEKVERYKAGLPLTTTSFDDSTYYETFDYEFKNFWLNGNYYCIFAGLGLLPDRSLPLLRHRPESIDKAEAMFARIRREAERLRTSLPTNYDYLRSLREGDAGRSRSQPGPTLATPEVL

SEQ ID NO: 87079 - protein, 507 aa, Glaciecola sp.
  REGION 1..507: note = tr|A0A2N1HZQ0|A0A2N1HZQ0_9ALTE Tryptophan halogenase; OS = Glaciecola sp. 33A OX=2057807 GN=CXF81_02630 PE=4 SV=1
MNTVTKRILIVGGGTAGWLTAALLAKQHGQSIEICLVESSDIPTVGVGEGTWPSMRTTLQKIGISESQFITECSATFKQASKFVDWISPANEYFHPFTQPAGYGKVDIAPYWESLSVAPTFCDSVTFQSHMCKMGLAPKNITHKEYETVANYGYHLDAGKFAVLLRNHSVNKLNVKHKVANITQVNQHPDGSISDVETDSAGRLEADFFIDCSGFSSLLLGQTLGVPFIAKNDILFNDTALAMHVPYKDKNDPIACHTISTAQTAGWIWDIGLQHRRGVGYVFSSKHQSLENAERILKNYVGPQAEDLVIRKIQFKTGHRACFWRHNCVAVGLSSGFLEPLEASALMLVETSANFIADQLPMTKAEMKPMEKRFNKVFTAKWRGVIDFLKLHYVLSERQEPFWKDNKKSSSIPETLQEMLMLWQNRVPSEYDFLQSYEAFNAASYQYVLYGGGFKTDFSLLSHTLTHKDRAKRQLEITLKTAQQMALRLPKHRELINQIKLQGFAKL

SEQ ID NO: 87080 - protein, 516 aa, Salinimonas sp.
  REGION 1..516: note = tr|A0A5B7Y943|A0A5B7Y943_9ALTE Tryptophan 7-halogenase OS=Salinimonas sp. KX18D6 OX=2572577; GN = FBQ74_01080 PE=4 SV=1
MHQSDSVNSIIVLGGGTAGWLTAAVIAAEHDIAKRQDLTVTVVESPQVKTLGVGEGTWPTMRDTLRRVGISETEFLVRCDASFKQGTCFKQWTGTNGDDTYYHPFDLPTGFFECDLAHWWAAEQPETAFADMLCAQPALCSASKAPKQPQTPAYAAVANYGYHLDASKFADMLREHCVDILGVKHISAHVQDIQRDKDNYLTALRTDAGEIHGDLFIDCSGFAARLIGQHYGSAFKSVSHVLKNDTAMAVQAPYADAGCDIASATVSTAHRNGWIWDIALPHRKGVGCVYSSDFCSDDEAKDTLLSYLKNDTVTSPVSADAIRKISFTPGYRETPWIKNCVAVGTSAGFFEPLEASALVMTELAALHIARQLPQSRQDMAPVSRQFNRSFATKWQRIIDFLKLHYVLSARTDSEYWRAMGSLDSASDQLQDWLHLWHRRPINQHDFLYQDEVFPQASYLYILNGMGFAQSAPHRNNDDTNRFIQQNEKRKQQLLAGLPSNRDYLNALNQYRHKSAG

SEQ ID NO: 87081 - protein, 516 aa, Sphingomonas sp.; identical to SEQ ID NO: 86340
  REGION 1..516: note = tr|A0A430CQT0|A0A430CQT0_9SPHN Tryptophan 7-halogenase OS=Sphingomonas sp. S-NIH.Pt1_0416 OX=1920123; GN = BRX36_05170 PE=4 SV=1

SEQ ID NO: 87082 - protein, 505 aa, Caulobacter henricii
  REGION 1..505: note = tr|A0A0P0NXA9|A0A0P0NXA9_9CAUL Tryptophan halogenase; OS = Caulobacter henricii OX=69395 GN=AQ619_03805 PE=4 SV=1
MNTNPVRKVLIVGGGTAGWMTAAALAKVLRGVEVSLIESDAISTVGVGEATIPPINTFNQMLGIDEADFMRSTQASFKLAIEFVDWTRPGSRYLHPFGAYGLDIEAIKFHQFWLKARAQGSTQSLDDFNLSATAARLGKFMLPSKDPGQVLSSLKYAFHFDAGLYARYLRRYAEARGVVRREGKVVDVSLRGEDGFITSVTTDDGTVLEADLFIDCSGFRGLLIEQALDTGFEDWGHWLPNDRAVAMPCETGGDGLTPYTRATADTAGWRWRIPLQHRTGNGYVYSSRHLGDDEAVARLRATLDGPARAEPNFIRFRAGRRKQIWVKNCVAIGLASGFLEPLESTSIHMIQSGITKLLALFPDRGFDPVEIAEYNRLTILQTELIRDFIILHFKANERSEPYWQQARDMAIPDSLQHRIDLFAARGRLFPTDYDLFAEPSWVAVLLGQNIRPRAYDPLVDTLDETLVRNQMHRLASLVRQTAEALPTHEAFIARYCAASEIEKAR

SEQ ID NO: 87083 - protein, 472 aa, Salinimonas sp.
  REGION 1..472: note = tr|A0A5B7YBZ2|A0A5B7YBZ2_9ALTE Tryptophan 7-halogenase OS=Salinimonas sp. KX18D6 OX=2572577; GN = FBQ74_01065 PE=4 SV=1
MAAAALTRVLKNKVDVTLVESSEIGTVGVGEATIPTLVFFHKLLKLSEQEFMSETNATYKLGINFENWKDLNHSYLHAFGVTGKDCWAAGFQHFWLRGLQEGLSGDFGDYCLERQAAEANKFAHLPNNGLNYAYHIDATSYAKFLRKLSEREGLTRIDAKINNVNLRQQDGFIESLDLDNGQRIEGDFFIDCTGFKGLLIEKAMHTGYEDWSHWLPCDSAVAVQTESTSEPLPYTRCIAHEAGWQWRIPLQHRVGNGMVYCSQYQSDDETIDKLLSNIDGKPLNDPRVIHFRTGRRRKQWNRNCLALGLASGFLEPLESTSIHLIQQGIVRFLRMFPEAGVVQEDINEFNQQADFDIEHIRDFIILHYHVTNRTDTPFWRHCRQMDVPASLRHRIDLFVKTGRIFREGSELFDDSWQQVMIGQGLMPQSYHPIVDTMSRDELEALLTQITSQIRRTVEKLPPHEEYLKRFCQ

SEQ ID NO: 87084 - protein, 517 aa, Glaciecola sp.
  REGION 1..517: note = tr|A0A2N1HUY7|A0A2N1HUY7_9ALTE Tryptophan halogenase; OS = Glaciecola sp. 33A OX=2057807 GN=CXF81_08840 PE=4 SV=1
MHKPLRKIVIVGGGSAGWLTAGVIAAEHSIDPNVGIEVTLIESADVAPIGVGEGTWPTMRSTLKKMGISETDFLLECDASFKQGSKFSNWHTNTNEHYYHPFTLPHGFNDTNLASFWQPYRHQVTFADAVGVQSQLGEHGLAPKQISTAEYDFNANYGYHLDAGKFAALLQKHCTTKLAVKHIIDHVTQVNSAQSGDIATITTKNNGDIAGDLFIDCTGTASLLLAKHYAVPFVSTKHILFNDSALAVHVPHQDSNSPIASFTCSTAQSAGWIWDIGLPSRRGVGYTYSSRHITDVEAEKALRDYITPIMGESAAKSTKIRKIDFSPGYREKFWHKNCVAVGLSAGFIEPLEATALALIELSAKMISEQLPADREAMDLVAKRFNAKFLHRWLNIVDFLKLHYVLSNRTDSAYWREISDVEQLPDTLKDQLLLWKTRAPYHYDATHTEEMFPPASYQYILYGMDFITQPVNTKRMDESKKAQVLFAENAKHTKQLLSSLPSNRELINKIKLYGLPKI

SEQ ID NO: 87085 - protein, 45 aa, Burkholderia sp.
  REGION 1..45: note = tr|A0A1K1NA95|A0A1K1NA95_9BURK Tryptophan halogenase; OS = Burkholderia sp. NFACC33-1 OX=1566269; GN = SAMN03159384_01349 PE=4 SV=1
MRNLVKSILIVGGGSAGWMTVAHLSEAYGYKVKISLIESLTIPKI

SEQ ID NO: 87086 - protein, 498 aa, Pseudoalteromonas lipolytica
  REGION 1..498: note = tr|Z5XTM4|Z5XTM4_9GAMM Tryptophan halogenase; OS = Pseudoalteromonas lipolytica SCSIO 04301 OX=1452721; GN = AT00_06355 PE=4 SV=1
MEAKKITKVVIAGGGTAGWITAALLNKVLGKSLDITLVESAEIGTVGVGEASIPPILHLNGALGISEKEFIKATGATIKLGIEFENWRSQGHSYMHAFGEIGKDFPFCAFYHFWLKANQTQNAPDFWDFSLNYQAAKAHKFAHLKNIPNTQLAGLHYAYHFDATRYGEFLKELAQSRGVNRIEGKIETISQCDQTGSINALKLEDGSLIEGDLFIDCTGLRALLIEQTLNTGFEDWSHWIPCDSAVAVQSESASNAIPYTRSIARESGWQWQIPLQHRVGNGLVYSSRYLSDENAKQQLLNNLPAKPLTEPRIIKFKTGRRLKQWHKNVVSVGLSSGFLEPLESTSIHLIQSAAIRLIKFFPHQGIKQNLVDEFNKQSKTEFERIRDFIILHYKLTERDDSPFWRLCKGMDIPSSLAKKIALYKTSGKLVREDDELFAEVAWQQVLIGQGLIAEDYHPLTNALTDNQLNELFSNLKTLINSTVEQLPSHSEFLEKIQN

SEQ ID NO: 87087 - protein, 506 aa, Lysobacter sp.
  REGION 1..506: note = tr|A0A0Q7PMW2|A0A0Q7PMW2_9GAMM Tryptophan halogenase; OS = Lysobacter sp. Root494 OX=1736549 GN=ASD14_07880 PE=4; SV = 1
MTESRIRKVVIAGGGTAGWIAATALSHQFRDQLEIVLIESEQIGTIGVGESTIPPIRAFHRFVQIDEREFMREVACTFKLGISFEDWHRPEARYFHPFGITGHGTMACEFHHFWLDSLRRGMASDIGDFCLESVAARAQRFALLQQPEINYAYHLDAGMYARFLRRIAERHGVTRIEGKIRDVRQDPGSGFVEALTLEDGQVVDGDLFIDCTGFRGLLIEQTLQTGYEDWSHWLPCDRAVALQTEAVGPPVPYTRAIGHEAGWRWQIPLQHRVGNGLVYSSRHMSDDEAITKLLRDVEGRPLIQPRVVPFRTGRRLRMWNRNVVALGLASGFVEPLESTSIHLAITGVISLIHLFPFAGIAPSLVDRYNEVTRAELEHVRDFIVLHYHANEREEPMWKQCREMELPESLAARVDAWRERAHAWQEPNELFRVDSWLHVMLGQGLQPAQHHPLARALSDDDMRRLLASIRQPIEQAVAKMPSQQDFIERYCKAGPEVWGARQPALQA

SEQ ID NO: 87088 - protein, 496 aa, Cellvibrio sp.
  REGION 1..496: note = tr|A0A4R7BQ92|A0A4R7BQ92_9GAMM Tryptophan halogenase; OS = Cellvibrio sp. YR554 OX=2135765 GN=C8K91_101637 PE=4; SV = 1
MKKNNRIVIVGGGSAGWMTAAALSNAFGATKQITLIESDAIGTVGVGEATIPAVKSFNKLLGIDEAEFLKTTQGTFKLGIQFENWGAQGDVYMHPFGLVGKDSWMANFQHFWLKASRMGIAKSYFDYSLNIRSALGNKFLIDPNSGVDYAYHFDAGLYAAYLRKYSEARSVTRIEGMIDRVQTRTDDGFVESVTLRGGELIAGDIFIDCSGFRALLIEHTLHTGVEDWSHWLPCDRAIAVQTESVGEPAPYTRSIAHHCGWQWRIPLQHRVGNGLVYCSRYSSDEDAKQLLLANLEGAIRTEPRLIKFKTGRALKQWNKNCIAIGLSSGFLEPLESTSLHLIQTGIVRLIRMFPGAEINPAEVDEYNRQSRYEYERIRDFIILHYHVTQRNDSPFWNFCRTMDIPETLARKIQVYKNTTSVFKEQDELFHEGSWQQVMLGQGITPADYHPVVDKLSNAELQRLMQSIESEHDQCLARFPSHQQFIDHYCKALAPSA

SEQ ID NO: 87089 - protein, 511 aa, Cellvibrio sp.
  REGION 1..511: note = tr|A0A4R7BDB1|A0A4R7BDB1_9GAMM Tryptophan halogenase; OS = Cellvibrio sp. YR554 OX=2135765 GN=C8K91_10467 PE=4 SV=1
MSIESIQNLVIVGGGTAGWMSAALLGKVLGKQINITLVESDAIGTVGVGEATIPPLLTFHSLLGINENDFVKATQATYKLGIRFENWGKQGVSYIHPFGRYGDNFDMVAFNQYWLRLNALGQAAPLEDFSLCALAARLGRFSRPPTNDPRSIWSTFSYAFHFDAGLYAKFLRQYAEQHGVVRIEGKITHAEQRPDDGFVQSIVLESGKKINGDFFIDCSGFRGLLIEETLKTGYDDWSHWLPCNRAVAIPSASTLAPQPFTRSIALKAGWQWRIPLQHRIGNGHVYSSAYMSDDEAVSVLLNNIDGEPLKDPNYIRFTTGARKKVWNKNVLAIGLASGFLEPLESTSIHLIQRGLSKLISWFPDKKFEQKNIDEYNRLHTREVERVRDFIILHYKTTQRCDSDFWNYCRAMEIPEELQNKLDTFAATGRLIELPGDTFQEASWLSVMLGQGIKPLTYDPIAEFYDLSRLKMVMEKMRGMMAETVQSMPLHSEYIARHCAASSDTFARIKTM

SEQ ID NO: 87090 - protein, 529 aa, Sphingomonas trueperi
  REGION 1..529: note = tr|A0A543LTY5|A0A543LTY5_9SPHN Tryptophan halogenase; OS = Sphingomonas trueperi OX=53317 GN=FHW45_3218 PE=4 SV=1
MSVSSGIPFFFHGSARVKRVQNIVIVGGGTAGWLTAGVIAARHQSRMPGGFTVTLVESPITPIIGVGEGTWPTLRTTLAKIGVSETDFFRECDAAFKQGALFARWTTGAADDAYYHPLMLPQGFHQLSLVPHWITDSKGRSFCDTVTPQGRICDAGLAPKTIATPEYDGQANYAYHLDAGKFAPFLTRHCTTKLGVRHVLADVRAVELAENGDIAAIDTEQAGQIEGDLFVDCTGFRSLLLGEAMGVKFKDCGDVLFCDAALAAQVPYPEENAPIATHTLSTAQGSGWIWDIGLPTRRGTGYVYSTAHTSDDQAEATLRAYLGPAGADVAVRRIPIRSGHREIFWKNNVVAVGLAAGFLEPLEASAIVLIELSAKLIAEQMPAVREVMDVVAKRFNATTLYRWGRIIDFLKLHYVLTKRTDTAFWRDNLLPETIPERLQELLTLWRYQPPWFHDEFDRVEEVFPPASYQYVLYGMGFRSEVEPQALSGDQRLAERAMRENAAQTERLCAGLPRHRDLIRKIHEHGLQPV

SEQ ID NO: 87091 - protein, 508 aa, Cellvibrio sp.
  REGION 1..508: note = tr|A0A4R7BMM4|A0A4R7BMM4_9GAMM Tryptophan halogenase; OS = Cellvibrio sp. YR554 OX=2135765 GN=C8K91_101423 PE=4; SV = 1
MKIKRIAIVGGGNAGWLAANHLGLEMLRDPEIEITLIESKDIPVIGVGEGTIPLIRTSLQSFGISEADILLQCDATFKTAIKFSNWMSAEKYGSDNFYYHTFDAPFPGGFDVTQYWLGNRSDAYFSKLSPAYYVAERNRCPKRTDYPPYKGVVNYAYHFDAAKFTSLLTSNAKKRFGIRHIHETIEQVVLHADGSIKGLQYASGGSEDFDFYIDCSGFASLLIGEALKVPFIDKSHQILTDTALALQVGTAPDAELFPYTKAVAHGAGWIWDIPLTTRRGTGLVYSAQHMTDEEALATFSRYHGKNLENADVRKIPMKAGYRQKLWEKNCVTLGLAQGFVEPLEATSLFVTDFCAGMIAKKIPLNSEEIPVCEKSCNDISALIWERIFDFIQLHYCISDRRDTPFWRDVTEHVPLSDLLSERLALWQYAIPQRTDFASTFDFFHTESYLSVLYGMNFPTRAPIVGERVSNFSREKIAAHLETSKQMADSLMPQRRWLTELNAFAAKRP

SEQ ID NO: 87092 - protein, 496 aa, unidentified
  source 1..496: note = Unknown
  REGION 1..496: note = tr|H3NUP0|H3NUP0_9GAMM Tryptophan halogenase; OS = gamma proteobacterium HIMB55 OX=745014; GN = OMB55_00012400 PE=4 SV=1
MNQRTVEKVVIAGGGTAGWMAAAALSRLVGRKISVTLVESEEIGTVGVGEATIPTILTINRLLQIPEPDFIKLTSGTFKLGIRFENWQKQGEDYIHSFGDTGKGSWAAGFHHFWLRAKEMGLAEDYGEYCTELKAAEAERFAITSQNKLNYAYHLDASKYGMYLRKLAESSGATRIEGKIQRVETSSEDGFIEALHLEDGQRIEGDLFIDCTGFRALLSEGALQTGFDDWSHWLPANRAWAVQSELNEHPKPYTRAIAHKVGWQWRIPLQHRAGNGLVYSNDFMDEETARDLLLANVPDKPLTDPRPIKFVTGQRKQYWNKNCIAIGLSSGFIEPLESTSIHFIQNGIMWLLLMFPDTCIEPSTVNEYNRTMRSEAEHIRDFIVLHYTLNQRYGDPFWDHCRNMDLPDSLKHRMELFERSARVFKPQDDVFAENSWVQVMMGQGMYPEGYHNIAQAMSESQMTAFLKGIQHEVAQTVAKLPEHGAFVKTLVQHAKV

SEQ ID NO: 87093 - protein, 139 aa, unidentified
  source 1..139: note = Unknown
  REGION 1..139: note = tr|A0A2E0JYY7|A0A2E0JYY7_9PROT Tryptophan halogenase (Fragment) OS=SAR116 cluster bacterium OX=2024888; GN = CMN49_04925 PE=4 SV=1
MSERIQKVVIVGGGSAGWLTANILAARFQAGNSGLCITLVESPNVPTVGVGEGTWPSMRTTLKSIGIDEADFIRQCDASMKQGTWFKDWITLGDEPYYHPFSLPEGFDTVNLAEHWLNGEAGELSFAQAVTPQYAVCEL

SEQ ID NO: 87094 - protein, 501 aa, Streptomyces sp.
  REGION 1..501: note = tr|A0A1Q4WCL7|A0A1Q4WCL7_9ACTN Tryptophan halogenase; OS = Streptomyces sp. CB02056 OX=1703924 GN=AMK13_14325 PE=4; SV = 1
MTASYLKAAFEDRVDITLVESGNISTVGVGEATFSDIRHFFEFLGLKEKDWMPACNATYKLAVRFEDWREPGHYFYHPFEQMRSVNGFPLTDWWLKQGPTSRFDKDCFVMASVIDAGLSPRHLDGALIDQPFDEGADEMQGLTMSEHQGKTQFPYAYQFEAALLAKYLTQYATDRGVKRIVDDVQDVRLDDRGWISGLRTAEHGELTGDLFIDCTGFRGLLLNKALEEPFISYQDTLPNDSAVALQVPMDMAKRGVLPCTTATAQDAGWIWTIPLMGRVGTGYVYAKDYLSPEEAERTLRAFVGPAAADVEANHIRMRIGRSRNSWSRNCVAVGLASGFVEPLESTGIFFIHHAIEQLVKYFPAQDWNPVRRDLYNRAVAHVMDGVREFLVLHYVAAKRTDTQYWRDTKTRKIPDSLAERLELWKAQLPDSETVFPYYHGLPPYSYMSVLLGMGGIEVAHSPALDLSDGAAAEREFAQIREKTERLVATLPKAYDYFARMR

SEQ ID NO: 87095 - protein, 522 aa, unidentified
  source 1..522: note = Unknown
  REGION 1..522: note = tr|H3NUN7|H3NUN7_9GAMM Tryptophan halogenase; OS = gamma proteobacterium HIMB55 OX=745014; GN = OMB55_00012370 PE=4 SV=1
MADQHIQDIVIVGGGTAGWLTANIIAARFRPEQGLGVRVTLVESPNVPTIGVGEGTWPSMRTTLKDIGISEADFIRSCDASFKQGTWFKDWISKGDQPYYHPFSLPEGFDTVNLAEHWLAGAAGEIPFAEAVTPQHAVCELGKAPKQIGIPNYAYTVNYGYHLDAGKFASLLTTNATKKLGVTHVSADVVSVTNDHEGYITSVMTEQAGEIHGDLFIDCSGFQSLLLGQHFGVENVSIDHYLFNNAAVALQVPYAEADAPIATTTHSTAQKNGWIWDIGLQHRRGIGHVFSKAFQTHDQTLQVLDAYLKETGHIAGLDNLAPRLLEFEPGYKRHFWVKNCLGIGLSAGFIEPLEASALVLVELSATALANQMPRHRGDMEVISGRFNREFASRWSQIIDFLKLHYVLSKRDDSAYWQENREVGSIPDSLKENLVVWANRPPWYHDDLRRDEMFPAASYQYVLYGMGFESQPAFMATRSGDRQREVAQRLFAETQKKAGKYGQFLPPNRFLMNQLREQDFARI

SEQ ID NO: 87096 - protein, 510 aa, Streptomyces scabrisporus
  REGION 1..510: note = tr|A0A1T3NS36|A0A1T3NS36_9ACTN Tryptophan halogenase; OS = Streptomyces scabrisporus OX=159449 GN=B4N89_00365 PE=4; SV = 1
MIRNVVIVGGGTAGWMTATYLKQTFRDEVSVTVVESERVGTVGVGEATFSTIRHFFAYLGLEERDWMPSCAGSYKLGIRYANWREVGTYFYHPFERLPVLDGFTLDDWWLHLDGDVENFDTSCLLLSALCEANRSPRLLDGSLFTTLLDREIGNANEQRTQFPYAYHFDADLLAKFLTTFGVERGVRHVVDDVVEVRRDERGWIDHLVTTEHGDIPGDLFVDCTGFRGLLINGVLEEPFESFEDVLPNNRAVALRVPADPGREMAPYTSATAAEAGWIWTIPLYERVGTGYVYSDEFCDPAEAERTLRRFAAPDRPDLEANHIRMRIGRNRNSWVKNCVAIGLSSGFVEPLESTGIFFIQHGIEQLVNYFPDRDWDPALAVRYNRSVAEVIDGVKEFLVLHYCAAGREDTPYWKAAKSRALPEGLAERLESWRTLLPEPDTIYPRFHGFEAYNWKVMLIGLGKAPARPRPALAGLDPSGAMAEFAAIRRQAERLVAELPSCREYVSRLHG

SEQ ID NO: 87097 - protein, 506 aa, Cellvibrio sp.
  REGION 1..506: note = tr|A0A4R7BA20|A0A4R7BA20_9GAMM Tryptophan halogenase; OS = Cellvibrio sp. YR554 OX=2135765 GN=C8K91_10678 PE=4 SV=1
MSSSTKRIVILGGGTAGWITANLMATHWEQQGFEITLVESPDIGIIGVGEGSTPPLRGFMNAIGVKESDWMHECGATYKVGITFKDWSVKPGFSHYFHPFVSQPDEFTAPAFFYNSFLRRKGINLEGHPDHFFLATELAKQKLAPVAPPNFPFEINYGYHFDSALLGKFLARVAARKGVKYVQATVNEVVLDQQGNIDYLKSVEGQIIKADFYVDSTGFRSQLLQQALKVPFISCAESLFNDSAVVFPTPQTGDVEVQTIATALKNGWAWTIPLTHRVGNGYVYSSRFCSKDDAETEFRKHLGLLDSAVEARHLQFKVGRAAEHWAKNCLAVGLSQGFIEPLEATALDMVQETVVRFIDAYNRGNFTDQYRAEFNQRISTRFDAVRDYIVCHYRISSRTDTEYWIENGRNEKISPSLRSILSSWVAGKNITDELEKQKLDAYFPNVSWNCLLTGKGLYPLQEQLVAGNEMANKYDVAKLQHFIKGCALNFKPHREQLALLAQFSQQ

SEQ ID NO: 87098 - protein, 499 aa, Cellvibrio sp.
  REGION 1..499: note = tr|A0A4R7BB63|A0A4R7BB63_9GAMM Tryptophan halogenase; OS = Cellvibrio sp. YR554 OX=2135765 GN=C8K91_107142 PE=4; SV = 1
MQAVNNVVIVGGGTAGWLAAAAIGKIYQNKVKVTLLESDAIGTVGVGEATIPTMMAFHKLIGIPEAEMMRATHATFKLGINFKNWGEIGEDYLHAFGQIGRIFWGGEFQHFWARAKKLGVNAPYGAYCFENEAARAGKFAISENPVLNYAFHFDAGLYAKYLRNFSEALGVVRQEGTVESVQQDSDSGYITSVTLESGAVLAGDFFIDCTGFRGLLIEETLNTGYENWQHWLPCDSALAVQSAKTGPATAYTRATAHEFGWQWRIPLQNRTGNGVVYSSQFADRNWAEKTLAKNIDGKMLTEPRLIQFKTGRRKLSWNKNCVALGLSSGFLEPLESTSIHMVTSGLIRLLRLFPLRGIQPVLVEEFNRQSKEEAESIRDFIILHYHATRRTDTDFWNYVRTMSVPDSLRHRIDMFVESGMMFLGGEELFRTNGWSQVLIGQGFAPKNYQPIVDNMADAEFVAYMKGFRDHIAVNVSLLPRHEEFIAQYCSMNEELPQSA

SEQ ID NO: 87099 - protein, 615 aa, unidentified
  source 1..615: note = Nostocales cyanobacterium
  REGION 1..615: note = tr|A0A1Y0RNN4|A0A1Y0RNN4_9CYAN Tryptophan halogenase; OS = Nostocales cyanobacterium HT-58-2 OX=1940762; GN = BZZ01_17200 PE=4 SV=1
MNTIQQQEYDVVIMGAGFVGVCQARHLLLKVPNIRIALIDPRPEERTDKDLKLGESMVEIATLFVSKELGLHEYLIENHPPKSGLNFHWAKDPAKTETTDDHYHVWSNRRSPIQTFQMNRAKFERDLLKMNKAMGATFYNGRVVDVDLTPGDALKTVKVKLGNEDIELKAKHVIDGSGRKFIIGHKTDNLLFGPENLFGVNSGSAWVRVKYVDRTIFHDGYDPYGATCSHYYATNHWFGHGHWLWMIPTDKDTQEISIGVIHHHDVIPASDINTQEKFYAFLKANHTNLYRLLTSGENVDFHYLPRLAHKSKVMFSPDNWYVLGDAACIFDAFYSLGTTMISFEIESVTEIIRAKLAGEPDAEEKRAIYNSFNVAYTSTVNHAMKDHAKHLGHASIMSWRIYFEYMWFFGFILPMYVGKWFLDPQYIRAYLKNAGVGKRVISDVYEQFSKLVDRGANIGLMDAYRADQLLGHYSTIKHFGNYLENAKLEPKKHNIFTSLTYAYFYLAIWYIMFQWKGFGLKGLLAPRSLYNVFSLLSSSASFGFSALGYWLKTRGVPTNSQVAKMRQEFESYQYRPELQPWTQDITALRVKAQGAGDQQLNSTNVSKVREVAVSG

SEQ ID NO: 87100 - protein, 496 aa, Sphingomonas trueperi
  REGION 1..496: note = tr|A0A543LP60|A0A543LP60_9SPHN Tryptophan halogenase; OS = Sphingomonas trueperi OX=53317 GN=FHW45_4371 PE=4 SV=1
MDGQKFRVVIAGGGTAGWVAAAALVRHLGPNLDITLVESDAIGTVGVGESTIPTAWTFHKLLGINEQVFLRETNATFKLGISFENWLRDGDRYFHPFGSVGRAMPLCDFQHFWLEAQRRGFGGDLGDYSLETQAALAEKFATGEPMPLAYAYHLDATAYAAFLRGLAEPAGVRRVEGRIIEVEQAQDGDIAALVLEGGLRIEGDLFIDCTGFRALLIEETLKTGFDDWSHWLPTNRAFAVQSETTEAPVPYTRAIAHGAGWRWRIPLQHRMGNGFVYASDYLSDDEAKAQLLAAVPGRTLFDPRLIRFTTGMRKKAWNRNCIALGLSSGFIEPLESTSIHLVMIAVTRLLQNFPFRRDMAALSARFNAQSRAESEHIRDFIILHYKLNDRPEPFWRDHAARAVPDSLAARIALFEEGASTYQEGTDLFRIDSWNAVMLGQGVRPRDHHHMPAQIPSEDLERALGDLRAGIAAQLAKLPGHAEFIARYAAAKVPAAA

SEQ ID NO: 87101 - protein, 507 aa, Caulobacter henricii
  REGION 1..507: note = tr|A0A0P0P1U0|A0A0P0P1U0_9CAUL Tryptophan halogenase; OS = Caulobacter henricii OX=69395 GN=AQ619_13170 PE=4 SV=1
MNQHAPRRVVIVGGGTAGWMAAAALSKLLKGAYGPVTLIESEEIGTVGVGEATVPPIRLFNHLLGIDENAFLQACQGSFKLGIEFDGWSGEGRRYLHPFGTYGASIDGVSFHQHWLSQRARGDTSELDDYCVAAVAARMGRFSRGDDEPRSVFSTFSYAFHFDAGLYARFLRERAEAQGVTRIEGKIASVQQNGQSGDVTGVRLEDGETVEGDFFIDCSGFRGLLIEGALKTGYEDWTHWLPCDRAVAVPCENGGAFTPYTRSTAREAGWQWRIPLQHRIGNGYVYSSRHISDDDAAATLMANLDGAAQADPRFLRFVTGRRKKLWNRNVVALGLASGFLEPLESTSIHLIQTAIIRLLSLLPLGDDDPVARAEYNRLSILEMEHIRDFIILHYFINGRSGPLWEACRAMAVPDSLHRKLDLFRTRGKVVRYDDELFAEASWVAVLLGQGIVPQGYEPMADARDPADVARRLAGMRGHIARVVERLPTHAAFIAEHCRAPALTCDSR

SEQ ID NO: 87102 - protein, 510 aa, Cellvibrio sp.
  REGION 1..510: note = tr|A0A4R7BPI7|A0A4R7BPI7_9GAMM Tryptophan halogenase; OS = Cellvibrio sp. YR554 OX=2135765 GN=C8K91_101737 PE=4; SV = 1
MPNQQMPHAPVKKIVIVGGGTAGWMAAASLSRFAMGRELKITLIESTIIGTVGVGEATIPSIVNFNNSIGLDELEFIRATRASFKLGIQFEDWRTSGDRFFHPFADYGINFNGVEFQHYFYRLQKNNPTENLRDYSIACQLAAHNHFAQPLETPNNPLADFSYAYHFDATLYAKVLRELAVSRGVVHIDEKVERVNLRETDGFIASVLLANGQVVDGDLFIDCTGFKGLLIEETLKTGYEDWKDWLLCDSAVAVQCEISGEPTPYTRVSALDAGWMWQIPLQHRMGNGYVFSSRFLDKDTAAQTLLHKISGTPITNPKPFSFQAGRRKKVWNKNCYALGLASGFLEPLESTSISLIQTGITHLLTFFPDMSFDPAMISEVNRRHQHEMERIRDFIILHYKLTQRTDSEFWRYCQAMEIPDSLQHKIELFKSCGQILQHEPEAFEKSSWLSIYHGFGVTPLRTDNRIDHLKDADIKMQLEKIKQSLAQAGKNANTHGEFIRKHCTAPDFDQ

SEQ ID NO: 87103 - protein, 502 aa, Cellvibrio sp.
  REGION 1..502: note = tr|A0A4R7BLH2|A0A4R7BLH2_9GAMM Tryptophan halogenase; OS = Cellvibrio sp. YR554 OX=2135765 GN=C8K91_101736 PE=4; SV = 1
MKKIVIVGGGTAGWMSALIMAREWIKKGFSISLLESPEVGIIGVGEGSTPALKMFFDALNIAESEWMPECNATYKCGITFDKWSTKPGYESYFHPFSAALDRQTLPMFTHNVQARLRGADVYAHPDRFFISSRISNQCLAPVAPENFPFDVHYGYHFDAVLLGRFLRKKANELGVQHIIGHVVDVQQQESGDISALLVDNNERIEADFFVDCTGFSALLLQKTLKVPFVSYSNNLLNDAAVALPTDIGEKIPAQTLSTAMKSGWAWKIPLTNRYGNGYVYSSAFCSADEAEQELREHLGVLDADIPVRHLKMKIGRVEQHWSNNCLAVGLSQGFIEPLEATALFLVQQTAAVFAEYFARGDFTNRYQVEFNQRINGHFDGVRDYIVTHYKTSSRTDTEYWRANTADQQDISPVMCELYSAWFAGKELAAEVARLNIGAYYPAPSWYCILSGMGIFPSTQQMRKPNTDEARFDLSSLDEFLRRCTLNFSDHRAVLNNLATAKR

SEQ ID NO: 87104 - protein, 358 aa, Amycolatopsis thailandensis
  REGION 1..358: note = tr|A0A229SBY7|A0A229SBY7_9PSEU Tryptophan halogenase (Fragment) OS=Amycolatopsis thailandensis OX=589330; GN = CFP71_13740 PE=4 SV=1
MSVEEFDVVVAGGGPSGSTLATFVAMQGHRVLLLEKELFPRYQIGESLLPSTIHGVCQMLGVTDELAAAGFPIKRGGTFRWGARPEPWTFSFSVSPRITGPSSFAYQVERAKFDQILLNNAKRKGVDVREECSVTDVLEEGERVTGVRYTDRDGNEREVKATFVIDASGNKSRLYSKVGGSRNYSEFFRSLALFGYFEGGKRLSEPYSGNILSVAFDNGWFWYIPLSDTLTSVGAVVRREDADKVQGDREKALSSLIAEAPLIAEYLKDAKRVTTGKYGEIRVRKDYSYNQTEFWRPGMILVGDAACFVDPVFSSGVHLATYSGLLAARSINSVLAGDLDEKTALTEFEARYRREYSV

SEQ ID NO: 87105 - protein, 529 aa, Cellvibrio sp.
  REGION 1..529: note = tr|A0A4R7BH22|A0A4R7BH22_9GAMM Tryptophan halogenase; OS = Cellvibrio sp. YR554 OX=2135765 GN=C8K91_103267 PE=4; SV = 1
MTDQITRVVIVGGGSAGWLAAGIIAASSPAHIQTTLIESPDIKPIGVGEGTWPTMRVTLETMGISETDFFRECDASFKQGSKFSRWTSLSKDDDYYHPFTAPAKYHEINLAPFWLPFKDKINFANAVCPQADICDLGYAPKQMSTAEFGAVLNYGYHLDAGKFAPFLHKHCVEKLGVYYASANVTGINSRENGDIKSVATDACGNIEGDLFIDCTGLQSLLLGKHYAVPFISHKDTLFNDSALAVQIPYSDGANNIASHTLSTAQTNGWIWDIGLQSRRGIGHVFSSAYSTDELAERELRNYIAPAVGQKMAEELAVRKIAFNPGHRQSFWNKNCVAVGLSAGFIEPLEATALVLIELSAKIIGEQFPLNRSAMDIVAKRFNNTLGHHWQRIIDFLKLHYVLTQRTDTEYWRDNCRAETIPTSLRESLELWKVQSPWLQDELLRDEMFPSASYQYIYYGMKANTFVPEMAIQNQVTPKQAASKQLLSKKLKQAENLFMENAQHIQQLKKALQPNRDLIEKIKQFGLQKI

SEQ ID NO: 87106 - protein, 500 aa, Alteromonas macleodii
  REGION 1..500: note = tr|K0EGK6|K0EGK6_ALTMB Tryptophan halogenase; OS = Alteromonas macleodii (strain Balearic Sea AD45); OX = 1004787 GN=AMBAS45_13865 PE=4 SV=1
MTTPHRIVIAGGGTAGWMAANLLAHRWANQAVTITLIESEDIGTIGVGEGSTPTLKRFFQTLDIPEYDWMEECQATYKVNIKFTGWNGNDSHSYSHPFISQLDVFSERAFHVNALTRRLGLDVETRPDKFLMAGYLAKKNLAPLPSHNFPFDIEYGYHFDSLKLGRFLRERAKSKGVYHVVGNIESVHTSPSGDISHLVCQDGQKLDGDLFIDCTGFSGLLLQKTLGVPFRDFSDNLFNDSAVVLPTPACANLPVETESVAMSNGWRWQIPLRNRTGNGYVYSQEYQEKDAAECELRRALGMENTDVEAKHLSMRVGQCERHWEKNCLALGLSQGFIEPLEATALHLVQTSIELFADNYSFNETSAQQRQAFNREVSERFERVRDYIVCHYKLNGRNDSDYWRDNRTNMKLSESLLSLLDVWYRKGDIVEEIKRQGIGRHFSTTSWHCLLSGYGVYPPPALNQPASLKESGDLFEEKKLAAFFNRCSLNFDKQSTLFNAG

SEQ ID NO: 87107 - protein, 431 aa, Acinetobacter sp.
  REGION 1..431: note = tr|K9A6X9|K9A6X9_9GAMM Tryptophan halogenase domain protein OS=Acinetobacter sp. WC-141 OX=903915; GN = ACINWC141_0551 PE=4 SV=1
MSTLEKIDVVIIGAGPSGSSAAALLRKKGYTVTVIEKQYFPRFSIGESLLPQSMAFLEEAGLLETVREHVEQYAFQFKNGAAFLRGKQRSFYDFTEKFTDGPGTTWQVRRADFDNLLAKQAQAYGADIRFGHEVLDVDVASEQPLLTVLDEEQQRYQIQTKFLLDASGFGRILPKLLDLESPSNFPVRRALFTHIEDGIADDPEFDRNKILITVHEKDHRAWYWLIPFADGRASFGIVAEQDFFDKYTVENASDNEPEAMFKRILADEPSLSHVLHRAKFDTPVRTLVGYSANVKHLADRNYALLGNAGEFLDPVFSSGVTIALKSSSLAVPLVERVLQGEQVDWLQEYEKPLRRGIQVFRAYVESWYEGEFQDVVFSQNQNEGIRRMISSLLAGYAWDEKNPIHKNAKRRLSTLAEYCREGLTQEQVLEG

SEQ ID NO: 87108 - protein, 497 aa, Cellvibrio sp.
  REGION 1..497: note = tr|A0A4R7BK42|A0A4R7BK42_9GAMM Tryptophan halogenase; OS = Cellvibrio sp. YR554 OX=2135765 GN=C8K91_103270 PE=4; SV = 1
MIGDQHVKNVVIVGGGTAGWMAAASFAKLLGKSIAVTLIESDEISTVGVGEATVPPLILLNRYLEINEQEFLAFVKGSIKLGISFENWKNLNEDYFHMFGTPGKDTWAASFQHFWLRGKELGVNYPLGDYSLEHKAAEHNKFAHMPNSSLNYAYHLDAGFYAKFLRNIAEKAGASRIEGKVVNVALDEDEYIKSIELASGQVVAGDLFIDCSGFRGLLIEQALHTGYEDWSHWLPCDSAVAVQTESVRDPVPYTRSIAHQSGWQWQIPLQHRVGNGLVYCSKYISDDDAKKLLLEHIEGRLISEPKIIKYRTGQRLKHWNKNCVALGLASGFIEPLESTSIHLIQRGITSLIQMFPHTGIRKCDMDEYNEQMKVEILNVRDFIILHYHLTDRDDSPFWQYCKNMPIPESLEKRMRMFRETGKVFVKSYELFSESSWLQVMVGQGLMPENYHPVANEIPAEGLVKFLADIRAQVNQNLRKMPTHKEYLDFYCKASDWD

SEQ ID NO: 87109 - protein, 602 aa, Microcystis aeruginosa
  REGION 1..602: note = tr|A0A3N0X535|A0A3N0X535_MICAE Tryptophan halogenase; OS = Microcystis aeruginosa FACHB-524 OX=2486203; GN = ED562_02460 PE=4 SV=1
MNYTITQSREYDVVIMGAGFAGLCQARHLMLNIPNIRVALIDPRPVERTDKDLKIGESLIEVAALFLCKELGLHDYLIENHPPKSGLNFHWPKDPAKTETLDDYYHVWANRQTPVGSFHLQRAKFEQDLLVMNCQMGADFYEGRVKDVALTSGDELKTVYAKVGEENITLQAKHVIDAAGKNFIIGRKTDNVLSGPENLLGLNNGSAWLRVKNIDRTIFHSGYHPEGASTSHYYATNHYFGQGHWLWMIPIDKHSMELSIGIIHHHDVIPAQSINNLEKFSNFLKSNHTILSRLIESGEVVDFHYWPKIAHKSKVLFSPDNWYVIGDAAHIFDAFYSYGTTMIAFEVESVTEIIRAKLAEEAAAEQKRSAYNDFNLAYARTVNCLYRDHAYQLGHASVMSWRIYFEYMWWFGVHVPTYIGKWHLDLNFIPRYVTIADGNVNGIFADLCQEFHQLVSQGANIGLMDAYRADQLLGGYGTLKHFDDFLENTKFEPRRCNVFASMKAAYFYIAIWYALFQWKAFGIAGWLNPKHWYYFGRMLKLSIQATIAEVIYKRKTRGIADNSQIEKMREEFKNYHYQPQKKSPSVVQNVVGERVTIESFPA

SEQ ID NO: 87110 - protein, 505 aa, Erythrobacter sp.
  REGION 1..505: note = tr|A0A1F9ZG08|A0A1F9ZG08_9SPHN Tryptophan halogenase; OS = Erythrobacter sp. RIFCSPHIGHO2_12_FULL_63_10 OX=1797975; GN = A3J40_07870 PE=4 SV=1
MAQEFAPIEQILIVGGGSAGWMTAAALAESLGTACRITLVESEEIGIIGVGEATIPPIKYFNQRLGIDEATFVRETSGSFKLGIQFVDWARIGHSYFHPFGQHGAEFDPVPFYHYWMRESLAGNVEGPIDDFSMAWAMARAGKFSHPLADRRQIQSTFDYAYHFDASLYAAFLRKYAEARGVTRVEGRVVDVALDPESGAIGSITLADGQKLEAEFFVDCSGFRGLLIEDALEAGYENWQHWLPCDRAIAAPCARSAVTTPYTRSTALAAGWQWRIPLQHRTGNGYVHCSSFIREDEATGALVGALDGELLGDPRTVRFVTGRRREFWVKNCVAIGLSAGFMEPLESTALHLIQYGILRLLALFPDREMSPLLAREYNAQTATEYERVRDFLILHYKANQRGDAELWRYCAAMDIPDSLQYKIDHFRNYGLLVSDERELFNNPSWIAVYLGQGIVPRRAPAITAMRPGVPVADRLRAISLAMDEAVAAMPEHDTFIAQHCPSPYR

SEQ ID NO: 87111 - protein, 499 aa, Cellvibrio sp.
  REGION 1..499: note = tr|A0A1Y0FZP2|A0A1Y0FZP2_9GAMM Uncharacterized protein OS=Cellvibrio sp. PSBB006 OX=1987723; GN = CBR65_16735 PE=4 SV=1
MNSEAIQNIVIVGGGVVGWTAAAILARALKSEPIKITLLDLPGLPADDMAESSLPGIRPLHQMLGFDERQLMSITGATFKLGTEYQGNNARSFIHPLGRLATTTAAFDQQVIRLHHAGEHISYDDFFLAAVAARHGKFAFPEQNKKNILSTLSCGLHLNVDAYKKYLRDYAHYLQVTSLQARVQGVELCPDSGFINAVVFDDNTSLSGDLFIDCSGEMSVLIGDPALAVDYCSWAADLPVDRVMNFSIPYGPEESTLRPLTSIQAMPWGWQRTIPLQQHRVQQYIYHSDLLGDETLLAELQRLGLSANATHTSKHIRPGHRTVWWKANCVAIGTAAGNITSLAISELQWAQSALVRLLDYFPHKACKPCNTAEYNRLSLGEFERLRDFHIAHQLLLHTDSAFGRLCQEKSPPITLQHRLDLFRHRGRIGAYEYDVISDQLWAAFFLGLNCWPERYDIMTDALAEKELLQQHQHIRQAVQKTVDAMPNHHEVLARYCPAR

SEQ ID NO: 87112 - protein, 494 aa, Acinetobacter sp.
  REGION 1..494: note = tr|N8XK51|N8XK51_9GAMM Uncharacterized protein; OS = Acinetobacter sp. CIP 56.2 OX=1144672 GN=F966_02081; PE = 4 SV=1
MLNLRGIQRVCIVGGGTTGWFSALRLRQIFNQSVEVVVISAPEIPIVGVGEGGVVNLLDILAKLEINIKDFIDNTGSTLKLGFRYEQWNTGKKEDYYYHLFPNIDTPEMWDENGYYPFLSLLLNNGLNINSYMEALELCENKVPFNKVIDLLISGNHNFTASLHFDTFKVGQYLKEIALQRSIIHVEDKVEDFCLDAEKGSVTSIQCQNRKIDCDFVIDASGFSRLLIGGKFKTDWISFADTLIMNRALPFHLSHKKEIELVTRATALSSGWVWQIPLQERIGAGYVFNDQFLSDDQAHDEVEKWLGEKIDPIRVIKFEAGYFQKVWVKNVVALGLASGFVEPLEATSIGQMVTQLETLSNFILHNHGVISEQNINYFNKQNGQYWRGIGDFIRMHYDTPREDTPFWKEMKNVPISPEYKELKECWKHRTPRLIDFAEYSLSGTLMFGVPNWFAVGVGTGVIKPESTAAELYALSIDQKRKLAQHLHKMKQKLS

SEQ ID NO: 87113 - protein, 486 aa, unidentified
  source 1..486: note = Sphingopyxis indica
  REGION 1..486: note = tr|A0A239JAL6|A0A239JAL6_9SPHN Tryptophan halogenase; OS = Sphingopyxis indica OX=436663 GN=SAMN06295955_109151; PE = 4 SV=1
MSAAREPLRRVAVVGAGQVGVLAAIAIKRASPATDVLVVGTPIDPVAFADHIGTALPFTNRLHDRLGVGEEALVRRAGASHRLAMRYTGWAGPGSIGLTAYGGAVDPKLNSAFAREWGGGAHKAAGGAPAGSVGAALAEAGRFMPPGGEAPSPLAEVDYALRWNAPAYRDLLIGIAAQLGVRHHPGPVSAVQTTLDGGIAAIQLAGSDAVAADLLVDASGTAALLSAAQPDRRWIDWRGALPARSLAVAPPAAPRLDLADTIAFTDAGWCWEQAGRDGVTRFLAVPDDVSDAAVEAALGAPPADRFPIDAGRQEQPWTGNVVAIGDAAARFEPLAGVALDLAHRQIDLLLDLFPGRAIDPRERAEYNRRFALMADGARDWIASHYAAPAAAHRLAALERSPALDRMLDQFARRQRLPITEEATVSTSEWAALLHALGVPAQRSALSLAEGEASGRRAAAALDRKVAAALDAAPPYGAWIAHVLREG

SEQ ID NO: 87114 - protein, 277 aa, unidentified
  source 1..277: note = Caulobacteraceae bacterium
  REGION 1..277: note = tr|A0A4Q3TEW0|A0A4Q3TEW0_9CAUL Tryptophan 7-halogenase (Fragment) OS=Caulobacteraceae bacterium; OX = 1978230 GN=EON96_16020 PE=4 SV=1
MEQADRIRDIVIVGGGTAGWMTASALAKVAGTQSLSITLIESDEIGIVGVGEATIPPILLFNKLLGIDENEFIRETQATFKLGIQFVDWGKLGHTYAHPFGLFGADMNGINFSHYWLRAVRAGADPDNHLFVAEAEAMRLNRFARTPPGGAGDMPRVNYAFQFDASLYAAWLRKYAEKRGVVRREGRIVGATRDGEAGTIRSVTLADGREVKGDLFIDCSGFRGLLIEQEMEAGYEDWTQWLPANRAVAVPCDRVEDPVPYTRSTARESGWQWRIPL

SEQ ID NO: 87115 - protein, 491 aa, Sphingomonas sp.
  REGION 1..491: note = tr|A0A1P8PU03|A0A1P8PU03_9SPHN Tryptophan halogenase; OS = Sphingomonas sp. LK11 OX=1390395 GN=AV944_09340 PE=4; SV = 1
MTDKRIRRIVILGGGTAGWMTAAALSRALAGQGVAITLVESDAIGTIGVGEATIPTIHWFNQIIGLDERQFMAETKATVKLGIEFVGWNGEGSRYFHPFGTYGPPGDGAMFLHRLIRARADGDRAPTEAYSLTARAARAGRFARPVADRRSLLSTLGYAYHFDAGLYARYLRGLAERAGVRRIEGVVASVDQDGESGFVRSLTLDGGQVVAGDLFIDCSGLRALLIGQALDIGFDDWSHWLPCDRAWAAPSAAESDRTPYTRATAAEAGWRWRIPLQHRVGNGYVFSSRFQDEEEARASLIAGMDGPPLAEPRLIRFTPGMRREAWRANVVAIGLSSGFLEPLESTSIHLIQSGIAKLLSLFPAADCSPLLARQFNRVFGQEMLDVRDFLILHYHATTGRDEPMWRERQAMAIPDTLAEKLGHFRGSGRIVLSSDELFRDASWFAVLDGQGERPGDHNPLVEVLGREDNLRQLAALRADIVKTTAAMPPLS

SEQ ID NO: 87116 - protein, 525 aa, Alteromonas sp.
  REGION 1..525: note = tr|A0A385N0P4|A0A385N0P4_9ALTE Tryptophan 7-halogenase OS=Alteromonas sp. RKMC-009 OX=2267264; GN = DS731_20230 PE=4 SV=1
MKDTQQLTSVVIAGGGTAGWLTACILAAKHRPGNLSITVIESPGIPTLGVGEGTWPTMRGTLQKIGIDEATFLTACHGSFKQGTSFHHWRKPEASPHQYYHPFSLPFNYFDTDCAAWWQRHQPQMDFASVATSQGAICDRNLAPKQAETPPFAGVVNYGYHLDAVKFAGLLKNHATSESGVTHITGHISSVIPSEDGGIHSVVLDKTGREIEGDIFIDCTGFSARLIGEHCGEPLISCKHILANDSAVAVQCQYAADDSTVASVTRSVAQSKGWIWDIALPERKGAGYVYSSQHCTAEEAIRTLHRYAGSDTSLRDISFGEFSGKAKYFNFEPGYRRSPWQKNCVAIGTSAGFLEPLEASALVMIELAATLLSEQLPRYTNQIAPVARQFNQQLTGKWSRIVDFLKLHYVLSDRDDSAYWQEMRKLSSCSEQLQDWLSMWSTRSPNASDFNLRDEIFPAASYLYVLYGMGFNTAFLPGSADHDSSGHQHAWHKQQQLTRQHLAGLPANRALLNQLTGARQYQVNR

SEQ ID NO: 87117 - protein, 225 aa, unidentified
  source 1..225: note = Caulobacteraceae bacterium
  REGION 1..225: note = tr|A0A4Q3TYW9|A0A4Q3TYW9_9CAUL Tryptophan 7-halogenase (Fragment) OS=Caulobacteraceae bacterium; OX = 1978230 GN=EON96_04865 PE=4 SV=1
MNSSEQDPRIRSVVIVGGGTAGWMTAAALVQHFRGSPVSITVVESSDIGTIGVGEATIPTIRRFYAQLGLGDAELMAATEATCKLGIRFQDWSGPGSDFIHPFGLYGQELKGIGFHHYWLKARQAGDPAPLADYSLGASLARCGRFTTPSRNPPSTLSVFDWALHLDAGLFAQRLRRYAEEGGCTRIDGRIGEVRLRDDGFVEALALSDGRVVEGDLFVDCSGFR

SEQ ID NO: 87118 - protein, 517 aa, Cellvibrio sp.
  REGION 1..517: note = tr|A0A1Y0FZR2|A0A1Y0FZR2_9GAMM Tryptophan halogenase; OS = Cellvibrio sp. PSBB006 OX=1987723 GN=CBR65_16730 PE=4; SV = 1
MPSQRIQQVVIVGGGTAGWMTAAALARFLPSAICKITLIESEQIGTVGVGEATIPHIRHFNQLLGVDENEFIRATQATYKLGIQFSGWGYPGTSYIHPFGLYGHDISGIDFHHYWLRLRSLGDEAPLENYSIAAVAALAKKFAYPDANPDSPRSDFGYAFHLDASLYAQFLRCYAVQKGVVRIEGKIDQVQFSSTTGFIETVMLESGEQLAGQLFIDCSGFRGLLIEGALKTGYEDWRHWLPCDRAVAMPCERTGDPLPYTRAIAQKVGWQWRIPLQHRTGNGHVYCSDHLSDDEAAYQLRHQIDGEATGEPNFLRFVTGRRKRSWNKNCVAIGLASGFLEPLESTSIYLIQVGILKLLENFPDADFADVDRTEFNRHIDLEYRRVRDFLILHYKANARMGEPFWDACRTMAIPEELERKINLFRESAHIEHYQQGLFMTPSWLAVYIGQGVIPDAYDARVARHTRETIAAYLEKLHQGIRVDVDAMPSHNTAIQHAINAISARYPEASMSLYGLQR

SEQ ID NO: 87119 - protein, 508 aa, Pseudoalteromonas agarivorans
  REGION 1..508: note = tr|N6V107|N6V107_9GAMM Tryptophan halogenase; OS = Pseudoalteromonas agarivorans S816 OX=1307437; GN = J139_12578 PE=4 SV=1
MNKAIKTIAVIGGGTAGWLSAAIIASYHQGNKGDGLKVILVESSDIPTIGVGEGTWPTMKNTLQQIGLREVDVFKACNATFKQGGKFVNWTHGNNDFYYHPFTVPLGYGRIDLAPYLDNVENFAQQTNFQHDICEANLAPRGIAQGEYQANCNYAYHLDAGAFAELLKQHCKSKLGIEHIIGTVDQVKLDESGAIDTLTLTDQTRTINADLYIDCTGFSSLLLGQALNVPFKKMDHVLFNDSALAMQVPYDEGDESLASHTIATAQNAGWIWDIGLTHRRGVGHVYSSKFLSDEEAEQNLRNYLGDAAKGLTARKISFESGYREEFWHKNCVAVGMSAGFVEPLEATAIMLVEISSRFVAEHMPADTQVMPIVAKRFNEQMDYRWQRIIDFLKLHYMLTKRPEPYWQAHVQPQSIPQSLQEDLLLWGTRGTLIQDFHGALELFPAASYQYVLYGMGFKPDFTKQAYLYSNDAQANQIIERNSQLTQQMLQTLPPHRAYIEQWLAANPV

SEQ ID NO: 87120 - protein, 518 aa, Pseudoalteromonas agarivorans
  REGION 1..518: note = tr|N6WB82|N6WB82_9GAMM Tryptophan halogenase; OS = Pseudoalteromonas agarivorans S816 OX=1307437; GN = J139_01097 PE=4 SV=1
MNQQNKKIKTVVVVGGGIAGWLTAGRLAAHHKSNTPDGLNVVLVESPNVPIIGVGEGTWPTMRSTLIALGISETDFIRECEASFKQGAKFAKWVDGSNDDFYYHPLVLPQGFSKTDMAGHWLNNTAESTSFSNAVCYQEAICEQGLAPKTIRTPEYAALANYAYHLDSAKFAVFLQKHCTQELGVKHFLADVTQVNSAKNGDIASVTTKQQGEISGDLFVDCTGFSSLLLGEHYKVPFMPCDDVLFIDTALAVQVPYENEDESIASHTISTAQEAGWIWDIGLQHRRGVGYVYSSKYSSEAQAREKLKEYVGDKIESLTIRKIPIKSGHRSHFWQNNCVAVGLSAGFLEPLEASALVLVEMSAQMISEQLPHTRDIMDITAKRFNETFSYRWEKIIDFLKLHYILSTRDDNAFWRDNRDPKTIPQSLQDLMKLWQYRAPADHDFTSNNEVFPAASYQYVLYGMGFKSDYSTTSYMLKDTDFAKSQFDKNKSMINQAVTNLPSNRELLNKIKSHGFSTI

SEQ ID NO: 87121 - protein, 517 aa, unidentified
  source 1..517: note = Fuerstia marisgermanicae
  REGION 1..517: note = tr|A0A1P8WC74|A0A1P8WC74_9PLAN Flavin-dependent tryptophan halogenase RebH OS=Fuerstia marisgermanicae; OX = 1891926 GN=rebH_2 PE=4 SV=1
MATQTFQNQNNRENLSASRIAIVGGGTAGWMTAALLSHSLSRSECHVTIIDDGKGGIGVGEATIPSIVQLVRTLGGDEAEFLRGCDATWKLGIQFCDWKSDGQTAWHPFGQCGAQIDQRDLFSYWLADQQRPYHSYSVNWAAALAGKSPHARNSLSPIAATGAYAFHLDAAKLAQWLKLRSVANGVEVVGHRVREIVTDDSGQISAVTLDDGSSVAGDLFVDCSGFNSLLMSRRPQEEWVDASEQLLCDRAVTMRLPATKVKAPYTTAKAMSAGWAWDIPLMNRRGVGYVYSSQFVSDDEAAAELQQHVGVTDSAETDTPAFLSMKVGRRVNAWSENVVANGLAAGFVEPLESSGLHLIQTGVERLLKYFPTAKSSQASEAALRTAYNSETAIQFDEIVDFVQLHYLLNDRDEPFWKAAKAAPLSSALQHRLRLYDEIGMLDQLQASAFPDASYYYLLAGNGRLPKRPAALSLAVDKDRLQFVLRAILDQNRNALRELPLHEEMLQQVHATSVAKAS

SEQ ID NO: 87122 - protein, 521 aa, unidentified
  source 1..521: note = Fuerstia marisgermanicae
  REGION 1..521: note = tr|A0A1P8WC54|A0A1P8WC54_9PLAN Flavin-dependent tryptophan halogenase RebH OS=Fuerstia marisgermanicae; OX = 1891926 GN=rebH_1 PE=4 SV=1
MNDSTKPDQPSSPTVRFPRRVVILGNDVTVWMAATMLLRHFGRLGIRVTVCPDGPAFTTGFSTYATTTALVDLLKDIGIDEHDMLRACNGTYRLATQFSDWASEGRDFWQPLGMHAQRVDAYPLFDAWFSERKAGRLLRPLHSYAAQWTASLAGKSPHSFSATSAFAKSGHYGFHVDAAGLARWFRSIAVTSGVEEVQAAVEKVAPNGRGGIAQVVCGDGKAVPGDLFLDCRTANDGDASGANWISWNDQFSCDRVASIRTPGKRQVPVFTRVVGHNNGWSRTIPLAAELEHTYAFCSQKESDNDAPKRLQSISNAGMAGSEGVEAKVQVQSIRHGRRSVFWKDNVVALGNAACQLNPVAAMDLHLHQVGIELLMELFPDRKIGRATRAEYNARMSSIADELRDVAELHHALRRSSSANSENGMGTQSAALEQMLAVYDACGAVRATNPESMPSEEIRSFLAGCGRLPDRPSLAIRSIDPNRIQHVLRETVKHNEAAVKDLPLHEELLDWIHAGPFQQSAG

SEQ ID NO: 87123 - protein, 517 aa, unidentified
  source 1..517: note = Thalassotalea sp.
  REGION 1..517: note = tr|A0A4P7JIU5|A0A4P7JIU5_9GAMM Tryptophan 7-halogenase OS=Thalassotalea sp. HSM 43 OX=2552945; GN = E2K93_02195 PE=4 SV=1
MNQSIKHIVIIGGGSAGWLSAGIIASEHKTAADNGVQITLVESPDVQTIGVGEGTWPSMRQTLKKMGISETEFVLNCDASFKQASEFRNWTHGNGDSYFHPFTMPAGYHETNIADFWQQHRQQVSFADATTSQSHICRNGLAPKQISTPEYSFNVNYGYHLDAGKFSTFLQKHCCSKLGVSHVLDHVVKINSHENGDIKSVSTRQHGDIEADLFIDCTGFKSLLLGEHYGIDFISQKHVLFNDRALAVQVPYANDNEPIASHTISTAQSCGWIWDIGLPSRRGIGHVYSSAHISDDAAAAQLREYIRPALGNKADDVALRHIKINPGYRQKFWHKNCVAIGMSAGFIEPLEASALALIELSAKMIAEQLPANRQVMDITAKRFNTKFNHRWQRIIEFLKLHYILSQRDDSQYWRDNRSAESIPEHLQELMQLWQYQSPYGYDSDHSDDLFPAASFQFVLYGMGFETQLPNRQKRHDKSDMANTFFNDNIKQTQQLMRSLGSNRELINKIKKYGFAKL

SEQ ID NO: 87124 - protein, 226 aa, unidentified
  source 1..226: note = Caulobacteraceae bacterium
  REGION 1..226: note = tr|A0A4Q3TDT2|A0A4Q3TDT2_9CAUL Tryptophan halogenase (Fragment) OS=Caulobacteraceae bacterium OX=1978230; GN = EON96_17215 PE=4 SV=1
VFSGRHLSDDEATATLMAQVEGAPVVNPMVVPFKTGVREKVWDKNVLALGLASGFIEPLESTAIHLIYRGMDFFFRYLPQRDCDPALRDEYNRRMIADYEEIRDFIILHYCTTQRDDTAFWREVRDMEPPANLKHRIELFRVNGTLAEGLDELFRSASWQSVMEGMGIHPRGYHPLVDRIGRDDFPAQLDVARGQLRQTVEGLPTHADFIRDHCAAPTPEPVTMSA

SEQ ID NO: 87125 - protein, 518 aa, Alteromonas sp.
  REGION 1..518: note = tr|A0A385MYQ0|A0A385MYQ0_9ALTE Tryptophan 7-halogenase OS=Alteromonas sp. RKMC-009 OX=2267264; GN = DS731_16510 PE=4 SV=1
MSKRVLIVGGGTAGWITAAYMARMLAADTPGGVSITLVESDEIGTLGVGEGTFPIIRKTMKRIGIDESDLIKHADATFKQGIRFNNWKYNPADKSDDNYLHPFQVASQHTDMDLLPYWLLGVAGDVPWAKACSVQSTVIDEKLAPKLITHPQFDAPLNYAYHFDATKLAALVRNKATDTGVRRLVDTIDNVTLAEDGSIASVTAREHGELTADLYIDCTGFRARLIGETLGMPFTSFKKELFCDRAVALQVPYDNPQAGIPSCTYTTAKEAGWIWDIGLHHRRGVGYVYASEYCDEETAVKTLKAHIGPAAEDLSHRLLKFEPGYRQTQWHKNCIGVGLSVGFIEPLEATGISFAEVAALMLCNLFPWSGDYEASARQFNEAMCKRFEHVKDFIKVHYYLSERDDTAFWRDNRAPDSASEYLKGKLAQWRHRPPSFLDIDASHDIFDENSWQYILYGMGFKTDISARADALRFYDDARREFHSIQQQSRNAMTAVPAHRQLINEVASGGFRPRAGGRR

SEQ ID NO: 87126 - protein, 500 aa, Altererythrobacter sp.
  REGION 1..500: note = tr|A0A411ZDV5|A0A411ZDV5_9SPHN Tryptophan 7-halogenase OS=Altererythrobacter sp. BPTF-M16 OX=2169535; GN = BPTFM16_01541 PE=4 SV=1
MSETGIRKLVIVGGGTAGWIAAAAFARLLGHRISIELVESDAIGTVGVGEATIPQIIRLNTILGLDENDFLKNTYGTFKLGIEFVNWGKLGESYLHTFGDAGLNLANVNFHHYWRRHAQAGSDKDLWHYSLHKMAADQRRFAKLERVGNTAMTGLAYAYHFDASLYAAYLRQYSEARGVKRTEGIVEAVKRDGESGDIRSITLENDVQVDGDFFIDCTGFRSILLGQELGVAYDDWSKWLPCNRALAVPSERLPELPPYTRATAQSAGWQWRIPLQHRTGNGHVYCSEFIEDEQAADILLENLDTKALDEPRPIRFTTGRRQQFWANNCVAIGLASGFLEPLESTSIHLIQSNISRLIELFPRDRINSVDRSEYNRRTIAEFEQIRDFLILHYHQTDRVDSEFWKYCKHMTVPDSLKHKQALFAASGRIGRDFDDLFRDASWVQVMLGQGITPADYNPMADQLSDAQLGQFMGDVRGLIEKSVAGLPSHADYISKHCFAG

SEQ ID NO: 87127 - protein, 267 aa, unidentified
  source 1..267: note = Caulobacteraceae bacterium
  REGION 1..267: note = tr|A0A4Q3SUZ0|A0A4Q3SUZ0_9CAUL Tryptophan 7-halogenase (Fragment) OS=Caulobacteraceae bacterium; OX = 1978230 GN=EON94_04715 PE=4 SV=1
WTQWLPANRAVAVPCDRVEDPVPYTRSTARESGWQWRIPLQHRTGNGYVFSDAFISEDQATADLMSRLDGAPQADPRVLRFVTGRRRKGWIGNVVAIGLSSGFLEPLESTSIHLIQTAISKLLALFPRARRDDAMADQFNREMDQQYEGVRDFIIAHYKVSTRDDTPFWRHCRDMAVPDSLAAKLELFRARGEVMVENHELFRETNWFPILYGQGLTPEGYHPLADVLSDDDLRLRLSQIRTAIKARVDGLPSHESYLQQCVAGTAR

SEQ ID NO: 87128 - protein, 508 aa, Sphingomonas sp.
  REGION 1..508: note = tr|A0A258RY21|A0A258RY21_9SPHN Tryptophan halogenase; OS = Sphingomonas sp. 28-63-12 OX=1970434 GN=B7Y47_06300; PE = 4 SV=1
MARIERLVILGGGTAGWMTAAALAKTFGRAIAIELLESDAIGTVGVGEATIPTIHWFNQLVGLDEADFVRATKASFKLGIEFVDWARPGHRYFHPFGRYGVELGPVPFHQCWLRAGSDGAKTPLAAYSLATALAAANRFAKPVDDPGSILSTLGYAYHFDASLYAAHLRQRAEANGVRRHEGRVIAIERDPDTGFVTALTSDRGDRLAGDLFVDCSGFRSLLIGNELGAAFEDWSAWLPCDSAVAVPCARAAETTPFTRSTLRPAGWQWRIPLQHRTGNGYVYASRFVSDDEAAATLLANLDGEALADPRVLRFTAGFRRDSWTKNVVAIGLSSGFLEPLESTSIHLIQSGIAKLIALFPDRACDPALARQFNALFGHDMDGIRDFLILHYHATNGHDAPLWRRSRAMTLPDSLVEKEEQYRRTGRLMLSGDELFREASWLAVLNGQGIVAADHSPVADTLDGAANRHQLDQLAAIIARAAPTLPKHDEAIAALLGQAPPRAMALARS

SEQ ID NO: 87129 - protein, 450 aa, unidentified
  source 1..450: note = Caulobacteraceae bacterium
  REGION 1..450: note = tr|A0A4Q3TR86|A0A4Q3TR86_9CAUL Tryptophan 7-halogenase (Fragment) OS=Caulobacteraceae bacterium; OX = 1978230 GN=EON96_10630 PE=4 SV=1
MHENAIRTVVIVGGGTAGWMTAAALSKRLGRTVAITLIESAEIGTVGVGEATIPPIIDFNKMLEIDENAFVKATQATFKMGIEFRDWGALGDNYLHPFGRFGLDFEGVPFHQQWLKQQAAGQPGDIEAYSLSGTAARAGKFFRPVEDTRNLLSMLAYAFHFDASLYATFLRAYAEERGVVRQEGRVVQVAQRALDGHIESVTLESGAVIAGDLFIDCSGFRGLLIEQTLEAGFEDWAHWLPCDRAVAAPSASSGEPLPLTRSTAREAGWQWRIPLQHRVGNGYVHCSRFISEDEATATLVANLDGELLAEPRTLRFRTGRRQRTWVKNCVAIGLAAGFLEPLESTSIHMIQTAITRLLALFPDRSFDPTLVDEYNRLSKREAERIRDFVILHYHQTTRDDAPLWRQVRTMEVPETLRRKLELFRSRGRYFREDDDLFVEANWLAVMLGQG

SEQ ID NO: 87130 - protein, 492 aa, Shewanella sp.
  REGION 1..492: note = tr|A0A411PCZ8|A0A411PCZ8_9GAMM Tryptophan 7-halogenase OS=Shewanella sp. D4-2 OX=2520507; GN = EXU30_00970 PE=4 SV=1
MDSKVNNIVIVGGGSSGWMSAALLCKMYKGTINITLVESDAIGTIGVGEATIPPLKIFNDVLGINEQDFIEKTKASIKLGIEFENWGKQGDAYMHAFGSIGKDIGYSAFHHYWLANKPQSPASLWDFSYNYQVAKQNKFSVQPKIHNDQLAGITHAYHFDAGLYANYLQQYCQQLGIRHIQGLVETINQKDNGDIESLTLQDGQVINGDLFIDCSGLHALLIDKTLNVEFESYQQWLVCDSAWAVPSEKTSPIIPYTRATAHDFGWQWRIPLQHRTGNGMVFSSKYISDEKAKQTLLDNLDAKAIGEPKLIRFKPGRRVKQWQNNCVAIGLSSGFLEPLESTSLHLVQTAIIRLTKLMPHLSITPELVAEYNRQSQTEFEQIRDFIILHYHLNQRQQGELWQYCQTMSIPDTLQHKISLFAQTANLFRQQDELFTQEAWLQVMIGQNLMPQDHNPLANILSQQERKDFLDNLKQIYQHYSAELPAHETFLNL

SEQ ID NO: 87131 - protein, 493 aa, Erythrobacter gangjinensis
  REGION 1..493: note = tr|A0A1J0V4A1|A0A1J0V4A1_9SPHN Tryptophan halogenase; OS = Erythrobacter gangjinensis OX=502682 GN=BMF35_a0028; PE = 4 SV=1
MPPHVVVLGGGSAGWITACLLHKAWGEHGGKVTVVESPEIGIIGVGEGSTPQLKAMFDHLGIAEADWMAACDATYKLGIRFTGWSERPGFESYFHPFPCAVDLHSEPDFTQNCTLARRGFDVPAHPDDWFLASILADAGSGPQPADTFPFPPTYGYHFDAYKLGAFLRDWAVERGVDHRALKAEKVELSGHTDVAALLCEGGERIEGDIFVDCSGFRAMIAGDALGGEFLPFAENLFADRAVVVPTEKVAQFKPQTGAIAMSSGWRWHIPLTTRTGNGYVYSSRYISDEDAAAELLHAVGLKDDETEPRFLRMKVGRMAKSWRGNCLAAGLAQGFIEPLEATALHIVIATALDFAAAYEAGGFSPEHRDHFNRQTALRYEAIRDYIVGHYRLNQRSDAAFWRDNAANQNLSDELKAMITAWFTHKDIAATNAERYSVQAYSAASWHCLFAGYGTFPAPAKMQPLPANLKAADHGAITSMLAACARNFSPVDWS

SEQ ID NO: 87132 - protein, 510 aa, Porphyrobacter sp.
  REGION 1..510: note = tr|A0A2Z2PDG3|A0A2Z2PDG3_9SPHN Tryptophan halogenase; OS = Porphyrobacter sp. CACIAM 03H1 OX=2003315; GN = CBR61_15125 PE=4 SV=1
MNAMDRPEVRKLVIVGGGTAGWITAAAFARLLGQRLQIELVESEAIGTVGVGEATIPQIIRLNAILGLDENAFLSATSGTFKLGIEFVDWGRKGSRYLHTFGDTGMTLANVAFHHHWRRSAGTAPDPKGLWDFSLHQLAADQARFGKLDRVGNTAMTGLAYAYHFDASRYALFLRDYAEGRGVTRTESIVESVARDGESGDIRSITLKGGKEVAGDFFIDCTGFRALLLGETLGVGYRDWSKWLPCDRALAVPSERLPVLVPYTRATARDAGWQWRIPLQHRTGNGHVYSSGFATDDAAADLLMAGLDTRALGDPRPIRFTTGRREAFWAHNCAAIGLSSGFLEPLESTSIHLIQSHVSRLIQLFPRAGDPSAMRAEYNRRCEEEFAQIRDFLILHYHRTDREDTEFWRFCKHMDVPDSLTHKIALFASSGRVGRDVDDLFRDASWVQVMLGQGIVPADYDPMADQLSEAQLAEFLANLRMLIARAVGTLPTHEEYLARHCPADASLLAA

SEQ ID NO: 87133 - protein, 515 aa, Sphingomonas sp.
  REGION 1..515: note = tr|A0A1P8PVS8|A0A1P8PVS8_9SPHN Tryptophan halogenase; OS = Sphingomonas sp. LK11 OX=1390395 GN=AV944_13305 PE=4; SV = 1
MTTPSPDAIRSVVIVGGGTAGWMTAAALAHASPRGLSITLVESDAIGTVGVGEATIPPIRLFNQTLGIDEAEFLRETKGSFKLGIEFVGWGRAGHRYFHPFGTHGKSFDLVAVHQHWLAAGGPGSGIAFDDLSMAWGAGQRGRFAAPMADPRSVASTFDYAYHFDAGLYAQFLRRYAEARGVVRVEGKIAGHTLEATRGHVASVTLDDGRVLAGDLFVDCSGFRGLLIEEALATGYEDWTHWLPCDRAVAVPCETGGDGLTPYTRSTAREAGWQWRIPLQHRTGNGYVYCSRHISDDQAAATLMAKLDGAALGDPRFLRFTTGRRKRMWNRNVVAIGLSSGFMEPLESTSIHLIQAGIAKLLAYFPTQAFAPAAIEEYNRVAITEYERIRDFLILHYKLTERTDAPLWHECAAMPIPDTLAMKIAHFRESGRLVARDMDLFGPASWAAVHIGQFNMPEGLDPLLAYGDPAQSRGFVAKLAGAIGQMADSMPTHAQWLTKIGATIQAASTLTLPIR

SEQ ID NO: 87134 - protein, 500 aa, Parvularcula sp.
  REGION 1..500: note = tr|A0A371RL10|A0A371RL10_9PROT Tryptophan 7-halogenase OS=Parvularcula sp. SM1705 OX=2292771; GN = DX908_13115 PE=4 SV=1
MGQKRIKKLVIAGGGTAGWITAAAFSRLLGKSLDIHLVESEEIGIVGVGEATIPQIIRLNHMLGLDENEFLRRTYGTFKLGIEFVDWGRLGSRYLHTFGDTGINLANLHFHQYWLRYRQAGGENSLWDYSLHQQAADDNKFARMDRVGSSPMGGLAYAFHFDAALYAAYLREYAEAQGVRRTEGIIASVERTTEDGGIAALKLEDGTRIEGDFFIDCTGFRAFLIGQELKTDYQDWTHWLPCNRAIAVPSEKLSPLPPFTRATAKSAGWQWRIPLQHRTGNGHVFSNEFMSEDEATAILLDGLEGEALSDPRTLKFTTGRRETFWEKNCVAIGLSSGFLEPLESTSIHLIQSNVSRLISLFPRDGLHSADIDEYNRRTAAEFEQVRDFLILHYHQTEREDSPFWQHCRNMEVPEPLNEKMALFRASGRIGRDVDDLFRDTSWMQVMLGQGIEPQDYHPMADNITDAQLDEFLRNVRAIIDNAVTPLPSHEDFIKKFCDAG

SEQ ID NO: 87135 - protein, 489 aa, Sphingomonas sp.
  REGION 1..489: note = tr|A0A1P8PSX1|A0A1P8PSX1_9SPHN Tryptophan halogenase; OS = Sphingomonas sp. LK11 OX=1390395 GN=AV944_06970 PE=4; SV = 1
MSAPIRHVLVAGSGLTAWSAAAALKRRAPFLDVTLLATPAAHDALADRIACTLPSLPGFHADLGISEDNGVTRTGAGYRLGTRFFGWAEGLPDYVHAYGGYGHAIGPAAFHLHWVRAMRDGRAAPFDAYCPAAQLARAGGFVPPSPGTPFAGHDYGLTLDLPRQVAMMRAFALHVGVREVTDSIAQVQVDATGHVTAIAVQHGAALTAHLYIDATGPAALLRGSIDDAWQDWRDWLPCDRVLLGTQVSGEGAPVLTPATAHAAGWRWSSGEQVGMAYGSALLSNAEAAAMLARDQAVVDAPIVIRPGTRARAWRGNCIAIGDAATQVEPLEWCNLHLALSAIDRLVTMLPDTAMAEVEAADFNRQTLAEAERVRDFLAAHYRTARRPEPMWQAVAQAELPASLAHTLGQFGERGRLPFYEEETFTRDSWAAILLGQGYLPRRIDPLVHGVPAPQVNAAMARMTDAIAAALPHIPAHAQWRAAQMRRLAR

SEQ ID NO: 87136 - protein, 272 aa, Pseudoalteromonas sp.
  REGION 1..272: note = tr|G7EF55|G7EF55_9GAMM FADH2 O2-dependent halogenase I OS=Pseudoalteromonas sp. BSi20652 OX=388384 GN=prnA PE=4; SV = 1
MHTGYEDWSHLLPCNSAIAVQTKSTSETVLPLTRSIAHKSGWQWRIPLQNRVGNGLVYCSQYMDDEQAKALLLNNIEGEPLTEPRIIKFKTGRRLKGWNKNCLALGLASGFVEPLESTSIHLIMSGIIRFMRLFPFNGITNHAIDEYNKQLKSEIENIRDFIVLHYKVTNRDDSEFWQHCSEMEVPKTLQHKIDLFKQTGRVFLDDGDIFRVDSWVQVMLGQGIEPNQHHLIASMMSDEELTRFLHGIKQQIEQRVSQLPPHHEFLKQYCPA

SEQ ID NO: 87137 - protein, 502 aa, Undibacterium pigrum
  REGION 1..502: note = tr|A0A318J8V9|A0A318J8V9_9BURK Tryptophan halogenase; OS = Undibacterium pigrum OX=401470 GN=DFR42_10317 PE=4 SV=1
MQNTTIKNIVIVGGGTAGWMTATALATVLEGQYQIRVVESDEIGIVGVGEATIPMIQRFNQVVGIDENEFLRETQGTFKLAIEFVNWGRQGDRYMHGFGTIGQDFGSLRFDQYWQHMRKLGKADNLAAYSITRMMGKANKFMPARQDMSNSPLHQIAHAYHFDASLYARYLRKIAESRGAMRTEGKIVSVSQREADGFVDAIVLENGERIAGDLFIDCSGFRGLLIEQTLHTGYEDWSHWLPCDRAQAVPCESAPELLPYTRATAHRAGWQWRIPLQHRIGNGHVYCSQYVSDDEAASVLLSNLDGKPLADPRVIKFKTGMRNKTWNKNVVAIGLSSGFLEPLESTSIHLIQSAIARLIDFFPDQSFNAVDIAEYNRQSRFEYERIRDFVILHYKLNQRDDSEFWKACAAMPVPDSLQHKIDLFRASGRLLRVDNELFTEVAWLQVFEGQNLIPERLHPLVNLQTGADTMEYLDSVREVVQKCVAIMPGHAAYIAQHCKARS

SEQ ID NO: 87138 - protein, 198 aa, unidentified
  source 1..198: note = Caulobacteraceae bacterium
  REGION 1..198: note = tr|A0A4Q3TF65|A0A4Q3TF65_9CAUL Tryptophan halogenase (Fragment) OS=Caulobacteraceae bacterium OX=1978230; GN = EON96_16995 PE=4 SV=1
MSAAGLVGVLKPDQVKVRLVESDDIGTVGVGEATLPQMREFNDRIGIVESEMMRKTNATFKLGIEFRDWGFKGSSYVHPFGAHGHPMGGVGFHHQWTRARLAGEAYDIGDYSYAIVASRRNRFDFPAADKSAVNSTYDYAYHFDAGLYARYLRGWCEARGLTRTEGKVTEVRLDPASGDVAAIVLESGEAITGDLFID

SEQ ID NO: 87139 - protein, 496 aa, Shewanella sp.
  REGION 1..496: note = tr|A0A411PL66|A0A411PL66_9GAMM Tryptophan 7-halogenase OS=Shewanella sp. D4-2 OX=2520507; GN = EXU30_17345 PE=4 SV=1
MTAQVKRVVIAGGGTAGWMTAAAITKLMGKNLDVVLVESDQIGTVGVGEATIPTLHLFHRLLGLKEQDVMAATNATFKLGINFENWRDVGKDYLHSFGFLGKDCWACGFAHFWNKGQKLGIVKPIGDYCTEHLAARNGRFAVLPNQDQNHAYHMDATLYAQFLRKMAESLGLKRIEGKIAQVLQHDNGNIKALALENGEMVEGDLFIDCTGFRALLIEQTLNTGFEDWSHYLPCDSAIAVQTRSVGEPVAYTRSIAHQSGWQWRIPLQTRTGNGLVYCSKFLSDADATELLMSNIEGEPLNQPRVIKFKTGTRRKHWNKNCVAIGLSSGFLEPLESTSIHLIQRSIIRLLQQFPSTGINESDINEFNQQTLLEMDYVRDFIILHYKVTERKDSRFWRHCKNMEIPQSLAHRIELFKDSGKVYKQDSDLFGVSSWVQVMLGQGLTPNSYHPIVDMMEDEELNAFLENIRGNVKRKVDALPAHFDFVKHYCPSKVALD

SEQ ID NO: 87140 - protein, 508 aa, Cellvibrio sp.
  REGION 1..508: note = tr|A0A1Y0FV89|A0A1Y0FV89_9GAMM Tryptophan halogenase; OS = Cellvibrio sp. PSBB006 OX=1987723 GN=CBR65_07525 PE=4; SV = 1
MAEELSEGKSISDVLIVGGGTAGWMTAAALANVFSKTHCRIRLVESDQIGTVGVGEATIPVVLKFNQMLGIDEDDFLRSTQGTFKLGIQFVNWGSLGNRYIHPFGSYGTPMGSLSFYHYWLKYHREGKSRDIGEFSIAVQAALNGKFMRPANMPNSPLSQIAYAYHFDAGLYAQYLRSFSEKKGVERIEGEIVDVAIRPDDGFIESVNLKNGEKLSADLYIDCTGFRGLLIEQALNTGFIDWSHYLPCDRAVTVPSKNIGPPDSFTRATAHTAGWQWRIPLQHRTGNGHVYSSKYMRDEEAKDILLKNIEGDTLAEPKFIQFKTGMRQKFWNKNCVAIGLSSGFLEPLESTSIHLIQSSIAKLLALFPTADFVQPVIDKYNQIMCSEFIGVRDFIILHYKATDRSDSAFWNYCRHMDIPQNLADKIELYKSSGRLFRDNNELFDEISLIAVMHGQGIRAQRYHPMVDDINEIEFDRLMKEIKSVIDHSAQAMPRHGDFIAKHCAAKFV

SEQ ID NO: 87141 - protein, 512 aa, unidentified
  source 1..512: note = Caulobacteraceae bacterium
  REGION 1..512: note = tr|A0A4V1UE01|A0A4V1UE01_9CAUL Tryptophan 7-halogenase OS=Caulobacteraceae bacterium OX=1978230; GN = EON95_07330 PE=4 SV=1
MAQERALRRVVIVGGGTAGWMTASALARAFSGPAGLTLPITLVESDAIATVGVGEATIPPIRQFNATVGLDEAEFVRATKATAKLGVDFHDWSGPGSNYFHGFGDYGPMVRGQAWRQYLFRLHAEGRIETMEPWSLPTILFRQNRFAPPVADPRSVLSSYSYAYQFDAGLFARRLRVLAEGLGVVRREGRIVDCPRDPESGLITGVTLDDGSLIEGDLFIDCSGFRGLLIEGVMQAGYEDWTRWLPCDRAVALTYPLSGPPEPCTRATARKAGWQWRIPLQHRIGGGYVYSSAFTSDQEALDDLLGMVGPPLTDPNPLRFTTGRRREAWKGNVVSIGLSSGFIEPLESTSINLIQSGIGRLLELFPDRDFDPALVAAYNKGSAQEYERVRDFIVLHYHLAGRTDGELWRQCRETAPPDSLAEKIELFKARGEIRLLENESFREDSWAAVFTGLGVWPRRATPLVEVPGLDEVAHQAERLRDLIARAAASVPAHSSFFPDRPQAAATSRTRAP

SEQ ID NO: 87142 - protein, 493 aa, Sphingomonas sp.
  REGION 1..493: note = tr|A0A1P8PUC9|A0A1P8PUC9_9SPHN Tryptophan halogenase; OS = Sphingomonas sp. LK11 OX=1390395 GN=AV944_10225 PE=4; SV = 1
MSTPRRIVIAGGGTAGWMAAAAMARTLGRAVTVTLVESDAIGTIGVGESTIPPIITFNRLLGINEAEFMAATQATFKLGIQFDGWKGPEDRYFHSFGLTGKDHWAAGFQHFWLDGLRRGHDAPYDDYCLELIAAREGRFAHLPDERMNYAYQLDSTLYGRFLRGMAEGDGVTRIEGRIAEVELNPDNGDIAALALDDGRRVEGDLFLDCTGFRALLIDRALHVGFDDWSHYLPCDAAVAVQTESVRAPVPYTRAIAHEAGWQWRIPLQRRAGNGIVYCSRYMDHDAARERLLSTVEGQVLTEPNMLRFQTGARRKQWHRNCIAVGLSGGFLEPLESTSIHLIQRAILRLIRLLPGGPISAHDVAEFNDQQMTDMLQIRDFLILHYKVHERRDSAFWRQCADMEVPDSLAHRIALFRETGRVFRRNDELFAENSWVQVMMGQGIMPESHHPITARLSDEELDRLLTTLRQNIATTVRGLPPHADYVAHHCGTAA

SEQ ID NO: 87143 - protein, 526 aa, Undibacterium pigrum
  REGION 1..526: note = tr|A0A318J4R5|A0A318J4R5_9BURK Tryptophan halogenase; OS = Undibacterium pigrum OX=401470 GN=DFR42_10340 PE=4 SV=1
MKAVKNVLIVGGGTAGWLTACFMAKHLSSTREREGIQIRLVESKDIGIIGVGEGSFPSIRGTLAAIGVDEARFIKECHGTFKQGIRFDHWVRPAGSPGADHYFHPFSHPSQRGPELLPYWLKGLAARDGQQPAFADAVTMQKCIADASRGPKRFADKDFLGPMNYAYHFDAGRLAALLSEHGQSLGVNRILGTVEHVQLDDQGAIAAVHTQDGQVLAADLFIDCTGFSAGLIGKTLGSPFKSLNDVLFVDRALALQVPYAKPDAPIPSYTISSAQEAGWIWDIGLQERRGTGYVFSSRHTDEARAEQVLRNYIGPAADGMTPRLLKLNVGYRETQWIKNCVAIGLSGGFIEPLESSGIGLIETAAYLLTYLFPFNGEFDAVATQFNQHMKARYERVVDFVKMHFSLSQRTDSAFWRDNRDVASIPESLQEKLKMWSCRPPHRMDFIADLEMYPPSSWQFVLYGMEFQTDMANNKFVYPQDQEATQEFQMIAQMAQRALADLPDHRKLVEHLCRAASPLPSALARQA

SEQ ID NO: 87144 - protein, 504 aa, Erythrobacter gangjinensis
  REGION 1..504: note = tr|A0A1J0V4B3|A0A1J0V4B3_9SPHN Tryptophan halogenase; OS = Erythrobacter gangjinensis OX=502682 GN=BMF35_a0032; PE = 4 SV=1
MMDTVPHTFVIAGGGTAGWMAAAALSRFTPPGTRIVLVESDAIGTVGVGEATIPQIHNFNRALGFDEREFLRATRGTFKLGIEFDGWLRAGERYMHAFGPIGRAHGLLPFQHYWIRARQLGFAKPLSAYSLNETAARQMRMQKGRTSVGIELPYAYHFDAGLYAAFLRDFAEARGVRRVEGVIASVERDGESGDITALALNDGERIEGTFFIDCTGFRALLIGEAMEARFDDWSAYLPCNRAITVPCEGVAEITPYTRATARKAGWQWRIPLQHRIGNGLVYCADFMSDDEAAETLLANLDGEVQADPRPIRFTTGARRQHWVGNCLAVGLSAGFMEPMESTSIHLIQSAISRFLSVVPGGRADPATIDWFNAQSRFEWERIRDFLVLHYTANQREGEPFWDHVRTMDLPDTLSAKIAQWKATGFIHREHEELFTEVGWFQVLAGQGVKAQSYNPLADALPESDLRAMLEGVEGALDAAVQPMTNHTEFLQSYTGGMVRTEIPA

SEQ ID NO: 87145 - protein, 511 aa, Parvularcula sp.
  REGION 1..511: note = tr|A0A371RFT4|A0A371RFT4_9PROT Tryptophan 7-halogenase OS=Parvularcula sp. SM1705 OX=2292771; GN = DX908_02835 PE=4 SV=1
MTTAPSSLDKIVIVGGGTAGWMTAAALSKFLRAGKTNIELVESEEIGTVGVGEATIPPINTFNGLLGIDENDFISKTQATFKLGIEFTNWAKKGHTYIHPFGDYGQDVEAIKFYQLWLKLRQISQNVPYIDEFCVSAMAARHGKYLAPARDPRQVLSALAYAFHFDATLYARYLRQFAEDRGVIRTEGKVTKVNLRGEDGFIASLDLEGGRTVEGDLFIDCTGFRGLLIEGALETGYEDWTHWLPCDRAVAVPCENAGPPDPFTRSTAHEAGWQWRIPLQHRMGNGHVWSSGFTDEETATTRLMQNLEGKPLADPRHLRFTTGRRRKFWYKNCVAIGLSAGFLEPLESTSIHLIQAGISKLIALFPDKDFAPIEAEEYNRLTAMQFEQIRDFIILHYHATERDDSEFWNYVRTMSIPESLTRKMDLFKSKGRIFRFEDELFGEANWLSVFLGQNVWPRAYDPMVDTLSDEQITQIAGQIHHAIRTTIEKMPSHQDYITRFCAAPASGVYSS

SEQ ID NO: 87146 - protein, 528 aa, Shewanella sp.
  REGION 1..528: note = tr|A0A411PL74|A0A411PL74_9GAMM Tryptophan 7-halogenase OS=Shewanella sp. D4-2 OX=2520507; GN = EXU30_17360 PE=4 SV=1
MQKPISKIVIVGGGAAGWITAGLLAAHHNADKGQLAPSPKLDITLIESPDVATIGVGEGTWPSMRSTLEKIGINETQFLLHCDASFKQGSKFINWCTEATHNPLQSPASYLHPFSLPAGQPQFDISNYWLPHHEQVAFAAAVSNQEAIAKASLAPKLGSTKQYGFINNYGYHLDAGKFSELLREHCTGKLGVNHIRDHVDDIHLAELGDIESVQCRSKGLINGDLFIDCSGVKSLLLGGALNVPFICQKQVLFNDCALAVQVPYDNDDTPIASNTHSTALDNGWVWDIGLPTRRGVGHVYSSDHQSDDQALEQLITYLTPSIGDKASDINPRKLSIAPGYRASCWHKNCVAIGMASGFIEPLEASALALIEWLASQVAEQLPANRQVMDTISTRVNKQFEQHWQQIIEFLKLHYVLSERQSDYWQDHRHETSSSDELRHKLALWRHHVPSVADINHRNPLFPAASYQYVLYGMRPNYTAMPAQLKPSLKRQAQQLFNENQQRTMQLAKALPSNRDLLQQLASHPFPLI

SEQ ID NO: 87147 - protein, 507 aa, Sphingomonas sp.
  REGION 1..507: note = tr|A0A1P8PTL5|A0A1P8PTL5_9SPHN Tryptophan halogenase; OS = Sphingomonas sp. LK11 OX=1390395 GN=AV944_08315 PE=4; SV = 1
MSVVEGQARSILIVGGGTAGWLTAAYLARFLGPATRITLLEDPAIGAIGVGEGAFPTMRSTLRFLGIDEAHFIRAAGATFKQGIRFDDWRHAPDGGRRHRYVHPFEPPFQADGVDLVAHWLAQDPATRAPFAEAVTIQHRVAAAGRGPKQAGEAAFDGPLSYAYHFDAQRLVALLADHAMGLGVRHLEGRLTGAQVGADGLIAHVVTDRQDTLTADLYVDCTGQRAELISGALGEPLLPVRDQLFTNRALACRLPYDAERGHALPTMTIATAHRAGWTWDIGLAEGRGIGTVYSDAHMDDEAALATLAAYLGQDPDRLEPRLLTFEPGYRQRPWIGNCVAIGLAGGFLEPLESTGIVLIEAAVAMLAELFPHRGPIAAPAARFNTLMTARYRTIVDFLKLHYCLSSRDEPFWRDNGAAGTISDRLRDLLEQWRYRPPGRFDFTLDVESFAHFNYQYILYGMGFADGEMRKTCASGEADRLFRKLQMFGDRAVADLPTHGELVAAMRG

SEQ ID NO: 87148 - protein, 529 aa, unidentified
  source 1..529: note = Acaryochloris sp.
  REGION 1..529: note = tr|A0A2W1JMJ0|A0A2W1JMJ0_9CYAN Flavin-dependent tryptophan halogenase PrnA OS=Acaryochloris sp. RCC1774; OX = 1764569 GN=prnA PE=4 SV=1
MNQPIQKILIVGGGTAGWMTASYLTKALGNDVEISLIESDVVKKIGVGEATLPSLQQVFFNFLGIPEEEWMQQVNGSYKVGVKFVNWSQTPSPGRPDKSFYHIFGGMPTCEGIPLQQYWLRKHLAGETAGAMQYACYSEAALLDQKLSPVFCDRNPAMYYAWHFDAHLVAEYLTKWSTERGVNRIVDDVVEVALSPETGNIQSVLTKTGQQLTADLFIDCSGFRSLLLGKALSEPFIEMNDALLCDSAVATPVPHDDDQHGIEPYTSAIAMKHGWTWKTPMQGRFGTGYVYSSQSCSQDEATQEFQQLWNLDERQPLKHLKFRVGRTERAWVKNCVGIGLASSFLEPLESTGIYFIYATLYQLVKHWPSQALEPQLQKQFNRKVTWMFDDCRDFVQMHYFTTGREDTVFWQTNRYDLKKSDSIQEKLDLYKAGLPVGAVVSNSADYYSAFDFEFENFWSNSNYYCVLAGMGVYPDQSPPILEHNPQAVEKAEQIFADIRLRTNALAQQLPSTHQALQSLHQNHSFRAAA

SEQ ID NO: 87149 - protein, 359 aa, unidentified
  source 1..359: note = Caulobacteraceae bacterium
  REGION 1..359: note = tr|A0A4Q3U1L9|A0A4Q3U1L9_9CAUL Tryptophan 7-halogenase (Fragment) OS=Caulobacteraceae bacterium; OX = 1978230 GN=EON96_03405 PE=4 SV=1
MGPDLSNAGSVRRVVIVGGGTAGWMTAAALVRLVAPSGVDIVLIESAEIGTVGVGESTLPHIRAFNERIGIDEAEFMKATRATFKLGIRFDDWARKGDSYIHPFGDYGAPGGEAPFHHYWLRAQGLAGDDVGPIDDYSLPIVAARQGRFAPPSVDPRSLMSTYGYAYQLDATRYAAFLSQRSQAAGVRRIEGRIIDVTLDAEQGDIVSVTLDRGEVIEGDLFIDCSGFRALLIEQTLKAGFTDWSHWLPCDRAVAMPCASDQPTVPYTRAQALEAGWRFRIPLQHRVGNGYVYASAFVDQEAATCRLEGLLEGEALNTPNHLRFTAGQRTRNWVANCVSVGLSSGFIEPLESTSIYLIQ

SEQ ID NO: 87150 - protein, 505 aa, unidentified
  source 1..505: note = Caulobacteraceae bacterium
  REGION 1..505: note = tr|A0A4Q3S5G1|A0A4Q3S5G1_9CAUL Tryptophan 7-halogenase OS=Caulobacteraceae bacterium OX=1978230; GN = EON95_07325 PE=4 SV=1
MSIAPPIQSIVIVGGGTAGWMTAAAISHVLQGKVKITLVESDAIATVGVGEATIPPIILFNKLLGVDEVAFIKATQATFKLGIEFRNWTRQGHSYFHPFGQYGTRMGAAGFYQYWLRLNAAGLDDDLGDYSPCTMAARLGRFAMPEPDPRSVRSQMTYAFHFDASLYAKFLRGRAEASGVVRREGKVVDVNLREPDGFIESIRLDDGEVLGADFFIDCSGFRGLLIEGALKTGYEDWTHWLPANRAVAVPSTRVADPHPYTRATALEAGWQWGIPLQHRTGNGYVYSSEFISDDDAGTRLLGNLDGKPMADLNFLRFTTGRRKKTWNKNCLSLGLASGFIEPLESTSIHLIQAGITKLLLTFPDTAFAQPDIDNYNKLMQKEFERVRDFVCLHYHATERTDQPLWRMTGAMTVPDSLKEKMDLFRSRGRVYRYEDELFQEASWVAVLLGQGVIPQRADPITDIVPMDELQARLKHIKAMIRDGVERMPTHDQFIRANCQAPAWDS

SEQ ID NO: 87151 - protein, 538 aa, Pseudomonas chlororaphis
  REGION 1..538: note = tr|A0A3G7QNW3|A0A3G7QNW3_9PSED Thioredoxin reductase; OS = Pseudomonas chlororaphis subsp. aureofaciens OX=587851; GN = C4K14_3874 PE=4 SV=1
MNKPIKNIVIVGGGTAGWMAASYLVRALQQQANITLIESAAIPRIGVGEATIPSLQKVFFDFLGIPEREWMPQVNGAFKAAIKFVNWRKSPDHSRDDHFYHLFGNVPNCDGVPLTHYWLRKREQGFRQPMEYACYPQPGALDGKLAPCLADGTRQMSHAWHFDAHLVADFLKRWAVERGVNRVVDEVVEVRLNDRGYISTLLTKEGRTLEADLFIDCSGMRGLLINQALKEPFIDMSDYLLCDSAVASAVPNDDAREGVEPYTSAIAMNSGWTWKIPMLGRFGSGYVFSSKFTSRDQATADFLNLWGLSDNQPLNQIKFRVGRNKRAWVNNCVSIGLSSCFLEPLESTGIYFIYAALYQLVKHFPDTSFDPRLSDAFNAEIVHMFDDCRDFVQAHYFTASREDTPFWLANRHELRLSDAIKEKVQRYKAGLPLTTTSFDDSTYYETFDYEFKNFWLNGNYYCIFAGLGMLPDRSLPLLQHRPESIEKAEAMFASIQREAERLRTSLPTNYDYLRSLRDGDAGLSRSQPGPTLAAREIL

SEQ ID NO: 87152 - protein, 503 aa, Porphyrobacter sp.
  REGION 1..503: note = tr|A0A2Z2PB29|A0A2Z2PB29_9SPHN Tryptophan halogenase; OS = Porphyrobacter sp. CACIAM 03H1 OX=2003315; GN = CBR61_13025 PE=4 SV=1
MAIERIIIVGGGTAGWMAAAALSRIKAGRPVEITLIESEAIGTVGVGEATIPPFVGFNRLLGIDEAEMLAAVGGTFKLGIQFENWGKLGDSYIHPFGAYGYTMGGISFHHVWHRMQAGGDRRPIQVFNLETMAAAFGKFARTEDYKRDDLPPVNYAYHLDAGRYAAFLRRLAESRGVVRQEGKVADVQLDGESGFVTGVTLDDGRAFAGDLFIDCSGFRGLLIEQALKTGYDDWSHYLPCNRAVALPCLREDGSPPPPFTRATAHSAGWQWQVPLQHRNGNGHVYCSAYMEDQQALDILLGNIAGKPQAEPNWLRFVTGRRKKFWNRNVVALGLAAGFMEPLESTSIHLINTGIDKLISLLSLDGITQVQEDTFNRLTGREYARIRDFLILHYNATQRTDSDFWNHLRTMPVPDTLTEKVELFRANGQIFREEDELFTETSWAAVMMGQGIQMGGHNAMADALDPVTTAKEVNEMEQSIRWLVQHMPGHGDYLKRYCPAPMAA

SEQ ID NO: 87153 - protein, 546 aa, unidentified
  source 1..546: note = Flavobacteriales bacterium
  REGION 1..546: note = tr|A0A2D8WDP6|A0A2D8WDP6_9FLAO Uncharacterized protein OS=Flavobacteriales bacterium OX=2021391; GN = CMD04_00650 PE=4 SV=1
MKVENIVIVGGGSSGWMTAAALLKCCPWTNVILIESDKPTVGVGESTLGHFNKYLRALDLEDKDWMPKCNATYKNSIQFTDFREKGTVFQYPFGKYDYNDTVEGMKDWFDLARQRPEEYPPESFAEFFNKENSALVKHNKQWDNKDNRWRNFDWLTDVAYHLDAEKFAEYLRDEYCDNFDDRFTHIRGEVRGSVKDINAGGSPAVSNRYIKQLAVRLNEDKRTVGVIGDLFIDCTGFKSVLLEEYMGTRFIKFNDLANDKAYFARIPYLTQDEREKHMHNVTDCQAAENGWLWSIPLWNRIGVGYCWSSRFAMETETRTEFETWIEQKYGVSPDQYEVGTIDIKHGYHEKAWNLNVVAIGLSYGFVEPLESTGLLTTHENILRLVDVLSRRKGYVTQIERNWYNYAAQREVIGFSKFVAMHYALSQRTDNPYWRWCSQRNEYMTEQFDGMVRVNDNYERLGSSLDLDQTMDVNMNGMNYIAAGQGMMLGRDWYSDRDPDELTFVENSHLKYSKEVNDFVESDDCPTHYEYLRDYIYGGDELRAELI

SEQ ID NO: 87154 - protein, 509 aa, Alteromonas sp.
  REGION 1..509: note = tr|A0A385MVA6|A0A385MVA6_9ALTE Tryptophan 7-halogenase OS=Alteromonas sp. RKMC-009 OX=2267264; GN = DS731_10485 PE=4 SV=1
MSAPHRIVIAGGGTAGWIATCLMAHHWRDKPVSITLVESADIATVGVGEGSTPTLKRFFSDLNIAESDWMPACNATYKVNIRFKGWSPQNGPDSYSHPFISQPDAFTERPFHVNCHNRRLGLDVNVTPEQFLLNGWLAGAGKAPVAPTSFPFRIEYGYHFDSALLGRYLKRHAVSLGVNHIEGKIDDVITSLSGHITSLKLQSGEIVDGDFFIDCTGFRSLLLQQTLDIRFNPFSENLFNDRAAVLATPAQARLPVETTSTALSNGWAWSIPLSSRTGNGYVFSSAHLSDDKAEAELRRHLSVQDNEGDVRFLSMRVGQVEKHWHKNCLALGLAQGFIEPLEATALHLVQLSVEFFIEDYEQGNFSPALQDKFNKDVTERFSGVRDYIVAHYKLNTRDDSAYWRENRNNMALSESLLQLLDVWYRKGDFPAEIQRQNIQSHFGITSWHCLLAGYGIFPPLAKQQPGRGDLYKDNDTEAFFKGCLLNFPDHSAYLKDVANSFPAVKSSLY

SEQ ID NO: 87155 - protein, 500 aa, Cellvibrio sp.
  REGION 1..500: note = tr|A0A1Y0FW91|A0A1Y0FW91_9GAMM Tryptophan halogenase; OS = Cellvibrio sp. PSBB006 OX=1987723 GN=CBR65_07535 PE=4; SV = 1
MTIENKKPEKILIVGGGTAGWMAANLLVSRWKDVEIYLLESTDIGIIGVGEGSTPHLKFFFDAADISESEWMPRCNATYKNGISFVNWSSIPGFESYFHPFPAQTDDIFTVPVFFNNIKARMQGSNANVHPDHFFLETYLTRANLGPIPAETFPFGVAYGYHFDSTLLGQFLAEKATSRGVKRIYGTLTEVLHDSDGALTAVRLDDDSLLDADFFIDCSGFKSLLLQGALKASFKSFKENLFNDAAVVMPSAMSEVIPPETRSTALSSGWAWKIPLTNRYGNGYVYSADYISPDQAEIELRQHLGLLDSDVAARHLQMKVGRVEKHWVKNCVAVGLSQGFIEPLEATALALSFDTISRFMTYYENGLYTNKYQDEFNKEINAKFDGVRDYIVCHYKANQRQDTDYWRDNAANTNLSQNLNKILHFWSNSKDFAKDMYMNNLVLSYQPKSWACLLAGYGVLPPLGDSEENARYKSSQDMDQLADFIRRCGLNFKKHNELLI

SEQ ID NO: 87156 - protein, 516 aa, Pseudoalteromonas sp.
  REGION 1..516: note = tr|G7EF58|G7EF58_9GAMM Tryptophan halogenase; OS = Pseudoalteromonas sp. BSi20652 OX=388384 GN=P20652_1394; PE = 4 SV=1
MTKPITKIVVLGGGTAGWLSAGLLAAEHPHLNITLVESANVPILGVGEGTWPSMRNTLQRIGIKESDFITQCDASFKQGSKFINWRNLSEGENYYHPFMNPQGYEHTNLHASWQRIAPDQKFADVVNMQSFVCQAALAPKQLQTPEYAAVTNYGYHLDAGKFADFLKNHCVKNLNVTHITDDVSHVFNDEHGYIAALKTNNKGDIKGDLFIDCSGSRARLIGEHFNSEFIAQDHILFNNSAVAAQIPNAHTDQPIASATLSTAQSNGWIWDIALPTRRGTGYVFSSNYQSDESATNTLKSYIAKSTSEQQAGQLNYRVLKFSPGYRQKFWIKNCVAVGMSAGFLEPLEASALAMVELSISMISEQLPQNRIHMSQLKTRFNDRFSTRWQRVIEFLKLHYVLSERDDTPYWQDISNLNTAPERLQNLLKLWQFQPPSRFDFIENEEVFSSSSYQYVLYGMGFNTQTVSAQNTFNDPRAGDYYYQQNREKIAQCLNGLPSNRALLNHLLSNNGQPHND

SEQ ID NO: 87157 - protein, 537 aa, Sphingobium sp.
  REGION 1..537: note = tr|W1S8A0|W1S8A0_9SPHN Tryptophan halogenase; OS = Sphingobium sp. C100 OX=1207055 GN=C100_13175 PE=4 SV=1
MRMRLPAEPAIACPVEGESAMAKSILIVGGGTAGWLTAGYLARRLGSDLPGGVSIRVVESAEIGILGVGEGTFPTIRRTLATIGIDEAEMIRRCGASFKQGAKFVHWRHAPGQAGPDHYSHPFQVAESPEGMELLPYWLLGQGGTDNWDEVCGPQKKAADAHRAPKLPDHPDYVAPLNYAYHFDAVALAEMLRDKAVENGVAHLSDRVTEVLVGGDGAIDGVRTAQHGLLKADLYIDCTGFRAELIGKALDMPYRSCRDVLFCDSAVAMQVPYATIDDPIASCTIATAQDAGWIWDIGLEKRRGIGHVYSSAHMDDGSAEARLRAYVGPASDRLEFRKLRFEAGYRETNWHKNCVAVGLSSGFFEPLEATGIVFSEIAAGMIANLFPWGGDFESSARQYNANMRKRYERALDFIKLHYCISERRDTDFWRDNVAQSSIPDSLLELLDRWRFRPPNEMDFDLQVDIFSEMSWQYVLYGMGWRTDLTAKAGIYRYHDEARRAFAEVRRQASFAIANLPSNRELISNAHRRGFGTRPAAA

SEQ ID NO: 87158 - protein, 497 aa, Cellvibrio sp.
  REGION 1..497: note = tr|A0A1Y0FYD4|A0A1Y0FYD4_9GAMM Tryptophan halogenase; OS = Cellvibrio sp. PSBB006 OX=1987723 GN=CBR65_13185 PE=4; SV = 1
MINDILILGGGSAGWMTAMIMARAWAKKNIRITLLESAEVGTIGVGEGSTPALKNFFDKMGIAEAEWMPECNATYKCGITFADWSTRPGFNKYYHPFPSVVDSHTLPIFIHQAQQRLAGMDVDAHPNRFFLSHHLAEKSLAPKAHYHFPFDTQYGYHFDAVLLGRFLRKKATEMGVVHRELHVKDVIQDDAGNLRQLVADTGEIVTADFFVDASGFSGLLIQKTLQIPFVSYSQQLFNDAAVAIPSVITEKIPTQTRATALRHGWAWQIPLTNRFGNGYVYSSAFCSADDAELELRKHLSLSDNDIPVRHLKMKVGRVTQHWHKNCLAVGLAQGFIEPLEATALFLIQQTVAIFVELFQQGGFTDRLQHVFNERINNQFDGTRDYIVTHYKTSSRQDSEYWRANTANPDDVSDSLRELYRCWKRGGNLAAEIQRQDIAKYYPASSWYCIFAGMGIFPPVQRGADASAYDLNQLDDFLTRCALNYDDHRTVLAQLRQA

SEQ ID NO: 87159 - protein, 517 aa, Streptomyces sp.
  REGION 1..517: note = tr|A0A542TRP8|A0A542TRP8_9ACTN Tryptophan halogenase; OS = Streptomyces sp. SLBN-192 OX=1119093 GN=FBY48_2620 PE=4; SV = 1
MLNRVVIVGGGTAGWMTASYLKAAFGDRIDITLVESGKVGTIGVGEATFSDIRHFFEFLGLKESDWMPACNATYKLAVRFENWRKPGHHFYHPFEHMQSVDGFPLAEWWLKNGRSDRFDSDCFVMANICDAERSPRHLDGRMLAQPFDENAEEPRGLTMSEHQGKTQFPYAYHFEAALLAKYLTTYTVERGAKHIIDEVKDVKLDERGWISSVVTAEHGELTGDLFIDCTGFRGVLLNKALEEPFISFQNTLPNDSAVALQVPQDMEARGIRPCTTATAQEAGWTWTIPLYGRIGTGYVYASDYLSADEAERTLREFVGPSAADVEANHIKMRIGRTSRSWVNNCVGIGLTSGFVEPLESTGIFFIHHAAEQLVKHFPGPDWSPVQRDNYNSAVAHVMDGVREFLALHYAAAGRNDTQYWKDTKTRELPDGLAERIERWKHQLPDSETIYPYYHGLPAYSYMCVLLGMGGIDVKPSPALSLADDSAAQKAFQSVHDRAAGLIGQLPTQYEYFTHMRR

SEQ ID NO: 87160 - protein, 498 aa, unidentified
  source 1..498: note = Planctomycetes bacterium
  REGION 1..498: note = tr|A0A517WZU1|A0A517WZU1_9BACT Tryptophan halogenase; OS = Planctomycetes bacterium V202 OX=2527965 GN=V202x_41830; PE = 4 SV=1
MQQFDVVILGAGFGGSLTALLLNQIGLNVALIDRGTHPRFSIGESSTPIADYLLESLSENYDLPQFQPFCKYGTWQERYPQLACGIKRGFSYFAHEPEQFFRQKSNHSSELLVTANLDEASADTHWFRADVDHFFAEEVQKSSVVYLDQTEVVLAQSDDWTIQVERRGERFDFRAQFLIDATGAMGVVPEFLGVERQTEFESCSTAVYGHFENVIPWSEILDQYEFDRSEYPFDCDQAALHHVLSEGWMWQLRFNNDITSAGFVLDSARNARSANELWQNLLSRYPSIQSQFEEASIVSPNFGLCSTGRFQRGWKECAGPKWALLPNTAGFVDPLHSTGIAHTLCGIERLVMILEQCWRNSDELSVALSHYSQSIQAELKLIDALVAGCYRTLKHFDLFTTSTLFYFAAATSFEHQRCNEQKRPLFLCADDVGLSNIISGWLSEVSKINDKNVSEPDEIKRAILNAETMLKPWNRVGLFHPDVPNMYYYTAAPKTEPQ

SEQ ID NO: 87161 - protein, 503 aa, Shewanella colwelliana
  REGION 1..503: note = tr|A0A1E5IPJ3|A0A1E5IPJ3_SHECO Tryptophan halogenase; OS = Shewanella colwelliana OX=23 GN=BEL05_05350 PE=4 SV=1
MNTKVKHVVIVGGGSAGWMAAAMLSRLMGQQLNITLIESPDIATVGVGEATIPPLQVFNQALGISEPDFIKATQGTFKLGIEFENWYKRGDSYMHAFGQFGKDLALTPFHHYWLKSKPADTASFWDYSLNYQAAKANRFTPLATIKGPSLPGITHAYHFDATLYAALLSERSQQQGVTRIAAKVGDVHLNQYNGFIDSLTLENGQSIKGDLFIDCSGFKGLLIEEALKTGYDDYSHWLLCDSALAVPCKPTTLTIPYTRSIAHQAGWRWRIPLQHRTGNGIVYSSQFMSDEQAQKELLDNLDNEAIGTPKQLRFTPGRRLKQWHKNCVSLGLSSGFLEPLESTSLHLIQSGLIRLIKLFPTLDMPSSYQDEYNRQSKREFEQIRDFIILHYRLNQHQELPFWRYCQTMAIPESLREKIELFEQTGNVFRHQEELFSEAAWVQVMLGQGIVPQRCHPLTEGLTGQQLSQFLSDLSGIYRNSCDQLPSHDQFIHHHCRAPAQHDA

SEQ ID NO: 87162 - protein, 510 aa, Sphingomonas trueperi
  REGION 1..510: note = tr|A0A543LP97|A0A543LP97_9SPHN Tryptophan halogenase; OS = Sphingomonas trueperi OX=53317 GN=FHW45_4248 PE=4 SV=1
MRGDQIRRIVVVGGGTAGWMAAAALGKLVGALPGLQIELVESDAIGTVGVGEATIPHINLFNRMLGIDEAAFVRETSATYKLGIEFVDWQRIGTRYVHPFGVYGLDMLGVEFHHFWLKARALGHTTPLDAYSIGIAAARRGRFAHPRPDQPNSPLARLGYAFQFDAGLYAGFLRRLAEGLGVRRSEGRIVDVRRDGETGHVTAVRLESGAEIAGDLFVDCSGFRGLLIEQTMGARFCDWTHWLPCDRAVAVPCAPSGDRLPLTRATARAAGWQWRIPLQHRTGNGYVYAGDHLSDDEATATLLTNLDGPALSEPRALRFRAGHRDRAWIGNVVALGLAGGFLEPLESTSIHLIQSGIGRLMALFPSRGFDAPEIDRFNRETAQEYADIRDFLILHYKATERDDTAFWRRCRDMTPPDSLAERIALFRRNGRILREQHELFQDASWLAVMNGQGIVPAGYHPVADLLSDAETLERLNHIAQVIDETANAMPLQDDYLRQIGCALPPLRQAS

SEQ ID NO: 87163 - protein, 503 aa, Sphingomonas trueperi
  REGION 1..503: note = tr|A0A543M504|A0A543M504_9SPHN Tryptophan halogenase; OS = Sphingomonas trueperi OX=53317 GN=FHW45_1161 PE=4 SV=1
MAVAAPYRIVVAGGGTAGWMAAAALARFLGPGFTVTLVESDAIGTVGVGEATIPQIRMFNASLGIDEDAFVAATHASYKLAIEFVGWTKGGRYMHAFGDVGRDNGLLAFRHTWLRGLAEGVAEPLAAYALNNVAALGNRMQRGPARTARVLPEMPYAFHFDAGLYARFLRSYAEARGVVRHEGRIEAVARNGEDGDVAALHLDGGRRIDGDLFLDCTGFHARLIGEAMGVGYQDWSQWLPCDRALAVPSARARDFTPYTRATAHDAGWQWRIPLQHRTGNGIVYSSHHLSDDEAAARLLAGLDEPALGDPRPLRFRTGRREVAWAGNVIALGLASGFLEPLESTSIHMIQSAVERVLKLLPGRRALEPLRDSYNRQAAQESERIRDFLILHYWANDRDEPFWRERRETPLPDGLAEKIALWRETGEILREDGDLFSDVAWLQVLVGQGITARGYHPLADQPPVAQIAEYLDLLAKLNAREVAQMPSHSDFVRAHGAANAEIAA

SEQ ID NO: 87164 - protein, 509 aa, unidentified
  source 1..509: note = Marinicauda algicola
  REGION 1..509: note = tr|A0A4S2GX51|A0A4S2GX51_9RHOB Tryptophan 7-halogenase OS=Marinicauda algicola OX=2029849; GN = E5163_14690 PE=4 SV=1
MAKPQSHREAPRKVVVVGGGTAGWMAAASLVKFLGRLVEVEVVESEAIGIVGVGEATIPQIRNLNRALEIDEADFVAGTNGSFKLGIEFINWRRLDHSYLHNFGSIGLSVNQIHFHHHVFRAQAEGYGGDLWDYCVNTQAARAGRFAPMERLGSSPLGGVAYAYHFDAALYGQYLRRYAESRGARRTEGRIVEVIQDPESGDVERVRLEDGREVAGEIFVDCSGFRALLIEGALKTGYEDWSRWLKCDSALAVPSRNTRPPRPFTQAIAREAGWQWRIPLQHRTGNGHVFSSGYVDVDTARETLLANLEGEALAEPRLIRFTTGRRRKFWNRNVLALGLASGFLEPLESTSIHLVQSGISRFIQMFPTRPIADAERDEYNRQVTLEFERIRDFLILHYHLNERTDSPFWIDVREMDVPETLTSKIALFKASGRIYRDAQDLFTEASWLQVMHGQGLTPQAWHPMADKLSEAELRDMLANIRQIVTGAAAKLPSHADHIARCCAAPQAAE

SEQ ID NO: 87165 - protein, 544 aa, Luteimonas sp.
  REGION 1..544: note = tr|A0A562BXB0|A0A562BXB0_9GAMM Tryptophan halogenase; OS = Luteimonas sp. J16 OX=935283 GN=L599_000400001230 PE=4; SV = 1
  VARIANT 421: note = Xaa can be any naturally occurring amino acid
MSEGRIRRVVIAGGGTAGWIAACALTHQFPKDVLKVVLVESEQIGTVGVGESTIPTIRTFHHLLGIDEREFMSSVAASFKLSISFENWLRPGHRYFHPFGLTGLNTWACEFHHFWLDSRRRGIQSELGDFCLETVASRVDRFVLLGKDGGASQWSTRWASGGLSPDRLQVNYAYHFDAGLYAAYMRERAERQGLERVEGRIEQVRQHPETGFIEALVLEGGRVIEGDLFIDCTGGRAVLSEQALKTGYEDWNHWLPSNRAVALQTEADGPAVPYTRAIAHEAGWHWKIALQHRIGCGIVFSDAFMSDDEATARLLKENPARPLRDPWIIPFRTGRRRKAWNKNVIAIGLSSGFIEPLESTSIHLTLSGVARLLKLFPYDGIDESMVRRYNDISRAEMEHVRDFIILHYHLNQRDEPMWQQXRNMTVPDELAHRIQMFRDRAHALQGEDELFRLDSWTHCMLGQGVEPRSWHPLARTLADNDLKRLFEGIRQPIQQAVAAMPTHQQFLDQYCKAPPSAWELMYERARAHARITGKVAGVGGELRQ

SEQ ID NO: 87166 - protein, 578 aa, unidentified
  source 1..578: note = Nostocales cyanobacterium
  REGION 1..578: note = tr|A0A1Y0RQQ0|A0A1Y0RQQ0_9CYAN Tryptophan halogenase; OS = Nostocales cyanobacterium HT-58-2 OX=1940762; GN = BZZ01_17195 PE=4 SV=1
MHSTQLPEYDVIVLGTGFAGNCQVRHLLLKIPGIRVALIDPCLEEDLEENFKPGESMIEIGTLFLCKELGLYDYVVENHLPRAGSNFHWPKDPTQTQTTDDHYHIWCNRQPELDSTQINSARFEQDLLRMNKEMGAGFFKGRIVDVDLTPGDVLKTVYVQLGNEKITLKTKHIIDSAGRQFIVGHKTNNLLFEPENHDGVNAGSAWVYVKNVDRDLFHNGYDPYGATCSHYYATNHWFGYGHWLWIIPTDKYTQEISIGVIHHHDVIPTSDINTQEKFYAFLKANHTNLYNLVCSGENVKFYYLPSITHTSKVMFSPDNWYVLGDAACCFDIFYASGTTMISFSIESITEIIRAKLAGEVDAEEKRSAYNNFCVAYARQANHLMKHRAQQLGHASVMSWRIYLEQMWIFGLTLPIYVGKWFLDPQYIRAYLNQAPSVQRVISDVYEELNKLVDKGVNIGLMDIYRADQLFGDYTPVKPQDDYLENAKFEPKHCNVFASLKQTYFYTAILYILLQWKGFGFLGVLAPRHLYNFFSLLKGALETAARERVYLQQTKHIPTNTEVAKMRQEFKNYRYQSQF

SEQ ID NO: 87167 - protein, 476 aa, Sphingomonas trueperi
  REGION 1..476: note = tr|A0A543LNT5|A0A543LNT5_9SPHN Tryptophan halogenase; OS = Sphingomonas trueperi OX=53317 GN=FHW45_4250 PE=4 SV=1
MSLAQIMVVGGGLTGWSTAAALKRRVPALTVSILPLAPPGDALADRIATTLPSILGFHADLGIGLGDGVVRTGSICRLGTLYRDWVEGLPDYVHAHGPHGEPVDGVSFHHLWARAARGDVVAPFDAFSAAAAMAREGRFVLPAEGGILGAHSFGLILDVPRYLGMLQAFARHVGVRTLDGGLAEVERAADGSVAGVVLTDGLRVTADLYCDCSGPAARVHGVTGSARESWQRWLPCDRLLLEEATPAEDAAPIECVTATAHGWRWTSASQQGAVYSAAHSHREDAAIRFEAGAALEPWRHNVVAIGDAAVAIEPLEWGNLHLAHSAIDRLISMLPAGAPHPLEAAEYNRQALAEARRVRDFVLLHYVTARRAGAFWHDVTSAEPPDSLAHSLRLFRERGRLPFYEEETFDRDGWLSVLFGQGVLPRRIDPLADAVPPARAADAMARHRDRIAQAVRPLPTLAAYRAAQSRHLHERA

SEQ ID NO: 87168 - protein, 510 aa, Alteromonas sp.
  REGION 1..510: note = tr|A0A1Z9X5B8|A0A1Z9X5B8_9ALTE Tryptophan halogenase; OS = Alteromonas sp. TMED35 OX=1986603 GN=CBB95_14725 PE=4; SV = 1
MNSSTNTSSKQRIVIVGGGTAGWLTAAIVAAKHKVAKGQCGLDITLVESSDIPTVGVGEGTWPTMRNTLKDIGLSEKEVFKRCSAAFKQGGKFVNWVKGNGDFYYHPFTVPLGYGRVEMAPYINNIADFANTTNFQQHVCEQNMAPRTLNEEEYSSAQSNYAYHLDAGAFADMLKSFCKEELGVQHKVATVEQVSATSSEHIENITLDDNSTLHADLFVDCSGFRSMLLGEALQEPVVSVNDVLFNNSAIALHVPYEDDFEIKPYTQATAQEAGWIWDIGLSSRRGVGHVYSTDFTDDGRAEELLRRYVGDEKGKLNARVIRFDSGYKKRIWKGNCIGVGLSAGFVEPLEATALMLIEISARYIAEQMPTPASAMPIISQRFNKQMQYRWQRIIDFLKLHYIFNQRSEPYWQANRDIASIPDSLKEDLEIWKYRGPQIADFSAAIELFPAASYQYVLYGMGFSPDFSLQSHFYTERDLADKVMKQNQLITQQKLSSLPNHRDYIEQWLAS

SEQ ID NO: 87169 - protein, 529 aa, Streptomyces scabrisporus
  REGION 1..529: note = tr|A0A1T3NS31|A0A1T3NS31_9ACTN Tryptophan halogenase; OS = Streptomyces scabrisporus OX=159449 GN=B4N89_00380 PE=4; SV = 1
MDHRIKRLVVLGGGTAGWMTASYLGKALQGAVDITVLEAPTIPRIGVGEATVPNLQSAFFDYLGIPEDEWMRECNASFKAGIRFVNWRTPGNGAAQPRALDGGVDHFYHHFANLPEHDGIPLSHYWHLRTLRGETDVPFDYACFAEAEVLDAKKGPRYRDGSQATGYAWHFDANLVADFLRRFATEKQGVRHVQDEMTEAVLDERGHITALRTKEGRLLEGDLFVDCSGFRGLLINQAMEEPFLDMSDQLLCDSAVATAVPHDDAANGVEPFTSAIAMSSGWTWKIPMLTRFGTGYVYSSKFTGQDEATREFCDLWGLNPDRTPFNHVRFRVGRNRRAWVRNVVSIGLASCFVEPLESTGIYFIYSAVHQLAKHFPDKRFDPTLVDHFNREVESMFDFTRDFIQTHFYFSPRTDTEFWRANKELPLGDDVREKISLYRAGFPVNTSQAGERVYYGNSEVDNKNFWNNTNYWCIFAGLGHLPDRVLPALEYKPASIESVENLFAEVESRRRHLLAELPTTYEFLRQLHGK

SEQ ID NO: 87170 - protein, 494 aa, Cellvibrio sp.
  REGION 1..494: note = tr|A0A4V3DWW7|A0A4V3DWW7_9GAMM Tryptophan halogenase; OS = Cellvibrio sp. YR554 OX=2135765 GN=C8K91_101821 PE=4; SV = 1
MHDKKIKLVIAGGGTAGWMAAAAFSIKFGELLDITLIESDDIGTVGVGEATIPPIRVFHKLLGIDEQEFMRATRATFKIGIAFENWGQQGDRYIHSFGKTGKETWLGDFHHFWLRSRELGMDFEFGDFCLEVQAALANKFFTGPNAEINYAYHLDATRYAKFLRDIYEKKGGKRVEGKITEVKQHPDSGFITGVILASGVTVEGDFFIDCSGFRGLLIEQTLQTGYEDWTHWLPCDSALAVQTESVGPAVPYTRSVAHHAGWRWQIPLQHRVGNGSVYCSRFMSDDEARTKLLQDVDGKTVTEPRPIKFRAGRRNKSWNKNCVALGLASCFIEPLESTSIHLFIMAITRLMRLFPFSGVEPALVNEYNRDTLAEIEPIRDFVILHYKATERDDSPFWRYCKNMDVPASLAHRMELFKKTGHAYQAPGELFRIDSWTQVMLGQRLMPEQYHHIAHLMTENELRQFLTKIKTTVRSNVEKLPTHEDFVQRFCKTVI

SEQ ID NO: 87171 - protein, 513 aa, Pseudoalteromonas lipolytica
  REGION 1..513: note = tr|Z5XZM4|Z5XZM4_9GAMM Tryptophan halogenase; OS = Pseudoalteromonas lipolytica SCSIO 04301 OX=1452721; GN = AT00_00745 PE=4 SV=1
MQQNNVKKVVILGGGTAGWLTAGLIAAQPHLTHNAQITLIESPDIATIGVGEGTWPTMRQTLKTIGISESDFIQTCDASFKQGSRFDGWCEDDGSTHYYHPFSLPVAYQQLNIAPYWFANKEAVSFSHAVASQTYLCDHHKAPKNHLHSAYQGEANYGYHLDAGKFAMLLQTHCTTQLNVEHIVSHVESINNDDEGYISSLETRDHGIITGDLFIDCSGTHAKLLHQHYGVELIEQQDVLFNDRAVAVQVPYASPQQDILSYTKATAQDAGWIWDIGLQSRRGLGMVYSSRFANSDDAKQALGRYIESTQPGTDQSQLTFREIRFTPGYRRTFWHKNCLAIGMSAGFIEPLEASALVMVELGLNNLLANFPTHRAAMPTLAKRFDDQCHYRWQRIIEFLKLHYVLSKRTSPYWQAHKEAASVPAQLQENLALWQYQSPWLNDFDRAQEVFSAASYQYVLYGMKQLPKFPSMAMPAAIVEHFTANQQHAKHALQQLPTNRELLNHIQQFGIQPI

SEQ ID NO: 87172 - protein, 501 aa, Alteromonas sp.
  REGION 1..501: note = tr|A0A1Z9XF51|A0A1Z9XF51_9ALTE Tryptophan halogenase; OS = Alteromonas sp. TMED35 OX=1986603 GN=CBB95_07045 PE=4; SV = 1
MTALGLDSSNNQTPVKNVVIAGGGTAGWMAATALSRLLGKSVSVTLVESKDIGIVGVGEATIPPIRTFHKLLGIDEKAFMRATQATFKLGIEFENWREVNHSYIHSFGITGRECWAGEFHHFWLRAQDYGFGGDFGDYCPELIAAKQNKFATSDAMPLNFAYHFDAVAYGRFLKSLACDAGVTHREGDIEKVTVCPNTGNIQALHLTNGESIGGDFFIDCTGFKGLLIEQALHTGYDDWSHYLFCDRAVAMQTELTSPPVPYTKSVAHKAGWRWQIPLQERMGNGLVYCSRFMSDQEAIDTLKSQVSSTPINEPRVIRFTPGKRRRGWNKNCVALGLSSGFIEPLESTSIHLIMTGLIRLMRLFPFDGITQSAVDEYNNKFDSEMSAILDFIVMHYKVTQREDSPFWQQCQRMEIPASLTHKLDLFAQSGRVFLDDGDIFRVDSWTQVLMGQGMKPQQYHRVVDEMSEQSLKQFMAGLKLQVDNHVAKLPSHNAFLAQYLR

SEQ ID NO: 87173 - protein, 518 aa, Shewanella colwelliana
  REGION 1..518: note = tr|A0A1E5IQQ3|A0A1E5IQQ3_SHECO Tryptophan halogenase; OS = Shewanella colwelliana OX=23 GN=BEL05_11285 PE=4 SV=1
MSDNSKRPMKVLIVGGGTAGWLAANHLGKKFSASEGLSVEVTLIESPNIPNIGVGEGTVPMMRDTLRYLGIDEGDFIRQTDATFKQSIKFINWTDNPQPDNPTYYHHLFDYPKWDNSALMWLNESAESTSYANSVSPQGYFADLGLGPKTMTQPQYQGETSYAYHLDANKFSVLLRDNAVKRFGVSHILDDVTDVLVDDAKQIQSVTTVNHGVLEADLYVDCTGFSARLIEQACEVPFVDKGDVLFVDTALAVQVPYEQSDTPIPCFTLSTAQEAGWIWDIGLTERRGVGYVYSSRHSTQAEAEQVLRKYLGTAGDKLALRKIEMRIGYRERAWHQNCVAIGLSAGFVEPLEATGLLVFDVTSRMLAECFPAHRDAMPLVAEQFNRRITHTWDKVIDFIKLHYVASKRSDSQFWLDNRQTNTIPESLQQKLALWRYQLPSRYEFASTMEIFNLENYLYVLYGMDFDTDIAPWTVTDAQQSKYQAQQAQLQQYVQAARKQLLPHRELIARIKQYGISKV

SEQ ID NO: 87174 - protein, 501 aa, unidentified
  source 1..501: note = Marinicauda algicola
  REGION 1..501: note = tr|A0A4S2GX84|A0A4S2GX84_9RHOB Tryptophan 7-halogenase OS=Marinicauda algicola OX=2029849; GN = E5163_14685 PE=4 SV=1
MRQGQIERIVVVGGGSAGWMAAAALANAAPRECRITLVESEAIGIVGVGEATIPPIKVFNRLLGISEAEFLRETKGSFKLGIEFPGWRREGTRYFHQFGSFGREFDLVPMHQYWLKMRHEGDDTPIEDFSMAWALARRNRFAPPVSDPRMVQSTHDYAYHFDAVLYGQFLRRYAEARGVVRVEGKVADVRLDAESGDIAGLTLDDGRTVDGEFFLDCTGFRGVLIEGALQTGYHDWRRWLPCDRAIAVPCAHGGDFTPYTRSTAKAAGWRWRIPLQHRIGNGYVHCSEFIGEDEATQALLADLDGAPEADPRVLRFVTGRRKMFWNRNCVAIGLAAGFMEPLESTSIHLIQTGIMRLIALFPDRSDNALARREYNRLTEAEYEHIRDFLVLHYHETAREEPLWRHTRAMEIPDTLRYRLDHYRACGRQVAFGHDLFPNASWLAVMAGQGVEPETYDPIVDKRDTPFRERLAGLKRLIHEAAERAPDHRTALNAVMDAASAA

SEQ ID NO: 87175 - protein, 502 aa, Cellvibrio sp.
  REGION 1..502: note = tr|A0A1Y0FZX5|A0A1Y0FZX5_9GAMM Tryptophan halogenase; OS = Cellvibrio sp. PSBB006 OX=1987723 GN=CBR65_16530 PE=4; SV = 1
MKNSPLQSLVILGGGSAGWMAAAFLAKKFQGATLKISLIESSEIGTIGVGEASVPAIKYFLSELGISEKDFILATHATFKLGIDFESWYERDKKFFHPFAKFGEKIAAVDFTHYWTRMRNAGCPEPLDSYSLPTQMARAGKFAIPRGDTSIDGMASFNYAYHFDAALFAQYLRRYAEGLGVERCDAKVEKVQQHSSTGNIESLSLHDGTEVHGDFFIDCSGFAGLLIEGALQTGYEDWSHWLPCDHALAVPSSPNDSINPYTRCTAMSAGWKWNIPLQHRVGNGYVYASQFIDDSAAQEELLSGLDGEMLASPKLLKFKAGRRKKIWNKNVLALGLAGGFLEPLESTSIYLIQYGLTAFFENFPTKTENNYLQDRVNAMVAEHTLRLRDFLIAHYCLNDRRGETFWDYCRNMVIPGSLEIRIEEYRATGSIRLDELDFFKMNSWAAILSGMQITARYYHPKVEYLEERLVKQELDNMRKGIARVLPIIPDHEQFIKNNCSIR

SEQ ID NO: 87176 - protein, 502 aa, unidentified
  source 1..502: note = Sphingopyxis indica
  REGION 1..502: note = tr|A0A239K6A1|A0A239K6A1_9SPHN Tryptophan halogenase; OS = Sphingopyxis indica OX=436663 GN=SAMN06295955_112104; PE = 4 SV=1
MGDNRVTKVVIVGGGTAGWMAAAALSRMMGHLSIRLVESDAIGTVGVGEATIPAIRLFNALIDLDEDEFIRETQGTFKLGIEFRDWGRIGDAYMHAFGQIGRSLGILQFPQYWLRGRREGVAGPLADYSLTETAARRNRFARLPRIPNTSLDGITYAFQFDAALYAAHLRRIAERAGARRTEGRIEGVRRNGETGHVEAVILESGEEIGGELFIDCSGFRGLLIEEALETGFEDWSHWLPCDRAVAVPSENAGPPRPYTQAIAQRCGWQWRIPLQHRTGNGHVFCSEFISEDEATATLLANIEGRPLAEPRTLRFRAGMRKRAWTGNVVALGLASGFLEPLESTSIHLIQNGIAKLLSHFPDRDFAAVNIDAYNRRVAFDYERIRDFIILHYCANQRTDSPFWVRCREMAIPDTLARKVELFRSHGRIFREEDELFIEIAWFQVLTGQNIAPQSYHPLADALTHDELAGFFSDIGKIVANTASRLPSHADFIAQHCAAGGSA

SEQ ID NO: 87177 - protein, 506 aa, Alteromonas macleodii
  REGION 1..506: note = tr|K0ELI9|K0ELI9_ALTMB NAD(FAD)-dependent dehydrogenase OS=Alteromonas macleodii (strain Balearic Sea AD45) OX=1004787 GN=AMBAS45_14410 PE=4 SV=1
MNKLPQEIVIVGGGTAGWMTACYLARTAELMANNSNVTACAPKITLLESAVISTVGVGEGSTPYLRHFFEFLGISESEWMLKCSATYKMGISFERWTTTAESKTTRPAFTDSDSYFHPFFSSLDIPTADMYFNAVNEYRKGASHDINPSHYFTAAHMVEKGITPDAICSSANIDYAYHFDAGLLGDFLKEYALNKGVSHQIGTVANVESHEQTINSLKLDDGNTLSADFFIDCSGFRGLLGKQALLRKFTSYADTLFNDAAVAIASDATASPKTALQTRSIALSHGWQWHIPLTSRTGNGYVYSSQFCTEAQAEEELRLALEPDQSHQQARHLKMTVGRLEEHWKGNCLCIGLSQGFIEPLEATALMLVQYALHHFIDCWQSNNPRREERYNSEINRMFDGIRDYIAAHYYLNTRDDSAYWVACREDLKVPDTLSYLLNAWDKGASFEQALNEVDNKLVYLRPSWYCIFAGMKRFSNNSTPLAQPNILALRTMQQSVEGAHRVRQP

SEQ ID NO: 87178 - protein, 130 aa, Pseudoalteromonas sp.
  REGION 1..130: note = tr|G7EF56|G7EF56_9GAMM FADH2 O2-dependent halogenase I OS=Pseudoalteromonas sp. BSi20652 OX=388384 GN=prnA PE=4; SV = 1
MLGINEQAFMKATQASFKLGISFENWGDENTHYIHSFGATGKECWAGEFHHFWLQGKTLGINNPFGDYCYELQAAKSGKFAFNQQNPINYAYHMDATRYAQFLREFSEPLGVKRVEGKIQKVVKTLKQAI

SEQ ID NO: 87179 - protein, 522 aa, Alteromonas macleodii
  REGION 1..522: note = tr|K0EER6|K0EER6_ALTMB Tryptophan halogenase; OS = Alteromonas macleodii (strain Balearic Sea AD45); OX = 1004787 GN=AMBAS45_02875 PE=4 SV=1
MHQANSPLRRIVVVGGGAAGWLTASIIAVTHKHDDNISVTLVESPDVSILGVGEGTWPTMRSTLLKIGISEETFLAQCNASFKQGTSFHNWRSDTVEHQYYHPFSLPFRYFESDIAAWWQSYAAEQDFAHAVCSQAALCDHHLAPKQRQTPAYAGIANYGYHLDANKFAALLQKHATTVLGVQHIVDHVDDVVGSSSQPIAAIVGREHGNITGDLFIDCTGFAARLIGQHYGVPLTSCSNVLANDSAIAIQAPYVDSSVDIASTTHSTAQDSGWIWDIGLPSRKGVGYVYSSAHCSEDEARATLETYLKHDKKTADVDVSKARKITFSPGYRKTLWVENCVAIGTSAGFLEPLEASALVMIELSATHIAKQLPRTYKECQAAGRQFNQAFEKKWERIIDFLKLHYVLSEREASAYWRDMRNQESCSTQLQDWLTLWKSRSPISSDFELREELFPAASYLFVLYGMGFRSQYNDVYQANLHTPEQRQAYAKHVQSIQQQLSGLPTNRQFLNQVAQSQGLSMHY

SEQ ID NO: 87180 - protein, 517 aa, Cellvibrio sp.
  REGION 1..517: note = tr|A0A1Y0G065|A0A1Y0G065_9GAMM Tryptophan halogenase; OS = Cellvibrio sp. PSBB006 OX=1987723 GN=CBR65_17680 PE=4; SV = 1
MNKATKSIVVVGGGTAGWITAGRIAAMHKANQPDGVQVTLVESPNIPIIGVGEGTWPTMRNTLIKLGISETDFIRECDASFKQGAKFARWVDGSDTDFYYHPLMLPQGFGKVNLAPYWQQHRHNGLEGQSFSAAVCFQEAICEQGLAPKMITTPEFNSVANYAYHLNAGKFSSFLQKHCCEKLGVQHILADVTAVHSAENGDIAAVETQQAGRVEGDLFIDCTGFSALLLGKHFEVPWVDCSDVLFIDRALAVQVPYAGEDAPIASHTISTAQEAGWIWDIGLVHRRGVGHVYASGYTTEEQALQRLADYVGPMFDESAVRRIPIRSGHRQLFWKNNCVAVGLSAGFLEPLEASALVLVELSAAMIAEQLPACRAVMDITARRFNDTFHYRWQRIIDFLKLHYILSKRTDNAFWIDNRDPQTIPESLQELMTLWRYQSPWDHDFTSNNEVFPAASYQYVLYGMGFETHPEFQQHQLDEAQAREQLNKNRRNIEQALRQLPTNRDLLSKIHQYGLQTL

SEQ ID NO: 87181 - protein, 495 aa, Alteromonas sp.
  REGION 1..495: note = tr|A0A385MV59|A0A385MV59_9ALTE Tryptophan 7-halogenase OS=Alteromonas sp. RKMC-009 OX=2267264; GN = DS731_10490 PE=4 SV=1
MTSGVRKLVIAGGGTAGWMAAALFKKVLADNIKVELIESEDIGIIGVGEATIPPIQTFNQYLGLDEKAFLKETHASIKLAIRFENWKQEGSSYYHTFGAPGATLGFVGFQHYWLRAAQNGLTQSLWDFDLNYLACLEGKFNKIQTDNPVYQLPYAYHFDATLYGQFLRRMAENAGVKRTEGTIEHVKQNATTGFVEALQLKSGQQIAGDLFLDCTGMRGLLLQKTLGTEYEDWSHWLCADRAWAVPSQRHEHTAPFTRSIARSTGWQWRIPLTHRNGNGLVYSSKYMDDDKARELLMTNLDTPALDEPRKISFRTGRTVKQWSKNVIGIGLSSGFLEPLESTSIHLIQSGLVRLLKMFPHKEINPSMETMYNAESKEEFETIRDFIILHYVVNERDDSEFWRDMQNMSIPARLEQKINAFKDTATIFNEQNDIFRDASWLQVMAGQGIMPRDHHPAANTQTVPQLLDVMGKVLQAKQQPLTQMLPHDEFLKRFTQ

SEQ ID NO: 87182 - protein, 522 aa, Cellvibrio sp.
  REGION 1..522: note = tr|A0A1Y0FYV7|A0A1Y0FYV7_9GAMM Tryptophan halogenase; OS = Cellvibrio sp. PSBB006 OX=1987723 GN=CBR65_12905 PE=4; SV = 1
MTDQITRVVIVGGGSAGWLSAGIIAASGPAHVQVTLIESPDVHPIGVGEGTWPTMRATLQTIGVSETDFFSECDASFKQGSKFSCWTSVSKEDDYYHPFTPPVKYHDINLAPFWLPFKDKIPFANAVCPQAAICDLGYAPKQITTAEFGAVLNYGYHLDAGKFAPFLHKHCVEKLDVNYISANVVHINSQDNGDIASVMTDSHGEVSGDLFIDCTGLSSLLMEKHYKIPFVSQKAILFNDSALAVQIPYAEDQTAIASHTLSTAQTNGWIWDIGLQSRRGIGHVFSSAYTTDEAAERELRSYLVPSVGNKSVEDLAVRKITFNPGHRKTFWHKNCVAIGLSAGFIEPLEATALVLIELSAKMIAQQFPANRTAMDTIAKRFNKALTHHWEQIIDFLKLHYVLTKRTDSAYWRDNCSANTTPDSLNELLELWKVQSPWLHDEILREEMFPSASYQYVYYGMKGTTNIAVSSGTHNRKNLYEKQWKKAETLFMENVQHIQQLKKILQPNRELIEKIKQHGMQTI

SEQ ID NO: 87183 - protein, 511 aa, Sphingomonas trueperi
  REGION 1..511: note = tr|A0A543LY58|A0A543LY58_9SPHN Tryptophan halogenase; OS = Sphingomonas trueperi OX=53317 GN=FHW45_2351 PE=4 SV=1
MSRHIQSVCIVGGGSAGWLTAALIAARHGPDLQVTLVESVRLGIIGVGEGTWPTMRNTLRKIGISETDFLRTCKASFKQGAKFAGWRTGAADDFYYHPLVLPEGFPTVDLAPFWNAQADAAGTPSFSDAVCFQEFLCEHHLAPKQITSPEYGGIANYAYHLDAVRLGEMLRDHCVGKLGVRHVDDDIVEVQQAENGDVTAVIGQRHGGIAADLFVDCSGFSSLLLGQTLGVPFIDCSDVLFIDRALAVQVPYETDDSPIVSHTVSTAQNHGWIWDIGLQNRRGVGYVYSSRHAGADRVEEALAAYVGPAFADLTPREITIRSGHRETFWKNNVVAVGLAAGFLEPLEASALVLIELSADYIASAMPATRSAMDIVARRFNEMTRYRWDRIIEFLKLHYMLSERDDTAFWRDNREPATIPQPLQDLLQLWRHTPPGEHDFASAHEMFPAASYQYVLYGMGFRTAPRAHALAARHAAEDAFERVAAMKQRLAAAMPTNRALLDKLAQYRFQPV

SEQ ID NO: 87184 - protein, 506 aa, Sphingomonas sp.
  REGION 1..506: note = tr|A0A0Q6AWW6|A0A0Q6AWW6_9SPHN Tryptophan halogenase; OS = Sphingomonas sp. Leaf407 OX=1736369 GN=ASG37_03550 PE=4; SV = 1
MEQAADTAIRSIAIVGGGTAGWMTAAALAHAIPRGCTITLIESDAIGTVGVGEATIPPIRVFNQTLGIDEAEFLRETKGSFKLGIEFVDWARTGQRYFHPFGTFGKPFDLLAVHQHWLAARAGGSRVPLDELSMAWGAARHGRFAPPVGDPRSVASTFDYAYHFDAGLYAAFLRRYAEARRVERIEGAVVDVTLHGDNGHVASVTLADGRQVAADLFVDCSGFRGLLIEQALGTGYQDWTHWLPCDRAVAVPCATGGEGMTPYTRSTARAAGWQWRIPLQHRTGNGYVYCSRHLSDEEAATTLLANLDGPALGDPHFLRFTTGRRTKFWNRNVVAVGLASGFMEPLESTSIHLIQAAIAKLLAFFPTRDFDPAVVDEYNRVAITECERIRDFLILHYKLTQRSDAPLWRDCAAMAIPDTLAMKIDHFRSTGRLIARDMDLFGPASWLAVHIGQGNDPRGGDPLLAYAAGAQTSSGFVDRLAGAIDAMARSMPGHAAYLQRIGAIQP

SEQ ID NO: 87185 - protein, 504 aa, Sphingomonas sp.
  REGION 1..504: note = tr|A0A1I3TI72|A0A1I3TI72_9SPHN Tryptophan halogenase; OS = Sphingomonas sp. NFR04 OX=1566283 GN=SAMN03159338_2261; PE = 4 SV=1
MAGRQSLRVVIVGGGTSGWMTAAAIARLLPARCSLHLIESEAIGVIGVGEATLPHIRSFVEKLGIREADFMAWTRGTFKLGIEFRDWGKIGDSYVHPFGTFGRGKGEVDFHHYWTRLRRAGADVPPLEAFSYACMLARANRFEVPATDPAQLASTYGYAYQFDALLFAPYLRSIAEGLGAMRSEGKVVEVLRDGTSGDITAVRLDDGQLIEGDLFIDCSGFRSLLLGEALEEPFEDWNHWLPADRAVAMPCRTETSVTPYTSAIAMPAGWRWRIPLQHRTGNGYVFASAFTSDDAAAQALTQAVEGAPLADPRFLRFRAGRRRRSWVNNCVAIGLASGFLEPLESTSIYLVQQAITALIELFPETTISTVDRDEFNRLVDLEYDRIRDFLILHYHATTRSDSDFWHYVRTMAVPDSLAEKIELFRRAGRVVKYREGVFLDASWIAVYVGQGIIPEGYDPRADLPDNDSLMRGMQALRAEIDATVAQVPEHLRYIDQCCAMAAAA

SEQ ID NO: 87186 - protein, 492 aa, unidentified
  source 1..492: note = Planctomycetes bacterium
  REGION 1..492: note = tr|A0A517XLN1|A0A517XLN1_9BACT Tryptophan halogenase; OS = Planctomycetes bacterium ETA_A1 OX=2528023; GN = ETAA1_02960 PE=4 SV=1
MTRLDCDLVVLGSGFGGTLLAIVARSLGLSVAVVERGTHPRFAIGESSTPLADFKLARIADRFGLDWLRPLAKYGPWKATYPHLSCGLKRGFSFFRHRAGESFAPAEGNANALIVAASPTDATADTHWYRPDFDAHLVERAVAAGAHYLDRCEVHTLRHTKPGWEIEGARPDGAVSVRAGLLIDATGTGQALAEALKLEAVDPAQLRTRSRALYSHFRGVAHWHDVLGPAATADHPFPCDAAALHQIIDGGWMWVLRFENGITSAGFSLDPDRHPVRPGESPDAEWRRLLDTYPSLARQFADAVPTRPLVRTGRLQRRLTRAAGPDWALLPHAAGFLDAWLSPGIAQTLYAVNRLANVLADEPAARARRLAGYGDAVLRELAWVDEITGTCFECLDRFPVLATAVMVYFTAAIYCEERERRGEAGPDEGFLLADHPEYRAAAAKLFAAARTTADADAFLAAARRALEPYNSCGLCDPRRRNMYPYTASHAAR

SEQ ID NO: 87187 - protein, 507 aa, Alteromonas sp.
  REGION 1..507: note = tr|A0A4Q8UK47|A0A4Q8UK47_9ALTE Tryptophan 7-halogenase OS=Alteromonas sp. KUL49 OX=2480798; GN = EYS00_00870 PE=4 SV=1
MTMNEVNSITNYVVVGGGTAGWISAAILSKALRNQPHKISVVESPDIPTIGVGEATIPSFVDLLEYLQIPLAEFVAKTGATFKLGIKFVDWKQKGHHYWHQFGEVGNKIDGVDFYQHWLKHHLTTQKYEFTDFSPAVALAKQHKFFISSPEHPTNLSKSTFALHFDASKVAKFLKQYCLSHGVEYVPAKVCDVTKHNDGSIYSLVTDEGKELEGDFFFDCSGQRALLIGKALRVGYTNWQHHLPVNSAIAVQSESRGEIPPYTESVALEHGWRWRIPLQERIGNGYVYCSDFCSDENARQTLLANIERPTSEPRKITFTTGVRQKIWDKNCVAVGLSSGFLEPLESTSIYLVMRTMLKFVQSLPSAQLFQPTIDEFNRLMVNEYEYIRDFIILHYCVSERQDSDFWRMWQHMELPDSLKYKLELFKCQGRLMDNYYDLFSHESWYAVLEGMGVRPRSYDPAINNSDDMLVAQALDKSFAALQVSASKCLDHKDYLDKLIAAFYRATA

SEQ ID NO: 87188 - protein, 500 aa, Nocardia sp.
  REGION 1..500: note = tr|A0A0M8WH04|A0A0M8WH04_9NOCA Tryptophan halogenase; OS = Nocardia sp. NRRL S-836 OX=1519492 GN=ADL03_13165 PE=4; SV = 1
MTASYLTAAFGDRVNVTLVESARVGAIGVGEATFSTVRHFFDYLGLEEKEWMPACNATYKLAIRFENWREPGHHFYHPFERQRVVDGFPLTDWWLREPRSDRFDKECFLVGTLCDDLKSPRRLDGTLFERDLGERSSYRTTLAEQTTQFPYAYHFDATLVANYLRDYAVARGVTHVLDDVQDVALDERGWISHVVTKEHGDLTGDLFIDCTGFRSLLLGKALAEPFESYQSSLPNDSAVALRVPQDMENRGLRPCTTATAQEAGWIWTIPLFDRIGTGYVYAGDYTTPEEAERTLRAFVGPAAEHAEANHIKMRIGRSRRHWVNNCVAIGLSSGFVEPLESTGIFFIQHGIEQLVKHFPDARWDDGLRESYNRLVNNVMDGVREFLVVHYYAAKRQDNQYWKDTKSRPLPDGLAERLERWQTRLPDNESVFPHYHGFESYSYVCMLLGLGGLELKSSPALNLMDPASAQHEFKLVEEQAAELARTLPTQYDYFAQLHRAR

SEQ ID NO: 87189 - protein, 495 aa, Alteromonas sp.
  REGION 1..495: note = tr|A0A4Q8U3C1|A0A4Q8U3C1_9ALTE Tryptophan 7-halogenase OS=Alteromonas sp. KUL49 OX=2480798; GN = EYS00_18665 PE=4 SV=1
MVIAGGGTAGWLAAATLGNIFANTSTQITLIESSQIGTIGVGEATIPPFIAVIESLGIDLVDFIQQTQASFKWGIQFPNWRKKDHSYFHPFGTVGKTIDGHDFFQCWLKTLEGKDAMPLMAHSKEAILAEQGRFFKPFEAANTPLASAQFALHVDANLVVKYLKRFCEGKGVKHIDGKIEKVSTHPSGDIASLTLDDGQLVNGDFFIDCTGFKGLLIEETLASGYEDWRCYLPCNKAVTVPTQTSEPLNPFTIATAQDAGWTWKIPLQHRTGNGYVFADDYIDDDRALNTLLNQVGEPLQGEPQFIPFKTGIRKQPWKANCLSLGLAQGFLEPLESTAIHLVSKSLALFVRTFPNKENNELLRNEFNRRLRADYEEIRDFLILHYCETEREDTPFWRWCKHEMPIPASLQQKLDFFKRGGGLIPQVEALFQPTSWYAVFEGMGVRPDAYNPTLNALDANALGKSLSAGAKSLQTLANTQPLHKAFLDQYCCAPKP

SEQ ID NO: 87190 - protein, 534 aa, Streptomyces misionensis
  REGION 1..534: note = tr|A0A5C6K4K0|A0A5C6K4K0_9ACTN Tryptophan 7-halogenase OS=Streptomyces misionensis OX=67331; GN = FRZ03_01935 PE=4 SV=1
MTGEDRRIKKVVILGGGTAGWMTAAYLGKALQNTVEITVLEAPTIPRIGVGEATVPNLQRVLFDFLGINEDEWMRECNASFKTAVRFVNWRTEGAGQATARQLPQGGPDHFYHPFGLLPDYDQTPLSHYWYKNKYEGLTDEPFDYACFREPPVMDAKLSPRWLDGRHATRYAWHFDAALVAKFLCRFATEKQGVRHVQDEMTRVEQDERGFVTALHTASGKVLDADLFVDCSGFRGLLINKAMAEPFIDMSDHLLCDSAVATAVPHDDEANGVEPYTSAIAMSSGWSWKIPMLGRFGTGYVYSSKFTGKDEATREFSDMWGLDPENQEFNHIRFRVGRNRRAWVKNVVGIGLSSCFVEPLESTGIYFITAAIYQLAKHFPDRSFNETLINRFNREVETMFDDTRDFIQAHFYFAPRNDSPFWRANKELTLPENIREKIEAYRAGLPINSPVTDESTYYGNFEAEFRNFWTNGSYYCIFAGLGLVPDAPLPALSYKPESVTGAQPLFERVKRQQQDLLDTLPTAYDYLRQLHGRS

SEQ ID NO: 87191 - protein, 517 aa, unidentified
  source 1..517: note = Tokpelaia hoelldoblerii
  REGION 1..517: note = tr|A0A1U9JVN3|A0A1U9JVN3_9RHIZ Tryptophan halogenase; OS = Candidatus Tokpelaia hoelldoblerii OX=1902579; GN = BHV28_12250 PE=4 SV=1
MLDLTQAKRIAIVGGGVAGWFAALVFRRLFGDETEVVVFADEGGMPPVAQDGGLLNMAAALTRNGLDVEEFIRETGATSRLGVAFHNWRKNTQAEAGDVFYHLMPMPGEQVAEIDHMAFGFAPLLAARVAAGADLHSFFPGFSLIRNKSSQREAQAVLATKRSGLSQSWHFDCRRFARYLRGKALTRGVREQAGRVDKLVVNEHGAVTAVAVNGAQAAVDFVVDASGLRRIGLGQTYKESWCSLHSFLPVDTMQPFSRICQQGQLPLLTKATALSSGWLWQVPLANADRGYMGGAYLFSSAHGNVHNMQAELVQHLGAGVQLAQPLRFEAGHFKVAWRNNLVALGAAAGFVEPLEATAMGQMLESLRNIERMISDGGGVVGHQAIFSFNRSSYKTWDTISDFLRMHYEGGRQDTPFWQAVAQLPRSGRYQEIRRAFARRLPRAVDLESYIGYGWGAMFHMVNWLSIGAAVGVVPQQAGVADLKRLPRNMLQEVGPYLKELRKRMGQEMNVSGKQAGQ

SEQ ID NO: 87192 - protein, 506 aa, unidentified
  source 1..506: note = Phenylobacterium deserti
  REGION 1..506: note = tr|A0A328A8A6|A0A328A8A6_9CAUL Tryptophan 7-halogenase OS=Phenylobacterium deserti OX=1914756; GN = DJ018_16810 PE=4 SV=1
MNDRRIQSLVIVGGGTAGWMAAARLAQHFRGTPLKITLVESSEIGTIGVGEATIPTIRSFYGALGLSDAEVMRATQATAKLGIRFTDWSRPGRSFIHPFGLFGHELNGIEFQHWWLRARSLGAAAELGEYSLGASLAAAGRFNLPPRNPPSPLAVFDWALHFDAGLFAQLMRRHAETLGVRRIDAKVRQVKLRPENGFIEGVELDSGETVTGELFIDCSGFRGLLIEEALGAGYEDWSQWLFCDRALAVQSESAGDPAPFTEVTAQPAGWRWKIPLQHRDGNGHVFSSRHMDEPTALRLLTGAVQGRLLHEPRAIRFHPGRRKLAWSRNCVALGLASGFLEPLESTSIALIETGIEKLRQLFPDRSMDPALRDEFNDWSRREMERTRDFIILHYKLNGRTDSDFWREAREMDVPDSLQHKIDLWRARGHFVRYRWEMFQPASWLAIYAGFECLPQVWDPGVDAVEPNSLRARLADMRQAIARAVASAPPHTQFLQQTARAEAAAVG

SEQ ID NO: 87193 - protein, 511 aa, Sphingomonas sp.
  REGION 1..511: note = tr|A0A1I3Z7V5|A0A1I3Z7V5_9SPHN Dehydrogenase (Flavoprotein) OS=Sphingomonas sp. NFR04 OX=1566283; GN = SAMN03159338_4091 PE=4 SV=1
MSRHIQSVCIVGGGSAGWLTAALIAARHGPDLQVTLVESVRMGIIGVGEGTWPTMRNTLRKIGISETDFLRTCKASFKQGAKFAGWRTGAADDFYYHPLVLPEGFPSVDLAPFWNAQADAAGTPSFSDAVCFQEFLCEHHLAPKQITSPEYGGIANYAYHLDAVRLGEMLRDHCVGKLGVRHVDDDIIEVEQAENGDVTAVIGQRHGGIAADLFVDCSGFSSLLLGQTLAVPFIDCSDVLFIDRALAVQVPYESEDAPIVSHTVSTAQDHGWIWDIGLQNRRGVGYVYSSRHAGADRVEEALAAYVGPAFAELTPREITIQSGHRETFWKNNVVAVGLAAGFLEPLEASALVLIELSADYIASAMPATRSAMDIVARRFNEMTRYRWDRIIEFLKLHYMLSEREDTAFWRDNRDPATIPQPLQDLLELWRHTPPGEHDFASAHEMFPAASYQYVLYGMGFRTASRPGALAARHAAEDAFERVAAMKQRLGAAMPTNRALLDKLAQYRFQPV

SEQ ID NO: 87194 - protein, 513 aa, Sphingomonas sp.
  REGION 1..513: note = tr|A0A4V1JWP6|A0A4V1JWP6_9SPHN Tryptophan 7-halogenase OS=Sphingomonas sp. UV9 OX=1851410; GN = EQZ23_00915 PE=4 SV=1
MHEIQNIVIVGGGTAGWLTAGVIAAKHQARRQHGFTVTLVESPNVPTIGVGEGTWPTLRTTLKRMGVSETELFRQCDASFKQGARFNRWTTGTPDDGYYHPLMLPQQFGQVNLAPHWLADEGGTTFCDTVTPQGRICDEGLGPKTIATPEYDGHANYAYHLDAGKFSHFLQRHCCDTLGVRHVKADVTEVRLDESGDIASLDTEQGISIAGDLFVDCTGFAALLIGGAMKVPFRSCTDVLFCDTALAMQVPYDLPDDPIASHTISTAQSAGWIWDIGLPTRRGVGHVFSSSHISADAAEQELRDYIGPAARDLTARRLAIRAGHREQFWVRNCVAVGLAAGFLEPLEASAIVLIELSAKMIAEQMPACREVMDVVARRFNDTTSYRWGRIIDFLKLHYALTKRTDTDFWRDNVRPESIPDRLMGLMELWRFQSPWVHDEFDRAEEVFPSASYQYVLYGMGARTAVMPGTIDGDVALARRARHDNQAQTQRLVSSLPGHRDLIDRIKRHGLQSL

SEQ ID NO: 87195 - protein, 510 aa, Stenotrophomonas pavanii
  REGION 1..510: note = tr|A0A246KY35|A0A246KY35_9GAMM Tryptophan halogenase; OS = Stenotrophomonas pavanii OX=487698 GN=CEE55_12535 PE=4; SV = 1
MVDTESTPAGRIRKVVIAGGGTAGWLAGCALAHQFRDQLEITLVESEQIGTVGVGESTVPPIRTFHRFLQIDEQEFLRAVAGTFKLSISFENWRLPGDRFFHPFGTIGHGTWAAPFHHFWLDSLRRGMPSDLGDFCLESIASRADRFSLQTQPQASYAYHFDAGLYARFLRRRAEGHGLRRIEGRIAQVRQHAHDGSVQALVLQDGQVIEGDLFIDCTGFRGLLIEQTLGTGYEDWHEWLPCDRAVAVQTEAVAPPVPYTRAIAHEAGWRWHIALQHRVGCGLVYSSRHLSDDEATAKLLRDVGAPPLRDPWQVPFRSGRRLKAWNRNVVALGLASGFIEPLESTSIHLTISAVVRLIQLFPFDGIRASLVQLYNDVSRQEIEHVRDFIILHYHATQRTEPMWKACREMRVPESLQQRLQAWRERAHAWQDPGELFRVESWTSVLLGQGIPPGPPHPLARAVSDADLRTLLKGIQQPVQHAAAQMPTQAEFIAQYCRSGADVWRSMATPA

SEQ ID NO: 87196 - protein, 508 aa, Sphingomonas sp.
  REGION 1..508: note = tr|A0A0Q6AIB4|A0A0Q6AIB4_9SPHN Tryptophan halogenase; OS = Sphingomonas sp. Leaf407 OX=1736369 GN=ASG37_01130 PE=4; SV = 1
MGAERRIAIVGGGTAGWLTAAYLARALGSSVRITLLESPGIGIIGVGEGTFPTIRETLRFLGIDEAQFVTAAGATFKQGVRFDGWRRGGPVPHRYYHPFEPPFPADRLVAHWLRADPATRPPFAQAVTIQHPVAAANRAPKQPGDEDFDGPLAYAYHFDAVRLAGVLADRARASGVTHIEGRIADVVQNDDGTIERIDTDAGPLHADLFVDCTGFRAELIGRLPGAAFRSVADQLFTDRALTCKLPCGDPNAPIESTTIATAHEAGWIWDIGLSGARGIGCVYASRYIDDDRAADLLRAYLGPAADGITPRRLTFDPGWRPRQWIGNCVAVGLSAGFLEPLESTGVVLIEAAAAMIAELLPHAGPVDAPAGRFNAVMAARFAGIVDFLKLHYCLSDRTEPFWRDNADPASWSPRLTDLLDQWRHRPPSRFDFPVDTETFAFFNYQYILYGMGFATVPPPGGAAQQAEAQRLFARIRSYGDHAVRDLPPHRVLVDGLRGLPAIPARTGS

SEQ ID NO: 87197 - protein, 505 aa, Alteromonas sp.
  REGION 1..505: note = tr|A0A4Q8UI69|A0A4Q8UI69_9ALTE Tryptophan 7-halogenase OS=Alteromonas sp. KUL49 OX=2480798; GN = EYS00_04580 PE=4 SV=1
MQPHRIVIAGGGTAGWMAANLFAHHWKDACVEISLIEAPNIGIIGVGEGSTPTLKRFFSDLAISEAEWMPKCNATYKTNIRFEGWSPKYAPKGYSHPFFGQLDTFSERAFHVNCRTRRLGLDVETQPDKFLFAGYLANQGLAPVTPDNFPFRIEYGYHFDSGLLGNFLKDRAVTQGVNHIQAEITAVAQHPDGSIKSLECDDGRSIEGDLFVDCSGFKSLLLQSTLKVPFNPFADNLFNNAAVVLPTSAFKDIPVETKSTALSNGWCWQIPLTHRTGNGYVYSNQYLNKDAAETELRAHLGLLDADIEARHLTMNVGQCEQHWAKNCLGLGLSQGFIEPLEATALHLVQIGIEMFIRDYQAGDFTSKHQDKYNSAMSERFERVRDYIVGHYKLNSREDSQYWIDNRENNAISDSLIQLLNTWYQKQDLVKEISRQNIDEHFSASSWHCLLSGYGLFPPKANNQPESLKEQGDLYRDNGLEAFFEGCALNFQSHNNVLKAHTEGAR

SEQ ID NO: 87198 - protein, 528 aa, unidentified
  source 1..528: note = Erythrobacter lutimaris
  REGION 1..528: note = tr|A0A395LK31|A0A395LK31_9SPHN Tryptophan 7-halogenase OS=Erythrobacter lutimaris OX=1538146; GN = DL238_06680 PE=4 SV=1
MAERGGIVTANRVARVVIVGGGTAGWMAAAAMSRFFDDGRRSIVLVESDAIGTVGVGEATIPPIRNFNAMLGIEENEFLRETRGTFKLGIEFVNWGQRGDRYFHPFGEYGHDFHGIQFHQLYLRQKALANPDLGGIGDYSMSTMAAARGAFGRPSAAAKSVVSEIAYAFHFDAGLYAAYLRKMAERQGVIRHEGRITAAHRDAESGDVLSIELENGERIEGDLFIDCSGFRGLLIEEELETGYEDWSHWLPMDRAIALPTTHTTSPDPFTRATAHGAGWQWRIPLQHRMGNGHVFSSRFMDEDEARAILLGSVEGEPLAEPRTLRFLTGMRKKAWNHNVVALGLSSGFIEPLESTSIHLIQNGIARLFALFPDTPISPLERDEYNRGMRELYEDVRDFIILHYKATQRDDTEFWRYVRDMEVPASLARKMDLWRLHARVFRENAELFAQPSWIAVLMGQNIEPRTYDAIADTLDETKIASAMAQLRENYRSVAERLPSQEAFMRQAGAWHASAPAEGQAPLRAHGARV

SEQ ID NO: 87199 - protein, 493 aa, Alteromonas sp.
  REGION 1..493: note = tr|A0A4P6BGU3|A0A4P6BGU3_9ALTE Tryptophan 7-halogenase OS=Alteromonas sp. KUL49 OX=2480798; GN = EYS00_17650 PE=4 SV=1
MTNQSKINNVVILGGGTAGWMTAAALSKSLSHLNITLVESDRIGTIGVGEATIPTMQFFNNLLGIPQHEFLKQTQGSYKLGIQFENWRKLDHDYFHAFGSTGKGLWAAGFHDFWRKGVNNNACRDYSKYNIEAVAAKAGKFGRLQTPLNHAYHLDAGLYAKMLRSLSEKQGVKRVEGEVEYVRQDSESGYITGLTLKDGSKLDGDLFVDCSGFKGLLINETMKVPFNDWSHWLPNDRAIAVQTRSDKPPAPYTRSIAHHAGWQWRIPLQHRMGNGIVYASEYMSDDEAEALLLSSVEGEVLTTPRPIKFKTGYRQELWHKNCVAIGLSGGFIEPLESTAIHLIQQGILRLIKLFPEHGIDALEVAEYNLSATLDYEQIKDFIVLHYKVTERDDSPYWQFCKNMDIPESLEKRLNLFKKTGRFIQRQEELFVDSWLQVMIGQGLVPDRYHRIVDEMTDQQLEQFLDKIASSLEQQVATLPSHAEYLKRYCSASM

SEQ ID NO: 87200 - protein, 501 aa, Sphingomonas sp.; identical to SEQ ID NO: 82742
  REGION 1..501: note = tr|A0A0Q6AXR0|A0A0Q6AXR0_9SPHN Tryptophan halogenase; OS = Sphingomonas sp. Leaf407 OX=1736369 GN=ASG37_05315 PE=4; SV = 1

SEQ ID NO: 87201 - protein, 516 aa, Sphingomonas sp.
  REGION 1..516: note = tr|A0A4Q0GTC7|A0A4Q0GTC7_9SPHN Tryptophan 7-halogenase OS=Sphingomonas sp. UV9 OX=1851410; GN = EQZ23_06215 PE=4 SV=1
MDEPIANIVIVGGGTAGWLAACLIAARADPGAARPIRVTLVESPDVATIGVGEGTWPTMRRTLERIGITETDFLLACDAAFKQGSRFDGWRTGSTDDSYFHPFTAPVEGDPRDIVAAWAEHGDRFADSVGAQAELCRQHLAPRQRVMPDYAGTQNYAYHLDAGKLAALLMRHATERLGVRHVRDHVIGIDATEDGDIAAVRTRASGAIPGDLFLDCTGHAGLLIGAHYGVATVDRGGELFNDRALAVQMPVAPDSAIASQTNAAAHAAGWIWDIGLPTRRGIGCVYSSAHLSDDAAADTLTRYLRATAPDAPTPSFRQLQFRSRHRERFWHRNCLAVGLSAGFLEPLEASAIVLIELSLDALLDNFPATRGTMDIHADRFNTLFRYRWDRIVEFLKLHYVLSERDEPYWRDHRDRASIPPRLADLLQLWRHQPPSRADFPMIDEVFPAASYQYVLYGMGFPAPPRGPIATADRSRTNGLLAKVDQRRRMLTAGLPTNRAYLDALRHATLPAMEPIS

SEQ ID NO: 87202 - protein, 450 aa, unidentified
  source 1..450: note = Caballeronia ptereochthonis
  REGION 1..450: note = tr|A0A158C8G3|A0A158C8G3_9BURK Tryptophan halogenase; OS = Caballeronia ptereochthonis OX=1777144 GN=AWB83_04058; PE = 4 SV=1
MSEATQTGMQDHVQTWDVAVIGGGPAGSTAATLLAERGYRVRVLEKARHPRFHIGESLLPANLRLFDKLGVAEEVRAIGMVKLAAEFVSPQHDNRTQRFLFADAWDKSMPSAYQVRRSELDEILLRNAAKHGAQVSEGCRARDIVFAPDGASAKISAEHEDGRVEEVRARFVVDASGRDTLLANHFKTKRRNARHNSSALYGHFRNARRNEGANEGNITVFWFEHGWFWFIPLADGATSVGAVVWPAYLKRRPKGTSVDAFFRETIALCPPLAERLKDAELMSEVHATGNYSYTGDMTHGRNFLLLGDAFAFIDPVFSSGVMLAMQSAFAGAEAIDAALTHPARAQAALARFDRDVRHGPREFSWFIYRMTSPTMRNLFMGPRNPLRMKEALLSLLAGDIFGTTPIWHSLRAFKGVYYIAATLDWRNSLRAYRMRRRNLNDAERAEMSAN

SEQ ID NO: 87203 - protein, 496 aa, unidentified; identical to SEQ ID NO: 83656
  source 1..496: note = Cellvibrionales bacterium
  REGION 1..496: note = tr|A0A3R7YYD9|A0A3R7YYD9_9GAMM Tryptophan 7-halogenase OS=Cellvibrionales bacterium TMED47; OX = 1986841 GN=CBC07_003080 PE=4 SV=1

SEQ ID NO: 87204 - protein, 497 aa, Sphingomonas sp.
  REGION 1..497: note = tr|A0A5B8LGM0|A0A5B8LGM0_9SPHN Tryptophan 7-halogenase OS=Sphingomonas sp. HKS19 OX=1813879; GN = FPZ24_07035 PE=4 SV=1
MSETPRSIVILGGGTAGWMAANLIAHHLGLEASVTVVESPEIGIIGVGEGSTPQLKAFFDTLDIAEADWMPRCNATYKTGIGFRDWSEAPGFDAYFHPFPTDLDGFTAPAFFANAYARRHGADVWAHPDRFFLPTALAARRLAPIVPDHFPFQIGYGYHFDAHLVGAFLRDHAIGLGVRHLQHRIVDVAVADGNVSHLVAQNDITIPGDFFIDCSGFRSVIAQGALGAKFLPFAANLFNDAAVVMPTPRDPNGTNCQTISTAMQNGWVWDIPLTNRTGNGYVYASGYCSADEAETELRAHLGLLDSPVEARHLKMKVGRIAESWTGNCLALGLSQGFIEPLEATALHVVQATVEGFFRAWRDGGFTPRHRDAFNRAIAARYEGIRDYIVCHYRMNRRTDTAYWRDNATHDELSDSLKAIITCWFTGRDLEEEIARQDIAHYYAPASWHCLLAGYGQFPGRLSADAPAPPTDMAAIDDFITRCALNFPSHDAALEALR

SEQ ID NO: 87205 - protein, 508 aa, unidentified
  source 1..508: note = Phenylobacterium deserti
  REGION 1..508: note = tr|A0A328ABW4|A0A328ABW4_9CAUL Tryptophan halogenase; OS = Phenylobacterium deserti OX=1914756 GN=DJ018_16815 PE=4; SV = 1
MSRLQKIVIVGGGTAGWVTAAMLGHHLQGRMAQIELVESDDIGTIGVGESTIPPFITLLRNLGIDEQHFIQATQASFKLGISFRDWLRKGESYFHPFGSIGGAIDIHEFFQCWLKAKLTENHPSNLQDFAPASVMAEKGRFMLPFKAQRTLIGGANYALHVDARLVAQYLRRFAEAKGVKRTEGIVTEVKTRPSDGFVEKLVLKTGEEVTGDLFIDCSGFRALLIEKTLGVGYHDWSDVLLCDRAVAVQTENRGATTPFTVAEAQDSGWRWRIPLQHRTGNGYVFSSKFISDEEATEVLLSKVDGELLTKPMVIPFKTGVRHRIWDKNVVSVGLASGFIEPLESTAIHLVYRAIDMLFRYMPDQDCAPALAAEYNRRMTADYEEIRDFIVLHYCVTEREDTPFWRAAKAITPPASLTERIELYRESGLMREGLDELFRNPSWQSVLDGMGVTPKRYDQLVDRMPFEVIRRTLDEAGPRLAAFVDTLPTHDEFLREHCPAEPPGVIAAQ

SEQ ID NO: 87206 - protein, 515 aa, Novosphingobium subterraneum
  REGION 1..515: note = tr|A0A0B9A0D9|A0A0B9A0D9_9SPHN Tryptophan halogenase; OS = Novosphingobium subterraneum OX=48936 GN=NJ75_03444; PE = 4 SV=1
MIGSVKQVVIVGGGTAGWLSACLLAARRPELAITLVEAPDIPTIGVGEGTWPTMRETLSTIGIPEAEFLAECDASFKQGSRFDGWVDGSAQDSYLHPFTPPPPGDMAAMLQAWHTQAPELSFAALVTPQAAACEDNLAPRQRAMPDYAGALNYGYHLDAGKFAALLKRHATTRLGVTHVSAQVIAIADDEAGNIASLRLLDGREIAGHFFIDCSGLAAILIGDHCGVPWVDRSDVSFNDSALAVQVPVEPGSPIASQTIGTAHEAGWIWDIALPTRCGIGCVFSSRFMDDARAEDVLRNYIAARLPSADLQTLRPRKLTFSTGHRERFWQGNCLAVGLSAGFIEPLEASAIVTIELSIKALAENFPRRSDTLGLLAGRFNELFRYRWDRIVEFLKLHYVLSRRPEPYWLAQRDPATVPARLAECLELWRDQPPSAWDFPRMDELFCAASQQYVLYGMGFPVPGGAADATATQALAEVRQRSRALAAALPSNRTYLDALRPVAAAAPIAMHGAAVK

SEQ ID NO: 87207 - protein, 506 aa, unidentified
  source 1..506: note = Sphingomonas guangdongensis
  REGION 1..506: note = tr|A0A285QZV9|A0A285QZV9_9SPHN Tryptophan halogenase; OS = Sphingomonas guangdongensis OX=1141890; GN = SAMN06297144_2538 PE=4 SV=1
MTDTDLNPERVRSICIVGGGSAGWMTAATMARLLGPTYAKITLVESEEIGIVGVGEATIPQMRTFNRMLGIEEDEFIRQTRGSFKLGIQFVDWSRLGHTYFHPFGSYGVNMGGLSFHAYFLRLNQLGEAPDIDAFSLQAGAASHAKFMRSVDAGTKSPLSDIAYAYHFDAGLYARYLRGYAEARGVERREGRIIDVRLDERGHVGAVVLESGERIEADLYVDCSGFRALLIGQALGNDYVDWKHWLPCDRAVAVPCAGAERMEPYTRSTARAAGWQWRIPLQHRIGNGHVYSSAHVSDDEATAVLLANLDGEPLADPRYVPFRTGHRTRVWDRNVVALGLSSGFMEPLESTSLWMIQSGLSRFMAMFPDRGFDQATIDRYNRIILTEYEEIRDFLILHYHATERTDSAFWDYCRTMPIPDRLAEKMRVYRAHGRVFRENEELFNDTSWFAVMWGQLMRPRGYDPVADAMGLDLTRDRLAEIAAVMRNSVDYMPDHRAYIRQHCAAA

SEQ ID NO: 87208 - protein, 526 aa, Sphingomonas sp.
  REGION 1..526: note = tr|A0A4Q0GPN3|A0A4Q0GPN3_9SPHN Tryptophan 7-halogenase OS=Sphingomonas sp. UV9 OX=1851410; GN = EQZ23_00710 PE=4 SV=1
MSKAGGEQGAVRTVVVVGGGSAGWLTACRLAAQSVRSGSDLSVLLVESATVPSVGVGEGTWPTMRNTLRKIGIDETTFIRSCDATLKQGARFAGWTDGSAGDAYYHPLNPPVGVGEIDVAPYWLGLPGSDAQIGAEGISFADWVDYQSTLCDAGLAPKTITAPEYGGHANYAYHLDAGKFATMLREHAVGSLGVEHVVGDVVRANLADNGDIRDVELVDGRTLAGDLFVDCSGFSALLIGGVYDVPFRSCRHILFADRALAMQVPYQGEDDPIACHTISTAQDAGWIWDIGLWTRRGVGHVYSSAYTSDDEAEAALRRYVGPVADALPVRRIAFEPGHRERFWQNNCVAIGLSAGFLEPLEASALMLIETSLDALVDRLPQTRSAMDAIARQFNETFAHHWQRIIEFLKLHYVITQRRDTAFWRDNAAAASIPEGLQERLDLWTHHSPAAQDFAHAREVFSWPSYQYVLHGMRFGGRYRGAPATAEGATVAALVARNDRVRAELVRKSPRHRDLLRAVREHGLQRV

SEQ ID NO: 87209 - protein, 495 aa, unidentified
  source 1..495: note = Sphingomonas guangdongensis
  REGION 1..495: note = tr|A0A285R0U4|A0A285R0U4_9SPHN Tryptophan halogenase; OS = Sphingomonas guangdongensis OX=1141890; GN = SAMN06297144_2540 PE=4 SV=1
MAGNIASVLIVGGGTAGWMVAAALGHKLSGTGIAVTLVESEAIGTVGVGEATVPHIRAFNQALGFDEAAFMAATNATFKLGIEFRNWGRIGDSYIHPFGAFGQPIGGVDFHHQWIALRRSGRAEPFDHYSLPVAMARANRFAHPAADPASLASTYGYAYQFDASLYARFLRAQAEAKGVTRLEGRVVDVTQDERGHVSAVTLDDGRRLSADLFVDCSGFRGLLIEGALASGYDEWTHWLPCDRAWAVPCANVGPIGPYTRATALHAGWAWRIPLQHRAGNGHVFASGFTDEQAALDRLLGQLDAAPLAEPRQLRFTAGKRRRQWIGNTVAIGLAAGFLEPLESTSIHLIQLGIERLLDLFPTADWDPLDAAEFNRLMDLEYERVRDFIILHYAATQRDDTPFWNHVRTMSLPDSLATKMALWRARGVVVNYRQGMFLEPSWLAVYLGQNIVPDGIDPRAGAGAADAAAMLRNIASTVERLPTHESVLPRTLEAAA

SEQ ID NO: 87210 - protein, 507 aa, Shewanella sp.
  REGION 1..507: note = tr|A0A2N1ELM5|A0A2N1ELM5_9GAMM Tryptophan halogenase; OS = Shewanella sp. ALD9 OX=2058330 GN=CXF88_15300 PE=4 SV=1
MDQTIIKNIVIVGGGTSGWMTAAMLAKLFKTQLNITLIESDTIGTIGVGEATIPPLQIFNSVLGINEKDFIKATQATFKLGIEFENWHQQGDAYMHAFGNIGRDLGFTSFHHYWLSAQANCSQQNQNSFNANDFWQYSLNYQAAKHNKFQPIQSIAQAQMSGITHAYHFDASLYANLLRQYSTQRGVTRIEGTITSTQLTNDDSIDSITLQNGRCISGDLFIDCSGFSALLIEKALGVEYENWQHWLPCDSAYAVPSESSSPVIPYTKATAHDAGWQWRIPLQHRTGNGIVYSSQHMSDEQAKQHLLANLDGKPLAEPRKINFTTGRRVKQWHKNCVAIGLSSGFLEPLESTSLHLVQSAIIRLTKLFPRNGIQPQHIDEFNRQSQTEFEQIRDFIILHYHLNSKQSADGEHGLWQQCRDMDIPASLQRKIDLFTTTATVFRHQDELFTEAAWIQVMLGQGIIPLDYHPLTQAVTQVDLTDYLTNIRKVIASTVKQMPTHETYIEKI

SEQ ID NO: 87211 - protein, 587 aa, unidentified
  source 1..587: note = Microcystis panniformis
  REGION 1..587: note = tr|A0A552QBK7|A0A552QBK7_9CHRO Tryptophan halogenase; OS = Microcystis panniformis Mp_MB_F_20051200_S9 OX=2486223; GN = EWV53_00620 PE=4 SV=1
MNTTQALHYDVVIMGAGFAGLCQARHLMLNIPNIRVALIDPRPENRPDTDLKIGESTVEIAALLICKELGLHDYMIENHPPKAGLNFHWPKNPAETDSIDDYYHVWINRQPPIPTFQINRAKFERDLLKMNKEMGAIFYNGRVVDVDLTEGDQLKTVTVKLEDTTIEITAKHIVDAAGRRFIIGKKTDNLIFGSDQLLGVNNGSAWVRIKDVDRTIFHSGYHPAGTTVSHYYATNHYFGPGHWLWMIPIDRDSKELSLGVIHHHDVIPSATINTQEKFTAFLKANHTVLYKLLQSSELVDFHYLPRVAHKSKVMFSPDNWYVVGDAACIFDAFYSLGTTMIAIAVESITEIVRAKLANEANAEEKRAVYNDFNLAFTDSVNTFMQEHQKQLGHASIMSWRIYFEYMWWFGVLVPMYIGKWHLDPAFLKQFTGPFRTFLNGLFVDVYQDSNQLVERGVNMGLMDAIRADQLIGSYYTFKHFEDFLENSKLEPQRCNIFTSMKNTFFYVAIWYAMFQWKGFGWRGLLKPRNLANFSYLLAQSGLSALGEMRHNFLTRSLPDNSEIEEMRQEFKEYRYQGKLQPWSAELS

SEQ ID NO: 87212 - protein, 523 aa, Bradyrhizobium sp.
  REGION 1..523: note = tr|A0A1G7XRH4|A0A1G7XRH4_9BRAD Tryptophan halogenase; OS = Bradyrhizobium sp. Rc2d OX=1855321; GN = SAMN05216338_1003257 PE=4 SV=1
MIGESIVIVGGGSAGWMTAAYLKKALRGVDIALIESANVGTIGVGEASFSTMKLFFDYLGLDESEWMPPCNATYKLAIKFTNWSAGGGHFYHPFQRYEIIGGNNLGEWWLHLKPNETPFDSACFSTPSLCENNRSPRYLNGEVFDHKVKTTFNFASEAPPNTFLSDHRSQYPYGYHFEASLLASFLKDYATALGVRCIKDDVEDVLLSSDGSIDCLRTRRNGAVKGSLYVDCTGFRGLLINQALKEPFVSFQDVLLNDRAIALQVPYQADTSNIQPFTSATALPSGWVWNIPLYNRVGTGYVYCSQFISSEQAESDLRAHLGPRAKDCIANHIKMRIGRCRNSWVKNCFAIGLSSGFVEPLESTGIFFIQFGIEELLRHYSGSTTDPEVVADYNRIIADRIDGVRDFLVLHYRASDRADTPFWKATKEISVPSSVDQRLALWKKRLPNERSINSCYHGFEFYSYSVMLLGLRYRPVNSLPTLRHSNVSAAVAAFQAVRDRTAELVRTLPSHLEYLQHLRRARN

SEQ ID NO: 87213 - protein, 520 aa, Novosphingobium subterraneum
  REGION 1..520: note = tr|A0A0B8ZE18|A0A0B8ZE18_9SPHN Putative tryptophan halogenase OS=Novosphingobium subterraneum OX=48936; GN = NJ75_03042 PE=4 SV=1
MVRAVRDVVIVGGGTAGWLTAAIIAAKHKARIGHDFSVTLVESPNVPIIGVGEGTWPTLRSTLKSVGISETDFFRECDAAFKQGALFAKWTTGAEDDAYYHPLVLPQRFGQLNLAPHWLTGTLNEGGDNGETFCDAVCPQGRLCDENLAPKSMVNAEYEGQANYAYHLDAGKFAPFMQRHCTEKLGVRHVLADMRQVLQDEGGDIRAIATEQAGEISGDLFIDCTGMRSLLLGQTLGVGFKDCNDVLFCDTALAMQVPYPAPDAPVATHTISTAQSAGWIWDIGLPTRRGVGHVYSSRHISREEAEAELRAYVGPAAEGLAVRKIDIRSGHRELFWKNNCVAVGLAAGFLEPLEASAIVLIELSAKMIADQMPPVREVMDVVARRYNEKTLYRWGRIIDFLKLHYVLSQRRDTAFWRDNMDPASIPERLQELMALWQYQGPYMHEEFDRVDEVFPSASYQYVLYGMGFRTEVSARTLEPEVREARRARAENADVTARMLSGLPRHRDLIDRIVKYGLQPV

SEQ ID NO: 87214 - protein, 503 aa, Caulobacter sp.
  REGION 1..503: note = tr|J3ADK2|J3ADK2_9CAUL Tryptophan halogenase; OS = Caulobacter sp. AP07 OX=1144304 GN=PMI01_03181 PE=4 SV=1
MTEPSPFKFVIVGGGTAGWMAAAALAHAFKGRVAEIELVESDEIGTVGVGEATIPPIQFLNSLLGIDEIEFIKKTQATFKLGIEFRDWKQLGHSYLHPFGPIGVPIEGVGFHHYWRRLREQGDTRGICDYSMSAVAAAKGKFVIAPRELPPGVPPLAYAYHFDAGLYARFLREYAETRGVKRTEGKIVEVKQRASDGFIEAVELEGGKRIEGDFFVDCSGFRGLLIEQTLKTGYEDWNHWLPCDRALAVPCDSVMPLTPYTRATARTAGWQWRIPLQHRIGNGYVYSSPFISDDEAAATLMANLDGAPRAEPRLLRFTAGRRKQAWNKNVVALGLASGFMEPLESTSIHLIQTGVMRLIALLPTRNHDPATVEEYNRLSKIEYEQIRDFIILHYRATERDDSELWRYCRRMALPDSLTHKIELFRERGKVARYEEQLFAEPSWIAVFLGQGVVPRDHDRLADVPPIADVERALFNIRDKITHIADRLMTHDEFIARHCKADPI

SEQ ID NO: 87215 - protein, 511 aa, Sphingomonas sp.
  REGION 1..511: note = tr|A0A5B8LIH0|A0A5B8LIH0_9SPHN Tryptophan 7-halogenase OS=Sphingomonas sp. HKS19 OX=1813879; GN = FPZ24_10555 PE=4 SV=1
MVPRRSILIVGGGTAGWLTACYLAKFFDLARHPSLSITLVESPDIGIVGVGEGAFPTIRTTLQFLGIDEYDFIRETSATFKQGIRFDDWLRNPHDGRHAHFIHPFEAPLYAHDESLVSHWLASDPATRPPFAEAVTIQHRVSEQQRGPKTAADGGFAAPLNYAYHFDAAALAAMLARRGRELGVRHVEDELVAAAVGADGTIDRLSFKRSGDATADLYIDCTGLRAELLGGALDEPFVSAKSYLFTDRALACRVPYDCADAPLPSYTVAAAHEGGWLWDIGLRDKRGIGCVFSSAHLDEDRARTILAAYPGVGDRGADARLITFEPGWRARQWVGNCVAVGMAGGFVEPLESTGIVVIEAAAAMIAELFPFNGPVDAPADRFNALMTARYDNLVNFLKLHYCLSRRIEPFWRDNADPASTPEALRALLDRWRHRPPSRFDFLIDVETFAFFNYQYILYGMDFHTEPIFGSAKGTGSAGSGTLFERIRGFGDQAVHELPSHRELVEQINAAR

SEQ ID NO: 87216 - protein, 498 aa, Pseudoalteromonas sp.
  REGION 1..498: note = tr|A0A4Q6YNY9|A0A4Q6YNY9_9GAMM Tryptophan 7-halogenase OS=Pseudoalteromonas sp. CO133X OX=1777237; GN = EXT40_04225 PE=4 SV=1
MESKKITKVVIAGGGTAGWITAALLNKVLGKVLDITLVESAEIGTVGVGEASIPPILHLNGALGISEKEFIKATGATIKLGIEFENWRSQGYSYMHAFGEIGKDFPFCEFYHFWLKAHHANNAPDFWDFSLNYQAAKAHKFAHLKHIPNTQLAGLHYAYHFDATRYGEFLKELAQSRGVKRIEGKIESVNQCHQSGHIRSLLLKNGEQIDGDLFIDCTGLRALLIEQTLNTGFEDWSHWLPCDSAIAVQSDSASDAIPYTRSIARDSGWQWQIPLQHRVGNGLVYSSRFLSDETAKQQLLNNLPAKPLTEPRVIKFKTGRRLKQWHKNVVSVGLSSGFLEPLESTSIHLIQSAAIRLIKFFPHQGIKPSLVDEFNQQSKTEFERIRDFIILHYKLTERDDSAFWRFCKGMDIPSSLKKKIELFKTSGKLIREDDELFAEIAWQQVMIGQGLIAEDHHPLTDALSDEQLNELFSNLKTLINSTVEQLPTHSQFLEKVQN

SEQ ID NO: 87217 - protein, 524 aa, Caulobacter sp.
  REGION 1..524: note = tr|J3AV38|J3AV38_9CAUL Tryptophan halogenase; OS = Caulobacter sp. AP07 OX=1144304 GN=PMI01_00374 PE=4 SV=1
MRDRQETASGRVKRVVIVGGGTSGWMCAAALSRLVAHAGVEITLVESDEIGTIGVGEATIPSILDFNAALGLDEDEFLRETQGTFKLGIEFVGWNRPDERYIHPFGMFGRDTQAIKFHQLWLKFAQRGDVELGPIEDYNLCAMAARLGRFARPAGRGDSVLSSLRYAFHFDAGLYARYLRGYSERRGVVRREGKITEVLQHADNGFIRAVKLANGEQIEGDLFVDCSGFRGLLIEETLHAGYETWNQWLPCDRAVAAPSSNVGPPPPYTRATADEAGWRWRIPLQHRTGNGYVYCSSFISDDDAEQRLLSTLEGAPLADPRRLKFVAGRRKAFWIKNCVAVGLAGGFIEPLESTSIHLAQNAIARLLALFPDKDFSQPEIDEFNRLNQVEYEQTRDFIILHYKANNRSEPFWRRLAQMPIPDSLQSKIDLFKSRGRALRGVQTLFTEDSWIAVMLGQGIHPDGYDPLVDSLPEDEARRFVRHVREMVGKTAQAMPLHAKFLEGLVVAPAPAGGVEPGSTTRAVR

SEQ ID NO: 87218 - protein, 500 aa, Novosphingobium subterraneum
  REGION 1..500: note = tr|A0A0B9AGF0|A0A0B9AGF0_9SPHN Tryptophan halogenase; OS = Novosphingobium subterraneum OX=48936 GN=NJ75_01070; PE = 4 SV=1
MSNPDLMIRSIAVIGGGTAGWMTAAALAQALRHNCSITLVESDEIGTVGVGEATIPPIRTFNETLQIDEREFVRKTKGSFKLGIEFVDWGSLGNSYFHPFGPHGRAFDIVNLHHYWLRAREAGETAPLDEHSMAWALAKENRFAPPMPDQRNVLSTFDYAYHFDAGLYAKFLREYSEARGVTRIEGKVASVQQDAETGFVTGVTLDDGRAVEAELFVDCSGFRGLLIEGALKAGYEDWTHWLPCDRAMAVPCENAGPLTPYTRSTAREAGWQWRIPLQHRTGNGYVFCSQFLSEDQAADKLLSRLDGKALADPRPLRFVTGRRKTFWEKNVIAVGLSSGFMEPLESTSIHLIQAGISKLLALFPERTFDPIVIEEYNRIAINEYERIRDFLILHYKLTTRDDSELWRYCAAMDIPDTLQTKIEHFRRYGRLVQRDADLFGAPSWLAVHVGQGNIPERTDPLADYRGIDGREWLGKLRAAMHHAALQQPTHEQFIKANCAA

SEQ ID NO: 87219 - protein, 500 aa, Sphingomonas sp.
  REGION 1..500: note = tr|A0A1I4A5J0|A0A1I4A5J0_9SPHN Tryptophan halogenase; OS = Sphingomonas sp. NFR04 OX=1566283 GN=SAMN03159338_4426; PE = 4 SV=1
MVAQQVLIAGGGSAGWMAAALFARLRPAPDTQITLVESEAIGTIGVGEATVPILQDFNRLLGLHEPDFVAATQGSFKLGIEFVGWGATDNRHFHGFGDFGPPIEGIAPHHHWHRLRAAGRITDPIDDWSMPACAAAEDRFAPPEALRGEAAQYRYAYHFDAGLYARLLRGYAEARGVTRIEGRILHADRDPETGDLTALQLDGDRRIEADLFIDCTGFASRLLGDALDTKFVDWSHWLPADRALAQGCTRAGRFTPFTRSTAHAVGWQWRIPLQHRTGNGLVYSSAYLPDDEAAAQLAANLDGDAIGDPRLLRFTTGRRERFWAHNVVAIGLAAGFLEPLESTSLQLVQTGLARLAELLPSAGRADPAIVAEYNRETIGEYARIRDFLIAHYCISRRPEPFWRDMAAMAVPDSLAHKLALWDASARVPLYELESHGEASWVAVLLGQGRMPRGHDPAADRPALDALQHAFDARRAALTTALPRLPAHDHFVARTCRADAA

SEQ ID NO: 87220 - protein, 500 aa, Novosphingobium subterraneum
  REGION 1..500: note = tr|A0A0B8ZCX7|A0A0B8ZCX7_9SPHN Tryptophan halogenase; OS = Novosphingobium subterraneum OX=48936 GN=NJ75_03447; PE = 4 SV=1
MTASHLPRRIVIAGGGTAGWMTAAALARTLGPVAEVTLVESEQIGTIGVGESTIPPLVTYNRLLGINEAEFMRATQATFKLGINFENWRVPGENYFHSFGGTGKDHWSAGFQHFWLNGRERGHTAPYGEYCLELKAAEAGKFAHLPDDRMNYAYQLDSGLYAKFLRAMAEADGTIRIEGKIARVELDGETGDIAALVLEGDRRIAGDLFIDCTGFRALLIEGALRAGYDDWTHWLPCDSAIAIQTSSVRPPVPYTRAIAHEAGWQWRIPLQHRQGNGVVYCSDYLAHEAALKKLLLTVEGEKLVKPNHIRFRTGARRKQWHRNCVAVGLSGGFMEPLESTSIHLIQRAILRIVRMLPAGAISQRDIDEFNDQQFTDMEQIRDFLVLHYKATDRRDTPFWRHCASMEIPASLEHKIELFRETGRVFRKNEELFAENSWVQVMMGQGINPQSHHPVAAKLRDEELKHLLGSLREQVSRTVAALPSHGDYVARYCGAEVPAAA

SEQ ID NO: 87221 - protein, 496 aa, Sphingomonas sp.
  REGION 1..496: note = tr|A0A1I4AJM8|A0A1I4AJM8_9SPHN Tryptophan halogenase; OS = Sphingomonas sp. NFR04 OX=1566283 GN=SAMN03159338_0041; PE = 4 SV=1
MDEQKFRVVIAGGGTAGWVAAAALVRHLGPNLDITLVESDAIGTVGVGESTIPTAWTFHKLLGINEQVFLRETNATFKLGISFENWLRDGEHYFHPFGSVGRALPLCDFQHFWLEAQRRGFDGALADYSLETQAALAEKFATGDPMPLAYAYHLDATAYAAFLRGLAEPAGVRRVEGRITEVEQTENGDIAALVLEAGLRVDGDFFIDCTGFRALLIEETLKTGFDDWSHWLPTNRAFAVQSETTEAPVPYTRAIAHGAGWRWRIPLQHRMGNGFVYASDYLSDDEAKAQLLAAVPGRALFDPRLIRFTTGMRKQAWNRNCVALGLASGFIEPLESTSIHLVMIAVTRLLQNFPFRRDMAALSARFNAQSRAESEHIRDFIILHYKLNDRPEPFWRDHAARAVPDSLAARIALFEEGAATYQEGTDLFRIDSWNAVMLGQGVRPRDHHHMPAQIPSEDLERALGDLRAGIAAQLAKLPGHADFIARYAAAKVPAAA

SEQ ID NO: 87222 - protein, 506 aa, Streptomyces sp.
  REGION 1..506: note = tr|A0A1Q5BHX4|A0A1Q5BHX4_9ACTN Tryptophan halogenase; OS = Streptomyces sp. TSRI0445 OX=1703925 GN=AMK14_14125; PE = 4 SV=1
MTASYLAAAFGERIDVTVVESARVGTIGVGEATFSDIRHFFEFLKLSEPDWMPACNATYKLAVRFENWREPGHHFYHPFEQLGSVDGFPLSDWWLRNPTTSRFDKDCFVMASLCDAERSPRYLDGKLIDQGFVEQQREETSARSTIVEYQGTQFPYAYHFEAALLAKFLTTYATQRGVRHITDDVTDVVLDQDGYIAQVQTAEHGRLEGDLFVDCTGFRALLLNKALDEPFVSYQDTLPNDSAVALQVPLDMDREPMRPCTTATAQEAGWIWTIPLISRIGSGYVYASDYTTPEEAEHTLRAFIGPGAEDVEANHIKMRIGRSRRSWVKNCVGIGLSSGFVEPLESTGIFFIHHAIEQIVKYFPSGREDHRLRDLYNESIAHVQDGVREFLVLHYVGAKRADNQYWKDTKTRRVPDELAERIENWKYKVPDAQTVFPHYHGLPPYSYNCILLGTGGIEVRHSPALDMADERAAIAEFERIRLKADKLVQELPTQNEYFAAMRAGAV

SEQ ID NO: 87223 - protein, 525 aa, unidentified; identical to SEQ ID NO: 83684
  source 1..525: note = Cellvibrionales bacterium
  REGION 1..525: note = tr|A0A424QW78|A0A424QW78_9GAMM Tryptophan 7-halogenase OS=Cellvibrionales bacterium TMED47; OX = 1986841 GN=CBC07_003070 PE=4 SV=1
  VARIANT 11: note = Xaa can be any naturally occurring amino acid
  VARIANT 22: note = Xaa can be any naturally occurring amino acid
  VARIANT 66: note = Xaa can be any naturally occurring amino acid
  VARIANT 81: note = Xaa can be any naturally occurring amino acid
  VARIANT 91: note = Xaa can be any naturally occurring amino acid
  VARIANT 99: note = Xaa can be any naturally occurring amino acid
  VARIANT 105: note = Xaa can be any naturally occurring amino acid
  VARIANT 109: note = Xaa can be any naturally occurring amino acid
  VARIANT 120: note = Xaa can be any naturally occurring amino acid
  VARIANT 136: note = Xaa can be any naturally occurring amino acid
  VARIANT 173: note = Xaa can be any naturally occurring amino acid
  VARIANT 175: note = Xaa can be any naturally occurring amino acid
  VARIANT 179..180: note = Xaa can be any naturally occurring amino acid
  VARIANT 184..185: note = Xaa can be any naturally occurring amino acid
  VARIANT 484: note = Xaa can be any naturally occurring amino acid

SEQ ID NO: 87224 - protein, 497 aa, unidentified
  source 1..497: note = Sphingomonas guangdongensis
  REGION 1..497: note = tr|A0A285R2E6|A0A285R2E6_9SPHN Tryptophan halogenase; OS = Sphingomonas guangdongensis OX=1141890; GN = SAMN06297144_1643 PE=4 SV=1
MSVPMTGEQRVRRVVIAGGGTAGWLAAAALSHQLGKLLDITLVESDEIGTVGVGEATIPTVRSFHALIGLDEREFLRATNATFKLGISFENWARIGDRYIHSFGTLGRSTWMGEFHHFWLHARAAGVADEIGAYCLEHEAAAAERFAGGEGQDTSYAFHLDATLYARHLRARSEAAGVRRIEGKIARVDRDGESGEIRALVLDSGAEVPGDLFIDCTGFRALLLGETLGVGFEDWGEWLQTDRALAVQTESTRPAVPYTRAVAHDAGWRWQIPLQNRVGNGLVYASAFLDDDAARERLLASLDGPTRTEPRLIRYRTGRREQSWAANCVSLGLSSGFVEPLESTSIHLIMIGITRLMQLFPFGGCHEGLRRRFNAQSRTELERVRDFIILHYKLTERDDSPFWRRCRDMSVPQSLADRIALWVEDAHAYQGAEDLFRVDSWVQVMLGQRLQPGGHHLLGRIMPDERLRQTFEGMRRSVRERVASMPAHGEFLKRYAA

SEQ ID NO: 87225 - protein, 249 aa, unidentified
  source 1..249: note = Alphaproteobacteria bacterium
  REGION 1..249: note = tr|A0A2N3AVI1|A0A2N3AVI1_9PROT Tryptophan halogenase (Fragment) OS=Alphaproteobacteria bacterium HGW-Alphaproteobacteria-9 OX=2013672 GN=CVT87_04325 PE=4; SV = 1
FTPYTRSTAKAAGWQWRIPLQHRTGNGYVHCSQFISEDEASAELLATLDGKPLADPRPLRFVAGRRRAFWKRNCVAIGLSAGFMEPLESTSLHLIQYGILRLIALLPDSAMSPLLAREYNAQTTAEYERIRDFLILHYKASERDDSELWRYCAAMPIPDSLQYKIDHFRDYGLLVSDERELFTNPSWIAVYLGQGIVPGRAPALAAMRSGVPVAERLAQIRSAMDEAVAAMPSHGEFIARHCAAPLPTT

SEQ ID NO: 87226 - protein, 409 aa, unidentified
  source 1..409: note = Burkholderia novacaledonica
  REGION 1..409: note = tr|A0A2U3IBZ9|A0A2U3IBZ9_9BURK Tryptophan halogenase; OS = Burkholderia novacaledonica OX=1544861 GN=NOV72_04924; PE = 4 SV=1
MNASVDVAIIGAGPSGAVAAALLRKAGRSVLVLEQQHFPRFSIGESLLPQSMAYLEEAGMLQDVVEAGFQYKNGAQFVHHDRAAAFDFRDKHSDGWGTTFQVERAVFDDLLIRRAAKQGAEVRFGHSVLDMKTGHAPVLEVADEAGTRYQVHARFVFDASGFGRVLPRLLNLEAPTRLPTRAAIFTHIRDGIPPEAHDRNKITVAVHPEHRDVWYWMIPLANGRSSVGCVAEAAFLDVPEAQREAKLRALIRGEPTLNRLIGDAPFLMPVRHIGGYSANVERLHGPGYALLGNAGEFLDPVFSSGVTIALRSAHLAVETLERQLKGEAVDWQAHYDRPLRKGIDTFRAFVENWYTGKLQDIIFARDQTPGIRRMIAAVLAGYAWDETNPYVAEPVRRLNTLHEVCMQRG

SEQ ID NO: 87227 - protein, 510 aa, Pelomonas sp.
  REGION 1..510: note = tr|A0A0Q8GLG0|A0A0Q8GLG0_9BURK Tryptophan halogenase; OS = Pelomonas sp. Root662 OX=1736580 GN=ASD88_19310 PE=4; SV = 1
MSNEQAIRRIVIVGGGSAGWMTAAPLSQMFGTQPGGPANPVGCEIVLVESADIGTVGVGEATLPSIRYYNDALELDNAEFMRKTQASFKLGIEFKDWGHIGNRFFHGFGGFGPPIVNRSSVAHWMRLNRTGGMPSYEDWSTASVMAQRNRFVPPEGGPPSAANSYSYAFHFDAGLYANFLRDYALARGVKREEGTIVDVSLRPGDGFVTAVTLADGRRIEGDLFIDCSGFRALLIEGVMKAGYDDWTHWLPCDSAQAAPCDKVVPLTPYTTSTARSAGWQWRIPLQHRTGNGHVYCSGYTSDEEAGRVLMSNLDGAPQGEPRQLRFKTGMRKRIWEKNVVAVGLASGFLEPLESTSLSLVIHGVSALVELFPDRSCEPHLVDEYNRRMTRQYESIRDFIILHYKETARDDSEFWRYCKAMPIPDTLAHQMDNFRRNGRVVVLDRDSFGEDSWYSLYLGLGMRPEALHPLLAQVDEATLREHFKRLHMAISKTVDDMPDHAAYLGRLVGTR

SEQ ID NO: 87228 - protein, 500 aa, Sphingomonas sp.
  REGION 1..500: note = tr|A0A1S6FJ34|A0A1S6FJ34_9SPHN Tryptophan halogenase; OS = Sphingomonas sp. LM7 OX=1938607 GN=BXU08_08470 PE=4 SV=1
MTDNRIRNIVIVGGGTAGWMAAATLSRILGPDYARITLIESDEIGIIGVGEATIPQMATFNRMLGIDENEFVRATKGSFKLGIQFVDWGRRGHSYFHPFGKYGVDMQGVSFHAYFLRLHQLGEAPDIDQWSLQAKAGQMDKFMRPVDAGRSPLSDIAYAFHFDAGLYARFLRGYAEARGVTRREGKVVDVTLRGEDGFVQSVTMEDGTTIEGDLFVDCSGFRGLIIEQALDAGFTDWSKYLPCDRAIAVPCESVPEWTPYTRSTAHKAGWQWRIPLQHRTGNGHVFCSEYMSDDEATAILLANLDGKPVADPRTVRFRTGHRNKFWVKNCVALGLAGGFIEPLESTAIWLIQSGLSRFLTMFPDKQFNQADIDRYNRIMATDYEEIRDFIVLHYHATERDDSPFWDYCRNMEIPERLAEKMRVFRSHGRCFRENEELFNDTSWFAVMHGQLMTPQGFDPVAEVMTLDETRARLAHIREAIANSAEYMPNHRDFIQENCAA

SEQ ID NO: 87229 - protein, 509 aa, Xanthomonas citri; identical to SEQ ID NO: 82725
  REGION 1..509: note = tr|A0A0U5FRG1|A0A0U5FRG1_XANCI Tryptophan halogenase; OS = Xanthomonas citri pv. citri OX=611301 GN=prnA PE=4 SV=1

SEQ ID NO: 87230 - protein, 505 aa, Xanthomonas translucens
  REGION 1..505: note = tr|A0A199P035|A0A199P035_XANCT Tryptophan halogenase; OS = Xanthomonas translucens pv. poae OX=227946; GN = A6R73_03070 PE=4 SV=1
MIAAPLRNLVIVGGGTAGWMAAAALARVLGPDYRITLIESEQIGIVGVGEATVPHIKAFNNLLGINEAEFVRQTQGSFKLGIEFVDWHRQGTSYIHGFGTEIGHSLGLLPFQQYWFKQALAGKAKPLGAYTLNTVAARRGKFMTSASDAPPNSPLGNIAYAYHFDASLYAAFLRRFSEQRGVTRREGIVEQVQLHPESGDVLSVRLASGDTIAGDLFIDCSGFRGLLIEQALHTGYHDFTHWLPCDRALAVPCVKVGPPTPYTRATARAAGWQWRIPLQHRTGNGYVYSSAHLSDDEAAATLLTNLDGAALADPRPLRFVTGRRKQAWNRNVVALGLASGFMEPLESTSIHLIQSGISKLLELFPREGISPVLVQRYNDRIAFEFDRIRDFLVLHYTATERDDSDFWRQCRAMAITPELQATLDLFGDSGRFYRNGDEMFAEISWVQVMVGQGILPRAYHPLVDQVPAADIERFVASIEQTIGHCVDAMPPHQAFIDRYCAAAPR

SEQ ID NO: 87231 - protein, 505 aa, Xanthomonas translucens
  REGION 1..505: note = tr|A0A0K2ZI76|A0A0K2ZI76_XANCT Tryptophan halogenase; OS = Xanthomonas translucens pv. poae OX=227946; GN = XTPLMG728_0893 PE=4 SV=1
MAQIRKVVIAGGGTAGWIAACALAHQFRDLLDITLIESEQIGTVGVGESTVPPIRSFHRFLQIDEQEFLRAVAGTFKLSISFENWRRPGERYLHPFGLTGQSTLACAFHHFWLEAQRRGMLSELGDYCLETVASRMDRFALQQSPPVNYAYHLDAGLYARLLRRHAERYGLKRVEGKIQQVRQHAESGGVEALLLEDGTLVEGELFIDCTGFRGLLIEQTLHTGYEDWQQWLPCDRAVAVQTEAVAAPVPYTRAIAHAAGWRWHIPLQHRVGCGLVFSSAHLSDDEARAKLLHDAAAPPIKEPWLVPFRTGRRRKAWNKNVVALGLASGFIEPLESTSIHLTIAAVMRLITLFPSEGIAPSMVDLYNAVSRAEMEHVRDFIILHYHANQRDEPMWQACREMALPDSLQQRLRAWRERAHAWQGADELFRVDSWIHVLLGQGIVPAQHHPLARALPDQPLQQFLDAIRQPIDRAVAQMPSQQDFIARYCKAGPEVWAGRAPVAAPA

SEQ ID NO: 87232 - protein, 510 aa, Sphingomonas sp.
  REGION 1..510: note = tr|A0A1S6FLI8|A0A1S6FLI8_9SPHN Tryptophan halogenase; OS = Sphingomonas sp. LM7 OX=1938607 GN=BXU08_13370 PE=4 SV=1
MAEKRRILIVGGGTAGWLTAAYLARFLDLPNKAEIEITLLESRALGIIGVGEGAFPTIRSTLEFIGIDEADFIRSTSATFKQGIRFDDWLYAPTSDGRRHRYLHPFEAPYYTEGTSLIPYWLLQDEAARRPFAEAVTIQGRVAGNCRGPKRPGEGSFSGPLNYAYHFDAHRLAALLGKRAGELGVRALEGLLTGVELDERGHISGIETREHGRLKADLYIDCSGFRAELIGKALGAPFKSVKHLLFADRALACKIPYDRPDAPIESVTIAAAHDAGWTWDIGLEGARGIGCVYASKYMDEAQAAKILRAYIGHDDFSARQLEFEPGYRETQWIGNCVAVGLSGGFVEPLESTGVVLIEAAVGMLAQLFPHAGPIDAPARQFNALMTARFDNIINFLKLHYCLSRREEPFWRDNADPGSIPEALQELLQRWRHRPPNRFDFLLDLESFAFFNYQYILYGMEYPTDLSGGRGDFPNVEAAEKLFDRIRGFSERATADLPEHRSLIAHINEPT

SEQ ID NO: 87233 - protein, 498 aa, Sphingomonas sp.
  REGION 1..498: note = tr|A0A1S6FN40|A0A1S6FN40_9SPHN Tryptophan halogenase; OS = Sphingomonas sp. LM7 OX=1938607 GN=BXU08_16590 PE=4 SV=1
MRRIVILGGGTAGWMAAACLARTLGTGERSITVVESEEIGTVGVGEATIPLIETFHQILGISAIDVLRNCEATFKLGIEFVDWRRRGDRYLHPFGPVGTDLNGVGFLQHWLRHRAQGGDSDYLDYNLESRAAMAGRFGMTQLRQPGEHQLHFAYHFDAALYAAMLRRYSERLGVVRVEGMVQDVRRDGESGDVTALALRDGSEVAGDFFLDCSGFRGLLIEQTLGAGYDDWSEWLPCNRAVAVQSGRLAQLSPFTRSTALDAGWQWRIPLQHRTGNGYVFCDAFVSEDEATATLLSRLDTPATIEPRMLRFVTGRRRKTWDHNVVALGLAGGFLEPLESTSIYMVQSALAKLIALFPRGDRVNRVAADRFNAMMATEWARVRDFIIAHYKITERDDTPFWKHCRNMTIPDTLAERLALFEEEGLFIEQPHDLFKEGSWASVLIGQGMTPRRFHPVANAAPPEALETQLARMRSAVAARLATLPEHGEYIDQCMGKAAA

SEQ ID NO: 87234 - protein, 510 aa, Sphingomonas sp.
  REGION 1..510: note = tr|A0A1S6FHF9|A0A1S6FHF9_9SPHN Tryptophan halogenase; OS = Sphingomonas sp. LM7 OX=1938607 GN=BXU08_04150 PE=4 SV=1
MREKREILVVGGGTAGWLTAAYLARFFEGRITVTLLESPDIGIIGVGEGAFPTIRSTLKFLGIDETRFIREASATFKQGIRFNDWLHAPSPDGTRHQYLHPFEAPFYTEGGSLVPYWLLQDADSRPPFAAAMTIQNRVAEARRAPKRPGEGDYAGPLNYAYHFDAARLAQVIEARAVELGVRHLRGLLTGVDLAADGSIAGIRTDAHGTLEADLYIDCSGFRAELIGKALGVPFKSVKHQLFTDRALACKIPYDRPDTPIESFTIATAHEAGWTWDIGLEGARGIGCVYSSAHIGDDRAAEILRRYIGHDDYTARIIPFEPGYRERQWVGNCVAVGLSGGFLEPLESTGVVLIEAAVGMIAELFPHSGPADAPAARFNRLIAARYENIINFLKLHYCLSRRPEPFWRDNADPASIPEPLQELLRQWRHRPPSRFDFLLDLESFAFFNYQYILYGMEFPTDLSASRGDFPNVEAAEKLFARIRNFSEQATQDLPSHRALIREINQGASRGA

SEQ ID NO: 87235 - protein, 525 aa, Erythrobacter citreus
  REGION 1..525: note = tr|A0A0L1KGA1|A0A0L1KGA1_9SPHN Tryptophan halogenase; OS = Erythrobacter citreus LAMA 915 OX=1306953 GN=J121_968; PE = 4 SV=1
MTASTPTDHGQAQAIGSICIVGGGTAGWSAAALLSQVLRGSGCRITLVESSAIPTVGVGEATIPPIFDFLRNIGADEIEFIRRCQATFKLGIQFRDWLHHGHAYWHPFGNLGLTINQRPFHHYYCMNRAAGHGETLADLCPSVALAEDGKFAFPSPDGQWPGGAVAYALHFDAGLVAAFLRDHAVAAGVERLDRRIVGATRGEGERIAAVQFDDGESLEADFYIDCSGFRGLLIEETLGAGFEDWKHWLPCDSAVAAPTAAQEQRAPYTVATARSAGWQWRIPLQHRTGNGLVYASDFISDADAQAQLLAGLDGEAQADPRVLRFTAGLRKRAWVGNCLAIGLSAGFLEPLESTSIHLIHTGLNRLLDLFPDRRFDPALIAAYNRDVHREYAHIRDFLLLHYVPNRREGEPFWDHIRGLDLPDTLAEKIELFTRTGRIMSRQRELFSDISWFYVMHGMGLTPAALDPLAEAAPFGEVRKVIDQLRGAMQAFRSAAPTHDAILDRLLDPAETRRPQFGTGGGWTTR

SEQ ID NO: 87236 - protein, 462 aa, Amycolatopsis decaplanina
  REGION 1..462: note = tr|M2ZWI3|M2ZWI3_9PSEU Tryptophan halogenase; OS = Amycolatopsis decaplanina DSM 44594 OX=1284240; GN = H074_02222 PE=4 SV=1
MRATTQILVIGGGPAGSTAAGLLAKEGFEVTLLERDHFPRYHIGESLLPSCRPILERLGVWDKIAAAGFQPKGGAYYFWGPEEWEVRFRPHGRDGSTSAWQVIRADFDKILLDHAREVGVDVTEGIAVKKLDFDGDRPVAAHWAEAKNPANTGRIEFDYLVDASGRGGVMATKYLKNRKFHNVFRNVAAWSYWKDAKELDRGPSGAITVASVGDGWFWGIPLPDGTLSVGLVTGRDSFNAARNELGGVDPVYHKAIGDCPAIQQLLVEAEQVTEIKVEQDYSYAAEQFQGPGFLLAGDAACFLDPLLSTGVHLGTYSALIGTAAIGSVIRGEISETEAWDFYEVVYRRAYERLLVLVSTFYESYRGKEHHFFRAQQLSEKDWMGMDVQAAFDRFVTGIADLEDTEEVYRRIQGHLLGDESGKHNPLDNLNRVHEHKQAPEKPEKAINGLYLSYEPQIGIRRA

SEQ ID NO: 87237 - protein, 389 aa, unidentified
  source 1..389: note = Alphaproteobacteria bacterium
  REGION 1..389: note = tr|A0A2N3AU80|A0A2N3AU80_9PROT Tryptophan halogenase (Fragment) OS=Alphaproteobacteria bacterium HGW-Alphaproteobacteria-9 OX=2013672 GN=CVT87_06170 PE=4; SV = 1
EAAPDARGLWHYSLHQLAADQARFGKLDRVGNTAMAGLAYAYHFDATRYALHLRDYAEAREGTRTEGMVESVERDGTSGDITAITLDDGRRVAGDFFVDCTGFRALLLGGALGVGYQDWSHWLPCDRALAVPSERLPTLVPFTRATAKSAGWQWRIPLQHRTGNGHVYASGFTDDDAAADTLLAGLDTKPLGDPRPIRFTTGRREALWAQNCVSIGLSSGFLEPLESTSIHLIQSHVSRLIQLFPRGKNAAAERAEYNRRCMAEFDQIRDFLILHYHRTDREDTEFWRYCKHMAVPDSVTHKLELFAASGRVGRDADDLFREASWVQVMLGQGIMPADYDPMADQIDPAQLEEFLASLRNVIERSVAGLSSHADYLQRHCPADSVSTPA

SEQ ID NO: 87238 - protein, 491 aa, Amycolatopsis decaplanina
  REGION 1..491: note = tr|M2YW94|M2YW94_9PSEU Tryptophan halogenase; OS = Amycolatopsis decaplanina DSM 44594 OX=1284240; GN = H074_31722 PE=4 SV=1
MSVEDFDVVVAGGGPGGSTVATLVAMQGHRVLLLEKEVFPRYQIGESLLPATVHGVCRMLGVADELANSGFPIKRGGTFRWGARPEPWTFHFGISAKMAGSTSHAYQVERAVFDDILLKNAKSKGVVVREGCSVNDVVEDGERVTGARYTDADGNAREVSARFVIDASGNKSRLYTKVGGSRNYSEFFRSLALFGYFEGGKRLPEPVSGNILSVAFDSGWFWYIPLSDTLTSVGAVVRREDADKIQGDREKALNTLIAECPMISDYLSNATRVTTGRYGELRVRKDYSYQQDSYWRPGMVLVGDAACFVDPVFSSGVHLATYSALLAARSINSVLAGDLDEKTALNEFEARYRREYGVFYEFLVSFYQMNVNEESYFWQAKKVTQNQSTDVESFVELIGGVSSGETALTAADRIAANSAEFAAAVDKMAAGDGDDMVPMFKSTVVKQAMQEAGQVQMKALLGEDAEPELPLFPGGLVTSPDGMKWLPHHPV

SEQ ID NO: 87239 - protein, 502 aa, Sphingomonas sp.
  REGION 1..502: note = tr|A0A1S6FJE0|A0A1S6FJE0_9SPHN Tryptophan halogenase; OS = Sphingomonas sp. LM7 OX=1938607 GN=BXU08_08475 PE=4 SV=1
MSAPAIRKVVVVGGGTAGWMTAAALARLTRAGVQVTLIESDSIGIVGVGEATIPPIRSFNAMLGIDENHFLAHTQGSMKLGIEFVDWNQPGHRYLHPFGEYGFSIDGVRFHHVWRKLRAAGRAGLLDEYSMSATAAGLNRFSAPVAEQNSPLSQLVYAYHFDASLYAGYLRGYSEARGVVRREGKITDVALRGEDGFVEAVTLEDGTRIEAELFIDCSGFRGLLIEEALHTGYEDWTHWLPCDRALAVPTENAGLLTPYTRATARPAGWQWRIPLQHRTGNGYVYSSAHVSDDEAAATLLANLEGKPLADPRPLRFTTGRRKLAWNRNVVAIGLSSGFLEPLESTSIHLIQSGISRLLALFPDSGWGNAERDAYNAFTRSQYERVRDFVILHYKTNGRDEPLWRYVREMAVPDSLTQRIELFRNRGRIFRHEDELFAEASWVAVLLGQGVTPTGWDPLADALDSDQVATMLERIRTTFRRAAEAMPDHAAYLSRHCASRGIA

SEQ ID NO: 87240 - protein, 529 aa, Rhodanobacter sp.
  REGION 1..529: note = tr|A0A1V3PBI5|A0A1V3PBI5_9GAMM Tryptophan halogenase; OS = Rhodanobacter sp. C06 OX=1945854 GN=B0E52_07920 PE=4; SV = 1
MQRLRKVLVVGGGTAGWLTACYLAKAVNAADPASVQVHLVESDRIGLIGFGESTFPSIRGTLSAIGLDERRFLAETSAAYKQGIRFRHWVRPPGTPGKEHFFHPFSVPSQRPGGPELLPYWLLGAAPAGLGFADAVTMQSLLVDRSRAPKRARDPDYQGPMNHAYQFDAGRFAMLLAEHGQQALGIRRHVATVERAVPDDHGGIARLVTAELGELEADLYVDCTGMRASLIGEALHSPYRSCGDMLFTDRAVAMQAPYPRPDAPIPSFTLCTAQESGWVWDIGLQQRRGVGYVYSSRHTDATRAEETFRRYLGSAAEGQDATHIRFDNGYRPEAWRGNCVAVGLSGGFMEPLESTGIALVELAAYLVTHLLPGDRDDMGRAARHFNAMMSARYERIVDFIKLHYCLSRRRDSAFWVDNADPAGIPQSLQDKLAQWRHRPPHRLDFVGDLEMFPVSSWQYMLYGMEFETDLELVRGAYPRGVEASREFAMIRQAATQALDDLPDHRALVTHLCEEYRRRPHAPVAHAATA

SEQ ID NO: 87241 - protein, 504 aa, Sphingomonas sp.
  REGION 1..504: note = tr|A0A0Q4CQ27|A0A0Q4CQ27_9SPHN Tryptophan halogenase; OS = Sphingomonas sp. Leaf10 OX=1735676 GN=ASE59_09435 PE=4; SV = 1
MSQPSSAPAPGRLVRQVVVVGGGTAGWMAAAALSRALGPIGRSVTLIESDAIGTVGVGEATIPPIRAFNAMLDIAEGRFLRETMGSYKLGIEFVDWGRIGQRYFHPFGAAGQDFHGVPFHQLWLRHRVRGGTTRLTDYSMCTVAAREGRFGIAAEGDRTPLAHIAHAYHFDATLYAALLRRVAEEQGVVRHEGRVVRVDRDGDSGDVTSVRLADGRTIAGDLFVDCSGFAGLLIEGALETGYHDWRHWLPMDRALAMPTTRLDPLPPYTRATAHAAGWQWRIPLQHRTGNGHVYSSGFTGADAAERVLRDHAPGELCGDVRALSFTTGMRRKPWSHNVVALGLAAGFVEPLESTSIHLIQHGIQRLIALFPGPAVRPAERDAYNADMTRAFEAVRDFVVLHYKATTRNDSDFWRAMRAMTVPDSLAHRIELWRAQGRLIPQAGDVFAIPSWAAVLTGQEIWPAAYEPTVDRLNADSVEAALADMRGAYRRTALSLPTHDAALPR

SEQ ID NO: 87242 - protein, 498 aa, Sphingomonas sp.
  REGION 1..498: note = tr|A0A0Q4DGE5|A0A0Q4DGE5_9SPHN Tryptophan halogenase; OS = Sphingomonas sp. Leaf10 OX=1735676 GN=ASE59_17625 PE=4; SV = 1
MTAAINRVVIVGGGTAGWMAAALIAKVIGPQVKIALIESDEIGIIGVGEATIPPIQHVNAVLGIDEAEFLRETRGSIKLAIRFDDWGAIGQSYYHTFGAAGRNTAFCSFHHYWNRAKRAGIAADYWDYDLNYLCAREGRFAKIQVDDPLWHLPYAYHFDSALYGQYLRRYGEARGVERIEGLVEQVARDGESGHVTSLTLRGGREVSGDLFIDCSGARGLLIQRQLNVGYEDWGHWLPCDRAMAVPTARHDDTPPYTRSTARSAGWQWRIPLQHRVGNGLVYSSRHLSDDRAAELLLGNLDGEVLADPRIIPFRTGRARRQWDHNVVAIGLSSGFLEPLESTSIYLIQSAIVRLLHLFPHAGFDARQIAEYNRQSRIEFETVRDFIILHYHATSRDDSDFWRHVRTMSLPDRLADKIALFRATGTLTQDPLDIFMEPSWVQVLMGQGIEPRDYHPLADGPSDAELAEQLRQLAAMKREPVPNMPMHDRWLRGFGGTAA

SEQ ID NO: 87243 - protein, 501 aa, Sphingomonas sp.
  REGION 1..501: note = tr|A0A0Q4DXF2|A0A0Q4DXF2_9SPHN Tryptophan halogenase; OS = Sphingomonas sp. Leaf10 OX=1735676 GN=ASE59_03635 PE=4; SV = 1
MSNDRIRRIVIVGGGTAGWMAAATFARLLTTDYCDITLVESDAIGTVGVGEATIPQMATFNRMLGIDEAEFLRETQGSFKLGIEFVDWTRVGHRYFHPFGSYGINMNGISFHAYWLRLHGVGEAPAIEPWSLQAMASAQGKFMRPIDAGNSPLSDIAYAYHFDAALYARYLRRYAEARGVVRHEGRIDRVDLRPQDGFVEAVVLEDGRRIEGDLFVDCSGFRGLLIEQTLGAKFVEWSHWLPCDRAVAVPCAGTAAMAPFTRSTARRAGWQWRIPLQHRIGNGHVFSSAHMSDDEATAILLANLDGEPLAEPRFVPFRAGHRDRMWIRNCVAIGLSSGFLEPLESTSIWLIQSGLSRLMAMFPDRRFRSAEIERYNRILSTEYAEIRDFIILHYHATERDDSDFWRHCRTMDVPERLAEKMRVFRTHGRTFRENEELFNDTSWFAVMNGQGMRPEGYDPIAETLSLEETRARLAHIRDAIAASADYMPAHRDFIRGYCAAG

SEQ ID NO: 87244 - protein, 496 aa, Sphingomonas sp.
  REGION 1..496: note = tr|A0A0Q4D803|A0A0Q4D803_9SPHN Tryptophan halogenase; OS = Sphingomonas sp. Leaf10 OX=1735676 GN=ASE59_05825 PE=4; SV = 1
MTDPIAHVVIIGGGTAGWMTAAACGRYLDDGQRRITLVESDAIGTVGVGEATIPSILNFNKLLGIDEAEFLRETRGSFKLGIEFAGWHTADSGYFHPFGNFGRDIEGVNFHQLWAKLKRQDGIGPIGDYSPTTVAARANAFGPPHPDPRSPLSGMAYAYHIDATLYARFLRRRAEADGVTRIEGRIVAVEHHDNGHVAAVRLDNGRRVEGDLFIDCSGFRSLLLGEAMGVGFEDWSRWLPCDRAIAVPTERTEPVLPYTRATAHAAGWQWRIPLQHRTGNGVVYASRYMDDDAAEALLLSRLDAAPTAAPRRLSFTAGRRDAMWAGNVVAIGLSGGFLEPLESTSIHLIQQGISKLFALFPDRGFSAVERDEYNRQMADNYRSIRDFIILHYHATARDDSSFWTHVRTMDVPDSLARKIDLFRQKGRIFRYEDELFAMPSWVAVLLGQGIEPVGYDPIADALDEERLLPAIRQMRSATAAAVATLPQHGAVLARMG

SEQ ID NO: 87245 - protein, 320 aa, Acinetobacter baumannii
  REGION 1..320: note = tr|A0A009E9U8|A0A009E9U8_ACIBA Tryptophan halogenase family protein OS=Acinetobacter baumannii 348935; OX = 1310605 GN=J504_3251 PE=4 SV=1
MQQSHGEIEADLFIDCSGFKGLIINQALKEPFIGMSDQLFCNSAVAASIKHDDEENGIEPYTSAIAMKNGWTWKIPMLGRFGSGYVYSDEFSTREQATDEFLKLWNVKEDSISLNHIKFRTGRNKRAWVKNCVAIGLSSCFLEPLESTGLYFIYAAIYQLVKHFPKKEIDEKLVKAFNENIEKMFDDSRDFVQTHYFTTSRTDTAFWKANKNDLKLSDSLKSKLDIYKSGLVVCPPITTNEEDYYGDFDIEFSNFWTNSNYYCMFTGFKSYPNSVYPKILYDNKYDKAREYMQELKKREDNLLESLPSTYEYLKHLHSRK

SEQ ID NO: 87246 - protein, 502 aa, unidentified
  source 1..502: note = Gammaproteobacteria bacterium
  REGION 1..502: note = tr|A0A2N1XD15|A0A2N1XD15_9GAMM Tryptophan halogenase; OS = Gammaproteobacteria bacterium HGW-Gammaproteobacteria-4; OX = 2013800 GN=CVV14_10995 PE=4 SV=1
MSIQPIRDIVILGGGTAGWMSAAALSKLLPPSCRIRLIESEEIGIVGVGEATIPNIKHFNAALEIDEDEFLKATQGTFKLGIEFVNWGRLGDRYIHGFGKVGPDTSLVGFHHYWLRLKQLGKASGLDAYSINTVAPRQARFLRYRKDMPGSPLGDIVHAFHFDASLYARWLRGLAEKRGVMRTEGKVKQVLRRAEDGFIEALVMESGERIDGEFFIDCSGIRALLIGDALGVGYDDWSHWLPCDRALAVPSAPVKPLLSMTRSTAHSAGWQWRIPLQHRVGNGHVYSSRFMSDDEAASILLANLDGEKLADPRLIRFRTGMRRKLWERNCVAVGLSSGFLEPLESTSIHLIQTAVSRIATFFPHRGFDAADIDEYNAQGRLEYQQIRDFLILHYKATERSDSAFWNYTRTMPIPATLQRKIDLYRSNGRLFRDGNELFAEPSWLQVMEGQRIHAQGYHPFAGFMPENELHEFVGGVEAVIGKCVGVMPDHAQFIAEHCAALR

SEQ ID NO: 87247 - protein, 505 aa, Sphingomonas sp.
  REGION 1..505: note = tr|A0A0Q4D713|A0A0Q4D713_9SPHN Tryptophan halogenase; OS = Sphingomonas sp. Leaf10 OX=1735676 GN=ASE59_18875 PE=4; SV = 1
MSAPLTSIAIIGGGTAGWMAAAALSRVLGRSVAITLVESEAIGTVGVGEATIPPIQAFNALLGIDEDDFVRATQGSFKLGIEFVDWGAKGERYFHPFGVYGIDFGPIPFEAMWHRLRAAGAAAPLDAYSICAAAAQGNRFQRPLDPPGNTPLHHVGYAFHFDAALYAAYLRRIAEAAGVARREGQVVDVTRDAGDGRIDSVTLAAGGQVAADFFIDCSGFRSLLLGETLGSVFQDWSHWLPNDRAVAVPSANAGPPTPYTRSTARAAGWQWRIPLQHRIGNGYVFSSAHCSEDDATATLLANLDGAPLADPRVLRFRTGRRQDCWVGNCVGLGLSTGFLEPLESTSIHLIQAGIARLLEMLPGRDPDPAMVRRYNRLMAAEFDGIRDFIILHFHATARDDTPYWDHVRTMTVPDTLAERLAEYRATGRVYREADDLFTRTSWLAVLDGQGVRAAGHDPLAMAMPLDEARERLARIAAVTAAAAGRMPAHGAFIAAHCAAPIASPA

SEQ ID NO: 87248 - protein, 499 aa, Sphingomonas sp.
  REGION 1..499: note = tr|A0A396RR20|A0A396RR20_9SPHN Tryptophan 7-halogenase OS=Sphingomonas sp. ZDH117 OX=2305907; GN = D1610_02980 PE=4 SV=1
MEDQIVRRVVIAGGGTAGWTVAAALASQLGPLIDIALVESDEIGTVGVGESTIPTVRGFHALLGLDEREFMRATQASFKLGIEFRDWARVGDRYFHSFGQIGRSTWMGDFQHMWLQARAQGFGGDLGDYCFELQAAEAGKFLTGENGRLNYAYHLDATAYGRFLRGFSEPLGVRRIEGRIAEVRQAPETGFIEALALQSGQVVEGDLFIDCTGFRGLLIEQTLKTGYEDWTHWLSTNSAIAVQTQATGPARPYTRAAAHDAGWQWRIPLQHRVGNGLVFASEFLSDDEAHAMLTERVEGEMLTDPRLIRFRTGRRRKAWNKNCIAFGLASGFVEPLESTSIHLIMIGVTRLMQLFPFGGVTDALADRFNLMSQRELEGIRDFIILHYHLNERDDSPFWKRCREMEIPDSLAARIALFREGAHAYQDAHDLFRVDSWVQVMLGQRLAPRAHHQMGRLMPPEQLLKALTDLKANIAGAVAKLPDHQRFLDSYCASTGRENG

SEQ ID NO: 87249 - protein, 510 aa, Microbulbifer thermotolerans
  REGION 1..510: note = tr|A0A143HP80|A0A143HP80_9GAMM Tryptophan halogenase; OS = Microbulbifer thermotolerans OX=252514 GN=A3224_13775; PE = 4 SV=1
MKDKFDLDDRIRHIVVVGGGSTGWIAAAVLAHQFKPDVCKVTLVESEDIGTIGVGESTIPPFIGLLRGLGIDEADFIQKTQASFKLGIQFHDWLEKGQSYFHPFGVLGQRLGIIEFYQAWLWAQLNGHSSELQDHAPCAVMAREGRFYLPQKAQKTPIGGASYALHLDAKLAGRYLRNYAEARGVERVEGRVVEVFSHDNGFIDKVRLTDGREISGDFFIDCSGFRALLIEQQLGVEFEDWKDFLPCNRAVAVQTENTGATTPYTQASAESAGWRWRIPLQHRTGNGYVFDTRFISDDEARARLLEAVDGKPITEPALIPFRTGIRTELWKHNCLSLGLASGFIEPLESTAIHLVTRGMDFFLRFFPGKSCDTELAAEYNRRMRLDYEEIRDFVVLHYCLTRRRDAPFWRWWQEEAEIPQTLRERIALFRCQGALREGIDELFHSPSWFSVFEGMGVRPRRYDARLDNLPAAQIIQHQETARAAIAQMVDTLPSHDDFLREHCPAVTINN

SEQ ID NO: 87250 - protein, 517 aa, Microbulbifer thermotolerans
  REGION 1..517: note = tr|A0A143HMI9|A0A143HMI9_9GAMM Tryptophan halogenase; OS = Microbulbifer thermotolerans OX=252514 GN=A3224_10280; PE = 4 SV=1
MSQPVKSVVILGGGTAGWITAGTLAARFKRDQAEPVSVTLIESPNVPTIGVGEGTWPTMRNTLKRMGVRETDFIRECNVGFKQGAKFARWSTGAKEDFYYHPLVLPEGFNSHNLAPHWLAGDRSVSFSNTVCPQEALCQRNLAPKTIDTPEYAAIANYAYHLDAGKFSKFLQEHCTENLGVRHILADVSGVRESETGDIAALQTDTAGEVSGDLFIDCSGFRSKLLGEHFGIPFHSCKSVLFIDTALAVQVPYEHENSPMATHTISTAQSAGWIWDIGLQNRRGVGHVYSSAHSDESSAYRELASYLNMSEPQLDELGVRKIPIVPGHREKFWHRNCVAVGLSAGFLEPLESSALVLVEISANMIAEQFPASRAAMDVVARRFNESFLYRWDRIIDFLKLHYVLTKRKDSEFWLDNCDPVSVPDSLKELLTLWRYQPPWHDDFDRAVEVFPAASYQYVLYGMGYETKPRPGGISAPNLEMAAQLFEQKNRGLEKMLRLLQPHRDLINKIRKFGLQKI

SEQ ID NO: 87251 - protein, 492 aa, Teredinibacter turnerae
  REGION 1..492: note = tr|C5BN16|C5BN16_TERTT Tryptophan halogenase PrnA; OS = Teredinibacter turnerae (strain ATCC 39867 / T7901); OX = 377629 GN=TERTU_0510 PE=4 SV=1
MSEQKTKVVIAGGGTAGWLAAAALSQQLGSAVEVALVESAEIGTVGVGEATIPPMKTFHRLLRIDEQEFMRTTHATFKLGIQFENWRVEGEKYFHSFGTTGRDTLVSEFIHFWLRGRDMGIAKDFGDYCVEFKAALENKCSTQGDTKVNHAFHLDAGLYAKYLRTFAESHGATQVEGNIAEVLQDNNSGYITGLRMASGDIVSGDLFVDCTGFRGLLIEQTLHAGYESWEHWLPCNRAVAVQTASVRDPVPYTRSIAHHAGWRWQIPLQHRVGNGTVFCNRYMSEDEAIAKLLADIQGDVITEPRVIQFQTGRRRKNWVKNCVAMGLSSGFLEPLESTSIHLIMTSIMRLLQLFPGKDIQQATIDEYNMQAAIEFELIRDFIILHYKATEREDSKFWRYCKRMDIPESLAHRIDLFRETGKSYQKEGELFRLDSWTQVMLGQGIYPKRYHPMVDSMQAQELERFLHATAANVAAVVDSMPPHEKFLAEYCAI

SEQ ID NO: 87252 - protein, 491 aa, Sphingomonas sp.
  REGION 1..491: note = tr|A0A0Q4DS79|A0A0Q4DS79_9SPHN Tryptophan halogenase; OS = Sphingomonas sp. Leaf10 OX=1735676 GN=ASE59_00590 PE=4; SV = 1
MTPMRIVIAGGGTAGWLAAALLTRQLASLVEVTLVESEDIGTVGVGEATIPTIRSFHALLGLDEAEFMAATGASFKLGIAFENWARDGDRYLHSFGEVGRSTWMGDFQHFWLEARAQGAAGPIGAYCLEHEAAEAGRFATGPDAPLNYAYHFDAGRYAAYLRTHSEAQGLTRIEGRIDRVELDGQSGNIAALVLDDGRRVTGDLFLDCTGFRALLIEQALGVGFEDWSHWLPTDRALAVQTAATGPAPPYTRAIAHDAGWRWQIPLQHRVGNGLVYSSSHLSDDAARDRLLSSVDGRTLIEPRLIRFRTGRRLATWERNCVALSLSSGFVEPLESTSIHLVMIALTRLVQLLPFGHPGEAARARFSDQSRREIEAVRDFVLLHYHLNQRPEPFWQERRETPPPDTLAERIALFAEGGHAYQSADDLFRVGSWLQVMLGQRLEPHGHHPLAKLMPPGQLAAVLGDLRSNIAAAVATLPTHQQFLDRYCRSES

SEQ ID NO: 87253 - protein, 501 aa, Sphingomonas sp.
  REGION 1..501: note = tr|A0A396RQL3|A0A396RQL3_9SPHN Tryptophan 7-halogenase OS=Sphingomonas sp. ZDH117 OX=2305907; GN = D1610_08940 PE=4 SV=1
MRQSAIQSVAIIGGGTAGWMTAAALAHKLAGLPISVTLVESEEIGTVGVGEATVPHIRHFNASLGFDEADFMARTNATFKLGIEFRNWGRIGDSYIHPFGAFGRDIDGVPFHHLWARLRRDGAAPAFDSFSLPVQAARMGRFAHPADDPASPFSTYSYAYQFDAGLYAAYLRAFAEARGTRRIEGKVVDTALDAQTGFIEAVTLDGGKRIAADLFIDCSGFRGLLIEQALKAGYQEWTHWLPCDRAIAVPCANAGPIAPLTRSTALDAGWAWRIPLRHRAGNGHVYSSAFIDDDRAEQAVLAQLEAPPLADSRRLRFTTGKRRRQWIGNCVAIGLSSGFLEPLESTSIHLIQLAITHLIELFPTTDWDPMDAAEFNRVMALEYERVRDFLILHYHATERDDTPFWTHCRTMEIPDSLAHKLALFRERGVVVNYREGMFLEPSWLAVYLGQRVIPRRGDPLAERGDSAELEARAVAMAADYRRAAERLPLHQSLLANVAAAA

SEQ ID NO: 87254 - protein, 503 aa, Sphingomonas sp.
  REGION 1..503: note = tr|A0A0Q4DUG1|A0A0Q4DUG1_9SPHN Tryptophan halogenase; OS = Sphingomonas sp. Leaf10 OX=1735676 GN=ASE59_00285 PE=4; SV = 1
MSEANIRSIVIVGGGTAGWMAAAALSHMLAGSGMTIRVVESEAIGTVGVGEATIPHIQYFNRLLGIDEDDFVRRTCATFKLGIEFVDWGQVGERYIHPFGTYGQEMEGIHFHHFWYRHAQAGRALPLDRYSIGVGAARAGKFMRPDPSRRGSPLAGISYAFQFDAALYAKYLRERAEAAGVVRTEGRIVDVALNGGNGHVDHVVLDDGSNVAGDLFIDCSGFRGLLIEGALKAGYDDWREWLPCDRAVARPCARVGDPTPYTRATATSVGWRWRIPLQSRTGNGHVYCSDYVDDDTALAMLDEGLDGAPLAGPNFLRFTAGVRRKAWDRNVVALGLAAGFLEPLESTSIHLIQTGIARLLTNFPDRSFNQPDIDYYNRRTRQEYEQVRDFLILHYKTTARDDSPFWRRCRDMAIPASLEERIAIFRENARLYRHDNELFSETSWLAVLHGQNIHPKRHHPIADILTEEELDRRMTHIAGAMDAGVRAMPGHMAFIDRFCRSPS

SEQ ID NO: 87255 - protein, 508 aa, Sphingomonas sp.
  REGION 1..508: note = tr|A0A396RWU2|A0A396RWU2_9SPHN Tryptophan 7-halogenase OS=Sphingomonas sp. ZDH117 OX=2305907; GN = D1610_02045 PE=4 SV=1
MKVVIVGGGTAGWMCAAALARLLALPDYDITLIESDEIGTVGVGEATLPHIKTFNDMLGIDEAQFMRETRATFKLGIEFVGWDKPGGRYIHPFGTFGEPWAGVDFQHHWVRASLAGQDVGSLQDYSYAVAACREGAFEFPNQDMKSIRSTYAYAYHFDAGLYADFLRRWTIFRGVKRVEGQVVGIVRNAETGHVESLTLKSGARIAGDLFIDCSGFRALLLGQTMNVAWRDWSEWLPCDRALAVPCERAGALTPYTRSIAQPGGWIWRIPLQHRTGNGHVFSSRFCSKEQAYEALMQSLDGPALAEPRLLRFQAGRRAKAWEGNVVAIGLSSGFLEPLESTSIFLIQAAATDLANLMPVGGVIDPRLAAEFNRLFEIHYDRTRDFLVLHYAANARVGEPLWDHVRTMTLPDSLAHKIALFEESAAAPDYTLGLFSRDSWLAVLVGQGIVPRAYNRLADRIAPPDLEAKLSDLKLRISTNAAAMTPHDEFVASYCSAAADAAGDTVSAA

SEQ ID NO: 87256 - protein, 496 aa, unidentified
  source 1..496: note = Unknown
  REGION 1..496: note = tr|Q1YRF4|Q1YRF4_9GAMM Putative tryptophan halogenase OS=gamma proteobacterium HTCC2207 OX=314287; GN = GB2207_03419 PE=4 SV=1
MTDKNITKVVVVGGGTAGWMAAASLSKLIGPNIRVCVVESDEIGTVGVGEATIPTMMTLHQLLKIDQPEFMAAVQGTFKLGINFENWNKLGDSYMHAFGRTGQDCWAGGFQHFWTRGKELGISEGYGRYSASYVAAKAGKFAVLPDHSLSYAFHMNATLYAKFLRNMAEKHGCERVEGKITQVNTHSDSGYIDSITLESGQKIEGDLFVDCSGFRGLLIDETLQTEYEDWSNWLPCDSAVAVQTESVGEPIPYTRAIARDAGWQWRIPLQSRVGNGMVFCSKYLSDDEAVDSLLKNVEGTPLTKPRIIKFRTGQRKQHWNKNCIALGLASGFVEPLESTSIHLIQRGIIRLLQMFPHQGICQPDVVEFNRQMSDEFVFVRDFIVMHYHLTERDDTPFWRHCQSMPIPDGLRHRLDLFKQTGRVFQEAGDVFAENNWVQVMLGQGLLPEQYHPIVDSMSEAELDNFLKGLAGNIDHLVNQLPSHQSFVSNYCPADSV

SEQ ID NO: 87257 - protein, 504 aa, Pseudoalteromonas byunsanensis
  REGION 1..504: note = tr|A0A1S1N947|A0A1S1N947_9GAMM Tryptophan halogenase; OS = Pseudoalteromonas byunsanensis OX=327939 GN=BIW53_08680; PE = 4 SV=1
MQITQDPIKKFVIVGGGTAGWLAGATLGNIFKHSDVEVELIESEDVNIIGVGEATIPPLIDTLESLGIDLSEFISATQASFKWGIKFENWYQEGHSYFHPFGELGKRIDGHEFYQCWLKLKAHGDNTPLMAYSPEAVLAENMRFFVPHQAMNTPLSGARFALHLDAVLAGKYLRNFAQSIGVKRTVGHVELVDKTLDGNIASVTLSSGHTIAGDFFIDCSGFNSLLIGNALNTDYQDWSEYLPCNRAVVVQTTLSEDIAPYTISRAQEAGWSWHIPLQHRMGNGYVYCDKYISDEQATATLMKNISGKALTPPRVIPFRTGLREQVWHKNCLALGLAQGFLEPLESTAIHLVSKSLALFVRMFPTKQHNAILQAEFNRRIHQDYVEIRDFLVLHYCTTKRSDSPFWQDWQHRPIPQTLQQRINFFAQQGGLLRETEALFQATSWYAVLDGMKVNPLSYNPTLDALDAKTLHKSLNMGRTALEQCVLKQPSHLQFLQQYCPAENP

SEQ ID NO: 87258 - protein, 504 aa, Sphingomonas sp.
  REGION 1..504: note = tr|A0A0Q4DI70|A0A0Q4DI70_9SPHN Tryptophan halogenase; OS = Sphingomonas sp. Leaf10 OX=1735676 GN=ASE59_00280 PE=4; SV = 1
MSAPLLRRIVIVGGGSAGWMTAAALSSLLDPKDVAIRLVESDAIGTVGVGEATIPDILAFNQMLGVNEAEFMAATQATFKLGIEFVDWGAKGDRYVHPFGQHGVDMQGIDFHQYWLRAREHGAPQPIEEYSLCAVAARAGRFALPDPNPRAVLSHIRYAYHFDATLYARFLRRYAEKRGVVRVEGIVGAVGQGADGAITGLTLSDGRVVEGDFFFDCTGFRALLAGETLGSGFVDWSHWLPCDTALAVPSEHAGPPTPYTRATARDAGWQWRIPTQRRVGNGHIFSSAFTTEEAASATLLANLDAPALADPRRIRFRAGCRETFWSGNCIAIGLAAGFLEPLESTSIYLIQEGISRFISLFPRGDIPDILRTEYNRHMRTEFEQVRDFIILHYAATTRDDTPFWNHCRTMTLPDTLLHKIDLFRETGRVFRYNDELFTRPSWVAVMLGQGIVPNSSDPIVATLPEADVTRSLASMRDAMAAAVARMPTHGDFLARYCPAQAMAA

SEQ ID NO: 87259 - protein, 512 aa, Sphingomonas sp.
  REGION 1..512: note = tr|A0A396RZ84|A0A396RZ84_9SPHN Tryptophan 7-halogenase OS=Sphingomonas sp. ZDH117 OX=2305907; GN = D1610_02675 PE=4 SV=1
MRKDRRVSERESPTIVIAGGGTAGWMAAAAFARFLAPRWRIRLVESEAIGTVGVGEATIPPIRAFNAGLGIDEAEFVRETQGSFKLGIEFAGWNGPDSRYIHAFGGIGRPLGLIGFLPYWLRHRAEGGTRGLWDFAPGAVAAYQNRFGHPQQRAGGPPSGIAWAYHFDASLYAAYLRRYAEARGVERHEGRILDVARDGESGDISALILDGERMIEGDLFVDCTGFAALLAGKALGTPYRDWTHWLPCDRALAAPCARTDPLTPYTRATARAAGWQWRIPLQHRTGNGLVYSSAHIADDAAADMLLANLDGEALGDPRPLRFTTGRREQAWTRNCVSLGLAGGFLEPLESTSIHLVQIGIAELLKFLPGRAIAEADRAAYNRRIAFETDRIRDFIVLHYHANGREGDFWRDCRAMAIPDTLAEKIALFRANGRIVRVDEELFTEVGWMQVMLGQGMEPLGYHPLADALTADQLAEFIALAAADAGRQAAALPLHQDFIAARCAAPSPERIPA

SEQ ID NO: 87260 - protein, 503 aa, unidentified
  source 1..503: note = Gammaproteobacteria bacterium
  REGION 1..503: note = tr|A0A2N1XGS8|A0A2N1XGS8_9GAMM Tryptophan halogenase; OS = Gammaproteobacteria bacterium HGW-Gammaproteobacteria-4; OX = 2013800 GN=CVV14_05305 PE=4 SV=1
MDKADRAIRRIVIVGGGTAGWMTAASLANTLGTNCRIDLIESDAIGIVGVGEATIPPIKLFNHALGIDENAFLKASKGTFKLGIEFVDWTRLGQRYFHPFGQFGAEFDAVPLYQYWLRERARGDDTPLQDYAMAWVAARNNKFAPPLTDRQRIQSTYDYAYHFDAGLYAQFLRSYAEPRGVRRTEGKVVDVSLRAEDGFIERVKLDDGTVIEGDLFIDCSGFRGLLIEDALHAGYENWQHWLPCDRAVAVGSAHGDGALTPYTRSTAHQAGWQWRIPLQHRMGNGHVYCSQFSSDDEATTVLLANLEGEPLGTPRPLRFTTGRRKAFWSRNCIAIGLSAGFMEPLESTSIHLIQSAITRLLALFPDRHCEPLLAQEYNRITGQEYERVRDFLILHYKAIKRDDAPLWRYTAAMEIPATLQYKIDQFRSSGRIVAEALELFQNPNWLAVLIGQEVWPQHYSALVDLRSTVDAPRLLASLRRVSEEAGAALPDHAHYIARHCRAG

SEQ ID NO: 87261 - protein, 506 aa, Pseudoalteromonas spongiae
  REGION 1..506: note = tr|A0A290T884|A0A290T884_9GAMM Uncharacterized protein OS=Pseudoalteromonas spongiae UST010723-006; OX = 1117319 GN=PSPO_b0274 PE=4 SV=1
MAQAVKKIVIVGGGTTGWMAAASLSRYIQDKDMSLTLIESPNINTVGVGEATIPNFVDFNRNLGINDAELIKATQATFKLGIEFEEWSQKGERFFHPFAAYGAPIENLDFHQYINKLNAEGKQLDIEDYSFPIQLAKKGGFAQPNPNQNNPLAQYSYAYHIDAVLYAKFLTEFCSKRGVNHILANVSEVKLNADNGFIQALTLDNGTYIEGDLFIDCSGFKGVLIEGAMGIGLDDLSHLLPCDSAVAVQTELVGEPTPYTRAIAKEAGWQWCIPLQHRMGNGYIYSSKFTTDEEAKQSLLDSVKGRTITDVKTFKFPLGRRKVSWHKNCFALGLAAGFLEPLESLGISLIQTALAKLMTFFPDMSFNQADIDEVNRLHNDELDRIVDFLLVHYKLTQRTDTAFWRYCQEMPIPKTLEHKIAMYKNRGHVVMYDNESFQQASWLSMFYGFNVTPSRYDVRLDHFNSSAIAENLAQMKAQIAMAANNCLSHQAFIDKHCKANNDVKNR

SEQ ID NO: 87262 - protein, 507 aa, Rhodanobacter sp.
  REGION 1..507: note = tr|A0A1V3PFT5|A0A1V3PFT5_9GAMM Tryptophan halogenase; OS = Rhodanobacter sp. C06 OX=1945854 GN=B0E52_04780 PE=4; SV = 1
MTDLRIKHIVIAGGGTAGWMAAAAFAKVLGGDCSIRLVESEEIGTVRVGEGTVPHLKLFNDLLGIDDVEFIRNTSGTFKLGVQFNDWARLGDSYIHGFGSIGHDISLLPFHQFWIKARQRGVAEDIGAYSINTVAAPRGKFMPSATDVPKDSPLANIAYAYHFDAGLYARFLRRYAEQRGVRRSEGKIARVELRPDDGFVAALHLESGERIEGDLFIDCSGFRGLLIEQALHTGFDDCSHWLPCDRAIAVGCERTSPPTPYTRATARPAGWQWRIPLQHRTGNGHVYCSTHMSDDEATALLLANLDGAPLGEPHRLRFTTGMRKQAWNRNVVALGLAAGFLEPLESTSIYMIQSGIARLLEMFPQRDFSPVLVDRYNARSRFEYERIRDFLILHYHATERDDTPFWNYCRTMSIPVQLDEYIRLFRDSGRFYRDGEEMFSTPSWVQVMLGQRIMPRGYHPLVDQMPERDLAGFMASVGQVVNTCVEAMPMHQAFIDRVCPAPAKEMA

SEQ ID NO: 87263 - protein, 500 aa, Sphingomonas sp.
  REGION 1..500: note = tr|A0A0Q4D7Y9|A0A0Q4D7Y9_9SPHN Tryptophan halogenase; OS = Sphingomonas sp. Leaf10 OX=1735676 GN=ASE59_05735 PE=4; SV = 1
MPHEPVRSIVIVGGGTAGWMAATYLARRLAHLKLSITVVDSAAIGTVGVGEATVPAIRDFLSAIELGEPDVLRETGGTIKYGIRFDGWGGDGHRFFHPFGLYGVGAQGVAFHHYWLKLNAIGRAGPLADYCLATQLARGGLFLPPAERPANDLGVFNFALHFDAAKFAALLRRLALANHVTHVDGRIVDVATDPARGHVTQVELDDGRAIAGDLWIDASGFRSLLLGEALGVPYVDWSHWLPCDRAVAIPCRAGPGDPTPYTVATARPAGWQWRIPLRHRIGNGSVYCSAFQSDADAEDALLASLEGAPLADPNRLRFVTGHRTRFWSGNVVGLGLASGFLEPLESTSISLIQSGLERFVALFPDRTCDPRLAATYNRQSVLEFERLRDFLFLHYLANGRDEPFWQSIRAVEPPEPLQIKLDAWRSGGEFVRNEWDTFQDPSWLSLYAGFGDLPLRHSPLADAIGEDDLADSFDRMRAAIARTLAHAEPHGRFLARVAGA

SEQ ID NO: 87264 - protein, 507 aa, Pseudoalteromonas spongiae
  REGION 1..507: note = tr|A0A290TBF0|A0A290TBF0_9GAMM Uncharacterized protein OS=Pseudoalteromonas spongiae UST010723-006; OX = 1117319 GN=PSPO_b1268 PE=4 SV=1
MQLTHNPIEKFVIVGGGTAGWLAAATLGNIFKDSNTQVELIESDEVNIIGVGEATIPPLIDTLESLGIDLVEFIKATQASFKWGIQFENWYQESHSYFHPFGEVGQKIDGHEFYQCWLKQKAEGDTTPLMAYSPEAVLSEKNRFFVPHQAMNTPLAGARFALHLDAVLAGQYLRKFSENIGVKRTVGHVESISKSIDGNIASVTLKSGETIKGDFFIDCTGFKGLLIGNALNTEYQDWSEHLPCNRAVAVQTKLTGNTKPYTVSRGQKAGWSWHIPLQHRTGNGYVYCDKYISDEEAIQTLLDNVDGEPLTEPRVIPFVTGVRDKVWNKNCLSLGLAQGFLEPLESTAIHLVSKSLALFVRMFPTKTPNAVLQNEFNRRISGDYQEIRDFLVLHYCTTKRDDSAFWRDWQQKQIPASLATRIEFFKQSGGLIPGVEELFQPTSWYAVFDGMGVVPNGYNPTLDALNSEMLAKSLAAGRNALEKCAEAQPSHDDFLQKYSPANEAIFN

SEQ ID NO: 87265 - protein, 503 aa, Sphingomonas sp.
  REGION 1..503: note = tr|A0A1S6FN61|A0A1S6FN61_9SPHN Tryptophan halogenase; OS = Sphingomonas sp. LM7 OX=1938607 GN=BXU08_16210 PE=4 SV=1
MAFEQPYRIVVAGGGTAGWMTAAALVRFLGPGFSIVLVESEAIGTVGVGEATIPQIRLFNAGLGIDENAFIAATQASFKLGIEFVGWTKGGRYMHAFGDVGRDNGGVAFQHSWLRGLAEGVAEPLAAYSLNNAAALSNRMQRGPARTAQMLPEMPYAFHFDAGLYARFLRNYAEARGVTRHEGKIVEVLRGGESGDVTALRLDGDRSIEGDLFIDCTGFRGLLIAETLGVEFEDWSHWLPCDRALAVPSARARDFTPYTRATAHSAGWQWRIPLQHRTGNGIVYSSAHLSDDEAASRLLANLDEPALAEPRALRFTAGKRKAFWQANVIAVGLASGFLEPLESTSIHLIQSAIERILKLLPGRRISDAQRAEYDRQTNLELDRIRDFLILHYWANDRDEPFWHARRETPLPEGLAHKIELWRACGQIVREDADLFSEVAWLQVLAGQGIAAEGYHPLADQPASGQIAEYLDLLAKLTAREVAQMPDHAAFIRQHCAAREDIAA

SEQ ID NO: 87266 - protein, 439 aa, unidentified
  source 1..439: note = Burkholderia novacaledonica
  REGION 1..439: note = tr|A0A2U3I167|A0A2U3I167_9BURK Tryptophan halogenase; OS = Burkholderia novacaledonica OX=1544861 GN=NOV72_01110; PE = 4 SV=1
MSEATQTWDVAVIGGGPAGSTAATLLADRGYRVRVLEKARHPRFHIGESLLPANLRLFERLGVADEVRAIGMVKLAAEFVSPQHGDRMQRFLFADAWDKSMPSAYQVRRSELDEILLRNAAKHGAHVSEGCCARDVAFAPDGSGATIDAEHDDGRIEAVRARFVVDASGRDTLLANRFKTKRRNERHNSSALYGHFRNARRNDGQNEGNITVFWFEHGWFWFIPLADGATSIGAVVWPAYLKRRPKGTSVETFFRDTIALCAPLAERLEEAELISEVHATGNYSYTGDMTHGRNFLLLGDAFAFIDPVFSSGVMLAMQSAFAGAEAIDAALCNPADAPAALAKFDRDVRHGPREFSWFIYRMTSPTMRNLFMGPRNPLRMKEALLSLLAGDIFGSTPIWHSLRAFKGVYYVSAALDWRNSLKAYRMRKRNLSDAEPSAN

SEQ ID NO: 87267 - protein, 509 aa, Sphingomonas sp.
  REGION 1..509: note = tr|A0A1S6FQ57|A0A1S6FQ57_9SPHN Tryptophan halogenase; OS = Sphingomonas sp. LM7 OX=1938607 GN=BXU08_08540 PE=4 SV=1
MDGAAERAIERIVIVGGGTAGWMAAAALSAHLSGTDVAITLVESSEIGTVGVGEATIPTIRRFYGALGMSDAEVMQACDATAKLGICFVDWLRDGHSFVHPFGRFGQDLKGIDFHHYWLKARAAGDRAQLGNYSLGSLLASEGHATLPAPDPGSQLGIFDWALHFDAALFAQHMRRFAEKMGVQRVDARITDVALRGADGFVEALTLDSGARIEGDLFIDCSGFRSLLLGEKLGVSYEDWSHWLLCDGALAVQSERAGLPPSCTTVTARTAGWQWRIPLRKREGNGLVFSSRFQSDDQAREELLAHLLGEPTMEPRKLRFTPGRRQVAWAKNCVALGLASGFLEPLESTSIALIETGIERLKSLFPDKDFDPTVIAEYNEQSAEEMERVRDFLVLHYKLNGRTGAFWQACRDMDVPDSLNAKLALWRARGAFVRYRWEMFSPASWLAIYAGFEDLPTRLDPAVAAVDNAQLTRSLETMRRSLRDTVADTPTHEEFLEIMDGAAAQGRAA

SEQ ID NO: 87268 - protein, 510 aa, Pseudoxanthomonas spadix
  REGION 1..510: note = tr|A0A3M6Q3T0|A0A3M6Q3T0_9GAMM Tryptophan 7-halogenase OS=Pseudoxanthomonas spadix OX=415229; GN = D9R12_02825 PE=4 SV=1
MSVSSIRSIVIVGGGTAGWMAAAALARVLGPTYKVTLVESEQIGTVGVGEATVPHIKAFNNLLGLNEAEFVRQTQGTFKLGIEFVDWRRKGASYLHGFGTEIGHRLGLLPFHQYWIKAHRAGWAKPLGAYTLNTVAAPMNRFMTSARDVPAQSPLANIAYAYHFDAALYARLLRTYSEQRGVRRIEGIVEQVIQHPESGDVQSLRLQDGTVIAGDLFIDCSGFRGLLIEQTLHTGYHDYTHWLPCDRALAVPCEKVGPPTPYTRATARQAGWQWRIPLQHRTGNGYVYSSAHISEDQAAATLLANLDGKALGDPRPLRFTTGRRKLCWNKNVVALGLASGFMEPLESTSIHLIQSGISKLLELFPREGISQVLVQRYNDRLAFEFERIRDFLVLHYHATEREDTGFWRQCRDMAIPAELQSTLELFGDSGRFYRNGEEMFAEISWVQVMVGQGIMPASYHPLVDQVPEADLKAFLASVEKTIDHCAQAMPGHQQFIDRYCAAPPLGTAAA

SEQ ID NO: 87269 - protein, 496 aa, Cyclobacterium amurskyense
  REGION 1..496: note = tr|A0A0H4PDU7|A0A0H4PDU7_9BACT Uncharacterized protein OS=Cyclobacterium amurskyense OX=320787; GN = CA2015_3234 PE=4 SV=1
MQDFKDVRDIGVIGGGTAGYFTALYLKKKFGDKNITVIESSKIPIIGVGEASTPLLLKFIHSILGFSVHEFFNATKPTLKLGVKFNWGRKEDKHYLNPFGRMDTIASLRYKQSLDYTSLTTRMMAADKAPFISRNGEVLPIKVKSGMAYHIDNELLVKYLKEKIQLAKINHIDAKIEKTFLKKNNSDIDYLQTDQQKELKFDMYFDCTGFSSYLLGKALKSNWVDYGDSLMTNSAILGKASHTNGIKPYTTASTLNHGWLWETPTQRENHLGYVYSDKFCSAEEARSELRKYCPEINDEKVIRFKSGRYEKSWSGNTIAIGNAFAFVEPLESTGLHMIILQLEKFEKYLKNEKNLEAAQARYNSKINRSWDYIKWFIALHFKYNEKKDTPFWKMVREHTDLSGIQDYLNYYKKNGPVFFNENNVLNQQLKNTIFGTFSFDLVMLGSGFGWEHIVDNQPQISAAEKIITFNEKVVANALSHEESLIYLENNLSFCFR

SEQ ID NO: 87270 - protein, 504 aa, Sphingomonas sp.
  REGION 1..504: note = tr|A0A0Q4DVY3|A0A0Q4DVY3_9SPHN Tryptophan halogenase; OS = Sphingomonas sp. Leaf10 OX=1735676 GN=ASE59_03580 PE=4; SV = 1
MAIDQNPVRSVAIVGGGSAGWMTAAALARFLPVDTRVTLIESEAIGTVGVGEATIPQLRLFNQRLGIDEDEFVARTGGSFKLGIEFAGWTGADGRYLHAFGTIGRSLGLVPFHHYWLAAGGGDAPASLWSHSVCAEAAAADRFDRDPGNPQAPSGVAWAYHFDAARYAAYLRERAEAGGVTRVEGRVVAVDLNDAGIDTVTLDDGRLIAADFFIDCSGFAALLIGRLAGDRWDDWSQLLPCDRALAVPCAGTQPITPYTRATARAAGWQWRIPLQARTGNGLVYSSAYLSDDAAAATLLGNLDGTPLADPKALRFTTGRRHAPWIGNCVALGLAAGFLEPLESTSIHLVQSGIARLLSLWPAARPRPADIAEFNRQSAREWLGVRDFLIAHYALNGRDEPFWQERRATPLPDSLAERIALFRESGRIVRDEHELFAEVAWLQLLVGQGVRAEGYHPLADALPADRRTQFLDMSSKHVAATVARMPTHDQFLRAHCPAPDAKVAA

SEQ ID NO: 87271 - protein, 497 aa, Pseudoalteromonas byunsanensis
  REGION 1..497: note = tr|A0A1S1N592|A0A1S1N592_9GAMM Tryptophan halogenase; OS = Pseudoalteromonas byunsanensis OX=327939 GN=BIW53_12410; PE = 4 SV=1
MSTQQIKNVVVVGGGTAGWLSASFLAKVMGKLINITVLESADISTVGVGEATIPPLQPFNSALGINEAEFMKATKATIKLGIQFEGWGTKDSSYMHAFGAIGKDFPFCEFHNHWLYAQHQGIGGDFWDYSLNYQAAKHHKFSKLNTIPGTKLPGTSYAYHFDAGLYANFLASHAQKMGVCHIQGTVEQVIKDEVSGNIAALKLVNGQQVQGDLFIDCTGMHALLIDKALNSGFEDWSHWLPCDSALAVPCEHANTEIAPYTRSIAHEAGWQWQIPLQHRVGNGLVYASKHMSDEQAKEKLLSNLPGKALAEPKLIRFRTGRRITPWHKNVVAIGLSSGFLEPLESTSIHLIQTAIVRLVKLFPHNGIEACQVALYNQQSKTEFERIRDFIILHYKLNDRNDSDFWRQCQDMEIPASLKQKITLFKETGKLLREDDELFAEVAWQQVFIGQGLKPKQLHPLLHALSDQQRQELFTSLRTLIEQTVAAMPTHKQFLADN

SEQ ID NO: 87272 - protein, 510 aa, Microbulbifer thermotolerans
  REGION 1..510: note = tr|A0A1I1P3P9|A0A1I1P3P9_9GAMM Tryptophan halogenase; OS = Microbulbifer thermotolerans OX=252514; GN = SAMN05660479_03020 PE=4 SV=1
MKDKFDLDDRIRHIVVVGGGSTGWIAAAVLAHQFKPDVCKVTLVESEDIGTIGVGESTIPPFIGLLRGLGIDEADFIQKTQASFKLGIQFHDWLEKGQSYFHPFGVLGQRLGIIEFYQAWLWAQLNGHSSELQDHAPCAVMAREGRFYLPQKAQKTPIGGASYALHLDAKLAGRYLRNYAEARGVERVEGRVVEVFSHDNGFIDKVRLTDGREISGDFFIDCSGFRALLIEQQLGVEFEDWKDFLPCNKAVAVQTENTGATTPYTQASAESAGWRWRIPLQHRTGNGYVFDTRFISDDEARARLLEAVDGKPITEPALIPFRTGIRTELWKHNCLSLGLASGFIEPLESTAIHLVTRGMDFFLRFFPGKSCDTELAAEYNRRMRLDYEEIRDFVVLHYCLTRRRDTPFWRWWQEEAEIPQTLRERIALFRCQGALREGIDELFHSPSWFSVFEGMGVRPRRYDARLDNLPAAQIIQHQETARAAIAQMVDTLPSHDDFLREHCPAVTINN

SEQ ID NO: 87273 - protein, 500 aa, Teredinibacter turnerae
  REGION 1..500: note = tr|C5BR00|C5BR00_TERTT Tryptophan halogenase PrnA; OS = Teredinibacter turnerae (strain ATCC 39867 / T7901); OX = 377629 GN=TERTU_1076 PE=4 SV=1
MKNKFIQHIVVVGGGTAGWIAAASLAKILHNRGVRITLVESPEINIIGVGESTLPQVMQFLRNLGIDEKEFMAATQATYKLGTKFFDWSEVGEAFWHPFGNIGVDIDGHNFFAFLQKARKQGDPAQMWQYAPSAVLGEAGRYYSPGAATPESFLSGVNYALHFDAVKVAKYLKRFSEALGIQHVMETVVDASLHDNGFIDSLTLKDGRRLAGDFYIDCTGTNALLIGGVLNTQYINWNNYLLCDSAVIVQSDNSCDIPPYTKAIAHENGWRWEIPLRHRLGNGYVYSSEFCTPSQAENKLLELVQNPALDSLRHFQFQAGRREKLWNKNCLALGFAGGFLEPLESTAIYLSLKGIESFLELYPDNQCSLAIANEFNRRMAIEYENIRDFIILHYCISGRSDSPFWQKNKTMDVPRALLEKIALYQAQGRIYRNDLDLFKSSSWHAIFDGMGIVPDFYNPLIEGSNFKEVLNILSEVRGLMSKMAAGLPAHKEYLDKHCPV

SEQ ID NO: 87274 - protein, 496 aa, Sphingomonas sp.
  REGION 1..496: note = tr|A0A0Q4D4R2|A0A0Q4D4R2_9SPHN Tryptophan halogenase; OS = Sphingomonas sp. Leaf10 OX=1735676 GN=ASE59_05815 PE=4; SV = 1
MDSGEKRKVRVVIVGGGTAGWMTAAGLAGLLPAACEVTLIESEAIGIVGVGEATLPHLRLYLERLGIDEAEFMAATEATYKLGIEFRDFARIGDRYIHPFGTYGRPLSGVAFHHYWLRRAQAGAVPPIGAFSAGVVAAERRRFERPGSDPSDPTTSFGYAYQFDATRFAPFLRDWSEARGVTRIEGRIVSADRQGDTVTAVTLDDGRRVEGDLFVDCSGFRSLLLGEALAEPWEDWSHWLPCDRAVAVPCTSPPDTIEPFTRATAMSAGWRWRIPLRHRVGNGYVYASGHISDDEAAAALLAALNGQPLADPRMLRFRAGRRRRSWAGNVVAVGLASGFLEPLESTSIYLVQAAITSLIEHFPDSRVADADRDGFNAAIDAEYDRIRDFLILHYHATERTDSTFWNHVRTMTVPDTLADKLALWRSSAQVAKYGHGLFLEPSWVAVYLGQRVLPTGWDPRADRPDAAGLDRALGSLAQAIADRVDAMPSHDRALGL

SEQ ID NO: 87275 - protein, 507 aa, Teredinibacter turnerae
  REGION 1..507: note = tr|C5BT78|C5BT78_TERTT Tryptophan halogenase; OS = Teredinibacter turnerae (strain ATCC 39867 / T7901); OX = 377629 GN=TERTU_1501 PE=4 SV=1
MNTKIKHFAIVGGGTAGWSAAAMLARRFAGQSIAITLVESPEHATIGVGEATVPAITQVHKQLGIDEQAMLVATDATFKLGIEFRDWRVPGEKFFHPFSDFGVPIEGKAFYHAWLCMQQEAKLESHTGNPLEHYSLCASLAQAGKFSLPNNHASTPLAWYGYAYHFDGAKYANFLRDYAQQLGVAYTKGTVSAFVKNPTSGNIDCLVLSDGAQLKADFFIDCTGFKSRLLAQEYGEPFCDWSHWLPCNKAVVVQTAANPTPPPYTISTALDSGWAWSIPLKSRTGNGYVFSDNHITEDQAASQLLRHVTGKPINDPRVITFRAGMRENFWVKNCAAVGLASGFIEPLESTSISMIHTAIGKIIEHLPNGCLDPKATEHANHLNRLEYERIRDFILLHYWLSDRTGSNFWKQFNELSLPDTLQYKIDQWLTNAQLVILEQESFQAQSWLAMYSGFKRYPLSYAIDAPMSTTVRDVSAKMRAAIVKGVSHAPYHHEFLSTLYETDAATQ

SEQ ID NO: 87276 - protein, 497 aa, Ferrimonas marina
  REGION 1..497: note = tr|A0A1M5VHV0|A0A1M5VHV0_9GAMM Tryptophan halogenase; OS = Ferrimonas marina OX=299255 GN=SAMN02745129_2785 PE=4; SV = 1
MKPMERVVILGGGSAGWMAAAMLARMLGPSLVITLVESEQIGTVGVGEAAIPPLQLFNQALGLSEAEFMSATAASIKLGIQFEGWGGAGERYMHAFGQVGKDLGLTPFHHYWLQAGEETERFWDYSLNEQAARAGRVLLPSPPQGKMLGGLVHAYHFDAHRYAQTLRRYSERLGVRRVAGEVVRVPLCPDSGQIQALELADGQRIEGELFIDCSGFAGRLIEQALGSGFEDWGHWLPCDRAWAVPCEGAESIAPYTRSIAREAGWQWQIPLQHRIGNGLVFSSRFQDEQSAKESLLANLPGKPLAEPKLLRFRTGRRRQPWLRNCVALGLASGFLEPLESTSIHLVQSGIMRLLKLFPNHGPMDSLAAEYNRQSQREFEQVRDFLILHYHLNRRDEPLWQHCRSMSLPDSLSHKLVLFAEQGRVLRDSDELFTEVAWVQVMLGQGLRPQQAHPLAAALSPAERRDYLGHLRTIVMGTLQGMPSHRAFLQRYCPQAKE

SEQ ID NO: 87277 - protein, 512 aa, Ferrimonas marina
  REGION 1..512: note = tr|A0A1M5YD02|A0A1M5YD02_9GAMM Tryptophan halogenase; OS = Ferrimonas marina OX=299255 GN=SAMN02745129_4085 PE=4; SV = 1
MTGNGQIREIVIVGGGTAGWLAACHMARKHGDSGLRVTLVESPDIATIGVGEGTVPAMRQTLHYLGIRETDFIRRCDATLKQGIRFVDWRHAPNGTQRHHYYHPFDYPAIDGIDPTPYWLLSGQPGRYADAVGVQAQLCDAGLGPKTLVDAEFTGPAAYAYHLDAAKFAALLTEHATERLGVVHRKAEVLQVELGQNGQIAALHCSDGKLKGDLFVDCTGFAGRLIEGSLNVPWRDRSDTLFVDTALAIQVPYDDPEAPIACQTISTAMPAGWIWDIGLTGRRGIGHVYASSYIHCDQAEQQLRDYIGPAADGLDCRRIPMKVGYREQAWKGNCVAIGLSGGFVEPLEATGILLFDLLSRMLAEQLPGHQDELGAVANRFNRRVNHTWERVIDFIKLHYAVSERDDSAFWRDNRDPQSWSQTLQENLAHWRHALPSRYDFASTMEVFNLENYLYVLYGMGYDTQLLAERFPHAEQARQRAEAIARRHSQLKSQLLGHRQLISRIQQHGLQKV

SEQ ID NO: 87278 - protein, 502 aa, Hirschia baltica
  REGION 1..502: note = tr|C6XNJ5|C6XNJ5_HIRBI Tryptophan halogenase; OS = Hirschia baltica (strain ATCC 49814 / DSM 5838 / IFAM 1418) OX=582402 GN=Hbal_2461 PE=4 SV=1
MSNTQIQKIVIVGGGTAGWISAAALAKLLPPSISVTLIESDSIATVGVGEATIPQIRRLNGMLGLNENTFLKATKGTIKLGIEFSNWGKIGESYLHTFGDVGLNLSNLQFHHYWKRAQEEGKQSSLWDYSLHHKVAYSNKFDRLERIGKTGMTGLSYAFHFDAGLYARFLRNFAETSGVTRIEGFVKQTVLNPHTGFIDHVKLENGTQIEGDLFIDCSGFRGLLIDKALGVSYQDWTHWLPCNRAIAVPSQSTRPLVPYTKSIAHTAGWQWCIPLQHRTGNGHVYSDQFMQDETALEVLLSNLDSTPIAEPNHIRFTTGRREKFWHKNCISIGLSSGFLEPLESTSIHLIQSNISRLIELLPTKKMEPANSNEYNRQVSKEYELIRDFIILHYHCTQREDSDFWRYCKNMDIPDSLKQKLELFSATGRIHKEPEDLFREASWVQVMIGQGLIPQSYHAMADRLSTDQLEKFLADIDAIIAQAEAQLPSHEDFLTRNCQLDLQ

SEQ ID NO: 87279 - protein, 502 aa, Hirschia baltica
  REGION 1..502: note = tr|C6XNJ6|C6XNJ6_HIRBI Tryptophan halogenase; OS = Hirschia baltica (strain ATCC 49814 / DSM 5838 / IFAM 1418) OX=582402 GN=Hbal_2462 PE=4 SV=1
MNAAPIKTIAIIGGGSAGWMAAAALSNALQKSCQIKLVESEEIGTVGVGEATIPPVKYFNAQLGIDEASFMRETNATFKLGIEFIDWARKNQSYFHPFGQYGAEFDQTPFYQYWMREAIRGNISQSIDIFSMAWKMSEAGKFQHPEKDKRKIQSTFDYAYHFDANLYARFLRKYSELRGVERLEGKVVNVELRAETGDIEKVLLQSGETIEADLYIDCTGFYGVLIEKALQTGYEDWSRWLPCDRAVAAACNAAEGPLLAYTKSTAKAAGWQWRIPLQHRVGNGYVYSSQHLDPHLAEDELMKSIEGDALVGARHLRFVTGRRKKFWNKNCVAIGLSAGFMEPLESTSLHLIQYGIMRLLALFPNADMSPLLADEYNALTSAEYERIRDFLILHYKATERDDTSFWQYCANMPIPDRLAYKMDQFRENGILVSDERELFHNPSWIAVYLGQGIKPKRAPALTSYRMQVPVSERFSQVQAAMQSALKVMPDHRTYVENYCKSN

SEQ ID NO: 87280 - protein, 496 aa, Pelomonas sp.
  REGION 1..496: note = tr|A0A0Q6W7C2|A0A0Q6W7C2_9BURK Uncharacterized protein OS=Pelomonas sp. Root1237 OX=1736434; GN = ASC91_21405 PE=4 SV=1
MGIRRVVILGGGSAGWMSAAALTTGLRGVAVELVESEEIGIIGVGEATFPSIRSFNDILGIDEAEFLAATRGSYKLGIQFCDWKQRGEHYFHTFGDFGPLDGPMALWGQLRRLQTGPGTPLGEFCLPTVMAHQGRFCRPAEGEDSLASRYTYAYHFDATLYAAFLRRLAEGRGARRTEGRVVGVERHEDGRVRALHLADGREVEGDLFIDCSGLASLLIGQTLEQRFIDYGHWLPVDRAWAVPTERAPGDLAPFTRSTALEAGWAWRIPLHDRTGNGHVFSSRFIDEGRAREQLLAQLDAPMLAEPRLLRFRTGHRERFWVKNVVAIGLAAGFLEPLESTAIYMVHNALGRLIPLLGEADHTQAAVGFNVQQLRQYQRIRDFIILHYALSERRDSEFWRTLTSMELPESLDYKLHAWRETGTLHAYDNEAFDTASWLAIHAGMGDWPRRRSPWPDEMPAELAARYLTERHQAIAALAAGMPDHDSFLRARLSGAAG

SEQ ID NO: 87281 - protein, 503 aa, unidentified
  source 1..503: note = Pararheinheimera mesophila
  REGION 1..503: note = tr|A0A3P3QQA2|A0A3P3QQA2_9GAMM Tryptophan 7-halogenase OS=Pararheinheimera mesophila OX=1547515; GN = EIK76_05065 PE=4 SV=1
MSYAANNSIKKIVIVGGGTAGWMTAAALSNALQQGCHITLIESEQIGTVGVGEATIPPIRLFNQSLGINENDFIRATQGSFKLGIQFINWGRQNHSYFHPFGSYGRQFDLVSLHHHWLAAKAQGKADSLDSYCMAWVVAQQGRFAPPVTDPRHVLSTHDYAYHFDAGLYASYLRQYSEAKGVLRIEGKISAVKQNSISGFIEAVQLDNGQLLEGELFIDCSGFRGLLIEDTLKTGYQDWSHWLPCNRAWAVPSERGEFTPYTKSTAHQAGWQWRIPLQHRTGNGHVFSNHFISEQQAQDVLLQNLGAKALAEPRMLQFVTGRRNLFWHKNVVAIGLASGFLEPLESTSIHLIQAGIAKLLALFPDKDFDPLLTEEYNRVAIREIENIRDFIILHYKLTERNDSEMWRYCAAMPVPDPLTYRIEQFKRQGRLIPGEMDLFGNTSWLAVHIGQLNTPQKTDAVLAYRSIEGAERLAKLSQALQAAALSLPTHQQYIDQHCKAASL

SEQ ID NO: 87282 - protein, 513 aa, unidentified
  source 1..513: note = Youhaiella tibetensis
  REGION 1..513: note = tr|A0A5B9DLC6|A0A5B9DLC6_9RHIZ Tryptophan 7-halogenase OS=Youhaiella tibetensis OX=1447062; GN = FNA67_04460 PE=4 SV=1
MAKPSRFVIVGGGTAGWLAAFIIQDSARRMKLDATISVVESSKIRTVGVGEATTAAFRVFLQHFGIDEFEFFRETEATFKLGIRHQDWRRKGFTYYGPIDDPHQVVQPPQGAPSDYLNVYAVSVGKKVQDMHLFGPLLERRKAPYARKADGSLVRLGPFHHAYHFDQSLVGKYLKRKSNGVEIVDAVVEGVERDGESGDITALKLDSGERLEGDFFIDATGFRKRLIVQELQAPWISYARELPVNRALPFWLDIKEGDEIANYTLAWAQENGWMWQIPTQTRYGCGYVYSDEFTTPEQAKLEVERALGHEIEVRDDIRFSIGRLEKAWMGNCVAVGLSSSFLEPLESTSIHGTIVQMMLFAEHYLKEPGRMTPAERDDYNRRVGRQVDDFRTFVNTHYATERDDTPFWRNVRAERLHPETQERLARWRTEMPRAEHFPNYLGGLPHIETQLHYPVLDGLGLLDPAVARAEMARDPKLRAFAKKTHDELVKEYKQAATRAMGHAEFLQAVRDMA

SEQ ID NO: 87283 - protein, 538 aa, Burkholderia anthina
  REGION 1..538: note = tr|A0A119DKJ9|A0A119DKJ9_9BURK Tryptophan halogenase; OS = Burkholderia anthina OX=179879 GN=WT32_18735 PE=4 SV=1
MSNPIRNIVIVGGGTAGWMSASYLVRALQQQANITLIESAAIPRIGVGEATIPSLQKVFFDFLGIPEREWMPQVNGAFKAAIRFVNWRKSPDGSRSDHFYHLFGNVPNCDGVPLTHYWLRKREQGFQQPMEYACYPQTEALDGKLAPCLADGTRQMSHAWHFDAHLVADFLKRWATERGVKRVVDEVEQVHLDDRGYISRLSTKEGRTLEADLFIDCSGMRGLLINQALKEPFIDMSDHLLCDSAVASAVPADDARDGIEPYTSAIAMNSGWTWKIPMLGRFGSGYVFSSKFTSRDRATADFLGLWGLSDKQPLNQIKFRVGRNRRAWVNNCVSVGLSSCFLEPLESTGIYFIYAALYQLVKHFPDTSFDPRLIDAFNAEIVYMFDDCRDFVQAHYFTTSRDDTPFWRANRHDLRLSDAIKEKVERYKAGLPLTTTSFDDSTYYDTFDYEFKNFWLNGNYYCIFAGLGLLPDRSLPLLRHRPESIDKAEAMFARIRREAERLRTTLPTNHDYLRSLREGDAALSRSEPGPTLATPEIL

SEQ ID NO: 87284 - protein, 496 aa, Pelomonas sp.; identical to SEQ ID NO: 82576
  REGION 1..496: note = tr|A0A0Q8GT15|A0A0Q8GT15_9BURK Tryptophan halogenase; OS = Pelomonas sp. Root662 OX=1736580 GN=ASD88_26150 PE=4; SV = 1

SEQ ID NO: 87285 - protein, 509 aa, Pelomonas sp.
  REGION 1..509: note = tr|A0A0Q6WZF4|A0A0Q6WZF4_9BURK Tryptophan halogenase; OS = Pelomonas sp. Root1237 OX=1736434 GN=ASC91_01930 PE=4; SV = 1
MNKRRILIVGGGTAGWLTAAYLAKALKLSERSHLEVTVLESPDISSVGVGEGTFPTIRSTLQFLGIDEARFIRETSATLKQGIRFVDWARTPTAGQHQQFFHPFEAPFYTEDLNLVPYWLLQDEAGRMPFAEAMTLQVRVAEAHRAPKRAGEAPYAAPLNYAYHFDALKLAKLLAARARELGVRHVEGTVTDVVLDATGAIAHLDTAQLGRFEAELYIDCTGFRAELIGRAMGSNFKSVRHQLFVDRALACKVPLDANAVMESSTIATAHEAGWLWEIGLNGARGIGCVYSSDHLSDDRAADILRGYCGAGNEDLAMRSIPFTPGYREQQWVKNCVAVGLSAGFLEPLEATGLVLIEAAVGMIAEMLPHSGPMHAPARRFNELMTARFENIINFLKLHYCLSQRQEPFWRDNAAPATIPDRLAGLLEEWQLRPPGRFDFVLDTETFAFFNYQYILYGMGFATDLSAGRSDFPQMADADKLFAKIQRFADRAIADLPSHRALIQQINAGR

SEQ ID NO: 87286 - protein, 520 aa, Pelomonas sp.
  REGION 1..520: note = tr|A0A0Q6WMI9|A0A0Q6WMI9_9BURK Tryptophan halogenase; OS = Pelomonas sp. Root1237 OX=1736434 GN=ASC91_04995 PE=4; SV = 1
MSSEVTTAVRRIVVLGGGSAGWLTAATLAAELGGDGPDALQITLIESPDVPSIGVGEGTWPTMRATLHRIGLSEVDLIRECDAAFKQGSCFDGWLYGGAGDRYYHPFTLPHGHGEADLAGAWLQAGGEHAFAESVGAQPHVCDARLAPKQTTTPDFAGVLNYGYHFDAVKLGHLLRRHATTVLGVRHIVDHFVAVRSHENGDIAALATREHGDLEGDLFIDCSGMASLLLGQHYGVGLRCQKGVLFNDSALAVQVPHADAKAPLASATISTAHAEGWTWDIGLPTRRGIGLVFSSGHTDDAAAERALLGHLQRNGLSLGDATPRRLSFSPGYREHFWHRNCVAVGLSAGFIEPLEASALALVELSAAMIRDEMPANRADMDLVAKRFNEAFAYRWSRIIDFLKLHYVLSRRDDADYWREHRSAATQPESLRELLQLWAHRAPSRNDFYRNEEVFPAASYQYVLYGMHFKPALRAPRADQRTQAETGLKDVTTITRRLLGGLPRHRDLIQHIREHGMPPAA

SEQ ID NO: 87287 - protein, 509 aa, unidentified
  source 1..509: note = Sphingobium barthaii
  REGION 1..509: note = tr|A0A4R6FQW7|A0A4R6FQW7_9SPHN Tryptophan halogenase; OS = Sphingobium barthaii OX=1054037 GN=DFS08_103257 PE=4; SV = 1
MGEPLDIVILGGGTAGWMAATALVTFLPSSRCRVRLVESEEIGIVGVGEATLPQMKNFNDAIGVNEAEMMRATKGAFKLGIEFVDWGTKGSRYIHPFGAHGTADTAHVFHHRWVRALRSGWESDIQEYSFAVQAARMRRFNFPSTDQAAIESTFSYAYHFDASLYSVFLRGLAQQRGVIRTEGKVREIVRDPQSGDVRSLTLESGESITGDLFIDCSGFRSLLLDKTLGVAWEDWSKWLPCDRAFAVPSERGEFTPFTRSTAMEAGWRWRIPLQHRTGNGYVCSSSFIKEDDAAASLLRSLDAKPLAEPRMLRFQAGRRVVSWEKNCVAIGLASGFLEPLESTSIYLIQVAVLQLLPLLPMKRIDPRLRDEFNRLIDMEYERIRDFLILHYKLNTRDDAEIWRYCAAMEVPDSLNHKIEIFRHSGIIKRYHGLFSPPSWLSVFVGQGLVPEGYSRLADIEPEDDMIAGLDALRTMIRDKVGQMPSHDDFIADYCAPEAPLAAVAEEVRP

SEQ ID NO: 87288 - protein, 501 aa, Pelomonas sp.; identical to SEQ ID NO: 84496
  REGION 1..501: note = tr|A0A0Q8H485|A0A0Q8H485_9BURK Uncharacterized protein OS=Pelomonas sp. Root662 OX=1736580 GN=ASD88_24995; PE = 4 SV=1

SEQ ID NO: 87289 - protein, 442 aa, unidentified
  source 1..442: note = Caballeronia hypogeia
  REGION 1..442: note = tr|A0A157ZM26|A0A157ZM26_9BURK Tryptophan halogenase; OS = Caballeronia hypogeia OX=1777140 GN=AWB79_01137 PE=4; SV = 1
MTEAAQTLDVVVIGGGPAGSTAATLLADRGYRVRVLEKARHPRFHIGESLLPANLRLFEQLGVADEVRAIGMVKLAAEFVSPQHDNRLQRFMFADAWDKSMPSAYQVRRSELDEILLRNAAKHGAQVSEGCRARDVAFAPDHSSATIAAVHDDGRVEEVRARFVVDASGRDTLLANHFKTKRRNERHNSSALYGHFKNAQRNEGQNEGNITVFWFEHGWFWFIPLADGATSVGAVVWPAYLKRRPKGTPVEAFFRETIALCAPLAARLKDAELISEVHATGNYSYTGDMTHGGNFLLLGDAFAFIDPVFSSGVMLAMQSAFAGAGAIDRALSNPSNARAALAKFDRDVRHGPREFSWFIYRMTSPTMRDLFMGPRNPLRMKEALLSLLAGDIFGTTPIWRSLRAFKGIYYVSAALDWRNSLRAYRQRRRNLSEAERAELPAN

SEQ ID NO: 87290 - protein, 494 aa, Altererythrobacter sp.
  REGION 1..494: note = tr|A0A2E6KAZ3|A0A2E6KAZ3_9SPHN Tryptophan halogenase; OS = Altererythrobacter sp. OX=1872480 GN=CL575_12145 PE=4; SV = 1
MSGGQPVKVVIAGGGTAGWISACALALQLGRLVQVTLVESDAIPTIGVGEATIPTARSFHEYLRIDERAFMAATGATFKLGIRFDDWGALGDSYMHSFGTFEMRNWVAEFQHFWLEGRASGLADGIGAFCLEHEAALAGKFTTEGAPPLNYAYHLDAGRYASFLRAIAERDGVRRVEGRISKVEQHFETGEITALTLNNGERIEGDLFIDCTGFRALLLGQTLEVGYENWSNWLPTNGAWAVQTEDTTAPPPYTVAAAHEAGWRWRIPLQHRTGNGLVFASDYLDAEDAREKLLGAIEGRAVSDPRLIRFETGRRRTMWAKNCVALGLSSGFIEPLESTSIHLIMSGVTRLIQLFPFDGEMDALRDRWNALADRELEHVRDFIILHYHLTQRGDSEFWRSRAEMDIPDSLKARIENFSAQGQAWQDALELFRTESWIYVMLGQGLMPRRWHRLASLVDSERLMGTFARQKEAIAARVAGMPGHGEFITSYAADR

SEQ ID NO: 87291 - protein, 506 aa, Xanthomonas citri; identical to SEQ ID NO: 85891
  REGION 1..506: note = tr|A0A0U5FLM9|A0A0U5FLM9_XANCI Tryptophan halogenase; OS = Xanthomonas citri pv. citri OX=611301 GN=prnA PE=4 SV=1

SEQ ID NO: 87292 - protein, 514 aa, Altererythrobacter sp.
  REGION 1..514: note = tr|A0A2E6KAF1|A0A2E6KAF1_9SPHN Tryptophan halogenase; OS = Altererythrobacter sp. OX=1872480 GN=CL575_10770 PE=4; SV = 1
MAIDFEKVVIVGGGTAGWLSAAYLAARRPELQITLVEAPDIPTIGVGEGSWPTMRETLRIIGIPESEFLFECDASFKQGSRFDGWRTGGAEDSYLHPFTPPTPGDVRPFITAWKQTDGRSFAELASPQAAVCMQNLAPRQRSMPDYAAALNYGYHFDAGKFARLLSRHAVNRLGVTHIRDQVTDILSEGPDRIAAVILRRGGQLSGDFFLDCTGMAARLIGEHYGTAWIDRSDVLFNDRALAVQVETQPDSPIASQTIGTAHKSGWLWDIALPTRRGIGCIYSSQFTEDAEAERTLKDYVATNLPWQEPEAIVPRKISFRTGHRERFWRGNCVAIGLSAGFIEPLEASAIVLVELSLKALADSFPVTREALPAYSERFNKLFHYRWERVVDFLKLHYVLSQRSEPYWKAHRDPASIPPSLACQLQLWRDHPPTQWDFPQVDEMFSAASQQYVLYGMGFAEPLSECSEDLEPVQAQLAAVREKARALTAAMPTNRTYLDALRSTHPANPREGEFA

SEQ ID NO: 87293 - protein, 512 aa, Pelomonas sp.; identical to SEQ ID NO: 84485
  REGION 1..512: note = tr|A0A0Q8GB93|A0A0Q8GB93_9BURK Tryptophan halogenase; OS = Pelomonas sp. Root662 OX=1736580 GN=ASD88_20730 PE=4; SV = 1

SEQ ID NO: 87294 - protein, 505 aa, unidentified
  source 1..505: note = Sphingobium barthaii
  REGION 1..505: note = tr|A0A4R6FSF0|A0A4R6FSF0_9SPHN Tryptophan halogenase; OS = Sphingobium barthaii OX=1054037 GN=DFS08_103256 PE=4; SV = 1
MRPVNDVVVIGRDAPAWMAAAAIVRSLGAAGVKVRVIELPSLLKATDCYSALPALDGYHLRVGLNDRLVWTTCKAVPVAGQRFNGWGGAGAPFLHGYDREIADPPLEFTHFWTKARQDGLRSEFEAFSLAAMAARAGRVPVPQDGASLRATFGYNIDARSYAMLLRHCTLGLGIAAKEAALADVEVDGDRIAAVVLDDGERVEADLFVDASGPEGLLIGRLPGTELESWREWLPCDRVMVASARTLQPLPSFSQISAFAQGWIGLFPMQNRTSVVAVYDSRQMSDQEMAQSLPSLARAPVNSEVAVSPLNQGIRRRCWVGNCVAIGEAAFSLEPLDAVQLHMAHNCISQLMALFPVEAEQFPEAQTYDDIIRCVASNLRDFQILHYKLNHRIGELFWDRCRETAVPETLQRKLDIFAARGHVPLNDFETFQTSSWASSFIGHGLMPQSFDPRLDAIEEREQIAEVHLRMKAVISQVEAFPSVEDFIAPTQQQGQARAAPLRQEQL

SEQ ID NO: 87295 - protein, 514 aa, Sphingobium sp.
  REGION 1..514: note = tr|A0A087NCR0|A0A087NCR0_9SPHN Putative tryptophan halogenase OS=Sphingobium sp. ba1 OX=1522072 GN=IL54_2335; PE = 4 SV=1
MVHPVRNIVIVGGGTAGWLTAGIIAARHRTRIGQGFSVTLVESPNTPIIGVGEGTWPTLRTTLSRMGVSESDFFRECDAAFKQGARFDRWTTGAVDDGYYHPLMLPQNFGQVNLAPHWLASNQGESFCDSVSAQGRICDDGLAPKTIATAEYDALANYAYHLDAGKFAPFIQRHCCETLGVRHVLADVQQVLMRENGDIRAIQTAQAGEIEGDLFVDCTGFKALLIEGAMNVPFKDCNDVLFCDTALAMQVPYERPDSPMASHTISTAQTSGWIWDIGIQTRRGVGHVFSSSHISDEEAERELRAYIGPAADGLNARKIKIRSGHRETFWKGNCVAVGLAAGFLEPLEASAIVLIELSAKIIAEQMPACREVMDIISSRFNATTHYRWGRIIDFLKLHYVLTKRTDSDFWRDNVRDETIPDRLKELLLLWRYQSPWFHDEFDRVEEVFPAASYQYVLYGMGYHTEVDPASLSRDHRLADRARRENAALTDKLCAGLPRHRDLINKIVAHGLPPV

SEQ ID NO: 87296 - protein, 494 aa, Altererythrobacter sp.
  REGION 1..494: note = tr|A0A2E1Y8U5|A0A2E1Y8U5_9SPHN Tryptophan halogenase; OS = Altererythrobacter sp. OX=1872480 GN=CL574_07700 PE=4; SV = 1
MSGGQPVKVVIAGGGTAGWISACALARQLGRLVQVTLVESDAIPTIGVGEATIPTARSFHEYLRIDERAFMAATGATFKLGIRFDDWGALGDSYMHSFGTFEMRNWVAEFQHFWLEGRASGLADGIGAFCLEHEAALAGKFTTEGAPPLNYAYHLDAGRYASFLRAIAERDGVRRVEGRISKVEQHFETGEITALTLNNGERIEGDLFIDCTGFRALLLGQTLEVGYENWSNWLPTNGAWAVQTEDTTAPPPYTVAAAHEAGWRWRIPLQHRTGNGLVFASDYLDAEDAREKLLGAIEGRAVSDPRLIRFETGRRRTMWAKNCVALGLSSGFIEPLESTSIHLIMSGVTRLIQLFPFDGEMDALRDRWNALADRELEHVRDFIILHYHLTQRGDSEFWRSRAEMDIPDSLKARIENFSAQGQAWQDALELFRTESWIYVMLGQGLMPRRWHRLASLVDSERLMGTFARQKEAIAARVAGMPGHGEFITSYAADR

SEQ ID NO: 87297 - protein, 480 aa, Sphingobium sp.
  REGION 1..480: note = tr|A0A087NAG9|A0A087NAG9_9SPHN Putative tryptophan halogenase OS=Sphingobium sp. ba1 OX=1522072 GN=IL54_1538; PE = 4 SV=1
MTAAALARTLGPVAQVTLVESEQIGTIGVGESTIPPLVAYNRILGINEADFMRATQATFKLGINFENWRVPGESYFHSFGGTGKDHWSAGFQHFWMHGQAQGHDAPYGDYCLELKAAEAGRFAHLPDDRMNYAYQLDSGLYARFLRRMAEADGAQRIEGRIAKVELDSESGDIAALLLDGDRRIEGDLFIDCTGFRALLIEGALHVGYDDWTHWLPCDGAVAIQTSSVRPPVPYTCAIAHEAGWQWRIPLQHRQGNGIVYCSSFLNPDAALEKLLASVEGDKLVQPNPIRFRTGARRRQWHRNCVAVGLSGGFMEPLESTSIHLIQRAVLRILRMLPAGTVSPLDIAEFNDQQMTDMEQIRDFLILHYKATDRRDTPFWRHCAAMAVPDSLAHRMELFRQTGRAFRKNEELFAENSWVQVMMGQGITPQSHHPIASKLRPDELTHLLASLKDQVSRTVANLPEHAAYIARYCSAQEPVAA

SEQ ID NO: 87298 - protein, 517 aa, Verrucosispora sp.
  REGION 1..517: note = tr|A0A372FYV3|A0A372FYV3_9ACTN Tryptophan 7-halogenase OS=Verrucosispora sp. LHW63014 OX=2294034; GN = D0Q02_14410 PE=4 SV=1
MIRDVVIVGGGTAGWMTATYLKTAFQDRISVTLVESAAVGTIGVGEATFSTIRHFFDYLGLDEREWMPECSGSYKLAIKYDNWRGDGSHFFHPFERLRTSDGFTAAEWNLALGDPTESFDRGSFITPYLCEAERSPRMLDGTLFTASLDGELGRSTLDEQRAQFPYAYHFDAALMARYLTKLGVAQGVRHVVDDVVGVGQDERGWITHVSTRNQGDVTGDLFVDCTGFRGLLINQTLKEKFVSFTDVLPNNRAVALRVPRDMAEHGIAPYTKATAKEAGWIWTIPLYGRIGTGYVYSDEFCEPEEAERTLREFAAPGQDELEANHIRMRIGRNERSWVNNCVAVGLSSGFVEPLESTGIFFIQHAIEQLVKHFPDNTWDQTLIRGYNDKVARVIDGVKEFLVLHYVASPRQDTDYWRETKVRAIPDGLAERLETAAVRLLDESTIYPYYHGFEVYSWITICLGMGLAPKSPRPALAHIDPVRASAELAGIRADAERLVKTLPSAYEYLSTIQPAAEG

SEQ ID NO: 87299 - protein, 516 aa, unidentified
  source 1..516: note = Streptomyces hundungensis
  REGION 1..516: note = tr|A0A387HB63|A0A387HB63_9ACTN Flavin-dependent tryptophan halogenase RebH OS=Streptomyces hundungensis; OX = 1077946 GN=rebH PE=4 SV=1
MLNKVVIVGGGTAGWMTASYLKAAFGERINVTLVESGNIGAVGVGEATFSDIRHFFEFLGLKEKDWMPACNATYKLAVRFENWRERGHYFYHPFEQMRSVNGFPLTDWWLQQGPTDRFDKDCFVMASVIDAGLSPRRLDGALIDQPFDEGADEMHGLTMSEHQGKTQFPYAYQFEAALLAKYLTTYAVERGVRHIVDDVKQVNLDERGWISGVTTAEHGDLTGDLYIDCTGFRALLINKALNEPFISYQDTLPNDSAVALQVPMDMEKRGILPCTTATAQDAGWIWTIPLMGRVGTGYVYAKDYLSPEDAERTLREFVGPAAADVNANHIKMRIGRSRNSWVNNCVAVGLSSGFVEPLESTGIFFIHHAIEQIAKNFPNEDWNPNQRMLYNRSVSHVMDGIREFLVLHYVAAKRQDTQYWRDTKTRAIPDSLAERLEMWKTQVPDSESIFPYYHGLPAYSYMCVLLGMGGIELKPSPALALSDPSAAEREFEAIRDKTRRLTQTLPKAYEYFAQHR

SEQ ID NO: 87300 - protein, 520 aa, unidentified
  source 1..520: note = Alteromonas confluentis
  REGION 1..520: note = tr|A0A1E7Z6Q8|A0A1E7Z6Q8_9ALTE Tryptophan halogenase; OS = Alteromonas confluentis OX=1656094 GN=BFC18_20790 PE=4; SV = 1
MTNRVVIVGGGAAGWLTAGILAAKNGIHSGCTNPVHIELVESPNVKNLMVGEGTWPTMRDTLRQIGLSEQDFMRFCNAGFKQASKFVNWQYGNGEHYYHPFTAPAGYGAVNLSSHFVKNRPGADFESMVCAQGAVCEQSLAPKTLAMPEYAFAMNYGYHLNAGKFTEMLRLHCTQKLGVVHTLGHVENVNGAANGDIASLTLDDGRQIDGDLFIDCSGFKALLLNGFYNIPLVSKRDQLFNDAALALQVPYKDDTAPIASATVATAQQHGWIWDIALSSRRGIGHVFSRQHCSEEQAREALMNYVKSDPHLDASGAEPRLITFEPGHRSTFWHRNCVGIGVSAGFVEPLEATALVLVEKSVEWISHQFPRCRNAMTVLAKRYNEMTHKRWEEIIDFIKLHYVLSSRDDSEYWRAHREGASIPESLKESLLLWQTQPPWLYETDRRLELFSSASKQYILMGMQATCSDACVGLSQHEMRVADKALGGVQRSTAELLGLLLSNREYLTRLAGKVQENARARA

SEQ ID NO: 87301 - protein, 510 aa, Pelomonas sp.
  REGION 1..510: note = tr|A0A0Q6X087|A0A0Q6X087_9BURK Tryptophan halogenase; OS = Pelomonas sp. Root1237 OX=1736434 GN=ASC91_26395 PE=4; SV = 1
MKEFNRVVIAGGGTAGWMMAALMGKLLGKRLDIKLVESEEIGTVGVGEATIPALHTYHNLLGINEAEFMAATNATFKLGIAFEGWKDIGQDYFHSFGSTGNDHWSAGFQHFWLKGRAEGLSKTYTDYNPETVAAYANRFAHLPRNGLNYAYHMDAGRYAKYLRAMSEGYGVQRIEGKIGAVLMDGPQGKDGDITALQMQDGTRIDGDLFIDCTGFRSMLIGEALGVGYEDWSYWLPCDRAVAVQTASVREAWPYTRSICHPFGWQWRIPLQNRVGNGLVYSSKELSDADAPEVLKKNVEGELLIQPRVIKFLPGQRDKVWHRNCIAVGLASGFVEPLESTSIHLIQRAAIRLMQTFPQGGIQQSDVDEFNLQSKRELEHIRDFIVLHYTVNERTDSKLWKHVREMDLPATLRHRIDLFRETGRVFRPSDELFAENSWVQVMMGQGITPERYHPVADLMGKQELATFLGDIHLKVSRTVAGLPQHQAYVEQLCAPYRNATTAQLAATPLRA

SEQ ID NO: 87302 - protein, 507 aa, Pelomonas sp.
  REGION 1..507: note = tr|A0A0Q6W6I3|A0A0Q6W6I3_9BURK Tryptophan halogenase; OS = Pelomonas sp. Root1237 OX=1736434 GN=ASC91_21410 PE=4; SV = 1
MNKPLRRVVIVGGGAAGWMSAAALSAVLKPPYEIRLVESDEIGIIGVGEATIPPIRMFNGLAKIDEAEFLKATQGTFKLGIEFVNWGRQGERYFHGFGGVGREALWPVDFSQYWLRLRALGRALPLDAYVISNMAAKANRFMLPRPDMQNSPMAALGYAYHFDASLYAKHLRALSEQRGVRRTEGKVVRVLLNEEPGPAEGHVRAVQMQSGELVEGDLFLDCSGFASLLIEKALGTGFEDWSHWLPCDRAVAVPSESTSPLLPYTRSTAHRAGWQWRIPLQHRVGNGHVYSSSHVSDDEAAGVLLKNLDGQPLADPRIIKFRTGMREEAWRRNVVAIGMSAGFVEPLESTALHLIQMGVAKLIEAFPHSGFDALEIAEYNRQSRERYEYVRDFIVLHYHLNQRDDSEFWKACAAMAIPGALRWRMALYASSGRLANVDGDLFREPSWLEVMEGQNLRPKGWLALAELQGVEETAAYFKGVSDTIAQCVAVMPDHAEFVRRYCPAMPV

SEQ ID NO: 87303 - protein, 492 aa, unidentified
  source 1..492: note = Planctomycetaceae bacterium
  REGION 1..492: note = tr|A0A2E6ADN3|A0A2E6ADN3_9PLAN Uncharacterized protein OS=Planctomycetaceae bacterium OX=2026779; GN = CMJ80_02150 PE=4 SV=1
MENRIQQFVVVGAGSAGLMSSMAIKRAFPTRKVVLVYAPEIPVIGVGESTTTIFPGFLHRSLGLGYLDFFREVQPSWKLGIRFHWGDPKDTHFNYVFDHCMTHKPAPLRKLTAYYCLNDWTDASRCWALMDRGLSPCHVEPDGRLSTYDAFGYHINNENFLKYLMKKSQELGVEHRPTKIVGVERNACGNLTSLQTDDGNQLTGDLFVDCSGFQSRLLGDVMQQPFVSYRDSLFCDRAVVGGWQRNSPILPYTTVDTMNHGWCWRIEFPDRVTRGYVYSSEFCSDDQAIEELKSKNPELESKPRVLSFQSGRRQNFWVGNVVGIGNATGFVEPLEATALHLVIEQIRLLCRLIDESEGDLPPKLIESANQRYRQLWDEVRDFLAIHYRFNRRKNTPFWQHCREATYLAGAQDLVNLYEEAGPTSLCSTTLDGGHLFGYDGFMSILVGSRAPTRYANRMSIDDLRRWHACQTKNQQAASNALTVRDALDRLGI

SEQ ID NO: 87304 - protein, 513 aa, Erythrobacter sp.
  REGION 1..513: note = tr|A0A165Q7V0|A0A165Q7V0_9SPHN Tryptophan halogenase; OS = Erythrobacter sp. HI0063 OX=1822240 GN=A3736_12530 PE=4; SV = 1
MAVTQSSETPLSVAIVGGGTAGWMAAAALSKLTGCSVTLIESDAIGTVGVGEATIPQIRLFNRSLGIDEAEFVRETKGTFKLGIEFAGWRKPGESYMHAFGNLGRGAGLLPFHQLWLRGRQLGLAKSLAAYSLNETAARAGRMQAWQQAHGQPDMPWAYHFDASLYAAFLRRFAEARGTSRIEGRIASVERDGESGDIRAVVLEDGAQVEADFFLDCTGFRALLSQGAPGQDFADWSHWLPCDRAVALPCASDGDPVPYTRATAHEAGWQWRIPLQHRTGNGLVYCSDYLSEDEAEATLRSHLDGEPLAEPNRLRFRTGMRSAPWSGNCLALGLAAGFLEPLESTSIHLIQSGIARFLSMLPRRGATATMAAEFNRQARFEWESVRDFLILHYAANVRQGEPFWDRCRAMPLPDSLAARLDLFRATGYLHREHEELFTEPGWVQVLMGQGIMPRATHPNADAIDPAALARLLDEIERGIAANVAAMPTHAELLRRLCAPQSPSRPAATMETAR

SEQ ID NO: 87305 - protein, 561 aa, Ruegeria sp.
  REGION 1..561: note = tr|A0A346SHN3|A0A346SHN3_9RHOB Tryptophan 7-halogenase OS=Ruegeria sp. AD91A OX=2293862; GN = D1823_10065 PE=4 SV=1
MSNRLNKITIVGGGTAGWMTALILDMVLSRTSGPTDRPKICLIESPNISTVGVGEATVPRMPVTLRQAGISERSFFRETNASFKLGVKFCNWNNDAKGNRIDYMNPFAHGQMLEGLEAAEFFLRFGNGDRDFTQSISPHDDLARLCKGARQLGQPEFEQRFGYAYHLDAVKFAGMLTRVCTKRGVEHIQDEVQTVELDEQGNVSHLTLEAKGRHDVEMVVDCTGFRGLIINKALGEPFLDYSDYLPNDRAMALQIEHPDPDKIESATRSTALGAGWTWRVPLYNRVGTGYVYSSAHRTDDQAADEYLEWLGDSGKGLTPRVIPMRVGRVRNAWVKNCVAIGLSGGFIEPLESTAIHMIDHAIRWFAEHLPTRDIEPSLRDRYNRQMDKLYNEVLEFICLHYRLGNRTDDQYWIDARTEMKVPDRLAENLELWQYRLPMDHDIEFATLFDSRVYQTVLLGKQVYDTGYGSGIRDRLRPLKKPLWFQGMKNAKVDLAKIIKSMPDHKTLLRDIRGELEQPAFGMAAAMKPTVAMPGAAPAPVVVENMPNFAEIQSGKKDLQLF

SEQ ID NO: 87306 - protein, 504 aa, Pelomonas sp.; identical to SEQ ID NO: 82579
  REGION 1..504: note = tr|A0A0Q8GSW4|A0A0Q8GSW4_9BURK Tryptophan halogenase; OS = Pelomonas sp. Root662 OX=1736580 GN=ASD88_15085 PE=4; SV = 1

SEQ ID NO: 87307 - protein, 528 aa, Luteibacter yeojuensis
  REGION 1..528: note = tr|A0A561HIT1|A0A561HIT1_9GAMM Tryptophan halogenase; OS = Luteibacter yeojuensis OX=345309 GN=FHW30_101156 PE=4; SV = 1
MARLKKVLVVGGGTAGWLVACYLAKAVNAVDPRSVQVHLVESPDIGLLGVGEATFPSIRGTLAAIGLDERRFLVGATATYKQGILYRHWVRPPGSPGADHFFHPFNAPSQRPGGPDLLPYWLLGAAPPGMPFADAVSMQSTVVDHFRAPKRRKDGDYQGPMNHAFHFDAACFARVLAEHGQEALGVVRHVATVERAERDERGGIARVITKEEGELTADLYVDCTGLRGLLVGNVMQSPFRSRADVLFADRAVAMQVPYEAPDTPIPSYTISTAQEAGWIWDIGLQRRRGVGYVYSSRHTTDDKAEAAFRRYLGKAGEGGKAMHIRFETGYRPEHWRQNCVAVGLAGGFVEPLESTGIALIELASYLLTHLLPGDTDDMEGAARHFNEMMVARYDRIIDFIKMHYCLSQRRDSAFWGDNCDIVSIPPTLQDKLEKWKHRPPHRLDFVTDLEMFMPCSWQYILYGMEFQTDLEPMRSAYPHMDAAREEFAMIQRAAGRALGDLPDHRALVEQLCSEYAASSRGRASAAHG

SEQ ID NO: 87308 - protein, 492 aa, Pseudoalteromonas byunsanensis
  REGION 1..492: note = tr|A0A1S1N6M0|A0A1S1N6M0_9GAMM Uncharacterized protein OS=Pseudoalteromonas byunsanensis OX=327939; GN = BIW53_12615 PE=4 SV=1
MTATLINQAYNKHHKLVDIRLIESPDVDIIGVGEATVPAIKDFLQAAGIDEAEFMNYCNATFKNGIMFENWRQPKHGKMHRYVHPFDFERVEKRLDIATSWVLSERQRPFDESVSLASTLIQHNLTPKTRTTKPYHGIVHYSYHMDARLFGQFLRQRAMAAGVTRIEAHVESVNTDNGQISSIATTQGLFESDLFIDCTGFRALLISALEEKSSNWRSYQDELMCDSAVTVQIPHSEEHIPRSYTVAHALSCGWAWSIDLQNRTGNGYVYSSKYCSKEQAELEFRNYLKLDNNVALNHIDMSVGRRKRHWIGNCVAIGLAGGFIEPLESTGLHLIFLAARFLVLHNNFQYCEANIAGFNQTMNATYDELKDFIVTHYVLSDRDDSDFWRDISKTLDACPQLAQKLDLWQSKVCEFFDVSNSTSHMFTDTSYRYILFGMDHIPQIKIPYFDGEFTDVFEFVKSRQQKAVAIALNHVDYFSYDVKGQVTVKLSQ

SEQ ID NO: 87309 - protein, 526 aa, Ferrimonas marina
  REGION 1..526: note = tr|A0A1M5YWP5|A0A1M5YWP5_9GAMM Tryptophan halogenase; OS = Ferrimonas marina OX=299255 GN=SAMN02745129_4545 PE=4; SV = 1
MQNPIQRVVIVGGGAAGWLTAGVLAAKHNADQGRLAPTPPLSITLIESPDVPTVGVGEGTWPSMRSTLETIGIRETEFLRCCDASFKQGSRFRHWGLDDARRLQEGVSDQYLHPFTLPQGQNQLNLADFWLPFREQVTFSEAVCAQEAISQAGLAPKTLTTPEYHFHLNYGYHLDAAKFGQLLQRHCTEKLGVTHLQDHVVEVVSHPSGDIAQVITQGKGAVEGDLFIDCSGRQSMLLGQHLKVPYISQKSVLFNDRAMALQVPYQRADDPIASCTLSTATEHGWIWDIGLPKRRGVGVVFSADHCSEAQAEQHLAHYLGGSIPKGLTPRIIQYRPGHHQVCWQNNCVAVGMAAGFIEPLEASALALIEWTANALADQFPRDRAAMPLLAQRMNRRYRQHWHQIIEFLKLHYVLSRREQGAYWRDHRDPSTCPDSLLEQLDLWQYQPPGDQDVAIKQPLFPAASYQYVLYGMGFETQAMALMKPSDKALARRLFDENQQQVAKLQRLLPSNRALLDQVSQYGFNKI

SEQ ID NO: 87310 - protein, 536 aa, Serratia quinivorans
  REGION 1..536: note = tr|A0A4Q8DDT3|A0A4Q8DDT3_9GAMM Tryptophan halogenase; OS = Serratia quinivorans OX=137545 GN=EOZ59_4369 PE=4 SV=1
MSKPIKNIVIVGGGTAGWMSASYLVRALQQQANITLIESATIPRIGVGEATIPSLQKVFFDYLGIPEQEWMPQVNGAFKAGIKFVNWRTSPDHSSNDYFYHLFGNVPSCDGVPLTHYWLRKREQGFQQSMAYACYPQPGALDGNLAPCLHDGTRQMSHAWHFDAHLVADFLKRWAVDRGVNRVVDEVVEVNLNEHGFISSLLTKEGRKLEADLFIDCSGMRGLLINQALKEPFIDMSDYLLCDSAVATAVPNDDAQAGVEPYTSSIAMNSGWTWKIPMLGRFGSGYVFSSKFTSRDQATTDFLNLWGLSDNQPLNQIKFRVGRNKRSWVNNCVSIGLASCFLEPLESTGIYFIYAALYQLVKHFPDTSFDPRLADAFNAEITYMFDDCRDFVQAHYFTSSREDTPFWLANQHDLRLSDSIKEKVERYKAGLPLTTTSFDDSTYYETFDFEFKNFWLNGNYYCIFAGLGMLPDRSLPLLQLRPESIEKAEVMFARIQREAERLRASLPTNYDYLRSLRDGEVGLSRPGPTPASPESR

SEQ ID NO: 87311 - protein, 505 aa, Sphingomonas sp.
  REGION 1..505: note = tr|A0A396RLW5|A0A396RLW5_9SPHN Tryptophan 7-halogenase OS=Sphingomonas sp. ZDH117 OX=2305907; GN = D1610_11835 PE=4 SV=1
MSKPVDIVIVGGGTSGWMCAAALIAKLDPRRYRVRLIESDEIGTVGVGEATLPQMKEFNDFVGIDEVAFMRATQATFKLGIEFVGWGKPGESYIHPFGTFGRPIGDADFFQYWSRARATGHAEALSDYCFPIAAAKADRFTKPESGGAPDIRTAYSYAYHLDAFLYARFLRGWAEARGLERIEGRIVDVARDERDDGIASVALASGAVIAGDLFVDCSGFRALLIGQTLGVPFESWAEWLPCDRAQAVPCDRAGAFTPYTRSTARKAGWQWRIPLQHRTGNGIVYSSAHIGDDEVAETLLANLDGAAQASPRVLRFEAGKRALSWKHNCVAIGLASGFLEPLESTSIYLVQMGIIYLLTLLPGGRRPDPALVAEFNRTIDVEYDRIRDFLILHYHANQREDSELWRHCREMALPDTLTAKIERFRHRGHVATYRDGLFGAPSWHAVFVGQNVVPQGHDRLADRLPSADLVQRLRSLRADIEAGVQAMPGHDEFVRGYCPADPLPA

SEQ ID NO: 87312 - protein, 500 aa, Ferrimonas marina
  REGION 1..500: note = tr|A0A1M5YCN0|A0A1M5YCN0_9GAMM Tryptophan halogenase; OS = Ferrimonas marina OX=299255 GN=SAMN02745129_4081 PE=4; SV = 1
MNPTPLRSITIVGGGSAGWMTALYLNRYLNHDAPRCDITLVESEDIGIIGVGEATVHSIRFFFAAMGLDEAELMRECCATYKTGILFRNWMAPKEGSTHQYFHPFEEQRVPGVLDLASTWLSGGQTDQMRYDQAASLGSRLMQQGLGPKTPTSPPWQGVVPYGYHLDAVLMGRYLRKKAIEAGVGHVVGTVDRIEHEGERITALYCQQQRFQSDLFIDCSGFRRLLLSPLRQDNWQSFEDALPCNRAVALQLPYQPGVSPRPYTTATALENGWIWEIDLQNRRGNGYVYDGNRLTEAEAEARLREFLGEPEQGKAVHLKMNIGCVKSFWVGNCVAIGLSGGFIEPLESTGLHLINLSVRLLATHLNCAEPDQSSKDSYNRLMNGIYDDLKRFIVLHYCLTDRQDTPFWQQAQRSVDHTPVLAQQLELWRHKVCEFMDLAGSFSTVFTDENYRYVLYGMDHLPQLPPQGAPAACRAALDQLHQRFDQVTLQALPHAEQLPN

SEQ ID NO: 87313 - protein, 500 aa, Sphingomonas sp.
  REGION 1..500: note = tr|A0A396RV20|A0A396RV20_9SPHN Tryptophan 7-halogenase OS=Sphingomonas sp. ZDH117 OX=2305907; GN = D1610_11090 PE=4 SV=1
MQQLRRILIAGGGSAGWMTAALLAKLFQGLYEITLVESEEIGTVGVGEATIPAIKKYNELLGLDENEFLQRTQGTFKLGIQFNDWWRKGESYIHGFGVIGQDLGWLRCHQYWLKMRAQGRASDFANFSINTAAALENKFMRAKPDMGESPIGHIANAFHFDAGLYARFLSGYAQERGVRRREGKIAGVALRNEDGFVKSVTMDDGEVIEADFFVDCSGFRGLIIEQAMKTGYEDWTHWLPCDRAIAVPCERSADFTPYTRSTAREAGWQWRIPLQHRTGNGHVYSSKYIDDNAAERVLLDNLDGEQRADPLRLRFVTGKRKRIWNRNCVAVGLAAGFMEPLESTSLHLIQSSVIRMVRLLPDAGFDQAGIDEFNRQTDFEYERIRDFIILHYKATERNDTPFWDYCRTMEVPATLQRKMNLFAANGRIFREDEELFSEESWIQVFLGQGVIPRGYDPLVDIKSDAQVAQFLGNIEAVIAKCVRLMPSHADFVAKTCPAPA

SEQ ID NO: 87314 - protein, 503 aa, Pseudoalteromonas sp.
  REGION 1..503: note = tr|A0A0Q0J913|A0A0Q0J913_9GAMM Flavin-dependent tryptophan halogenase RebH OS=Pseudoalteromonas sp. P1-26; OX = 1723759 GN=rebH_2 PE=4 SV=1
MIKKIAIVGGGTAGWLAANHLGHALLQSGIEITLIESPNIASIGVGEGTVPSMRNSLQKFGISESDFINECDVTFKQSIKFVNWLDKHKHGANFYHHLFDHPHIFGEELTQQWLAEGNGNDYADFVSKQHACCENNLAPKTIATPQYAGINGYAYHFDAKKFAAFLKSHATQHFAVKHLFAEIKDVSCDEQGFITHLIDSEGNALEFDFIIDCSGFSAAFIGQKLGVGFVDKSDSLLTDTAITLQVPTQSDDEIPPYTIATAHQAGWIWDIALTERRGVGFVYSSKYMSDEQAHAKLHHYLGNKFEHLTPRKIPMKVGHREKMWHKNCVAIGLSQGFVEPLEATAILIADFSAGLLAKRFPRTRDDINLVAGDYNQQVNYVWQQTFDFIKMHYCISDRTDSAFWRDNKKADQLSEKLKNNLARWQRFTPVREDFASKFDLFDLENYLYVLFGMHYVPTKQQYKQSDNQQVAKFKQQRVKQLLNELPKHRELLNKIKKFGLQKN

SEQ ID NO: 87315 - protein, 510 aa, Pseudoalteromonas byunsanensis
  REGION 1..510: note = tr|A0A1S1NCU1|A0A1S1NCU1_9GAMM Uncharacterized protein OS=Pseudoalteromonas byunsanensis OX=327939; GN = BIW53_04325 PE=4 SV=1
MSHNTKTKRVLIVGGGSAGWLTAGLLASQCRNWKITLIESKHIATIGVGEGTWPTMRTTLQKIGIDEDEFMHQCEASFKQGSEFINWAQRKEHSYYHPFSLPAGYTEQFDIVTPWLGIKDKVDFAHASCSQSYWCDRSLAPKTASDPQYQGRANYGYHLNADKFAQLLKQHCTTKLGVTLIQDDVISVNGQVDENIESVSTQEHGELAAELFIDCTGSRSLLLGKHFGVQWLSKKHILKNDRAVALQVQHNTPESDVASCTKSTAQSYGWIWDIALQSRRGIGYTFASEYCDFEEASSQLLEYISGQGLRVHQDAQVKEIKFSPGYREKFWHRNCVAIGMSAGFIEPLEASALVMIELGAQYVCDNLPESEDMMEVVAQRFNAKFSYHWARIIDFLKLHYVLSERSDTAYWQSMKSEQVPLSLKNLLTLWRHRPPKHGDLDHIDEVFSPASYQYVLYGMGFNTLVNNYSITPQINSLFKQVTQIAQQGLDTQPSNRLLLNNIAKYGIAKV

SEQ ID NO: 87316 - protein, 505 aa, unidentified
  source 1..505: note = Gammaproteobacteria bacterium
  REGION 1..505: note = tr|A0A2N1XD36|A0A2N1XD36_9GAMM Tryptophan halogenase; OS = Gammaproteobacteria bacterium HGW-Gammaproteobacteria-4; OX = 2013800 GN=CVV14_11000 PE=4 SV=1
MQIGSTPLRIVIVGGGTAGWMAANLLARRWRSRQVAITLLESPEIGIVGVGEGSTPLLGTFFEKLGIADSDWMPKCNATYKNGIRFSGWSDIKGHESYFHPFASAIDIHGQSAFFMHCALRRNGYDVAANPDRFFIAAELARQRLAPLAAHHFPFRIFHGYHFDAHRVGALLGEHAQRLGVEHLHGTVVTVERGEGGAVLAVGTEDGRRIAGDFFVDCSGFRSLIVQQALGVPFRQFADNLFNDRAVVLPTPTDPTGTNSQTISTALRNGWVWNIPLRHRHGNGYVYSSRFCTPDQAEHELREHLGLLDDPVGARHLQMRVGRVEQVWVHNCLAVGLSQGFIEPLEATALHLVQTTIESFIEQVERDGDLDARRQSFNDGIARDFEGVRDYIVCHYRMNRRTDTEYWRANASHDQLSDSLKAILTCWFTGRNLEQEIARQGIADIYPPMSWHCLLAGYGQFPDPAKLRTPEPGIAVADIAGIDDFRSRCALNFRDHAQVLAEMAA

SEQ ID NO: 87317 - protein, 507 aa, Pseudoalteromonas sp.
  REGION 1..507: note = tr|A0A0P9G3L1|A0A0P9G3L1_9GAMM Flavin-dependent tryptophan halogenase RebH OS=Pseudoalteromonas sp. P1-9; OX = 1710354 GN=rebH_3 PE=4 SV=1
MQLNQNPIEKFVIVGGGTAGWLAAATLGNIFKDSNTQVELIESDEVNIIGVGEATIPPLIDTLESLGIDLVEFIKATQASFKWGIQFENWYQESHSYFHPFGEVGQKIDGHEFYQCWLKQKAEGDNTPLMAYSPEAVLSEKNRFFVPHQAMNTPLAGARFALHLDAVLAGQYLRKFSENIGVKRTVGHVESISKTIDGNIASVTLKSGDTINGDFFIDCTGFKGLLIGNALNTEYQDWSEHLPCNRAVAVQTKLTGDTKPYTISRGQKAGWSWHIPLQHRTGNGYVFCDKYISDEEAIQTLLDNVDGEPLNEPRVIPFVTGVRDKVWNKNCLSLGLAQGFLEPLESTAIHLVSKSLALFVRMFPTKTPNAVLQNEFNRRIIGDYQEIRDFLVLHYCTTQRDDSPFWRDWQQKEIPASLSERIAFFKQSGGLIPGVEELFQPTSWYAVFDGMGLTPNGYNPTLDALNSETLAKSLAAGRNALDKCAEAQPLHDEFLQRYCPANEAIFV

SEQ ID NO: 87318 - protein, 508 aa, Luteibacter sp.
  REGION 1..508: note = tr|A0A2T5LDC0|A0A2T5LDC0_9GAMM Tryptophan halogenase; OS = Luteibacter sp. OK325 OX=2135670 GN=C8J98_105202 PE=4; SV = 1
MANGITNIVVVGGGTAGWMAAAALIRVLNKQVTVRLVESEEIGIVGVGEATVPHIKLFNNLLGLNEADFVARTQGTFKLGIQFRDWGKLGDTYIHGFGVIGHDIGLTPFHQYWLKARLSGMHSDADLHDYSVNTVAATRGKFMPAPTDVPAGSPLSTIGYAYHFDASLYARYLREYSEARGVRRTEGKVRSVDLHPETGHVAAVVMESGERIEGDLFIDCSGFRGLLIEGALQSGYEDWSHWLPCDRALAVPCARVEAPTPYTRSTAREAGWQWRIPLQHRTGNGYVYSSQFISEDEAAAKLMANLDGKALADPRPLRFVTGMRKKSWNRNVVALGLASGFMEPLESTSIHMIQAGISKLLELFPSDGVMDPVLIERFNERTRFESERIRDFLVLHYNATTRDDTPFWDYCRTMSIPDSLKTNIDLFRHSGRFFRNADEMFAAVSWIQVMIGQGIMPTGYNPLVDQMPDADLPKFLDSIRDVISKNVDLMPTHQQFIDRECKAAAVVV

SEQ ID NO: 87319 - protein, 506 aa, Pseudoalteromonas sp.
  REGION 1..506: note = tr|A0A0P9FSR6|A0A0P9FSR6_9GAMM Flavin-dependent tryptophan halogenase RebH OS=Pseudoalteromonas sp. P1-9; OX = 1710354 GN=rebH_5 PE=4 SV=1
MAQAVKKIVIVGGGTTGWMAAASLSRYIQDKDMSLTLIESPNINTVGVGEATIPNFVDFNRNLGINDAELIKATQATFKLGIEFEEWSQKGERFFHPFAAYGAPIENLDFHQYINKLNAEGKQLDIEDYSFPIQLAKKGGFAQPNPNQNNPLAQYSYAYHIDAVLYAKFLTEFSVKRGVNHILANVSEVKLNAENGFIQALTLDNGKHIEGDLFIDCSGFKGVLIEGAMGIGLDDLSHLLPCDSAVAVQTELVGEPTPYTRAIAKEAGWQWCIPLQHRMGNGYIYSSKFITDEEAKQSLLDSVKGRTITDVKTFKFPLGRRKVSWHKNCFALGLAAGFLEPLESLGISLIQTALAKLMTFFPDMSFNQADIDEVNRLHNDELDRIVDFLLVHYKLTQRTDTAFWRYCQEMPIPKTLEHKIAMYKNRGHVVMYDNESFQQASWLSMFYGFNVTPSRYDVRLDHFNSSAIAENLAKMKAQIAMAANNCLSHQAFIDKHCKANNDVKNQ

SEQ ID NO: 87320 - protein, 493 aa, Hirschia baltica
  REGION 1..493: note = tr|C6XQH0|C6XQH0_HIRBI Tryptophan halogenase; OS = Hirschia baltica (strain ATCC 49814 / DSM 5838 / IFAM 1418) OX=582402 GN=Hbal_2796 PE=4 SV=1
MERQTINRVVIAGGGTAGWVTAASLSHNLGPALDITLVESEAIGTIGVGEATIPTHTSFHAMLGINEAEFMRATHATFKLGIQFEGWKDKGESYIHSFGQVGKHTWMAPFHHLWLHARDLGIEGDFEDYCLELKAAKADKFFTSDKQKPLNYAYHLDAVAYAKYLRGFSEKKGVKRVEGKIQNVLQYAESGNIKAVELENGALIEGDLFIDCTGFNGLLIEKTLKTGYDDWRHWLPMDSAYAVQTQKTGPAIPYTRAIAHENGWRWRIPLQHRVGNGFVFTSEKLSNDDAREQFENALEGEALTEPRLIRFITGRRKKVWNKNCVALGLSSGFLEPLESTSIHLFQRGVTELVKHFPYHGITPALADLYNDKISKEVEQIRDFLILHYKVTQRDDSEFWRERQAMDIPDTLAARLSLFEENAHAYNGCDELFLLDSWIQVMFGQGIEPKGYHAIGQLFPKDRLENALKSQREKVASTLAQLPSHQEFIDQYCS

SEQ ID NO: 87321 - protein, 514 aa, Pseudoalteromonas sp.
  REGION 1..514: note = tr|A0A0P9FIZ3|A0A0P9FIZ3_9GAMM Flavin-dependent tryptophan halogenase RebH OS=Pseudoalteromonas sp. P1-9; OX = 1710354 GN=rebH_1 PE=4 SV=1
METKPIQSIIILGGGTAGWLAANHLAINLKPKEQQGVKITVIESPDTPTIGVGEGTVPLMRNTLKEFGISEETFIKECDVSFKQGIQFDNWMKPINGKMHSYYHPFDYPVLDNDSVAAWLQNPVLPFSHAMNRQAILCDNHKSPKAITDPEFAGQAAYGYHLDAYKFSDLLKQHAIENLGVEHLMAHIEDVTLSDDGAIDSLISLQGEVFNADFYLDCSGFCSRLLGQALNIPFIEKSDVLFVDKALAIQVPYDSEQPKLPSSTIATACDAGWIWDIALPTRRGIGHVFSSKHCSLDEAKATLANYLNKSVEEISPRLIDMKIGHREKFWHKNCVAIGLSQGFVEPLEATGLLAFDATAKLLAKSFPTNTSQLALAEKRYNTYVNGLWQGVINFIKMHYAVSDRDDTAFWRDNRDTASWPLELQEKLEHWRTHIPNLYDFERGFDAFRLENYLYVLYGMNYPTEIGDTAYRYQAPDNASKQFELIQKHALKLSDYLEDNLTVINKIKQFGLSKV

SEQ ID NO: 87322 - protein, 500 aa, Hirschia baltica
  REGION 1..500: note = tr|C6XNI6|C6XNI6_HIRBI Tryptophan halogenase; OS = Hirschia baltica (strain ATCC 49814 / DSM 5838 / IFAM 1418) OX=582402 GN=Hbal_2451 PE=4 SV=1
MNQAAISKIVIVGGGTAGWMAAASLARVLDANRISITLVESESIGSVGVGEATIPPILKFNELLGINEQEFMKATKATFKLGIEFSDWGDVGQKYIHPFGDFGTDIEGIPLHHFWLSQRQRAGYQHSLFGFSLMVKACELGRFKYPEYQNPKSVYSGIHYAYHFDAGLYAAFLRDYAEKIGVVRYEGIVGDVKLDSENGHVKSIVLDDHREIDGELFIDCSGFRGMLIEGALNTGYCDWSHMLPMDSAMAVPSEKVGDPIPYTKAIAHEAGWQWRIPLQHRTGNGCVYSSQFMSDNTARQNLVSGLDGPALVEPKKLQFKTGHRRKFWNKNVIALGLAAGFMEPLESTSISLIQTGLARLMTLMPDKRFSEASRSAYNQRTLEEYEHIRDFLLLHYVASKRNDSEFWQYMRNLPVPASLQEKISLYQDAGRILKFENGLFTPSSWLAVMHGQGIEVYGHDPITLRFTLEETQSRLDGMRNLIDKAALAMPFHSEVLKQLY

SEQ ID NO: 87323 - protein, 510 aa, Hirschia baltica
  REGION 1..510: note = tr|C6XNI7|C6XNI7_HIRBI Tryptophan halogenase; OS = Hirschia baltica (strain ATCC 49814 / DSM 5838 / IFAM 1418) OX=582402 GN=Hbal_2452 PE=4 SV=1
MTDRNIRKILIVGGGTAGWMAAAALSRYLPMGRTEITLIESDEIGTVGVGEATIPQIAVFNKMLGINEDEFVKATYATFKLGIEFQDWGRIGETYFHPFGEYGYDLEGIDFHQFWVRSKQSNDFHGLDEYSLNTKAAYAGKFIRLDAVNGGSVLSKMGYAFHFDAGKYASYLSEYAKKRGVRRLEGKVCSVTKRSTDGFLESVQLETGDVIDADLFIDCTGFKALLINGALGVGYEDWSHLLPMDRAVAIPCASVEFAKPYTISKAQSAGWTWKIPLQNRIGNGHVYSSKFMSKEMATQILEKELVGEALADPNHLRFQTGIREKFWEANCVSLGLSSGFLEPLESTSIHLIQSGISKLIALFPDRDFSPTDRDEYNRLLNVSYKHIRDFIILHYIATDRQDSPFWKEMQKIDPPSTLKQKMKLMQEKGRFFRYEDELFSVASWLAVMEGQGMGPQHYNPVADTLSDLNVKQSLENMRSLFTKTVAAMPTHQQFIDRYCKSAGADLGEGR

SEQ ID NO: 87324 - protein, 536 aa, Pelomonas puraquae
  REGION 1..536: note = tr|A0A254MXP7|A0A254MXP7_9BURK Tryptophan halogenase; OS = Pelomonas puraquae OX=431059 GN=CDO81_26835 PE=4 SV=1
MADTATLFNRHIAARPAQGSTDRPPPVRHVCVVGGGTAGWMTALMLATSAYGPRLQVTVLESPQVGIIGVGEGSTPWLRGFFEGLGIEESEWMPACNATYKSGITFKGWSTRPGFESYFHPFASMLDNLTMHQFVDNVHERLGGADVHAHPDRFFVAAALARQARAPRAPAHFPFDVWYGYHFDATLLGQFLARKATALGVRHLQGHMRQAVLDEAGDIDHLQLDDGSALSADFFVDCTGFSSLLIGQALQTPFISYAENLFNDAAIAIPTPHEGPIESQTVSTALGHGWAWQIPLTTRCGNGYVYSSAHCTADQAETELRRHLGLLDADVPARHLKMRVGRMAQQWHRNCVAVGLSQGFIEPLEATALLFVQRTAAMLVEVLERGDLGPAARAAFNDTMKQRFEHTRDYIVAHYKTNSRTDTDYWRDNAENLHLSESLQGVLMTWLSRKPLIAGLQAGRFGQGYPVVSWYALLAGMGIFPDADELQPPSPHQARHDLAAVDDFVRRSALNFPDHRELLGHIPPRHRGSTLQLYLW

SEQ ID NO: 87325 - protein, 535 aa, Saccharopolyspora hirsuta; identical to SEQ ID NO: 82326
  REGION 1..535: note = tr|A0A1H6A529|A0A1H6A529_SACHI Tryptophan halogenase; OS = Saccharopolyspora hirsuta OX=1837 GN=SAMN02982929_02147; PE = 4 SV=1

SEQ ID NO: 87326 - protein, 468 aa, unidentified
  source 1..468: note = Cytophagaceae bacterium
  REGION 1..468: note = tr|A0A4Q3NWY8|A0A4Q3NWY8_9BACT Tryptophan 7-halogenase OS=Cytophagaceae bacterium OX=2026729; GN = EOO38_08935 PE=4 SV=1
MARYLGRKVSITLIESDEISTVGVGEATIPSIRRFHAALGIDEATFMAATGATHKLGIDFIDWHQTGQRYFHPFGKLGTSVAGVGFLHAYLRLREEGLAEPLWRYSPNAVAAAARKFGAATGVDKAVASAFPYAYHLDAGRYAQMLRDYAGARGVERIAGTVGKIERDASGCVTTLSLEDGRKVAGDLFVDCSGGRAILIGDEPDNEWEDWSAFLPCDRAVVVQTEAVRDPVPYTQASAMVAGWRWSIPLQHRVGNGYVYSSAHCDAETAKAELIRSVEGSLINQPRTLSFRTGRRSRFWQGNVVAIGLSAGFLEPLESTSIHLIQTGITSLLNLFPRDRESNDLAAFYNQQMVTAFEGVRDFIILHYIATQRTGSSFWDYIRQMNIPKSLKDRVELFRGRGRFVRDENELFTLDSWVTVMLGQGIDPNAYSVTADGIPIDLLAETAERHVKQIESVVEQMVYYRYRC

SEQ ID NO: 87327 - protein, 499 aa, Caulobacter sp.
  REGION 1..499: note = tr|A0A3Q9IJ06|A0A3Q9IJ06_9CAUL Tryptophan 7-halogenase OS=Caulobacter sp. FWC26 OX=69665; GN = CSW63_17575 PE=4 SV=1
MESQRVRKVVIAGGGTAGWMAAAALGRQLGSLLDITLVESEDIGTVGVGESTIPTARTFNALLGIDEAEFMRATQATFKLGISFENWGEIGDRYIHSFGQVGKSTWMGGFHHFWLEAVAQGFGRDLGDYCFELKAAEAQRFYTGEESPLNYAYHLDAGLYGQFLRKMAEADGVRRVEGKIASVRQRETDGFVDALVMESGQLVEGDLFIDCTGFRGLLIEQTLQAGYEDWSHWLPTNSALAVQTRSTEPAVPYTRAIAHRAGWRWKIPLQHRVGNGLVYCSDHMSDDEAMDMLTREIEGETLISPRLIRYRTGRRRKTWDKNVVALGLSSGFVEPLESTSIHLITIGVTRLMQLFPFGGISQAVVDRYNRQADDELEKIRDFIILHYKVTERTDSAFWDRVRTMDIPDSLAHRIALFQESGHVFQAPGELFQVDSWLQVMLGQRIMPRTYHHMGRMMPPQQLMQALDDLKRNIAGAVSRLPQHQAFLDHYCAPPVSKSA

SEQ ID NO: 87328 - protein, 516 aa, Caulobacter sp.
  REGION 1..516: note = tr|A0A3Q9IP11|A0A3Q9IP11_9CAUL Tryptophan 7-halogenase OS=Caulobacter sp. FWC26 OX=69665; GN = CSW63_18270 PE=4 SV=1
MTTTHPNALRKIVIVGGGSAGWISAAMLSHYFQNGGCAVELVESEEIGTIGVGESTIPPFLQLLASLGVDEREFIQATQASFKLGIRFEDWKQKGERYYHPFGAIGGPIGPHEFYQCWLRAKANGHPSNLQDFAPGTVMADQWKFIPPIKAQRTLIAGASYALHVDARLVAKFLRDYAEARGVKRTEGIVTDVVTHPDGSVAKVVMKDGREVEGDLFIDCTGFRSLLIGKTLDVPFNDWSDMLLCDRAVVVQTENVGAPHPYTVSKAEDAGWRWRIPLQHRAGNGYVFSSRHLSDDEARATLVKNVEGQMLMNPMFIAFKTGMRQRLWHKNVVAVGLAGGFIEPLESTALHLIYRGMDFLLRFFPDRDFDPALAAEYNRRMTADYEEIRDFIVLHYCTTERADTPFWRDVRNAPIPDSLRDRIALFQAQGVLREGVDDMFRNPSWQSVMEGMGVRPRRYQQLVDTVPYEVITQTLDQSAPILAAQVAGLPSHGEFLEKHCPAPKPEAVVAPFGAVA

SEQ ID NO: 87329 - protein, 538 aa, Burkholderia stabilis
  REGION 1..538: note = tr|A0A4Q2A8K9|A0A4Q2A8K9_9BURK Tryptophan 7-halogenase OS=Burkholderia stabilis OX=95485; GN = D1006_36850 PE=4 SV=1
MSNPIKNIVIVGGGTAGWMAASYLVRALQQHTNITLIESEAIPRIGVGEATIPSLQKVFFDFLGIPEREWMPQVNGAFKAAIKFVNWRKSPDRAGDDHFYHLFGSVPNCDGVPLTHYWLRKREQGFQQPMEYACYPQPGALDGKLAPCLPDGTRQMSHAWHFDAHLVADFLKRWAVERGVNRVVDEVVKVRLNDRGYISSLSTKEGRTLEADLFIDCSGMRGLLINQALKEPFIDMSDYLLCDSAVASAVPNADARVGVEPYTSAIAMNSGWTWKIPMLGRFGSGYVFSSKFTSRDQATADFLNLWGLPDNQPLNQIKFRVGRNGRAWVNNCVAIGLSSCFLEPLESTGIYFIYAALYQLVKHFPDTSFDPRLTDAFNAEIVYMFDDCRDFVQAHYFAASREDTPFWLANRHDLRLSDAIKEKVQRYKAGLPLTTTSFDDSTYYETFDYEFKNFWLNGNYYCIFAGLGMLPDRSLPLLRHRPESIDKAEAMFARIRREAERLRTSLPTNYDYLRSLREGDAGRPRSQPGPTFATPEIL

SEQ ID NO: 87330 - protein, 518 aa, Luteibacter sp.
  REGION 1..518: note = tr|A0A2T5LGW1|A0A2T5LGW1_9GAMM Tryptophan halogenase; OS = Luteibacter sp. OK325 OX=2135670 GN=C8J98_102277 PE=4; SV = 1
MARLKKVLVVGGGTAGWLAACYLAKAVNAFDPRSVQVHLVESPDIGLLGVGEATFPSIRGTLAAIGIDERRFLVGATATYKQGIHYRHWVRPPGTPGADHFFHPFNAPSQRPGGPELLPYWLLGAAPEGMSFADAVSMQSALVDHARAPKRARDADYQGPLNHAFHFDAACFARVLAEHGEQTLGVVRHVATVERAELDEHGAIARVVTKEEGELTADLYVDCTGLRSMLIGNVMQSPFRSRADVLFADRAVAMQVPYESPDAPIPSYTISTAQEAGWIWDIGLQKRRGTGYVYSSRHTTDDRAEEVFRRYVGRAGEGLKAMHIKFETGYRPEHWRKNCVAVGLAGGFVEPLESTGIALIELATYLLTHLLPSDTDNMESAARHFNEMMVARYDRIIDFIKMHYCVSQRRDSPFWIDNADVASIPQTLQEKLAKWKQRPPHRLDFVSDLEMFMTSSWQYVLYGMEFKTDLEPVRSAYPDMEAARQEFTMIRQAAARALDDLPDHRELVEQLCREHNCR

SEQ ID NO: 87331 - protein, 390 aa, Myxococcus xanthus
  REGION 1..390: note = tr|A0A4Y6C3T9|A0A4Y6C3T9_MYXXA Tryptophan halogenase; OS = Myxococcus xanthus OX=34 GN=BHS06_04780 PE=4 SV=1
MSEASYDVAIIGGGPAGAAMAVALRDLAPFLSVVMLERTDYDTHRSGETLSPDLRIPLSRLGVWSSFLRDGHLASRGTSSCWSRAEPRVQDTRMSPWGSAWHLDRARFDERLSLEAARQGVRVLRLTTLLDVESIAKEGYRLHLSQRKTGALTLRARFVVDATGWKATFAMSQGARRRIRDRCFTVHGAFQLRPGESFPTDALVESCPEGWWHSARLPSDCVAVTLVGDGDSLHGLRWATPEPWAALLDQAPVTQARLAACDFAGEPLVAAPVLVGELDQMHGERWLAVGDAACTHDPLSAQGIFSALDSALLAAEALEQYLRGEEDALCAYEQTLHLRFNEHLHRRSCTYLEEQRWPDAPFWKNRHTAFPALPPAAGQRSAPAPTGLAP

SEQ ID NO: 87332 - protein, 507 aa, Hirschia baltica
  REGION 1..507: note = tr|C6XS27|C6XS27_HIRBI Tryptophan halogenase; OS = Hirschia baltica (strain ATCC 49814 / DSM 5838 / IFAM 1418) OX=582402 GN=Hbal_3201 PE=4 SV=1
MNQDNNSHHIVIVGGGTAGWLSAAFLSSQLKNRFQKNVNITLVEASDIATIGVGEATIPSLRQTLNACGIDEREFLKACDATFKHGIEFIQWRETPAKAPAESYFHPFGELVSVEGHNPAHQWSKLGKDQREDFADLFSVQPEIAKLGRAPKHSNDRAYDGALAYAYHLDAGKLVEFLKAKFRDVSVAQIIGKVVGASSSENGNFSSVQLDDGRSIEGDFFIDCTGFAARLINADQENEFIDKSSILFVNRAVTTRIPVEDKRDITGYTKCTAQTAGWIWDIALQTRRGIGHVFSTRHMNDEDAVQCLANYTGKPIEDLDVRFLDMKTGYHARQWRKNCVAVGLSSGFLEPLESTGIYLIEMANWALLDMLPRFFSGAQPQERYNEAMRLHYENIVDFLKLHYCLSNRDDSDFWTENRGPQTVPETLKQKLHQWQNSVPSVYDFDRRIQCFSENNYQFVLYGMGWSGHDCVQPLNNDIQQMLDALAVRRERLRQFVLRDTQANLDFY

SEQ ID NO: 87333 - protein, 498 aa, Pseudoalteromonas sp.
  REGION 1..498: note = tr|A0A0Q0L322|A0A0Q0L322_9GAMM Flavin-dependent tryptophan halogenase RebH OS=Pseudoalteromonas sp. P1-26; OX = 1723759 GN=rebH_1 PE=4 SV=1
METKKITKVVIAGGGTAGWITAALLNKVLGKVIDITLVESAEIGTVGVGEASIPPILHLNGALGISEKEFIKATGATIKLGIEFENWRSQGHSYMHAFGEIGKDFPFCEFYHFWLKANQANNAPDFWDFSLNYQAAKAHKFAHLKHIPNTQLAGLHYAYHFDATRYGEFLKELAQSRGVKRIEGKIESVNQCHESGYIRSLLLKNGEQIDGDLFIDCTGLRALLIEQTLNTGFEDWSHWLPCDSAIAVQSESAFDAIPYTRSIARDSGWQWQIPLQHRVGNGIVYSSRFLSDEAAKQQLLENLPAKPLTEPRVIKFKTGRRLKQWHKNVVSVGLSSGFLEPLESTSIHLIQSAAIRLIKFFPHQGIKQSLVDEFNQQSKTEFERIRDFIILHYKITERDDSAFWRFCKGMDIPSSLKKKIELFKTSGKLVREDDELFAEVAWQQVMIGQGLIAEDHHPLTDALSDEQLNELFSNLKTLINSTVEQLPSHSQFLEKVQN

SEQ ID NO: 87334 - protein, 513 aa, Pseudoalteromonas sp.
  REGION 1..513: note = tr|A0A0Q0H5V5|A0A0Q0H5V5_9GAMM Flavin-dependent tryptophan halogenase RebH OS=Pseudoalteromonas sp. P1-26; OX = 1723759 GN=rebH_3 PE=4 SV=1
MQKNEVKKVVILGGGTAGWLSAGLIAAQPHLTHNAQITLIESPDIATIGVGEGTWPTMRQTLKTIGISESEFIQRCDASFKQGSRFDGWCDDEGDAHYYHPFSLPVAYQQLNIAPYWFANKDAVSFSHAVASQTYLCDHHKAPKNHLHSAYQGEANYGYHLDAGKFAMLLQQHCTTNLNVEHIVSHVESINSDEDGYISSLQTRDHGTIAGDLFIDCSGTHAKLLHQHYGIELIEQHDVLFNDRAVAVQVPYLNPQQEILSYTKATAQDAGWIWDIGLQSRRGLGMVYSSRFASSEDAKQALSHYIAKTQPGTAQNELTFREISFTPGYRRRFWYKNCLAIGMSAGFIEPLEASALVMVELGLNNLLANFPTHRAAMPTLAKRFDEQCHYRWQRIIEFLKLHYVLSKRTSPYWQAHKEANSIPLQLQENLALWQYQSPWLNDFDRAQEVFSAASYQYVLYGMKQLPQFPVLAMPAAIIEHFSANQQQAKRGLQQLPTNRELLNHIQQFGIQPI

SEQ ID NO: 87335 - protein, 589 aa, Myxococcus xanthus
  REGION 1..589: note = tr|A0A4Y6CAM4|A0A4Y6CAM4_MYXXA Tryptophan halogenase; OS = Myxococcus xanthus OX=34 GN=BHS06_06020 PE=4 SV=1
MELLMSGAWEGKLYDVIVMGGGPAGATLAARLRKDPGLSVAIFESERFPREHIGESFVPSVVSSLQESGALGRVLASDCWIKKGGGYYSWDAVRPWSTFFEHKAYERDGYRRWAFHANRAELDDILLRHAEENGAEVFEGTPIKQVYRRDGFTEVDLGEKGSARCKVFVNASGRYSVTSLGGPREFLSSYRNIAIWSYIRKGKPAQSLPGDWNIFRESGVSPIGSFAFEDGWFWYIPIPLEVDGRREVVHSLGLVTDPRGLKSKRDYMSASVFMETARKVPFLRDLVADAELIYDEFRTTANYSRISHQMCSWENREIRVGDAAFFVDPLFSTGVHFALHHTAAAAVLVRAAFDEAMPEQHREDLWHDYDQMLRKQAQVFSLAIDQWYNEISLAHPGSVYWRERSERATFEVRNATFHYLVNGSLDEDLLHVISQGNDAVEALSETGAWRATFAQLQRLRPADDALVQLMPNVKFRKSVTLEHPIADSAEDKLDARPQAFDHGPYWESPEQHAHEVAPRFGRPSPCLRFYFEDGDPQDTVRILWNRPNSALLARLSQPHAYGPLLAGCSLSERVLLEQLLLKGMMKIIQ

SEQ ID NO: 87336 - protein, 499 aa, Pseudoalteromonas sp.
  REGION 1..499: note = tr|A0A0P9GE54|A0A0P9GE54_9GAMM Flavin-dependent tryptophan halogenase PrnA OS=Pseudoalteromonas sp. P1-9; OX = 1710354 GN=prnA PE=4 SV=1
MAIPKKIVVLGGGSAGWMAASLLHHSWANKGSEITLIESDMIGVVGVGEGSTPSLKYFFEKLQIAENEWMPFCNATYKCGISFPDWTSHLEENEYFHPFYSDHDWKTGQAFIHNCNVRRQGFDIQTRPNHYWLQAKLAKNKLSPKLKQAQNKELDYGYHFDSQKLGEFLKNRAIKLGIKHIIGTVDVVNNDDKGVHSLTLSCGKTINGDLFIDATGFASLLLQKTLKVPIISYEDYLLNDSAIAIPTETQTDNEISPQTVSRALSAGWAWTIPLRNRNGNGYVYSSKYITPEDAETELRAYLGISERADIKAHHIKMRLGRVAKHWHLNVLGVGLSQGFIEPLEATALSCIQYTVEHFIETVEQGSNDATTQQQFNQEINTVYDAIRDYISAHYRLNTRDDSAYWRDNRGAASPEKLSKILMSWDDSDSQFESTLQQLNAEVMYFSPSWYCLLAGKGRFSEATHALPQSVKVANVADIDNYCEQQALHFKPHYQALNNE

SEQ ID NO: 87337 - protein, 498 aa, Pseudoalteromonas sp.
  REGION 1..498: note = tr|A0A0P9JY06|A0A0P9JY06_9GAMM Flavin-dependent tryptophan halogenase RebH OS=Pseudoalteromonas sp. P1-9; OX = 1710354 GN=rebH_2 PE=4 SV=1
MTNQINNVVIVGGGTAGWLTASLLAKVLGKQISITLVESKDIATIGVGEATIPPIIPFNAAIGIDEKAFIKATNATIKLGIQFENWGQQGEHYMHAFGSFGKDFPFCNFLNYWLKAKEQGDTSSFWDYSINYQAAKRNRFDKLQHLPNTKLAGTSYAYHFDASLYAQFLRNHAEQLGVKRIEGKVIHVETHHNNGFIKSLTLENQEVVTGDLFVDCSGLHGLLLDKTLNVGFEDWRHWLPCDSALAVPCDHGENEIKPYTRSIAHDAGWQWQIPLTNRIGNGLVYASNHLSDDDAKQLLLSNLPGRALAEPKLIRFRTGRRLKQWHKNVVAIGLSSGFLEPLESTSIHLIQTAATRLVKHFPLMGINDGVVAEFNRQSQVEFERIRDFIILHYKLTERTDSAFWRQCKDMDVPNSLRHKMQLFAENALFFRQDDELFSEVAWQQVMLGQGIKPAQYHPLAHNLNNAQIKDLLESLKTLVAHTSDKLPTHNEFLKRFGN

SEQ ID NO: 87338 - protein, 516 aa, Rhodanobacter sp.
  REGION 1..516: note = tr|A0A1V3PGE7|A0A1V3PGE7_9GAMM Tryptophan halogenase; OS = Rhodanobacter sp. C01 OX=1945856 GN=B0E50_12380 PE=4; SV = 1
MEADPPVRRIVVVGGGTAGWMTALTLANTAYGSRLEVTVIESPQVATIGVGEGSTPFLRRFFEDLGIEEAEWMPACNATYKNGITFDKWSTRPGFESYFHAFASMLDNLTMTQFINNVHSRLNHADVYAHPDRFFIASRLARDCRAPKPAHSFPFDIWHGYHFDATLLGAFLLRKALERGVRHVARHVNEVILKDNGDIGSLRLEGDEILDADFFIDCTGFASLLIGKALKTPFVPYAENLFNNAAIALATPIDGPIMSQTVSTALKNGWAWKIPLTNRYGNGYVYSTDYCSPEQAETELRAHLGVLDADVPARHLKMRVGRVAESWNRNCLAVGLAQGFIEPLEATTLLFVQRTAYMFVAALEKGDLGAEARANFNQTINVQFEGTRDYIVTHYKTNTRTDTDYWRANAANTHLSRPLRHLLTTWLASKPIIPGLKKGVFGQGYPTMSWYSLLAGVGLFPDPQHMRPPTSEEAQHDLAQIDNLLERSAMNYPDQRELLQRIPLKSREPSLQVYLW

SEQ ID NO: 87339 - protein, 517 aa, Pseudoalteromonas arctica
  REGION 1..517: note = tr|A0A290S3T4|A0A290S3T4_9GAMM Uncharacterized protein OS=Pseudoalteromonas arctica A 37-1-2 OX=1117313; GN = PARC_a2186 PE=4 SV=1
MNDDIKSIVIVGGGTAGWLSAGIIAAYLQKHHSKKINITLLESSDIPTVGVGEGTWPTMRRTLKDMGIRETEFIKKCNVSFKQGAKFAKWVTGENDDYYYHPLEIPTGMFENNLATSWLNINNAQPPFAQYVSAQQSICESGLAPKQITTPEFSAIANYAYHLDAGLFATFLKNHCIDNLNVKHIVGTVVGVNNCTNGDIKSVSLNNKIEIAGDLFIDCSGFKSLLLGENLGVGFKSCKDVLFADSALAIHMPYKDDEPICSHTLSTAQTSGWIWDIGLQTRRGIGHVYSSKHISDEDAKQQLFDYLNINKDQQSEYKVKKLSFEPGHREKFWHKNCVAVGLSAGFLEPLEASALLLVEISANFVAQQFPANRHVMNITAQRFNRIFSYRWERIIDFLKLHYMLSKRTDSPFWQAHCHQNTIPQSLKDNLSLWEYHTPSDNHFDHSQEVFPAASYQYVMYGMGFTGSSELYGNSESYFKKAIALVNNNQQYTQKLLNKLPTNKALLAQINQFGMQQI

SEQ ID NO: 87340 - protein, 516 aa, Pseudoxanthomonas sp.
  REGION 1..516: note = tr|A0A4Q8L5S0|A0A4Q8L5S0_9GAMM Tryptophan 7-halogenase OS=Pseudoxanthomonas sp. NML171200 OX=2480816; GN = EA660_17700 PE=4 SV=1
MDEAIRQVVIVGGGSAGWLTAGLIAAEHRDRHGPTLRVSVLESPDVPAIGVGEGTWPTMRDTLRRIGVGEADFVRACDATFKQGSQFVGWVDGGAHDRYTHPFTLPKGYGETQLAVAWAAQGAVPFAHLACFQPHLCDAGRGPKQFATPEFAAVANYAYHLDATRLGAFLRQHCVERLGVRHIVGHMDAVISHENGDIAALAVRDQPALEGDLFVDCTGLRALLLDAHYGIAPVGVSDTLFNDRALALQVPYADPDAPIACQTLSTAQRAGWIWDIGLSARRGVGHVYSSAFTSDEEAEADLRAYVEATGGPAAATLPPARRIDLQPGYRPTPWHRNCVAVGLASGFVEPLEASSLVLVELAAARLADEMPATRADMDLLAARFNETFAYRWQRVIEFLKLHYVLSRRTTPYWQAHREDASVPPRLRELLQLWRHQSPSRSDFPRSEEIFPSASWQYILYGMGVRPEPRPARRSEDLQAAQACFAESAALVQRMLPALPSHRALVEHIKAHGLPRL

SEQ ID NO: 87341 - protein, 491 aa, Shewanella hanedai
  REGION 1..491: note = tr|A0A553JUJ9|A0A553JUJ9_SHEHA Tryptophan 7-halogenase OS=Shewanella hanedai OX=25 GN=FN961_00290; PE = 4 SV=1
MKKINRIVIVGGGTSGWMAAAALSNKLSVDQFEITLIESSRIGTIGVGEGSTPYLKHFMHSLGFQESDWMSRCDASYKNGIYFDNWNGDKNRYFHPFYFSLDVKPAEVFFNCANARRRGIGPHINGDNFFISGHLAQQHLSPIADKTLPAQAEYGYHFDAAKLAGVLSDLSCSRGVKHISADVIDVNQDDGGDVISLVLDDGGEIQGDHFIDASGFNALLIGKTLQVPFEPFGDELLNDAAVTVSTPRETREKLATYTQSKAMSAGWMWRIPLTSRTGNGYVYSSQYLSKEQAEDELAAELNLDASTVNFRHINMKVGMRSKPWSRNVVAIGLSHGFIEPLEATALMITQWSIEYFIQLLMEVETPNEQCRDKFNTEMTRLMLGVKEYVHGHYVTSKRRDSDYWRKATSEESISLRLSALLAKWKSGEDFDEFLHCNERDMAYFRPSWYALLAGMDYRDESLVMVHQMLDPNLIEQAQGYSKTVAEKYFNE

SEQ ID NO: 87342 - protein, 525 aa, unidentified
  source 1..525: note = Unknown
  REGION 1..525: note = tr|Q1YRF7|Q1YRF7_9GAMM Putative tryptophan halogenase OS=gamma proteobacterium HTCC2207 OX=314287; GN = GB2207_03404 PE=4 SV=1
MNHKINRVVIVGGGTAGWLSAGIIAAEHCIGTKTSSPENPFQLTLVESPDIATIGVGEGTWPSMRSTLQKMGISETDFFRECSASFKQGTLFKGWRTGADDIYTHPFTPPQGYTEVNLAPHWQTAREQINFAQAVSPQSALFTDKLAPKQISTPEYAFNVNYGYHLDAAKFAEFLRKHCVEKLGVTHIKANVTGINSADNGDIASIATDSHGTIEGELFIDCSGSRALLIGEHFGIPVCSKSDILFNNTALAAQIPYTHENDPIESCTLSTAQSAGWIWEIGLPTRRGIGHVYSSDHNTEERASEELLAYIASTVSDQAAAAATLRKVKFSPGHRAKFWHKNCVAIGMSAGFIEPLEASALVLVELSAAMIAEQLPANRQIMDLVAKRFNDKFLYRWDRIIEFLKLHYILTQRRDTEYWRDNCESSSVPEQLVDLLALWRHQSPWHRDNNNVDDMFPSASFQYVIYGMDFETMPSQTQRRSELAERQRAGALFQENATRTQQLQTSLPSNRDLINKIYTFGFQKI

SEQ ID NO: 87343 - protein, 501 aa, Sphingomonas sp.
  REGION 1..501: note = tr|A0A396RRY2|A0A396RRY2_9SPHN Tryptophan 7-halogenase OS=Sphingomonas sp. ZDH117 OX=2305907; GN = D1610_04230 PE=4 SV=1
MNPIRSVVIVGGGTAGWMAAAAAARFLDDGRRTITLVESDAIGTVGVGEATIPPILGFNRLLGIDEAEFVRATQATFKLGIEFVDWGAIGERYLHPFGEHGRDFEGVAFHQFWLKHRAEAGIGPLSDYSMSSVAAAAGRFARPVPDPRSPLSGLGYAYHFDAGLYAAFLRRRAEAHGVTRIEGRIAAVERNGETGFVEAVVLDDGRRVTGELFIDCSGFRSLLLGETLGVGYRDWSHWLPCDRAIAAPCERTEPLLPYTRSTARPAGWQWRIPLQHRTGNGIVYAAAHMADDEAEALLLANLDGAAAGAPRRLSFTAGVRERLWDRNVVALGLSGGFIEPLESTSIHLIQTGISKLFWLFPDTRFSTVERDEYNRLMIDQFEYIRDFIVLHYKATRRDDTPFWRYVRDMPIPDSLAHKIALFREKGRVLRYDHDLFAIPNWVAVMLGQNIMPDGYDPMVDSMDDARVLSAMRQIAEANAAAARQMPTHADYIARHCAASPV

SEQ ID NO: 87344 - protein, 508 aa, Shewanella hanedai
  REGION 1..508: note = tr|A0A553JIL9|A0A553JIL9_SHEHA Tryptophan 7-halogenase OS=Shewanella hanedai OX=25 GN=FN961_21385; PE = 4 SV=1
MDIKKVVIVGGGTAGWLAANHLGKALLNTEGVSVTLIESPDIPTIGVGEGTVPAIRKSLQSFGISETEFITQCDVTFKQSIKFSNWLNKDNHGSDNSFHHLFNIPSPLGGDLTPFWLNNRDYDYSNLVSPQFVACEALKAPKKITTPEYAGALGYAYHLNAAKFAKLLAKNGRDRFCVEHIIANVSEVKLNVSGAVGSLVTDTHGELVYDFYIDCTGFEALIIEKALKVPFVDKSAQLLVDRAIAVQVPTNINAPIPPFTIATAHQAGWIWDIALTNRRGVGFVYSTKYMDDETAISKLDKYLGGVLSDLSYRVLPMKVGYREKFWHQNCVCLGLAQGFLEPLEATSILLTDFAASYIANRFPKSVEQIQSIQPQFNQVMEYAWERVVEFIKLHYCLSDRTDSQFWIDNRDPSTIPDELKRRLSLWESYVPNREDFFSKFEVFDLDNYLYVLYGMKYHTQVKNLTNEQLHLANQQSLQIAKMGKQLAEELPDHRELLNKIKEHGLQSI

SEQ ID NO: 87345 - protein, 526 aa, Shewanella hanedai
  REGION 1..526: note = tr|A0A553JQL9|A0A553JQL9_SHEHA Tryptophan 7-halogenase OS=Shewanella hanedai OX=25 GN=FN961_08640; PE = 4 SV=1
MQKPTKKIVIVGGGTAGWITAGWLAAHHRTYDATSRVEVLLVESPNTPTIGVGEGTWPTMRNSLIKMGISETDFIRECDATFKQGAKFAKWVDGTQDDFYYHPLVLPQGFTQQDLAPYWSSQQKQTSLSADKHSFSNAVCFQESVCEQGLAPKTIRTAEYSDVANYAYHLDAGKFTDFLKRHCIEKLGVTYVSADVVAVNAHANGDIASLTTHVDNMPNGDISGDLFVDCTGFSSLLLGKHYQVPFIDCSDVLFIDTALAVHVPYDDADSPIASHTISTAQDAGWIWDIGLQHRRGVGYVYASKYTNEAAAMQALADYIGPKFTSLKVRKIPIHSGHRETFWHKNCVAVGLSAGFLEPLEASAIVLIELSAQMISEQLPANREVMDIVANRFNQTFRYRWDRIIDFLKLHYVLSQRDDTDFWKDNRDPATIPDSLKDLLKIWQHRAPADMDFTSNNEVFPAASYQYVLYGMGFETDFSMTPHMLNDWHTAHKQFAKNEHLIERALASLPTNRELINKIHQYGFNDL

SEQ ID NO: 87346 - protein, 513 aa, Microbulbifer thermotolerans
  REGION 1..513: note = tr|A0A1I1PWH9|A0A1I1PWH9_9GAMM Tryptophan halogenase; OS = Microbulbifer thermotolerans OX=252514; GN = SAMN05660479_03263 PE=4 SV=1
MLQGPFYFSLHERVFQVSDGNIKKLVILGGGTAGWMTAALAAKVLGKVIDITLVESDRIGTVGVGEATIPPIIHFNRALGIDEREFLTATKGTIKLGIQFENWLQRGDSYMHAFGSIGKNLAFCDFHHIWNRSRLSGDTSSFWDYSLNYQAAINNKFAPLTHIQGTNLPGISYAYHFDAGLYAQFLRRYSEGRGVKRIEGMVKEVRVRSDNGFIQGLLLESGLEIDGDLFVDCTGMAALLIEKTLGVGYEAWSQWLPCDRAMAVPSASAKPIVPYTRSIAHEAGWQWRIPLQHRTGNGLVYSSKHWSDDRAREALMSNLDGEPLAEPRVIPFRTGRRGEQWCRNVVSIGLSSGFLEPLESTSIHLIQTAATRLMKMFPHRGIRAEEVAEFNRQSRVEIEHIRDFIILHYKANQRRDSDFWRDCEAMGVPDTLSEKVELFRRTGKVFRDYDDLFSEAAWQQVMIGQGIVPEDYHPVADALSDEQLGDLMASLRTLIDGTVNSLPEHEQYLPNVG

SEQ ID NO: 87347 - protein, 530 aa, Xanthomonas translucens; identical to SEQ ID NO: 86477
  REGION 1..530: note = tr|A0A0K2ZYD2|A0A0K2ZYD2_XANCT Tryptophan halogenase; OS = Xanthomonas translucens pv. poae OX=227946; GN = XTPLMG728_2662 PE=4 SV=1

SEQ ID NO: 87348 - protein, 501 aa, Streptomyces sp.
  REGION 1..501: note = tr|A0A0A8ENB8|A0A0A8ENB8_9ACTN Tryptophan 5-halogenase OS=Streptomyces sp. 769 OX=1262452; GN = GZL_02919 PE=4 SV=1
MTASYLRAALGESINVTVIESKRIKTIGVGEATFSTVRHFFDYLGLSENDWMPKCNATYKLGIRFENWRAKGHYFYHPFERLRVVDGFPLTEWWLNKKPSDRFDQDVFLMSEICDTMRSPRYLDGTLFEQDFVERGGSMDLERSTLAEQATQFPYAYQFDASLLADFLTGYATARGARHIEDDVVEVVRDERGWISHLKTREHGELAGDLFIDCTGFAGLLLNKTLGEPFVSYQNTLPNDSAVALRVPHDAEHTRLRPCTTATAQEAGWIWTIPLFERIGTGYVYASDYTTPEEAERTLRAFVGPQAADVEANHIRMRIGRSRQSWVNNCVAIGLSSGFVEPLESTGIFFIQQGIEELVKHFPDAKWDPKLRDSYNRTVANAMDGVREFLVLHYRTAARNDNAYWRDAKTRELPDGLAARLEAWQSKLPTEETIFPHYHGFEPYSYHAMLLGLGGFEAKAAPVLAYMDDSRAAQEIQRLKDQARDIAKRLPSQYEYLAQMH

SEQ ID NO: 87349 - protein, 409 aa, unidentified
  source 1..409: note = Caballeronia arvi
  REGION 1..409: note = tr|A0A158HNM1|A0A158HNM1_9BURK Tryptophan halogenase; OS = Caballeronia arvi OX=1777135 GN=AWB74_02016 PE=4 SV=1
MNVSVDVAIIGAGPSGAVAAALLRKAGHSVLVLERQHFPRFSIGESLLPQSMAYLEEAGMLQDVVEAGFQYKNGAQFVHRDRAAAYDFRDKHSDGWGTTFQVERAVFDDLLIRRAAKQGAEVRFGHAVLEMKTGDAPVLEVADEAGARYQVHARFVLDASGFGRVLPRLLNLEAPTRLPTRAAIFTHVRDGIAPETHDRNKITVAVHPEHGDVWYWMIPLANGRSSVGCVAQAAFLDVPEAEREAKLRALIRCEPTLNRLIGDAPFLMPVRHIGGYSANVERLHGPGYALLGNAGEFLDPVFSSGVTIAFRSAHLAVQTLTRQLNGEMVDWHAQYDAPLRKGIDTFRAFVENWYTGKLQDIIFAREQTPLIRRMISAVLAGYAWDETNPYVVDPVRRLNALHEVCMQQK

SEQ ID NO: 87350 - protein, 505 aa, Xanthomonas translucens
  REGION 1..505: note = tr|A0A199P4S4|A0A199P4S4_XANCT Tryptophan halogenase; OS = Xanthomonas translucens pv. poae OX=227946; GN = A6R73_00120 PE=4 SV=1
MAQIRKVVIAGGGTAGWIAACALAHQFRDLLDITLIESEQIGTVGVGESTVPPIRSFHRFLQIDEQEFLRAVAGTFKLSISFENWRRPGERYLHPFGLTGQSTLACAFHHFWLEAQRRGMLSELGDYCLETVASRMDRFALQQSPPVNYAYHLDAGLYARLLRGHAERHGLKRVEGKIQQVRQHAESGFVEALLLEDGTLVEGELFIDCTGFRGLLIEQILHTGYEDWKQWLPCDRAVAVQTEAVAAPVPYTRAIAHAAGWRWHIPLQHRVGCGLVFSSAHLSDEEARAKLLHDAAAPPIKEPWLVPFRTGRRRKAWNKNVVALGLASGFIEPLESTSIHLTIAAVMRLITLFPSEGIAPSMVDLYNAVSRAEMEHVRDFIILHYHANQRDEPMWQACREMALPDSLQQRLRAWRERAHAWQGADELFRVDSWIHVLLGQGIVPAQHHPLARALPDQPLQQFLDAIRQPIDRAVAQMPSQQDFIARYCKAGPEVWAGRAPVAAPA

SEQ ID NO: 87351 - protein, 498 aa, Pseudoalteromonas spongiae
  REGION 1..498: note = tr|A0A290T4M3|A0A290T4M3_9GAMM FADH2 O2-dependent halogenase I OS=Pseudoalteromonas spongiae UST010723-006; OX = 1117319 GN=prnA PE=4 SV=1
MTNQINNVVIVGGGTAGWLTASLLAKVLGKQISITLVESKDIATIGVGEATIPPIIPFNAAIGIDEKAFIKATNATIKLGIQFENWGQQGEHYMHAFGSFGKDFPFCNFLNYWLKAKEQGDTSSFWDYSINYQAAKRNRFDKLQYLPNTKLPGTSYAYHFDASLYAQFLRNHAEQLGVKRIEGKVTHVETHHNNGFIKSLKLENQAFVTGDLFVDCSGLHGLLLDKTLNVGFEDWRHWLPCDSALAVPCEHDENEIKPYTRSIAHDAGWQWQIPLTNRIGNGLVYASYHLSDDDAKQLLLSNLPGKAIAEPKLIRFRTGRRLKQWHKNVVAIGLSSGFLEPLESTSIHLIQTAATRLVKHFPLMGINDRVVAEFNRQSQVEFERIRDFIILHYKLTERTDSAFWRQCKDMDVPNSLRHKIQLFAENALFFRQDDELFSEVAWQQVMLGQGIAPAQYHPLAKNLNDAQIKDLLESLKTLVAHTSEKLPTHNEFLKRFGN

SEQ ID NO: 87352 - protein, 510 aa, Sphingomonas sp.
  REGION 1..510: note = tr|A0A1S6FJF0|A0A1S6FJF0_9SPHN Tryptophan halogenase; OS = Sphingomonas sp. LM7 OX=1938607 GN=BXU08_08535 PE=4 SV=1
MRATDALRKVCIVGGGTAGWIAAAVMAEHFKGKLFEIELIESDDIGTIGVGESTIPPFMELIAKLGINEQEFVRATQASFKLGIEFEDWHKKGESYFHPFGSIGQPVELSEFYQCWLKAKRSGQPFGLMDFAPAAAMAKDGRFMLPFKAQKTPVGGAAYALHVDAKRVAQFLRGHAEARGVKRTEGIVSDVRLDDRGFVDTLVLKDGREVTADFFIDCSGFRAVLIEKAFGVGYEDWSEWLFCDRAIAAQTQNVGPPRPYTLAQAQDYGWRWRIPLQHRTGNGHVFCSEFLSDDEATRTLLDQVEGDVVAGPIVVPFKTGVRDKIWHKNVLSLGLASGFIEPLESTAIHLVYRGMDFFFRYLPDRHCNPRLADEYNRRMTADYTEIRDFIVLHYCATQRDDTPFWRKCRDMTLPDSLQARIELFRVNGVLREGMDELFRAVSWHSVLEGMGIHPATYHPLVDRIDEAWLFEGMSQVRAQLAQVVGTLPTHQEFIDAHCRADAVDLGKPAR

SEQ ID NO: 87353 - protein, 413 aa, Amycolatopsis decaplanina
  REGION 1..413: note = tr|M2Y7R2|M2Y7R2_9PSEU Tryptophan halogenase; OS = Amycolatopsis decaplanina DSM 44594 OX=1284240; GN = H074_20607 PE=4 SV=1
METRSTETADVVIIGGGPAGSTAAGLLAQQGIDVILLEREKFPRYHIGESLITGCVGVIDELGIRDRLENFGFVKKFGGSLVWGKGGRWSFNFAEGDPEFTNAYNVRRADFDAMLLGRARELGTRVLEEAIVKEVLLEDGRVTGVRHAVRGGAETEIRAKLVIDASGQARVLGRHLTEVHWHEDLRNVAVWTYFQGGVSLTGEETGNIFIEHVPGGWFWYIPLHDGTHSVGFVTPANEAGETRLSMPELFTTKIAESVHLKKYLENATRVSAYRNARDWSYACDRFAGPGWMLMGDAAAFVDPLFSTGVTLAMLAARSVAHAVPVMLGNPERAESIARGYEKSYREFLENILSFVRFFYDAGLNREAYYQYAQQLVDPSRLFFPRKDFVTLVSGLNSLNPIFELDVTGTGTRS

SEQ ID NO: 87354 - protein, 505 aa, Microbulbifer thermotolerans
  REGION 1..505: note = tr|A0A143HP58|A0A143HP58_9GAMM Tryptophan halogenase; OS = Microbulbifer thermotolerans OX=252514 GN=A3224_13780; PE = 4 SV=1
MTTDKRIKSLVIVGGGTAGWMAAASLQRHFSGTPLKITLVESPDIGTIGVGEATTPTFRRFCHRLGLQDLDVMRAIGATCKLGIQFNHWKNQNHSFFHPFSVFGQSLNQVDFLHYWLRARKAGLDAQLTDFSLGAGLALAGKFSPPSPNPPSTLSVYDWALHLDAGRFAALLREKAVAGGVEHVRATVHRVTRAENGFVHSLLLDDGRELAGDLFIDCSGFRGLLIEDALQTGFEDWSHWLLCDGAWVAPSARETAAKPYTQVNAHSAGWQWHIPLQERSGNGRVFSSRYIDAEQVRDEFSQSLGESALDEPRLIRFKPGIRRRAWNKNVIALGLSAGFIEPLESTSIALIETGIERLKTLFPQRDCHPDIATEFNEQTRLEYERVRDFVLLHYALNGREDSDFWRECRAMAKNGNLPESLQRKINVFLSSGYLLRYRWEMFQPASWLAIFAGFDRLPHSWNLAADALDQTQLLQGLRGMRDSVRQAVREAPAHQEFIARYVQKK

SEQ ID NO: 87355 - protein, 531 aa, Sphingomonas sp.
  REGION 1..531: note = tr|A0A396RLJ5|A0A396RLJ5_9SPHN Tryptophan 7-halogenase OS=Sphingomonas sp. ZDH117 OX=2305907; GN = D1610_11825 PE=4 SV=1
MGSAGRSAARRRADRTAAGDAFGGEAEGGCDDPSPGGTRGGVIRRVVIVGGGTAGWMAAAALARGLGTTHAITLIESASIGTVGVGEATVPPIRDFNRYLRIDEDEFVRATSGSFKLGIEFVGWNGEGSRYFHPFGFLGPDMAGADFHHVWLRHLAEGGDPDIARINPETAAAREGRFARDTRHGPLHHAFHFDAARYATFLRGYAEARGVARIEGEVTAVERDGESGDIAAVRLASGAAVAGDLFVDCSGFRGLLIEGALETGYVDWTCWLPCDRAVALPTARIADPAPFTRSTAREAGWQWRIPLQHRTGNGYVYCSSFLGDDEAASLLAARVDGEPLAEPNRLRFTAGHRRLFWNRNCVAIGLAGGFLEPLESTSIHLIQTAIIRLLALFPGDHVDPRLAERFNREAQAEYEGVRDFVVAHYAVASGIDTPFWRAIGEAPLPESLAERIAVFRATGTVLYERGDLFGPTNWYAILTGQGCAASAYHPLVGALDGKLVRDRIAALEARCAQMIAGLPGHADFIAAHCGA

SEQ ID NO: 87356 - protein, 501 aa, Sphingomonas sp.
  REGION 1..501: note = tr|A0A1S6FIQ8|A0A1S6FIQ8_9SPHN Tryptophan halogenase; OS = Sphingomonas sp. LM7 OX=1938607 GN=BXU08_06855 PE=4 SV=1
MAGPFRIVIVGGGTAGWMCAAACASKLDPARYDVRQIESEEIGTVGVGEATLPQMKDFNDFLGIDEAEFMAATQATFKLGIEFVDWGQIGNRYIHPFGNFGRPIGEAEFFHYWLRARETAGPLSDYCLPIVMAWQNRFGFAASDPADPRSAFSHAYHLDASLYARYLRGWAEARGLKRIEGKITQVAQHPESGDIASVTLEAGDVVQGDLFVDCSGFRGLLIEQTLATGIEDWSHWLPCDRAMAVPCERAGALTPYTRSTAVEAGWQWRIPLQHRTGNGYVYASAFLSDDEAATLLLSRLDGAPLADPRPLRFKACKRRKAWNHNIIAMGLAGGFLEPLESTSIYLVQMAVAFLLTLLPDRRGIDPALAAEYNRVMDVEYDRIRDFLILHYHATERDDAEIWRYCRAMPIPDSLADKIERFRHRGHIREYRDGLFGPPSWQAVFIGQGVEPAAHDVIADLIPDAVLAKRMHELRAVIASAAGAMPDHTAMVTRYCPAGPAA

SEQ ID NO: 87357 - protein, 514 aa, unidentified
  source 1..514: note = Unknown
  REGION 1..514: note = tr|Q1YUE3|Q1YUE3_9GAMM Putative tryptophan halogenase OS=gamma proteobacterium HTCC2207 OX=314287; GN = GB2207_09901 PE=4 SV=1
MTKTVVIVGGGSAGWLTAGIIAARHNPLGEAGQGTKVILLESPDVANLGVGEGTWPTMRDTLRRIGISEGDFLRACDVGFKQGSQFINWQRGEGESYYHPFVPPAGYGSVNLAAHWLDKAVDSTFADAVSPQGKVCDLGLAPKTARTPEYAFGLNYGYHLNAGKFVELLKRHCVDKLGVDYQLGHVDQILSDENGDISALLLTAGDKISGDLFVDCTGFSALLIGQHYQVPFVSQRDCLFNDTALAVQADHADEDTPIASCTKSTAQSSGWVWDIALPTRRGIGHVFSSQHISVEKAEDELQRYLAADPALAKKQHSPRKITFQPGHREHFWHKNCVAVGVSAGFVEPLEASALVLIEKSAEFVSNNLPQDRGAMTVVAKRFNEIISKYWVDIIDFLKLHYVLTERTDSDYWRDHVRPQSIPDSLQDSLELWRSQVPWVSDGNNRAELFSAASVQYILYGMGFATQINSSRYRDWDKDALLADRLMRDNRGKTEALMASQPTNRDLLNLVRRTS

SEQ ID NO: 87358 - protein, 500 aa, Sphingomonas sp.
  REGION 1..500: note = tr|A0A396RY77|A0A396RY77_9SPHN Tryptophan halogenase; OS = Sphingomonas sp. ZDH117 OX=2305907 GN=D1610_02040 PE=4; SV = 1
MSPPAVRAIVVIGRDAPLWLAAATIAKALEPAGVMVTAIELPSALHPADVYPTLPALEALHNQLRIDEAALIRASRGAFSLGQNFVEPASGASGFLHAYGAFGTAIDGKDFFAYWLKARRHGLSVGLEDFSLTAAAARHGRLLIPDAETERYGRSDYGYHLPAAAYAGILKAVAIRDGVTALTASGANAVLASETGDIAALIVDGGEHIGGDLFIDATGGEGDLIGGALGVARESWRSCFPADRVLAANGPALSPLPIYAEVRAWRGGWTALHPTPARTHVAQAYASALASDEEALRGAEAACGFALADPAVRSSDPGRREAAWARNCVAIGSAACAFDPVHGVDLHAVQLGLIHLLACFPVGGAFGAQRAEYNRIMRSSFEQVRDFQSAHYALARYEGAFWASAREAETSPELAHTIATFRARGEVPPMEEQSFAPDSWRALFIGHGVTPESHLPVIDRTTPDEMKAQFRRMLGFVKEQVLRQPTHDEYLGRIADHAGG

SEQ ID NO: 87359 - protein, 502 aa, Sphingomonas sp.
  REGION 1..502: note = tr|A0A0Q4D8P6|A0A0Q4D8P6_9SPHN Tryptophan halogenase; OS = Sphingomonas sp. Leaf10 OX=1735676 GN=ASE59_18285 PE=4; SV = 1
MTDNRIRQIVVLGGGSAGWMAAAALATYLGRSVSVRLVESEEVGIVGVGESSVPHMKTFNSETLGIDERDFVTRTNSTFKLGIRFIDWGRVGDDYIHGFGTIGRGLGPLPFHQLWLKRFLAGRAGPLGDYSLQTVAAPAGKFQWSGPPGTPLSDIAYAYHLDAVLYARFLRELAERRGVERIEGKVVRVEQDGDSGNVQAIVLDDGRRIDGEFFIDCSGFRGLLIEQTLRTGYLDWRHWLPCDRAFAVPSASVGPPMPYTEAAARPAGWQWRIPLQHRVGNGYVYSSAHIDDDAAAATLLDTLDGEPLDTPRQLRFTAGRRAKAWNGNVVALGLAAGFLEPLESTGIYLAQAGIRRLLGLFPARDIDPALADRFNRETAFEYERTRDFLVLHYHATRRDDTPFWNDCRTMDVPDPLKEAIALFRADGRYFRNGEDFFALPSWVQVMIGQGIIPADYHPIVDAMPDAHLDQYLTRIRGEIASAVATMPMHRHFIDRHCKAEVA

SEQ ID NO: 87360 - protein, 490 aa, Sphingomonas sp.
  REGION 1..490: note = tr|A0A396RT70|A0A396RT70_9SPHN Tryptophan 7-halogenase OS=Sphingomonas sp. ZDH117 OX=2305907; GN = D1610_08945 PE=4 SV=1
MTQPPPAIVIAGGGVAGWLAAAILAGAYGADATRICVVDEGGEDMSLGPFGRGVVARPEWHAFAAGQGWDEPALMHAAKGAFALGIAFDGWRAPRHSWFMPLGECGAAMRSIAFHHLAGRLRQEGREIRIADYALAAIAAQAGRFAHPSPDPRSPLSSYDYALHLDGVGLAGFLRDAALSRGAREISSRIAGLERRGDGGIAALMLGDGRRVAGDLFIDCTGAPARLVREMAGARFDGWQRWLPCDRAITHHEQLADGAAPYASHAAHNAGWVRHVPLDGAHALALIYASGAMTDQAAQASMDGAPIAYEAGRWREPWIANCVAIGAAAGLGDPLQGFDLQLALGSVLRLVRLLPHVDGGDVEAREYNRLTASVLDRARDAAILPYRTNGRTGQAFWDAARAVDPPETLAHKIALWESRGRVALYDDEALEEDDWVAMFEGMGVRPRRYDPLADAIPVDRIDAHLARLREVLTRAAQAMPRHADYLRGPA

SEQ ID NO: 87361 - protein, 485 aa, Pseudoalteromonas byunsanensis
  REGION 1..485: note = tr|A0A1S1N9F1|A0A1S1N9F1_9GAMM Tryptophan halogenase; OS = Pseudoalteromonas byunsanensis OX=327939 GN=BIW53_08675; PE = 4 SV=1
MAAASLSRYAKGKNITITLIESPEINTVGVGEATIPNFVDFNRHLGIADADLIKATQATFKLGIEFEDWYQKGSRFFHPFAAYGAPLENVEFHQYINKLKAQGLTQDIEDYCFASVLAKKGAFAQPNEQSSNPVTHYAYAYHIDAVLYARFLTQFCKEQGVKHILATVSQVTLNAQSGMIESLKLSDEQTIHGDLFIDCSGFKGVLIEGALGIGLDENVNWLPCDSAVAVQTELQGEPTPYTRAIAKEAGWQWCIPLQHRMGNGYIYSSKFMSDEQAKQSLLNSVKGRTITKVKHFKFPKGRRKVIWHKNCFALGLAAGFLEPLESLGISLIQTALAKLLTFFPDKSFNQADIDEVNRLHNSELDRIIDFLLVHYKLTQRDDTAFWRYCQQMPIPQSLAHKLAVYKSQGHVVQYADESFKQASWLAMYYGFNLQPGRFDPRIKGLDNHLIEKNLAQLKDQLETGASQCLSHQAFINQHCKAQSDI

SEQ ID NO: 87362 - protein, 508 aa, Sphingomonas sp.
  REGION 1..508: note = tr|A0A396RWT3|A0A396RWT3_9SPHN Tryptophan 7-halogenase OS=Sphingomonas sp. ZDH117 OX=2305907; GN = D1610_01980 PE=4 SV=1
MKPAPIRRVVIVGGGTAGWMAAAVLSRGFAAERLAITLIESPEIGTVGVGEATIPPILTLNRLLGIDEDAMIAATSGTFKLGIEFRDWGAIGDRYFHPFGSFGADLNGVAFHQHWLNLRDGALDDYSLNAQAAKAGRFIRPVDDPGHVHSRMSYALHFDAVRYAAFLRDQAAARGVIHLPRKVVEVRQDARGHVAAVRLDDGAEVAGDLFIDCSGFRGLLIEQTLATGYEDWSHWLPMDRAVAVPTERIAPPVPYTRSTAREAGWHWRIPLQHRTGNGHVYCSRHISDDEAAADLMGALDAPAAGEPRLLRFVTGRRKKAWNANVVALGLASGFVEPLESTSIHLIQQGVVTLMSLFPDTGFAQADIDQYNRLMQAEAEAVRDFVIMHYHLTRRDDSPLWNEVRTMEVPDTLKARMALFRSRGRLFLESSELFREPSWVAVMLGQGLWPDAVDPVAGAMDEAEIRAKLERMRAVIARGVQAMPMHDDFISRHCAHAPERTGAALAATG

SEQ ID NO: 87363 - protein, 500 aa, Sphingomonas sp.
  REGION 1..500: note = tr|A0A0Q4CZN5|A0A0Q4CZN5_9SPHN Tryptophan halogenase; OS = Sphingomonas sp. Leaf10 OX=1735676 GN=ASE59_09130 PE=4; SV = 1
MKAGDRIRRVVILGGGTAGWMTAAALSRSFGRAVGVTLLESEEIGTVGVGEATIPTIHWFNDLIGLDEPAFLRATKATFKLGIEFVDWTAPGHRYFHPFGQYGATLPGVAFHHRWLKAQAEGLDVPLPALSLAAQLAAQGRFAKPAGDARSILSTLGYAYHFDAGLYAAHLRRLSEAAGVRRVEGRLRDVERNGDNGFVTALTTEAGERIEGELFIDCSGFRALLIGGSMGEAFEDWSHWLPCDRAVAVPCARVAATTPYTRSTARSAGWQWRIPLQHRTGNGYVFASRYLSDDEATATLLAHLDGEALAEPRLLRFTAGTRRRPWRGNVVAIGLSSGFLEPLESTSIHLIQSGITKLLTLFPDCDCDPALADRFNTVFARDMDGIKDFLILHYHATSGRSEPLWRHCRTMDLPETLVARAAQYRRSGRLILDSDDLFREASWLAVLNGQGIVAQGYNPLADAIDSATNRAQVRQIAEVIARAAPTLPLHDDALARAMAK

SEQ ID NO: 87364 - protein, 506 aa, Sphingomonas sp.
  REGION 1..506: note = tr|A0A0Q4DTV5|A0A0Q4DTV5_9SPHN Tryptophan halogenase; OS = Sphingomonas sp. Leaf10 OX=1735676 GN=ASE59_00270 PE=4; SV = 1
MTVASDIERVCIVGGGTAGWMTAAALANRLHGLGVRVQLIESDEIGTVGVGEATLPHIRAFNATLGIAESDLMRATEATYKLGIEFCDWGRIGDRYIHPFGNYGPTDDGIPFYHQWLRLREQGDTTRLDEYSFPVIAAENNRFRHPGSDVRQVESSFGYAYQFDASLYARFLRRYAEARGVERVEGKVVDVALDGERGHVRDVTLADGRVLDADLFVDCSGFRGLLIEGALRSGYDDWSNWLPCNRAVAVPTDSRGPLGPYTRATARTAGWQWRIPLQHRVGNGHVYCSSFISDDDAQAQLLANLDAPMQAEPRRLRFTTGRRRDFWKRNVVAIGLASGFLEPLESTSIHLIQDGITELLALFPTRAFDPADIDEYNRRMALHFERVRDFLLLHYVATEREDSEMWRHFRALTLPDSLQAKIDAWLTRGYVVPYQFGLFLPPSWVAVMLGQRLMPKGYDPRVLAQDDATIAARAAALRGAVAQAVQATPDHADYIRRSPAAAGLAA

SEQ ID NO: 87365 - protein, 493 aa, unidentified
  source 1..493: note = Unknown
  REGION 1..493: note = tr|Q1YUE4|Q1YUE4_9GAMM Tryptophan halogenase, putative OS=gamma proteobacterium HTCC2207 OX=314287; GN = GB2207_09896 PE=4 SV=1
MMKVVIAGGGTAGWMAACGLSSRLASLLDITLIESDEIGTVGVGEATIPPMRNFHRLMGIDEQEFMRETQATFKLGIEFDNWGNIGDSYIHSFGEIGQRSWMAEFHEFWMEAQAQGFGGSLEDYCLELKAAKAGKFATAIGDTRLNFAFHLDATRYAKYLRKKSEKAGVRRVEGLIEDVQKDPQSGEIKALLLKSGELIEGDLFIDCTGFRSLLLGESLGVEFDDWSHWLFSDRAIAVQTESIDEPVPYTRATAHPSGWQWRIPLQSRVGNGIVYSSRFMSDDEAKQTLLNNISGKMITEPRHIKYRTGRRQKSWHKNCVALGLASGFIEPLESTSIHLVMTAIIRLIRLFPFGDSSTALADRFNQESTTEIETVRDFVILHYKQTNRTDTDFWNAYRTMDIPDTLAHRLDIFKNNGYVWPDDVALFRVDSWVQVMMGQGLTPSGFHSAGKLTGSEGLQQSLAKLKTSIDEKVAKLPTHQQFIDHYCAAPKAD

SEQ ID NO: 87366 - protein, 498 aa, Sphingomonas sp.
  REGION 1..498: note = tr|A0A0Q4D9Y6|A0A0Q4D9Y6_9SPHN Tryptophan halogenase; OS = Sphingomonas sp. Leaf10 OX=1735676 GN=ASE59_05635 PE=4; SV = 1
MVNSIRQVVVIGGGTAGWMAAAVLAQQLAPNQCTVTLVESAEIGTVGVGEATIPPIMQFNRLLGIDEDDLIQATGGTYKLGIEFRDWGAIGDAYFHPFGHYGADLNGIPFHLHWLCNRPGSLGDYSLVAQAAYARRFVRTSDDPKHVHSRMAYALHFDAVRYAKFLSDHAIANGATRIEGRIVDAVRDERGHVSAVRLADGRSVAGDLFIDCSGFRGLLIEEALQTGYVDWSHWLPMDRAVAVPSVPVSAPDPFTRSTAGRAGWRWRIPLQHRVGNGHVYCSRYISDDEATAELLAGLDGEALAEPRQLRFTTGRRAAFWNGNVVALGLAAGFVEPLESTSIHLVQRGIVTLMSLFPDGGFDAATTTEYNRLMTREFEAVRDFIILHYHLTRRDDSLLWNHVRTMDVPDTLKARMELFAAHGRLMLDPHELFREPSWTAVLLGQGLWPRRPDPIAAAQDDVRRAETLWRMKDLIGRGVSAMPSHATFLNHPSRKDTSR

SEQ ID NO: 87367 - protein, 479 aa, Sphingomonas sp.
  REGION 1..479: note = tr|A0A0Q4DEV9|A0A0Q4DEV9_9SPHN Tryptophan halogenase; OS = Sphingomonas sp. Leaf10 OX=1735676 GN=ASE59_04925 PE=4; SV = 1
MSAAALSHALGKRCAITLVESDEIGTVGVGEATIPPIKLFNDTLGIDEAEFLRETKGSFKLGIEFVDWARQGHRYFHPFGTFGKPFDLVAVHQHWLAARAAGSSIPLDDLSMAWGAAKHGRFARPMADPRNVASTFDYAYHFDAGLYAAFLRRYAEERGVVRVEGKVADAALDGQRGHVASVTLHDGRTLAADLFIDCSGFRGLLIEGALATGYDDWTHWLPCDRAVAAPCVTGGDGLTPYTRSTARAAGWQWRIPLQHRTGNGYVYCSRHLSDDEAATTLLANLDGQALADPRFLRFTTGRRRSFWNRNVVAIGLSSGFMEPLESTSIHLIQTGIAKLLAYFPTRDFDPLLTNEYNRVAITEYERIRDFLILHYKLTTRDDALLWRDCANMDVPDTVALKIAHFRHGGRLVARDMDLFGPPSWLAVHIGQWNRPVALDPLLDTTNSTSFVGRLAGAIDGMARSMPTHAAFLQQIGAST

SEQ ID NO: 87368 - protein, 505 aa, Microbulbifer thermotolerans
  REGION 1..505: note = tr|A0A1I1P3F7|A0A1I1P3F7_9GAMM Tryptophan halogenase; OS = Microbulbifer thermotolerans OX=252514; GN = SAMN05660479_03019 PE=4 SV=1
MTTDKRIKSLVIVGGGTAGWMAAASLQRHFSGTPLKITLVESPDIGTIGVGEATTPTFRRFCHRLGLQDLDVMRAIGATCKLGIQFNHWKNQNHSFFHPFSVFGQSLNQVDFLHYWLRARKAGLDAQLTDFSLGAGLALAGKFSPPSPNPPSTLSVYDWALHLDAGRFAALLREKAVAGGVEHVRATVHRVTRAENGFVHSLLLDDGRELAGDLFIDCSGFRGLLIEDALQTGFEDWSHWLLCDGAWVAPSARETAAKPYTQVNAHSAGWQWHIPLQERSGNGRVFSSRYIDAEQVRDEFSQSLGESALDEPRLIRFKPGIRRRAWNKNVIALGLSAGFIEPLESTSIALIETGIERLKTLFPQRDCHPDIATEFNEQTRLEYERVRDFVLLHYALNGREDSDFWRECRAMAKNGNLPESLQRKINVFLSSGYLLRYRWEMFQPASWLAIFAGFDCLPHSWNLAADALDQTQLLQGLRGMRDSVRQAVREAPAHQEFIARYVQKK

SEQ ID NO: 87369 - protein, 518 aa, Teredinibacter turnerae
  REGION 1..518: note = tr|C5BK75|C5BK75_TERTT Tryptophan halogenase; OS = Teredinibacter turnerae (strain ATCC 39867 / T7901); OX = 377629 GN=TERTU_2325 PE=4 SV=1
MSKSVLIVGGGTAGWITAAYMARMLAADTPGGVSITLVESDEIGILGVGEGTFPIIRKTMSRIGLDESELIRDADATFKQGIRFNHWKKNPAECPDDTYFHPFQVASQHTDMDLLPYWLLGVAGEVPWAEACTVQERVVESSLAPKLITHSNYNAPLNYAYHFDASKLAEVVRKRATSMGVRRLIDTVEDVKLDEQGAIASVIGRTHGELTADLYIDCTGFRARLIGETLGSEFTSYRDQLFCNRAVALQVPYEQPGCPIPSCTYATAQEAGWTWDIGLHNRRGIGYVYSSDHCSDDEAAATLKRYIGPAADNLTPRQLAFEAGFRKIQWHKNCVGIGLSVGFIEPLEATGISFAEVAALMLCNLFPWSGDTELSAKQFNAAMTKRFEHVIDFIKLHYYLSERTDTAFWRENRAPETASDNLKNKLEQWRHRPPSFLDIDASHDIFDENSWQYILYGMDFKTDISARADALRFYDDARQEFENIRKQSENAMNAVPTHRDLVSEVVTNGFRPKAKARA

SEQ ID NO: 87370 - protein, 504 aa, Sphingomonas sp.
  REGION 1..504: note = tr|A0A396RMD3|A0A396RMD3_9SPHN Tryptophan 7-halogenase OS=Sphingomonas sp. ZDH117 OX=2305907; GN = D1610_08950 PE=4 SV=1
MKDFAGEGRIRSIVIVGGGSAGWMAAATLARILGPDYASITLVESDEIGIVGVGEATIPQMATFNRMLGIDEDAFIRSTKGSFKLGIQFIDWARIGHRYFHPFGQIGVNMAGVSFHGYWLRMHAAGEAGRIEEYSLQALAAERDKFMRPIDAGRSPLSEIAYAYHFDAGLYARFLRSYAEARGVKRREGKIVDVRLRGGDGFVESVVMEDGSALPADLFIDCSGFRSLLLGKALGVGHVDWSHWLPCDRAVAVPCESVAAMTPYTRSTARACGWQWRIPLQHRIGNGHVYASSHMSDDEAAAVLLANLDGAPLAEPRLVPFRTGHRERFWVKNCVALGLASGFMEPLESTSLWLIQSGLARLMAMFPDRGFAQAEIDRYNRILITEYEEIRDFLVLHYKATERDDTPFWDYCRTMEVPERLAEKMRVFEAYGRTWRENEELFNDTSWFAVMLGQLIRPKSHDPVAEAMSLEETRERMAQIRTAVANSADYMPDHRAFIAEHCAA

SEQ ID NO: 87371 - protein, 485 aa, Sphingomonas sp.
  REGION 1..485: note = tr|A0A0Q4DEI5|A0A0Q4DEI5_9SPHN Tryptophan halogenase; OS = Sphingomonas sp. Leaf10 OX=1735676 GN=ASE59_17620 PE=4; SV = 1
MNQRFVILGGGTAGWITAHLLERAWPEASITVVESLEIGTIGVGEGSTPSLKRFFEIIGADEAEWMPRCGATYKAGIRFVDWSAAAPWRDYRHPFTTQIDVHTEEAFVLNCRNRRLGHDVPVRPDDFLLNGVLSAKGLVPVAPPNFPFRIEYGYHFDAGLIGQYLRELAVARGVVHRPAKVTGVERAENGDITALVTDRGESIAGDIFFDCSGFNGLLIERTLGVPFHSFSDNLFNDAAVVLPTEMTGRPPVETVATALSNGWRWSIPLQHRFGNGYVYARDFQSPDAAETELRQTLGVGDAVEARHLTFRVGQVARHWERNCIAVGLSQGFIEPLEATALHLVLGTVEQFIRHYREGGCTDRHRAAFNTVAAERMDGVRDYIVAHYKLNTRTDTDYWRANAANEALSDPLLHILDRWFRRADVAEELARQGQRSHFGNLSWHCLLAGYGAFPPVSEAARDDMDFYAARRVGAFLDGCALNFSPA

SEQ ID NO: 87372 - protein, 589 aa, Microcystis aeruginosa
  REGION 1..589: note = tr|A0A552F070|A0A552F070_MICAE Tryptophan halogenase; OS = Microcystis aeruginosa Ma_MB_S_20031200_S102 OX=2486254; GN = EWV92_05560 PE=4 SV=1
MNTTQALHYDVVIMGAGFAGLCQARHLMLKIPNIKVALVDPRPEQRTDKDLKIGESTIEIAALFLAKELGLHDYLIENHAPKQGLNFHWPKNPAKTETIDDYYHAGSNRQVPIPSFQINRSKFEQDLLKMDKAMGINFYNGQVVDVDLTPGDAIKTVKIKVGDERMELQAKHVIDAAGRKFIIGRKTDNLLFGPENLMGLNTGSAWVRVKNVDRTIFHSGYDPLNASTSHYYSTNHYFGEGHWLWMIPIDTQTMELSIGVIHHHDVINSTQVNSREKFHDFLQNNHQILANIIDSGEAVDFHYYPQISDKRNPLFSPDNWYVLGDTDYIFDAFYSYGTTTIALAIEGITEIVRAKLAGEESAEQKRAAYNEFNLAYSRIVNRLYWGHAKQLGQASVMSWRIYFEYMWWFGVQVPMYVGKWHLDLTYIPIFLKTLNSNIDGLFADLNEQFTELADKDVNIGLMDCYRGDQLFKGYHTLKHFDDFLENTKFEPRRCNVFAGLKATCFYAALWYALFQWKGFGIQGCLHPHHIYHFLRLLGLSGQATIGELIYKFKTKGLPANSEIEAMRQEFKTYQYQPKLQPWLAEATNS

SEQ ID NO: 87373 - protein, 516 aa, Streptomyces venezuelae
  REGION 1..516: note = tr|F2RDM3|F2RDM3_STRVP Tryptophan halogenase PrnA; OS = Streptomyces venezuelae (strain ATCC 10712 / CBS 650.69 / DSM 40230 / JCM 4526 / NBRC 13096 / PD 04745) OX=95373 9; GN = SVEN_6229 PE=4 SV=1
MLNRVVIVGGGTAGWMTASYFKAAFGERIDITLVESGSVGAVGVGEATFSDIRHFFEFLGLKEKDWMPACNATYKLAVRFENWRQPGHYFYHPFEQMRSVNGFPLTDWWLKNGPTDRFDKDCFVMASVIDAGLSPRHRDGTLIDQAFDEDGNEMQGLTMSEHQGKTQFPYAYQFEAALLAKYLTRYSVERGVKHIVDDVTKVELDERGWISAVKTAEHGDITGDVYIDCTGFRGVLINQALEEPFISYQDTLPNDSAVALQVPMDMERRGIRPCTTATAQDAGWIWTIPLTGRVGTGYVYAKDYLSPEDAERTLREFVGPAAADVEANHIKMRIGRTRNSWVKNCVAIGLSSGFVEPLESTGIFFIHHAIEQLAKNFPGEDWNPAHRDLYNNAIAHVMDGVREFLVLHYVAAKRSDTQYWRDTKTRAIPDSLAERIEKWKVQLPDSESIFPYYHGLPAYSYMCILLGMGGIDLAPSPALALSDPSAALQEFELIREKTERLVKVLPKAYDYFTQLG

SEQ ID NO: 87374 - protein, 499 aa, unidentified
  source 1..499: note = Sphingopyxis lindanitolerans
  REGION 1..499: note = tr|A0A2S8B8C8|A0A2S8B8C8_9SPHN Tryptophan halogenase; OS = Sphingopyxis lindanitolerans OX=2054227 GN=CVO77_09105; PE = 4 SV=1
MSENRQRRRVVIAGGGTAGWMMAAAIARTMGATVDLTLVESEAIGTIGVGESTIPPLVNFNRILGIAEPEFMRAAQATFKLGILFDNWKYDGDSYFHSFGLSGKDHWSAGFQHFWLRARAEGYPHSYDEYCLELVAGLQGKFAHLPEDRMNYAYHVDATLYGRFLRKLAEADGAKRVEGKIQTVELDGESGNIAALLLDGERRVEGDMFVDCTGFRGLLIDGALHAGFEDWGHWLPNDSAVALQSKHQGPPMPYTRAIAHDAGWQWRIPLQHRMGAGIVYSSRYLSRDAALDRLLSSLGEPLVEPIDIKFKGGVRRNQWVRNCVAVGLAGGFVEPLEATTVHLIQRAILRFIRLMPNGRVSERDAIEFNEQQRRDIEQIRDFVILHYKATERRDSPFWRHVAAMPIPDSLQQKIELFRETGRVFRKNEELFGENSWVQVMMGQGIEPQSWHPIAEKLSADELERFMEGLRESAARTAATLPDHQAYVARYCGAQAPQAA

SEQ ID NO: 87375 - protein, 497 aa, Microbulbifer thermotolerans
  REGION 1..497: note = tr|A0A143HRB8|A0A143HRB8_9GAMM Tryptophan halogenase; OS = Microbulbifer thermotolerans OX=252514 GN=A3224_13675; PE = 4 SV=1
MRDGSIKKLVILGGGTAGWMTAALAAKVLGKVIDITLVESDRIGTVGVGEATIPPIIHFNRALGIDEREFLTATKGTIKLGIQFENWLRRGDSYMHAFGSIGKNLAFCDFHHIWNRSRLRGDTSSFWDYSLNYQAAINNKFAPLTHIQGTNLPGISYAYHFDAGLYAQFLRRYSEGRGVKRIEGMVKEVRVRSDNGFIQGLLLESGLEIDGDLFVDCTGMAALLIEKTLGVGYEAWSQWLPCDRAMAVPSASAKPIVPYTRSIAHEAGWQWRIPLQHRTGNGLVYSSKHWSDDRAREALMSNLDGEPLAEPRVIPFRTGRRGEQWCRNVVSIGLSSGFLEPLESTSIHLIQTAATRLMKMFPHRGIRAEEVAEFNRQSRVEIEHIRDFIILHYKANQRRDSDFWRDCEAMGVPDTLSEKVELFRRTGKVFRDYDDLFSEAAWQQVMIGQGIVPEDYHPVADALSEEQLGDLMASLRTMIDGTVNSLPEHEQYLPNVG

SEQ ID NO: 87376 - protein, 516 aa, Pseudoalteromonas byunsanensis
  REGION 1..516: note = tr|A0A1S1N858|A0A1S1N858_9GAMM Tryptophan halogenase; OS = Pseudoalteromonas byunsanensis OX=327939 GN=BIW53_12610; PE = 4 SV=1
MNKSHYIENYVVVGGGTAGWISACLLASKLKDDPRKSVTLIEAPDIPIIGVGEGTVPSIRNTLKKIGISETELFRECDATFKQSIKFVNWNDKYRHRGKNFYHHLFDYPMPFGDDLSSYWKQQRNDELTSASFAQFVSIQYDVAESGLAPKDMTNAQYEGVCDYAYHIDAHKFAQLLKTHAIRNLNVQYIQDKVIDLKLDSSGHIQSLLLEQQGEKSYDFYVDCSGFSSFILGQKLQVPFKSQSDIILTDTALTIQVPAVDEAIPPYTISTAHQAGWIWDIALTQRRGVGLVYSSQFMDENAALEKLSRYTQMDLTDSSVRKIDMQIGYREKFWHKNCVAIGLSQGFVEPLEATAILLSDFSANLLCNKLPDSYQQLSLLASRYNQRVEYAWRGVVDFVKLHYCISDRNDSEFWRANRNPNSIPVSLQDKLALWQHCAISKDDFFSKFEVFDIENYLYVLNGMNFTGGSQFMSGQARHNYAEQVQRVKDTAAVYKQKLLSHRELINKIYQYGLPKV

SEQ ID NO: 87377 - protein, 505 aa, Hirschia baltica
  REGION 1..505: note = tr|C6XNI9|C6XNI9_HIRBI Tryptophan halogenase; OS = Hirschia baltica (strain ATCC 49814 / DSM 5838 / IFAM 1418) OX=582402 GN=Hbal_2454 PE=4 SV=1
MVDNRVKSVIIVGGGTAGWMAAAGIAKAIGSTNLQVTLIESEDIGIVGVGEATLPHLRYFIQSLGIDEREFMAATDATVKLGIEFVDWARVGDSYIHPFGDYGLPNDGIPFHQFYHKHQSNGPICDYSLPIVAARKAKFELPSQNASSVNSTYRFAYQFDATKFGPFLREHSERLGVKRVEGRIVNIEHSSDGNISALGTEDGRRFSADFFVDCSGFRGLLIDGALKTKWESWTKWLPCDRAIAAPCEHKGKLLPYTRATAKDAGWQWRIPLQSRAGNGYVYSSQFIANENAEREFLNSLEGAKLADPRVLKFETGKRKKLWSKNCLSIGLSGGFLEPLESTSIYLIQQGITYFLELFPEFKDHSIRATEYNRMMDIEFERIRDFLILHYHATEREDTEFWREMKYLDVPQSLKEKMELFKECGRVKTYANGLFLEPSWVAVYYGQRVIPDNYDSRVDMYPEDEVKTNLMRLKSLIARSADNMMPHEQWLKQFCKIPHSPKESLN

SEQ ID NO: 87378 - protein, 513 aa, Teredinibacter turnerae
  REGION 1..513: note = tr|C5BK76|C5BK76_TERTT Tryptophan halogenase; OS = Teredinibacter turnerae (strain ATCC 39867 / T7901); OX = 377629 GN=TERTU_2326 PE=4 SV=1
MNPSQVKRVIIVGGGTSGWMCAAAIARASPPNTSITLIESSDIGVIGVGEATIPTLIEFNRFLGINENDLIRECHGTFKLGIEFSDWQALGKSYFHPFGFYGRDTPDFPFHQLWLRLKHMETQGLAPAEAAGEISDFNLCTAAAYQGRFAPAQGGADTILATMRHAYHLDSRLYGKMLRRYAEAKGVTRIEANIVKASCSPEGGFIESVLLESGESVCGDLFIDCSGFKSLLIEDAMQSEFVDWSHYLLCDRAIALPTELSGSPLPYTRATAGDAGWRWRIPLQTRMGNGHVYSSQFTDDDTALRDLQNAIDGTSLAEPLPLRFKPGHRHEFWVKNCVAIGLAGGFIEPLESTSIHLTQVGIQRLIQFWPAHGVNYAETAHYNSEMTEDYERIRDFIVLHYKATDREDTAFWRAVKNMAVPDSLSNRMELFRSSGRVVDIPQDLFRPHSWLAVMLGQKVQPRNYDAFVDRIPVESLLANMQHLKDAVNKTAASLPGHQDYINRCCAAAESSRV

SEQ ID NO: 87379 - protein, 514 aa, Altererythrobacter sp.
  REGION 1..514: note = tr|A0A2E1Y7Y1|A0A2E1Y7Y1_9SPHN Tryptophan halogenase; OS = Altererythrobacter sp. OX=1872480 GN=CL574_05915 PE=4; SV = 1
MAIDFEKVVIVGGGTAGWLSAAYLAARRPELQITLVEAPDIPTIGVGEGSWPTMRETLRIIGIPESQFLLECDASFKQGSRFDGWRTGGAEDSYLHPFTPPIPGDVKALITAWKQTDGRSFAELATPQAAVCMQNLAPRQRSMPDYAAALNYGYHFDAGKFARLLSRHAVNRLGVTHIRDQVTDILSEGPDRIAAVILRRGGQLSGDFFLDCTGMAARLIGEHYGTAWIDRSDVLFNDRALAVQVETQPDSPIASQTIGTAHKSGWLWDIALPTRRGIGCIYSSQFTEDAEAERTLKDYVATNLPWQEPEAIVPRKISFRTGHRERFWRGNCVAIGLSAGFIEPLEASAIVLVELSLKALADSFPVTREALPAYSERFNKLFHYRWERVVDFLKLHYVLSQRSEPYWKAHRDPASIPPSLACQLQLWRDHPPTQWDFPQVDEMFSAASQQYVLYGMGFAEPLSECSEDLEPVQAQLAAVREKARALTAAMPTNRTYLDALRSTHPANPREGEFA

SEQ ID NO: 87380 - protein, 497 aa, Pelomonas sp.
  REGION 1..497: note = tr|A0A0Q8GWT6|A0A0Q8GWT6_9BURK Uncharacterized protein OS=Pelomonas sp. Root662 OX=1736580 GN=ASD88_13160; PE = 4 SV=1
MILGGGTAGWMTALALTKRARPGRPLAVTLVDSAAIGSIGVGEATVPAILDYLTSVQADVPALIRDSRATLKAGIAFQDWRAIGQRYFHGFGLYGASAGGVGFHQVLAWLQAQDGGQDLRLEDFNLCAQMALRGRFAAPPAQPEADHDIYRWALHLDAGLFAQHLRRQALGSGVQHLDGVFEHADIGPDSGAITAITLTDGRRLEADLFIDCSGFRGLLIRQALRQPWVSWRHWLPCDRAVAQPTAGSGPATPYTLAQALPAGWRWRIPLQHRIGNGHVYASAFMSDEQALQLLQAHQDGEALAEPNWIRFDPGHIAQPWVRNVVAIGLSAGFLEPLESTGITLIHSAIDKLLALWPDDPQAPALAAEFNRASLLEMERIRDFLVLHYALSERRDSEFWRHITAAPLPDTLVHKLAVYRANGHFVRHEWETFQDHSWLAVYDGLGVRPQQLDARLARFQAADVRQGCEAMQAAILRRAEQAPLSDAEVLARALQVAP

SEQ ID NO: 87381 - protein, 505 aa, Xanthomonas translucens
  REGION 1..505: note = tr|A0A0K3A2U2|A0A0K3A2U2_XANCT Tryptophan halogenase; OS = Xanthomonas translucens pv. poae OX=227946; GN = XTPLMG728_3230 PE=4 SV=1
MIAAPLRNLVIVGGGTAGWMAAAALARVLGPDYRITLIESEQIGIVGVGEATVPHIKAFNNLLGINEAEFVRQTQGSFKLGIEFVDWHRPGTSYIHGFGTEIGHSLGLLPFQQYWFKQALAGKAKPLGAYTLNTVAAKRGKFMTSASDAPPNSPLGNIAYAYHFDASLYAAFLRRFSEQRGVTRREGIVEQVQLHPESGDVLSVRLASGDTIAGDLFIDCSGFRGLLIEQALQTGYHDFTHWLPCDRALAVPCAKVGPPTPYTRATARAAGWQWRIPLQHRTGNGYVYSSAHISDDEAAATLLANLDGAALADPRPLRFVTGRRKQVWNRNVVALGLASGFMEPLESTSIHLIQSGISKLLELFPREGISPVLVQRYNDRIAFEFDRIRDFLVLHYTATERDDSDFWRQCRAMAITPELQATLDLFGDSGRFYRNGDEMFAEISWVQVMVGQGILPRAYHPLVDQVPAADIERFVASIEQTIGHCVDAMPPHQAFIDRYCAAAPR

SEQ ID NO: 87382 - protein, 503 aa, Pseudoalteromonas spongiae
  REGION 1..503: note = tr|A0A290T308|A0A290T308_9GAMM FADH2 O2-dependent halogenase I OS=Pseudoalteromonas spongiae UST010723-006; OX = 1117319 GN=prnA PE=4 SV=1
MIKKVAILGGGTAGWLAANHLGHALSATDIEVTLIESEDVPSIGVGEGTVPFIKDTLQKFGICEVDLLLGCDATFKQGIKFTNWMDKTRHGECNHYYHPFESPYPNEFDVTNYMLGEGSELRFDDVTIQSAVCELGLAPKLVSSAPYQGVLNYAYHFDAAKFALLLARNAKERFNVKHLKATVENVQLDDTGNVKAVTSVNGDTLAFDFFVDCTGFASLLIDKALNVPFVSKADELLTDKALVKQVPLNPKQGIFPYTKATAHQAGWIWDIPLTTRRGTGFVYASEFMSEDDAHRKYARYLNLDADKLDVRKINMEVGYREVSWYKNCVCLGLAQGFLEPLEATSILLTDFTADLLAKNFPKNQSDADVMRDDFNKAVTYAWDRTTDFIKLHYCISDRQDSDFWLKNQSLAHSSEELKTRLAKFKIRPPHRQDFFSRFDLFDEKNYLYVLYGMRYPTSKPHCSEQEVKLSRELLARNKEMLSMAQEKLLLTSEWLTKLKQAVR

SEQ ID NO: 87383 - protein, 508 aa, unidentified
  source 1..508: note = Planctomycetaceae bacterium
  REGION 1..508: note = tr|A0A2E5VMR3|A0A2E5VMR3_9PLAN Uncharacterized protein OS=Planctomycetaceae bacterium OX=2026779; GN = CMJ81_13010 PE=4 SV=1
MNQSGQIKNIIIVGGGSAGWMAASLLHQGLGKLGCRITLIESADIGTVGVGEATTPDVVKMVQRLELDADDFMRRCQATYKLAIRFVNWMDGDGEFWHPFGPVGGFIDGRDLFHFWYRSVCEGESQASYCSYSVHQRLAELGKGPRNATEESHIIQHGSYAYHLDATAFAAMLKGIALGKGIVHFFDEVSDVVLDSGGAIESLQTKAGRELTADLYLDCTGFRGTLIEKAMGDEWIDWSDLLLCNRALVASIPQQEDISPYTTSTALSAGWLWEIPLSHRLSAGYVYSDKFLDEEQATKEFVQFAGSKGVGNVRPRSIQFRVGRRENFWHKNCVAIGLAAGFIEPLESTGLALVARGVDAIMQFLPDCRMSPMLAAQYNREVGLLYEEIRDFIVLHYLVNRRVDTGFWKASREVDVPDSLARALQLYDETGLLDRFRKNIFGEPSYYCICSGANRLPQHTLPITRYVEMEKILQVLSQIKSQNEQWVHDLPSHGELIAQIHRRGEKLL

SEQ ID NO: 87384 - protein, 504 aa, Pelomonas sp.; identical to SEQ ID NO: 84555
  REGION 1..504: note = tr|A0A0Q8GKL3|A0A0Q8GKL3_9BURK Tryptophan halogenase; OS = Pelomonas sp. Root662 OX=1736580 GN=ASD88_13155 PE=4; SV = 1

SEQ ID NO: 87385 - protein, 528 aa, unidentified
  source 1..528: note = Sphingobium barthaii
  REGION 1..528: note = tr|A0A4R6FPA6|A0A4R6FPA6_9SPHN Tryptophan halogenase; OS = Sphingobium barthaii OX=1054037 GN=DFS08_105106 PE=4; SV = 1
MSVDIPSLFTGNFDMVHPVRNIVIVGGGTAGWLTAGVIAARHRSRIGRGFSVTLVESPNVPIIGVGEGTWPTLRTTLSRMGISETDLFRECDAAFKQGARFARWTTGTPDDGYYHPLMLPQNFGQVNLAPHWLAGEGNESFCDSVCPQGRICDEGLAPKTIATAEYDALANYAYHLDAGKFAPFLQRHCCEKLGVRHVLADVEQVLMKENGDIRAIRTTQAGEIEGDLFVDCTGFKALLIEGAMGVPFRDCRDVLFCDTAIAMQVPYERPDSPMASHTISTAQSAGWIWDIGLPTRRGIGHVYSSSHISDEEAERELRAYIGPPADGLNARKIAIRSGHRETFWKGNCVAVGLAAGFLEPLEASAIVLIELSAKIIAEQMPACREVMDIIAARFNATTHYRWGRIIDFLKLHYVLTKRTDSEFWRDNVRDEGIPDRLKELMLLWRYQSPWFLDEFDRVEEVFPAASYQYVLYGMGFRTEVDQPALARDAHLAERARRENAAMMAKLRAGLPRHRDLIDKIVTHGLQPV

SEQ ID NO: 87386 - protein, 361 aa, Burkholderia pseudomallei
  REGION 1..361: note = tr|A0A0F6L4T3|A0A0F6L4T3_BURPE Tryptophan halogenase; OS = Burkholderia pseudomallei MSHR4000 OX=1435370 GN=prnA; PE = 4 SV=1
MKHALGQACTFAATHAAVAACDPLQARALVLQLPALNRKRDVPGIVGLLSEFLPARGVPSGWGFVEAAAAMRDIGFFLGSLKRHGHEPVDVVPGLEPVLLDLARATGLPPRETLLHVTVWNPATADAQRSYTGLRDEAHLLESVRISMAALEAAIAATVELSDVPLRSPAFAQGCNALAAYLHKMVESIVYAYRFISVQVFYDELRPFYEPIRVGGQSYLGPGAVEMPLFVLEHVLWGSQADHQAYREFKETYLPYVLPAFRAVYARFAGEPSLVDRALGEARAAGARGEPVGAGLAALDRVFEVLLRFRAPHLKLAERAYEAGRSGPTIGSGGYAPSMLGDLLTLTRAARSRLRAALDGP

SEQ ID NO: 87387 - protein, 342 aa, unidentified
  source 1..342: note = Xanthomonadales bacterium
  REGION 1..342: note = tr|A0A2M7WWV3|A0A2M7WWV3_9GAMM Tryptophan halogenase (Fragment) OS=Xanthomonadales bacterium CG_4_9_14_3_um_filter_62_6 OX=1974107 GN=CO182_11735 PE=4; SV = 1
HFDASLYAKLLRAYAEARGVRRSEGKVVDVGVRAEDGFLSGVTLADGRVLEADLFIDCSGFRGLLIEGALKTGYEDWSHWLPCDRAVAVPCAHGAALSPYTRSTAHAAGWQWRIPLQHRMGNGLVYCSQFSSDDAAANVLLDHLEGAPLAEPRFLRFTTGRRKQFWHRNCVAIGLASGFLEPLESTSIHLIQSAISRLLALFPDRDFDPIVAREYNRITELEYARVRDFIILHYHANQRDDAPLWRYTRNMPIPEPLQTKIDHFRRHGRLVAEVLELFQNPSWLAIFIGQEVWPERYDPLVDMRSDIDAARLLSGLHRVIAESVQVMPTHQQYIERHCRARA

SEQ ID NO: 87388 - protein, 505 aa, Xanthomonas citri; identical to SEQ ID NO: 85879
  REGION 1..505: note = tr|A0A0U5FMK6|A0A0U5FMK6_XANCI Tryptophan halogenase; OS = Xanthomonas citri pv. citri OX=611301 GN=prnA PE=4 SV=1

SEQ ID NO: 87389 - protein, 432 aa, Erythrobacter sp.
  REGION 1..432: note = tr|A0A167I999|A0A167I999_9SPHN Tryptophan halogenase (Fragment) OS=Erythrobacter sp. HI0063 OX=1822240; GN = A3736_14240 PE=4 SV=1
AVQGTFKLGIQFVNWGNLGDSYIHPFGNYGYEVDGVSFHHLWQRNRMRGDKRPIQVFNLETMAAHFGKFARTEDYKRDDMPPMNYAYHIDAGAYARFLRAYAEKRGVVRREGRVAEVRRDGESGDVAALVLEDGSTIAGDLFVDCSGFRGLLIEQALETGYEEWTHWLPCDRAVALPCKRDDGSPPPPFTRATAHRAGWQWQVPLQHRNGNGHVYASAHMEGAEAHDILVANMAGKPTADPNFLRFVTGRRRKFWNHNVVALGLAAGFMEPLESTSIHLINTGINKLVALLSLDGITETQRSAFNRLTNKEYERIRDFLILHYHATARDDSEFWNYCRTMSVPDSLTEKMELFRANGQIFREDDELFTETSWAAVMMGQGIAMGGHNVMAHGIADQGVAKEVDGIEQSIRFLVEHMPGHGEYLQRYCPAPPA

SEQ ID NO: 87390 - protein, 497 aa, Pelomonas sp.; identical to SEQ ID NO: 82574
  REGION 1..497: note = tr|A0A0Q8GGY1|A0A0Q8GGY1_9BURK Uncharacterized protein OS=Pelomonas sp. Root662 OX=1736580 GN=ASD88_16480; PE = 4 SV=1

SEQ ID NO: 87391 - protein, 510 aa, Pelomonas sp.; identical to SEQ ID NO: 84514
  REGION 1..510: note = tr|A0A0Q8GXN1|A0A0Q8GXN1_9BURK Tryptophan halogenase; OS = Pelomonas sp. Root662 OX=1736580 GN=ASD88_09340 PE=4; SV = 1

SEQ ID NO: 87392 - protein, 507 aa, Pelomonas sp.; identical to SEQ ID NO: 82585
  REGION 1..507: note = tr|A0A0Q8GRN2|A0A0Q8GRN2_9BURK Tryptophan halogenase; OS = Pelomonas sp. Root662 OX=1736580 GN=ASD88_26340 PE=4; SV = 1

SEQ ID NO: 87393 - protein, 501 aa, Sphingopyxis sp.
  REGION 1..501: note = tr|A0A1Q3V7W5|A0A1Q3V7W5_9SPHN Tryptophan halogenase; OS = Sphingopyxis sp. 65-8 OX=1895852 GN=BGO58_03730 PE=4; SV = 1
MSPMRLVIIGGGTAGWMAAACLRRFLPAGWSVSLVESDEIGTVGVGEATIPQIRLFNDALGIDEDEFLAATQGTIKLGIEFNGWTRPGHRYMHAFGAVGRGLGLLEFHQYWLRARAAGVAETLDHYSLNERAAYARRMQRDAPRTSPHLLEMPYAFHFDAALYAAFLRRRAEASGVERIEGKVVDVRLNGETGDVTGVALDDGRSVEGDFFIDCSGFRGLLIEGALETGYEDWSHWLLNNRAVAVPCAHGATPQLPWTGATTRDAGWQWRIPLQHRIGNGYVYCSDHVSDDEAVATLLANLDGPAQAEPNRLRFVSGKRRRMWNRNVVALGLASGFMEPLESTSIHLVQAGISRLLKMLPSGATDPAVAAEFNRQSDFEWERIRDFIILHFKATERRDTAYWRDRAEMPVPDTLAAKIELFRAQGLIFREHEELFTESGWLQVLVGQGVAPRAWHPLAEGIGADDLARYMAGVAAMVEAEVAQMASYDDFLAATSRAAVAA

SEQ ID NO: 87394 - protein, 431 aa, Rhodopirellula baltica
  REGION 1..431: note = tr|K5D8X7|K5D8X7_RHOBT Tryptophan halogenase; OS = Rhodopirellula baltica SH28 OX=993517 GN=RBSH_05723; PE = 4 SV=1
MKDFYDCVVIGGGPAGGAAASIVADSGVSTLLIERDPVPRFHVGESLMPECYWPLERLGLIDQVKRSGWQTKKSVQFVTHTGKESAPFFFREHDERECSTTWQVERSEFDKMLYDRASELGADCFDQTRLIDVQTEPGETADQPIARAVVVRTADGTEKTIGCKVVVDATGQQAFLAGKMGLKEINPDLKKAAIWTYYRDAVRGEGDNDGATIILNTKSRDSWFWFIPQSRGITSVGCVGDNDYLLKGRGTPEEIFEEELANCPGLQPRLANATRVGKITTAKEFSYMTRRHSGPGWVLIGDALGFIDPVYSSGVYFALEMGVRAGDAIVEGLKKDDLSAEQLGKWTDDFKEGASKVRQLVHAFYNKDFSIGLFMKEHPEYRGNVTDLLIGRVFHEDAGKMFPALDRSIEMARANAMSKAESMAETKPMST

SEQ ID NO: 87395 - protein, 409 aa, unidentified
  source 1..409: note = Caballeronia hypogeia
  REGION 1..409: note = tr|A0A158CKP0|A0A158CKP0_9BURK Tryptophan halogenase; OS = Caballeronia hypogeia OX=1777140 GN=AWB79_05552 PE=4; SV = 1
MNVCVDVAIVGAGPSGAVAAALLRKAGRSVLVLERQHFPRFSIGESLLPQSMAYLEEAGMLQDVVEAGFQYKNGAHFVHRDRVSAYDFRDKHSDGWGTTFQVERAVFDDLLIRRAAKQGAEVRFGHTVLDMTTGDAPALEVADEAGTRYRVDARFVLDASGFGRVLPRLLNLEAPTRLPARAAIFTHVRDGIAPEAHDRNKITIAVHPEHRDVWYWMIPLANGRSSVGCVAHAEFLDVPEADREAKLRSLIQTEPTLNRLIGDAPFLMPVRHLGGYSANVERLHGPGYALLGNAGEFLDPVFSSGVTIALRSAHLAVETLKRQLNGEAVDWQAGYDQPLRKGIDTFRAFVENWYTGKLQDIIFATGQTPSIRRMISAVLAGYAWDETNPYVVEPVRRLNTLHEVCTRRE

SEQ ID NO: 87396 - protein, 509 aa, unidentified
  source 1..509: note = Unknown
  REGION 1..509: note = tr|A0A244C575|A0A244C575_9BACT Tryptophan halogenase; OS = bacterium AM6 OX=1954209 GN=B0X78_00905 PE=4 SV=1
MNTANTTQGPIRRVVIAGGGTAGWLAGCALAHQFRQQLDITLVESEQIGTVGVGESTVPPIRTFHRFLQIDEQEFLRAVAGTFKLSISFENWRRPGERFIHPFGTIGQGTWATPFHHFWLDSLRRGMPSELGDFCLESAASLADRFSLQTQPQVNYAYHFDAGLYARFLRGKAEANGLRRVEGKIREVRQHPHDGSVASLVLDDGRVIEGDLFIDCTGFGGLLTEQTLHTGYEDWNEWLPSDRAVAVQTDSAEPPVPYTRAIAHEAGWRWHIALQHRVGCGLVFSSRHMSDDEAHAKLLRDVDGRPLRDPWLVPFRSGRRLQAWNRNVVALGLASGFIEPLESTSIHLTISAVVRLIQLFPSDGITPSLVALYNDVSRQEMEHVRDFIILHYHANQRDEPMWKACREMALPESLQVRLRAWRERAHAWQDPGELFRVDSWTSVLMGQGIQPGPPHPLAQAIGDADLRTLLHRIRQPVQHTVAKMPTQAAFIERYCKAAPDAWQRGRAVA

SEQ ID NO: 87397 - protein, 531 aa, unidentified
  source 1..531: note = Planctomycetaceae bacterium
  REGION 1..531: note = tr|A0A2E5VU60|A0A2E5VU60_9PLAN Tryptophan halogenase; OS = Planctomycetaceae bacterium OX=2026779 GN=CMJ81_24400; PE = 4 SV=1
MREQDRARRYKTTQPRRHKRITLMADENPNSPYRKVGIVGGGTAGYLTALALKKQIPHLEVTVVESESIPVIGVGEATTPLIVMFLHQGLGLDAAEFYRVVQPTWKLGIKFEWGLPGDYAFHYPFDRNDSWNAIQQTGDIRNGCLTSVFMKNDKSHMLRSAGGSKLTPIHNKTNYAYHLENECFIGYLRSKLKDAGVEMRLGTIQEVKLNEAGTAIDHLFSPELGNLSFDLYVDCSGFRSVLLEKAMGSKFISYADSLYTDSAWTVTRPNNGQPKPYTTAVTMDHGWTWIIPVRTEDHLGYVYSSGFCDDESALAEMKRKYPDAIDPKLVKFRVGRHEQAFVGNVMSVGNSFGFVEPLESTGIHMIISTILEFVRNFPKSDNDVTSRQTINTTTNATWDNIRWFLGVHFRFNKRFETEFWKTCREKVDISGFETIRQLFYEKGPFLENGIDENPDYRHLGRYTIFPWNAFDLFMLGQGELPHEVATKIPAKTRGDLANKAVVWDQIQLRALPQNEALAAIDTWPSLVGSRN

SEQ ID NO: 87398 - protein, 522 aa, Pelomonas sp.; identical to SEQ ID NO: 84486
  REGION 1..522: note = tr|A0A0Q8H6F5|A0A0Q8H6F5_9BURK Tryptophan halogenase; OS = Pelomonas sp. Root662 OX=1736580 GN=ASD88_25085 PE=4; SV = 1

SEQ ID NO: 87399 - protein, 502 aa, unidentified
  source 1..502: note = Planctomycetaceae bacterium
  REGION 1..502: note = tr|A0A2E7ENZ8|A0A2E7ENZ8_9PLAN Tryptophan halogenase; OS = Planctomycetaceae bacterium OX=2026779 GN=CMJ77_17615; PE = 4 SV=1
MIRDDTNQIRRILIVGGGTAGWMAAAYLQKHCPCQIALVESPNVPTVGVGEATLPALIDFIAELGLDEDEFMRRCHATYKLGIQFQDWFQTQHSFWHPFGVVGGEIDGVDLFHYWLKGRRLQRDESVYTDYSLQRTLAEAGRAHRRIGGKAVVRNYAYHLDAGALADYLKEVATSQGVRHLLANVEEVVADGQDRIRYVRFDDGRQVDADLYLDCTGFQGLLIEQALGDPYLDWSDTLICDRAVVIRLPANPRMMPCTEVTGGRAGWIWRIPLTHRVGCGYVYSSRHLSDEEAFMELSQFAGLAQIPKDAKQLKMRVGRRAHFWKGNCVSLGLASGFIEPLESTGIFLIQRALECLLDAFPDTSCSQPLQKLFNARMAEAYEETRDFVLLHYYLSQRRDPFWEDARQIALPDSLVERLELFDDTGAVVIPAAAVFPATSFYSIYAGEERLPRTYNPRVDATDFGQVCKLLDQIKNANQNAIAQLPRHQDLMRWLHEGEATSR

SEQ ID NO: 87400 - protein, 415 aa, Pseudomonas fluorescens
  REGION 1..415: note = tr|Q4KJH2|Q4KJH2_PSEF5 Putative tryptophan halogenase OS=Pseudomonas fluorescens (strain ATCC BAA-477 / NRRL B-23932 / Pf-5) OX=220664 GN=PFL_0467 PE=4 SV=2
MPTVEMERRQVVVIGAGPSGAIAAALLKRQGHDVLIVERQHFPRFSIGESLLSHCLDFVEEAGMLEAVQAAGFQLKNGAAFAWGEHYSTFDFGDTFSNGKPTTFQVQRADFDKLLADQAALQGVEIRYGEEIVAVEVERPLPQLDCRREDGSQYRIEADFILDASGYGRVLPRLLELEAPSNFPVRRAVFTHVEDRIDCEHFDRNKILITTHPEHRDIWFWSIPFSNGRCSVGVVAAQEHFAGRDGDLDACLRGFISETPSLAKVLQYAEWDTSVRTIGGYSANVSTLHGPGFALLGNAAEFLDPVFSSGVTIAMRSASMAAAVLHRQLQGQGVDWATEFAEPLKRGVDTFRCYVEGWYAGTFQDVIYHPGSSPEIRRMISSILAGYAWDERNPFVSEPKRRLKALSEVCARDRA

SEQ ID NO: 87401 - protein, 421 aa, Amycolatopsis decaplanina
  REGION 1..421: note = tr|M2YS06|M2YS06_9PSEU Tryptophan halogenase; OS = Amycolatopsis decaplanina DSM 44594 OX=1284240; GN = H074_02227 PE=4 SV=1
MSATLHGMPERFDVIVIGGGPAGATCAGLLAKEGHTVLVLERERFPRYHIGESLIPVGMRPLQELDLLERMEARGFERKYGGSLVWGNRDVPWNFSFMKAAEGTYAYHTRRADLDTLILDRARELGAYVVEETTVKDVLQSDTGRVTGVRFTLRGSAGDYEATASLVIDASGQSRVIGRKFSDITWHNELRNVAVWTYYDNCDRLPGDEWTNILIEGTDDGWFWGIPIDKGTMSVGYVTKSDIANADDQSLEQLFVTERDKTTRLKGLLANARQHAGYRTARDWSYTNETFYGDGWALVGDAAAFVDPLFSTGVALATLAGSSLSKVVHRILEHPAIEEKALDRYAGNYRAFFDEIRTFVERFYDRTKYKEYYYDLAQEVVDPEQLHAPSIDFVTLVSGLSGKHPLLNISLDDLIANVTEP

SEQ ID NO: 87402 - protein, 534 aa, Rhodanobacter sp.
  REGION 1..534: note = tr|A0A1V3PG17|A0A1V3PG17_9GAMM Tryptophan halogenase; OS = Rhodanobacter sp. C06 OX=1945854 GN=B0E52_04940 PE=4; SV = 1
MNDARIRRLVIVGGGTAGWLTAALLARALGSQLKILLVESAEIGTVGVGEATIPQILHVNRFLGLDEDDMLRAVHGTFKLGVQLNDFTRVGESYLHAFGDLGLPLGLTPFHHYWLRAVQGRPSAAGAGGAEAPSRGRPGAQSLWAHSLNAAAAAQNRFARMDKVPNSPLGGIRYAYHFDASLYGQYLRQHIAPGIVERIEGKIVDVRLHAEDGHIESLLLDNGSTVEGDFFIDCSGFRGLLIEGTLKTGYENWQHWLPCDRALAVGSAPGGPMRPYTQASARTAGWQWRIPLQTRTGNGHVYCSRFISDDEAAAQLLANLETEALGDPRPLRFVTGMRKLAWSRNCLALGLAAGFMEPLESTSIHLVQSGVNRLLAMFPDRHCDPKLIDEYNRQTRFEYERVRDFLILHYKATERSDTPFWRQCGAMDIPPELARRIELFRRSGMIFREGEELFTETGWLQVLLGQGIAPARHHPLADELSDQQLDHFLADVRTLVGRAVATLPPHHEFVARHCGMPAAAAARATPTTASTETP

SEQ ID NO: 87403 - protein, 490 aa, unidentified
  source 1..490: note = Planctomycetes bacterium
  REGION 1..490: note = tr|A0A517RH51|A0A517RH51_9BACT Tryptophan halogenase; OS = Planctomycetes bacterium Pan241w OX=2527973; GN = Pan241w_32920 PE=4 SV=1
MQQFDVVIMGAGFGGSLTALLLDRVGLSVAIVDRGTHPRFAIGESSTPAAGYLLRSLSEQYDLPQFQPFCKHGTWQEHYPGLACGIKRGFSYFSHEPQHNFKAKPSHGSELLVTANLSDSLADTHWYRADVDNFFAEEVQKSKVVYLDQSEVTLERSDGWEITGTRKGEPIALQAAFVIDATGAAGIVPNTLGIERQTEFLTKSSAVYGHFASVVSWAEVLDQSHIDRSDYPFDCDRAALHQVLHEGWMWQLRFNNGITSAGFVLKEDQQTGGAEDVWRQMLEGYPSIAAQFADASLVAPESGLVSTNRLQRGWKKCAGENWALLPHTAGFIDPLHSTGIAHTLCGIERLVAALEQFWGKEELTSVMVDYSDSIQAELSLIDSLVAGCYLSLPHFDLFTASTLFYFAAATGFEHLRCSEGKQPLFLCADDTEFRQAVREWIHLLEQGADEIPQAIERAELLLKPWNRVGLFQPAIPNMYYYTAAPETEPR

SEQ ID NO: 87404 - protein, 424 aa, unidentified
  source 1..424: note = Rokubacteria bacterium
  REGION 1..424: note = tr|A0A2V6SHN9|A0A2V6SHN9_9BACT Tryptophan halogenase; OS = Candidatus Rokubacteria bacterium OX=2053607; GN = DMD77_18330 PE=4 SV=1
MASAWDFDVAVIGGGPGGSSAATALARRGRTVLLLERDRFPRFHIGESQLPWSNEVFRALDVHDAIAEAGFVKKWGASFRTVDGATEQYADFQFAAETPSPQTFQVPRATFDEVLLRHSERSGAKVLEEHRALDAAFEPDGVVLRFVGPDDTEQAVRVGFVVDASGRTGFLTKKLGHHEFDPVLRNIAVHAQYEGIPRLEGRRAGDIRMFTRADMGWIWLIPISQSVTSVGAVIPQSVHRRESKAVPEDSLTHYLTGTAGLAPLLAHARRVSPARFDADYSYLGSSLAGDRWIAVGDAAAFLDPIFSTGVLLAMQAGLEAAEAIDDSLREGEPARHRFAACERLVRQRYHHFRRFAVGFYDPYFRDLWFRPASRLGIFGAILSVLAGNWRPSWMTRQRIRFFFTLVALRRFFRLPVTSGRIPEP

SEQ ID NO: 87405 - protein, 497 aa, Sphingomonas sp.
  REGION 1..497: note = tr|A0A1S6FPC7|A0A1S6FPC7_9SPHN Tryptophan halogenase; OS = Sphingomonas sp. LM7 OX=1938607 GN=BXU08_18105 PE=4 SV=1
MTQPRKNVVVVGGGTAGWMVASAIAKLLPHAASVELIESAEIGIVGVGEATLPHLRAFIQTLGLDEAEFMAATHATYKLGIEFRDFGKPGDVYLHPFGVFGQPLNGVPFLHWWLRMHAQGRGGEIAEYSVANVMAVQQRFAVPAADPTTLLSTYGYAYQFDATKFGPFLRGFAEKRGVTRTEGRIVTVDRDGESGDVAAVVLESGARVEGDLFVDCSGFRSLLLGDALGEEWEDWSHWLPCDRATALPCASPRGEIEPVTRATAMAAGWRWRIPLQHRVGNGYVYSSAHLSDDAASDAILAAVDGEPLAEPRMLRFRAGRRKRSWSHNVVAIGLASGFLEPLESTSIYLAQAAITQLLDLFPIGPIEDADRDAFNTQIDYEYDRIRDFLILHYHASTRDDSEFWRYVRHMPIPDSLAEKIELFRRAGRIQRYSRGLFFEPSWIAVMIGQGIIPQAWDQRVDAANPGELGQALDRLRGQIAREVATLPGHRAALGLSA

SEQ ID NO: 87406 - protein, 512 aa, Pseudoalteromonas spongiae
  REGION 1..512: note = tr|A0A290TAA1|A0A290TAA1_9GAMM Uncharacterized protein OS=Pseudoalteromonas spongiae UST010723-006; OX = 1117319 GN=PSPO_b1267 PE=4 SV=1
MTEDTKTINSIVIVGGGTSGWMTAAALANHAPLKHCKITLIESSKLGTIGVGEATIPTLRRFYQNLGLSDIDVLNATKGSCKLGIEFQGWAGENSRFIHPFGIYGQSTPSTPFHHYWLRAEQAGAHSDLTDYSLGVQMAKHNKFVPPKIKPQNQLEIFDWALHFDASLFAKLMFDYSTNKGVKHIDNTISNIENHPDGSISQLQFEDGSSIVADLFIDCSGFKALLIGENQAVEYENWSHWLLNDSAIAVQTSATTEPITRTLAIAKKGGWQWRIPLQHRVGNGYVYSSKYLSHDEAEQSLLASIDGEILQPPRKFSFTPGRRKSAWHNNCVAIGLSSGFLEPLESTSIALVETAIEKLLLTFTSNHYSAHDVAKFNDVNAQEYERVRDFIILHYKLNGRSDSPMWQYYRDMAIPASLEEKMLTFAKTGELKRLPWEMFGPDSWLAIYHGLNFLPENYQASADNMPLNYLNEHLTKMREMVSSQVNNAPTHSEFLEKHCGYQPIKQQEAVCS

SEQ ID NO: 87407 - protein, 512 aa, Sphingomonas sp.
  REGION 1..512: note = tr|A0A1S6FIS8|A0A1S6FIS8_9SPHN Tryptophan halogenase; OS = Sphingomonas sp. LM7 OX=1938607 GN=BXU08_07215 PE=4 SV=1
MSADPIRSILIAGGGTAGWMAAAALSAAFKPHQCRITLVESDEIGTVGVGEATIPTIQLFNKLLGIDERDFVRETQGTFKLGIEFVGWLREGERYFHPFGRYGDDFGFAPFHQQWLRARALGNSLPLDAWSLNHQAAYRGKFEIPTPQSPRVFSTWSYAYHFDAALYARYLRSLAESRGVARLEGKIAEVILRPENGFVERLTLADGRSLEADLFLDCTGFRGLITEALGTGYDDWTQWLPCDRALAVPCTRVADPEPYTRSTARKAGWQWRIPLQHRTGNGQVYCSGAIADDEVHADLLASLDGAPEADPRMLRFTTGRRRKAWNRNVVALGLASGFLEPLESTSIHLIQTGISKLLSWFPDRNFDPLLATEYNRLVDAEMESIRDFLVLHYHANAREEPFWRQCRAMPIPDTLAEKMAMFRANGRLIERQYDLFHPPSWLAVLLGQGVHPAAHDPLADTVPPQELAAILAGMRQVIDQTADRMPSHQQYIDRHCRAAPRTTMPLAFQEAL

SEQ ID NO: 87408 - protein, 515 aa, unidentified
  source 1..515: note = Aliikangiella sp.
  REGION 1..515: note = tr|A0A545UHN5|A0A545UHN5_9GAMM Tryptophan 7-halogenase OS=Aliikangiella sp. M105 OX=2592383; GN = FLL46_05150 PE=4 SV=1
MAHIENIMVVGGGTSGWLTAAILARKFHQNPNRNIQVTLLESSDIPTIGVGEGTFPTMLNTLQYIGIEESEFLKSCQATFKQGIKFVDWLKPPSGDQHSHYYHLFNPPVLANGVDVTREWLAYEKDKPGYSYAVSPQAYICDQNLAPKRVDTGDYRWKTKYAYHLDAGKFVELLKRFATENLNVKHVIATVGQVEQEPETGNISAVVCEQGIRREADFFVDCTGFASLLIGKTLDSPFVDKSDVLFVDKAIAMQVPYLDEKQAIASHTISTAHEAGWSWDIGLKNRRGIGYVYASNYTSGERAEQVLRNYVGSQADNLDVKKISMRVGYREECWRNNCVAIGFSGGFVEPLEATAISMVETGATLLADQFPEDENAIPAIATKYNQIFKLRWEKIVEFIKLHYCLSQRTDSQFWIDNVKSTSIPKALLEKINLWRYFPPVENDFASRFEMFTLASYQYILYGMEFKTELQSAYLSGTRKEVAEMVFSKIHEQGSVALKDLPDHRELIETLNSSIR

SEQ ID NO: 87409 - protein, 528 aa, unidentified
  source 1..528: note = Aliikangiella sp.
  REGION 1..528: note = tr|A0A545UHI3|A0A545UHI3_9GAMM Tryptophan 7-halogenase OS=Aliikangiella sp. M105 OX=2592383; GN = FLL46_05170 PE=4 SV=1
MMKKVNKVLIVGGGTAGWITAAKLAKNLQADSSDGVEVTLVESPDIPTIGVGEGTWPTMRKTLLELGINEGEFMAYCQATFKQGTKFVNWKKEPGDKAAHTYYHMFSSIFDPSDFNLAPYWLAGIAGENTTFATAVSAQGNTCDLGCAPKKITDRPFDGVLSYAYHLDAGKFAEFLTQFATEKLGVKLIKANATQVHLTENGDIKGISVDRNEQGERESSENMVLEADLFVDCTGFRSLLLGESLNVSFKSVADTLLTDTAIAIQVPYESEDAPIPCQTNSIAQESGWIWDISLFNRRGTGHVFSSNHMHPDEAESVLRKHIGPVAKELESRTIKMNIGYREKFWEKNCVAVGLSAAFVEPLEASAIFLIEAAGNMLVDMFPKTRDAMDYAAQRYNQSFLYRWEKTIEFIKLHYYLSQRESKFWQDNKADETVPEVLRERVAHWRTHPVSKYEFDNVFEPFPHESYQYVIYGMGIHENGRFSRQHLSDQNKAMEYFKRVRQATELINKDLPQHRELLKKAYQYGFQTL

SEQ ID NO: 87410 - protein, 533 aa, Streptomyces sp.
  REGION 1..533: note = tr|A0A1U9NTF0|A0A1U9NTF0_9ACTN Tryptophan halogenase; OS = Streptomyces sp. fd1-xmd OX=1812480 GN=B1K54_05415 PE=4; SV = 1
MTSTDTRLQKVVILGGGTAGWMTAAYLGKALQGTVDITVLEAPTIPRIGVGEATVPNLQRSFFDYLGIAEDEWMRECNASFKMAVRFVNWRTGGQGESTARELPGGGPDHFYHPFGLLPDYDQTPLSHYWFKRKYEGRTTEPFDYACFREPPVMDAMKAPRWLDGRPATRYAWHFDAQLVADFLRRFATEKQGVNHVQDEMVRVEQDSRGYVTTLHTKGGLALDADLFVDCSGFRGLLINQAMQEPFIDMSDHLLCDSAVATAVPHDDEANGVEPYTSAIAMSSGWAWKIPMLGRFGTGYVYSSKFTDQDTATAEFADMWGLDAESTKFNHIRFRVGRNRRAWVKNVVSIGLSSCFLEPLESTGIYFITAAIYQLAKHFPDKTFNEGLIDSFNHEIEVMFDDTRDFIQAHFFYAPRNDTPFWQANKKLVLPDNIKQKISAYKAGLPINSPITDESTYYGNFEAEFRNFWTNGSYYCIFAGLGLEPDAPLPTLAHRPESVAGAEPLFDTVKRQQQNLLETLPSAYDYLRQLHGA

SEQ ID NO: 87411 - protein, 75 aa, unidentified
  source 1..75: note = Massilia namucuonensis
  REGION 1..75: note = tr|A0A1I7M7L5|A0A1I7M7L5_9BURK Tryptophan halogenase (Fragment) OS=Massilia namucuonensis OX=1035707; GN = SAMN05216552_10817 PE=4 SV=1
TGRVVVYDKEGFNVPSMVSLLMGLGVVPKQDDPLIDAMNFDHLLGHLASRRDAVARVVKAMPEHAQYISQHCAAP

SEQ ID NO: 87412 - protein, 510 aa, Pelomonas sp.; identical to SEQ ID NO: 87227
  REGION 1..510: note = tr|A0A0Q7AXU4|A0A0Q7AXU4_9BURK Tryptophan halogenase; OS = Pelomonas sp. Root405 OX=1736529 GN=ASC81_15150 PE=4; SV = 1

SEQ ID NO: 87413 - protein, 497 aa, Novosphingobium sp.
  REGION 1..497: note = tr|A0A3D1P5D1|A0A3D1P5D1_9SPHN Tryptophan halogenase; OS = Novosphingobium sp. OX=1874826 GN=DER67_08250 PE=4 SV=1
MRIVIVGGGTAGWMSAAALARFAPPGYAVTLVESDAIGTVGVGEATIPAIRLFNEALDIDEGSFLAATKGSFKLGIEFAGWLEDGHSYMHAFGTVGRQLGLLPFRHFWARGRALGLAKPLAHYSANELAARTGRMQVGASGPGIPEVPYAYHFDAGLYAAFLRDYAETRGVTRIEATLAGARRAETGDIAAVVTADGREIAGDFFIDCSGFKGLLIEQELQTGYDDWRHWLPCDRAIAVPCEPSGNFTPYTRSTARPAGWQWRIPLQHRIGNGHVFCSEFMSDDEAAAILLGNLDGPALADPRAIPFVTGRRKQIWNRNVLAVGLSSGFLEPLESTSIHLIQSTITRLLTVLPGKQIDPAVVDGFNRRSAAEFENIRDFLVLHYWANRRDGQPLWDRMRGLELPQSLQQRIGEYLAVNQIQPAHDELFTEVAWFQVLAGQGLIPRSWNPIADRYPEGELAGFLGAVEKDCVETVRPMPLHIDCVAAVCGAAKKEKAA

SEQ ID NO: 87414 - protein, 409 aa, Cupriavidus metallidurans
  REGION 1..409: note = tr|Q1LF24|Q1LF24_CUPMC Monooxygenase, FAD-binding:FAD dependent oxidoreductase:Tryptophan halogenase OS=Cupriavidus metallidurans (strain ATCC 43123 / DSM 2839 / NBR C 102507 / CH34) OX=266264 GN=Rmet_4387; PE = 4 SV=
MKKETVDVLIVGAGPAGSVAAGLLRKRGIGVLVIEKETFPRFSIGESLLPQSMAYIEEAGMLQAVVEAGFQYKNGAAFARGDRYTDFDFREKFSPGWGTTYQVQRAHFDDVLIREAQKQGAEVRFRHVVEAVDVSGAAPVVTVRDPDGNVYQVESRFLLDASGFGRVLPRLLDLESPSNFPVRAAIFTHVADRIPGGSFDRNKIRVSVHPEHVDVWYWTIPFSNGRCSQGVVAEKSFLDRYEGDEMTRLRQLVAEEPGLAKLLKDAEWDTPARQIVGYSANVRSLWGNGYALLGNAGEFLDPVFSSGVTIAFKSASLATACVARALAGESVDWETEYARPLKAGVDCFRAFVEAWYEGSFQKLIFHPNAPTDIRDMISSILAGYAWDLNNPFVTESRRRLSVLEQFCDD

SEQ ID NO: 87415 - protein, 415 aa, Novosphingobium sp.
  REGION 1..415: note = tr|A0A5C7UFE9|A0A5C7UFE9_9SPHN Tryptophan 7-halogenase (Fragment) OS=Novosphingobium sp. OX=1874826; GN = E6Q63_02795 PE=4 SV=1
MTASHLPRRIVIAGGGTAGWMAAAALARTLGPVAQVTLVESEQIGTIGVGESTIPPLVTYNRLLGINEAEFMRATQATFKLGINFENWRVEGENYFHSFGGTGKDHWSAGFQHFWLHGLERGHTEPYGEYCLELKAAEAGKFAHLPDDRMNYAYQLDSGLYAKFLRAMAEADGTTRIEGKIARVELDGESGDIAALVLEGDRRIEGDLFIDCTGFRALLIEGALRAGYDDWTHWLPCDSAIAIQTSSVRPPVPYTRAIAHEAGWQWRIPLQHRQGNGVVYCSDYLSHEAALEKLLSTVEGEKLVKPNHIRFRTGARRKQWHRNCVAVGLSGGFMEPLESTSIHLIQRAILRIVRMLPAGVISQRDIDEFNDQQFTDMEQIRDFLVLHYKATERRDTPFWRHCASMEVPASLEHKM

SEQ ID NO: 87416 - protein, 512 aa, unidentified
  source 1..512: note = Pseudoalteromonas piratica
  REGION 1..512: note = tr|A0A0A7EN29|A0A0A7EN29_9GAMM Tryptophan halogenase; OS = Pseudoalteromonas piratica OX=1348114 GN=OM33_20355; PE = 4 SV=1
MTEATKTINSIVIVGGGTSGWMTAAALANHAPLKHCKITLIESSKLGTIGVGEATIPTLRRFYQNLGLSDIDVLKATKGSCKLGIEFQGWAGENSRFIHPFGIYGQSTPTTPFHHYWLRAEQAGTHSDLTDYSLGVQMAKHNKFVTPKIKPQNQLEIFDWALHFDASLFAKLMFDYSTNKGVKHIDNTISNIENHPDGSISQLHFEDGSSIAADLFIDCSGFKALLIGENQAVEYENWSHWLLNDSAIAVQTSATSEPITRTLAIAKKGGWQWRIPLQHRVGNGYVYSSKYLSHEEAEKSLLASIDGDILQPPRKFSFTPGRRKSAWHNNCVAIGLSSGFLEPLESTSIALVETAIEKLLLTFTSNHYSTHNVAKFNDVNAQEYERVRDFIILHYKLNGRSDSPMWQYYRDMAIPASLEEKMLTFAKTGELKRLPWEMFGPDSWLAIYHGLNFLPENYQASADNMPLNYLNEHLTKMREMVSSQVNNAPTHSEFLEKHCGYQPIKQQEAVCS

SEQ ID NO: 87417 - protein, 374 aa, Caulobacter vibrioides
  REGION 1..374: note = tr|A0A0H3CDD3|A0A0H3CDD3_CAUVN Tryptophan halogenase; OS = Caulobacter vibrioides (strain NA1000 / CB15N); OX = 565050 GN=CCNA_02897 PE=4 SV=1
MRRVLIVGAGIDAWMTAAALATATRGLTQVVVAETGPPPVGRIAALPSLQGLHARLGISEPTLAQATEARPRLAARYGDAIEPFGETGVGIDGVAFHHYWLAAGRPGPLSDWSLAALAAARGRFAPPSPDPRSPLSTLSYGLSLDAAGYAALLKRVALAAGAKVVEGRPDADLKVDASGGERRLVAHETWTDWSARLPNGVALAQDSLVSTFAPAPAKTGRIAQAMRGDTVAVGAAYGAIGAGDGGDLHLLQGDVSRLIALFPTGPAAVAEYNRLAQSALERARDMAILRWGDLSNPPEPLARKIEQFQSRGRVVTYDEEAWPESAWIHAMLARGIVPKRWDPLADRLGTDRTREMLGRMKAMLDQTAEAMPRV

SEQ ID NO: 87418 - protein, 531 aa, Sphingobium sp.
  REGION 1..531: note = tr|A0A2W6WEY4|A0A2W6WEY4_9SPHN Tryptophan halogenase; OS = Sphingobium sp. OX=1912891 GN=DI547_00100 PE=4 SV=1
MTDDGKAAVRDGGSAIRSIVIVGGGTAGWMAACLLAKRLDRQDVSITVIESHMIGTVGVGEATVPAIRDYFRAIDLDEMEVLRETGGTIKLGIEFRDWLRPGHRFFHPFGLYGLSSRGVPFHQYWLKCLHAGDERPLEDYSLCSELARRGLFMPPVDNPVNELGVFNWAVHFDASLFARQLKTHGMARGVRLVDDVIVDVRLDLASGHVRDVVTEGGQSVAGDLFIDCSGFRALLIGKALNTPWVDWRDLLPRDRAVAMPCALDPALDFPYTVSTARPAGWQWRIPLQHRVGNGYVYSSAHLSDDEAIADLRGRLEGEALGEPNLIRFSAGHRVHFWNGNCVAVGLAAGFLEPLESTSITLIQTAVEKLIDLFPDTGFDPALAAEYNRATTLEFERIRDFLILHYLGNRRLGEPMWDALRAASPPDRLAHKLRLFQARGKLVRYEWEAFLDPSWLSMYAGFGMLPNRHDPMADHFTDAEIASALDRMREAIGAASAHAMPHGAFIARHAAARTSAQTHPPQNTHMEKVLHG

SEQ ID NO: 87419 - protein, 515 aa, Novosphingobium sp.
  REGION 1..515: note = tr|A0A5C7UCZ3|A0A5C7UCZ3_9SPHN Tryptophan 7-halogenase OS=Novosphingobium sp. OX=1874826; GN = E6Q63_02780 PE=4 SV=1
MIGSVKQVVIVGGGTAGWLSACLLAARRPELAITLVEAPDIPTIGVGEGTWPTMRETLATIGIHEAEFLSQCDASFKQGSRFDGWVDGSAQDSYLHPFTPPPPGDMAAMLQAWRAQSPDLPFAALMTPQAAACDENLAPRQRAMPDYAGALNYGYHLDAGKFAALLKRHATTRLGVTHVSAQVTAVADDEAGNIASLSLHDGRTIAGDFFIDCSGLAAILIGDHCGVPWVDRSDVSFNDSALAVQVPVEPGSPIASQTIGTAHEAGWIWDIALPTRRGIGCVFSSRFMDDERAEDVLRNYIAARLPSADLQALRPRKLTFSTGHRERFWHRNCLAVGLSAGFIEPLEASAIVTIELSIKALAENFPRRSGTMGLLAGRFNELFCYRWDRIVEFLKLHYVLSRRPEPYWLAQRDPATVPARLAECLELWRDQPPSVWDLPRMDELFCAASQQYVLYGMGFPVPAGAVDAAATQALAEVRQRSRALAAALPSNRTYLDALRPVAAAAPIAMHGAAVK

SEQ ID NO: 87420 - protein, 151 aa, Psychrobacter sp.
  REGION 1..151: note = tr|K7W8V2|K7W8V2_9GAMM Tryptophan halogenase (Fragment) OS=Psychrobacter sp. D8 OX=1258816 PE=4 SV=1
GVGEATIPIMVKFLHAYLERDVHELYRKVQPTWKFGVKFEWGQPGDYYFNYAFHPGPVLDSVYYGGDFNEYSLGSMLISNERAPILTGEGGQLTSLIDRIPFAYHLDNGRFVAYLREEAVRDGVERLELSVDSFVPTGDGESLDHIVTDDG

SEQ ID NO: 87421 - protein, 110 aa, unidentified
  source 1..110: note = Acidimicrobiales bacterium
  REGION 1..110: note = tr|A0A520XJX8|A0A520XJX8_9ACTN Tryptophan halogenase (Fragment) OS=Acidimicrobiales bacterium OX=2201156; GN = EX271_07940 PE=4 SV=1
LHYCATERTDSPFWEYCKNMEIPDTLKQRIELYKENARLYRHDNELFGDVSWFAVLHGQNINPKRFHPNTNMMPENELNQRMSDIRKTWNACLDKMPMHQDFINQNCKAV

SEQ ID NO: 87422 - protein, 517 aa, unidentified
  source 1..517: note = Acidimicrobiales bacterium
  REGION 1..517: note = tr|A0A520XP84|A0A520XP84_9ACTN Tryptophan 7-halogenase OS=Acidimicrobiales bacterium OX=2201156; GN = EX271_04740 PE=4 SV=1
MHDEHFKIIIVGGGTAGWLSAAFLSQQLPITSGRKIQITLIEASDIPTIGVGEATVPSLRQTLAACGISEVDFLSSCGATFKHGIKFVNWKRAPDEDPGESYFHPFGEPLKVGTIDPIRAWSKLAPETRGNIADVFSVQSEMAEAGRAPKHLKDRPYDGALSYAYHLDAGAFADYLKQRFRTEGVSQIIGKVTSVNFDQRTQNINGLVLEDGSEHSADLYIDCTGFAARLINADKQNPFEDKNGVLFVDRAVTTRIEHDGIRNINGYTTCTAQTAGWIWDIVLQNRRGVGHVYSSKYIDDDTAKNQLADYLNVAHDEIETRQLSMRIGYHKEQWRGNCVAIGLASGFLEPLESTGIYLTEMANWALIDLLPRFMADPNSQNGPQAQFTDAMSHHYENIVDFLKLHYAISGRLDSDFWRDNANPDTWPNSLAAHLDAWRNDAPSVYDFGRSIQCFSANNYQFVLYGMGWKGHDEPTPLSPQSETLMQELSIRRSRLKDFVLRDTLPNGEFFKPISDQQ

SEQ ID NO: 87423 - protein, 530 aa, Streptomyces olivaceus
  REGION 1..530: note = tr|A0A2R3ZQ36|A0A2R3ZQ36_STROV Tryptophan halogenase; OS = Streptomyces olivaceus OX=47716 GN=mymP PE=4 SV=1
MNDIRIKDVVILGGGTAGWMTASYLGKALQGTVNITLLEAPTIPRIGVGEATVPNLQSAFFDYLGIPEQEWMRECNASFKTGIRFVNWRTPGNGSPEPRDLDGGTDYFYHHFANLPEHDHVPLSHYWDFRRRQGEQIADFDRECFGEAAALDAKRGPWYADGTPATGYAWHFDAQLVADYLRRFATRKQGTRHVQDELVDVVLDERGHIESLLTKDGLELRGDLFVDCSGFRGLLINKALGEPFLDMSDHLLCDSAVATAVPHDDEKNGIEPFTSAIAMSSGWTWKIPMLTRFGSGYVYSSKFIEKDTATKEFCDLWGLDPTRTEFNHVKFRVGRNRRAWVKNCVSIGLSSCFVEPLESTGIYFIYSAVYQLAKHFPDKRFDPVLVNHFNREIESMFDFTRDFIQTHFHFSPRNDTEFWRANKELPLGDDIREKIELYRAGLPVNSSVTGERVYYGNSEVENKNFWNNTNYWCIFAGLGFLPDRVMPSLTYKSASLDSVETVFDDVRRREQHLLDKLPATRDILRSLHHR

SEQ ID NO: 87424 - protein, 342 aa, Pseudomonas chlororaphis
  REGION 1..342: note = tr|A0A3G8GC29|A0A3G8GC29_9PSED Tryptophan halogenase (Fragment) OS=Pseudomonas chlororaphis OX=587753 PE=4 SV=1
EREWMPQVNGAFKAAIKFVNWRKSPDHSRDDHFYHLFGNVPNCDGVPLTHYWLRKREQGFRQPMEYACYPQPGALDGKLAPCLADGTRQMSHAWHFDAHLVADFLKRWAVERGVNRVVDEVVEVRLNDRGYISTLFTKEGRTLEADLFIDCSGMRGLLINQALKEPFIDMSDYLLCDSAVASAVPNDDAREGVEPYTSAIAMNSGWTWKIPMLGRFGSGYVFSSKFTSRDQATADFLNLWGLSDNQPLNQIKFRVGRNKRAWVNNCVSIGLSSCFLEPLESTGIYFIYAALYQLVKHFPDTSFDPRLSDAFNAEIVHMFDDCRDFVQAHYFTASREDTPFWL

SEQ ID NO: 87425 - protein, 198 aa, Brevundimonas sp.
  REGION 1..198: note = tr|A0A519L772|A0A519L772_9CAUL Tryptophan halogenase (Fragment) OS=Brevundimonas sp. OX=1871086 GN=EON86_02025; PE = 4 SV=1
MSERAVSSVLIVGGGTAGWMAAAALARAFRALPIPRRPAVTLVESETIGTVGVGEATIPPIRQFNQSIGLDEADFVAATGATPKLGIAFEDWSAPGSRYFHGFGDHGPEMHGQPYRQHLFRLKSAGRLDSLDPWAVPAVMAREGRFAPPETDPRSILSAYSYAYHFDAGLYAKRLRTLAEAAGVTRIEGRILGVQADA

SEQ ID NO: 87426 - protein, 411 aa, Brevundimonas sp.
  REGION 1..411: note = tr|A0A519KSR8|A0A519KSR8_9CAUL Tryptophan 7-halogenase (Fragment) OS=Brevundimonas sp. OX=1871086; GN = EON86_13160 PE=4 SV=1
MHENAIRTVVIVGGGTAGWMTAAALSKRLGRTVDITLVESAEIGTVGVGEATIPPILDFNKMLEIDENDFVRATQATFKMGIEFRDWGALGDNYLHPFGRFGLDFEGVPFHQQWLKQQAAGQPGDIEAYSLSGTAARAGKFFRPVEDPRNLLSMLAYAFHFDASLYAAFLRSYAEARGVVRLEGRVVDVAQRGLDGHIESVKLESGAVIAGDLFIDCSGFRGLLIEQTLEAGFEDWAHWLPCDRAVAAPSASIGPPSPLTRSTAREAGWQWRIPLQHRVGNGYVHCSRFISEDEAAATLVANLDGELLAEPRTLRFRTGRRQRTWVKNCVAIGLAAGFLEPLESTSIHMIQTAITRLLALFPDRSFDPTLVDEYNRLSRREAERIRDFVILHYHQTTRDDAPLWRQVRTMA

SEQ ID NO: 87427 - protein, 129 aa, Brevundimonas sp.
  REGION 1..129: note = tr|A0A519KKG7|A0A519KKG7_9CAUL Tryptophan halogenase (Fragment) OS=Brevundimonas sp. OX=1871086 GN=EON86_17175; PE = 4 SV=1
FNREMDQQYEGVRDFIIAHYKVSTRDDTPFWRHCRDMAVPDSLAAKLELFRARGEVMVENHELFRETNWFPVLYGQGLTPEGYHPLADVLSDDDLRLRLSQIRAAIRARVDSLPSHDSYLRQCVAGTAR

SEQ ID NO: 87428 - protein, 511 aa, unidentified
  source 1..511: note = Streptomyces rugosporus
  REGION 1..511: note = tr|A4D0H5|A4D0H5_9ACTN Tryptophan 5-halogenase; OS = Streptomyces rugosporus OX=295838 GN=pyrH PE=1 SV=1
MIRSVVIVGGGTAGWMTASYLKAAFDDRIDVTLVESGNVRRIGVGEATFSTVRHFFDYLGLDEREWLPRCAGGYKLGIRFENWSEPGEYFYHPFERLRVVDGFNMAEWWLAVGDRRTSFSEACYLTHRLCEAKRAPRMLDGSLFASQVDESLGRSTLAEQRAQFPYAYHFDADEVARYLSEYAIARGVRHVVDDVQHVGQDERGWISGVHTKQHGEISGDLFVDCTGFRGLLINQTLGGRFQSFSDVLPNNRAVALRVPRENDEDMRPYTTATAMSAGWMWTIPLFKRDGNGYVYSDEFISPEEAERELRSTVAPGRDDLEANHIQMRIGRNERTWINNCVAVGLSAAFVEPLESTGIFFIQHAIEQLVKHFPGERWDPVLISAYNERMAHMVDGVKEFLVLHYKGAQREDTPYWKAAKTRAMPDGLARKLELSASHLLDEQTIYPYYHGFETYSWITMNLGLGIVPERPRPALLHMDPAPALAEFERLRREGDELIAALPSCYEYLASIQ

SEQ ID NO: 87429 - protein, 492 aa, Brevundimonas sp.
  REGION 1..492: note = tr|A0A519LC70|A0A519LC70_9CAUL Tryptophan 7-halogenase OS=Brevundimonas sp. OX=1871086; GN = EON87_02915 PE=4 SV=1
MSAAGLVGVLKPDQVKVRLVESDDIGTVGVGEATLPQMREFNDRIGIVESDMMRKTNATFKLGIEFRDWGFKGSSYVHPFGAHGRPMGGVGFHHQWTRARLAGQAADIGDYSYAIVASRRNRFDFPATDKTAVNSTYDYAYHFDAGLYARYLRGWCETRGLTRTEGKVMEVRLDPTTGDVAAIVLESGEVVTGDLFIDCSGFRGLIIGGALNGTFEDWTRWLPCDRALAVPTERSEDFTPFTRSTALEAGWQWRIPLQHRTGNGYVYSSSFISDDEAITRLMGNLDGKPLAEPKPIRFKSGRRTASWTKNCIAVGLASGFLEPLESTSIYLTQVAVLTLLDLLPRRPIDPVLAEEFNRVVDNEYDRVRDFLILHYHANTRTDSELWRHCREMEIPDTLREKMSLFGHRGHISQYKDGLFSPPSWLSVFVGQGVLPTGYHPMADTLPLASVLEEMEGIRARVADRVDAMPTHADFVRDYCAGEAPLKAMGAGA

SEQ ID NO: 87430 - protein, 490 aa, Brevundimonas sp.
  REGION 1..490: note = tr|A0A519HY27|A0A519HY27_9CAUL Tryptophan halogenase; OS = Brevundimonas sp. OX=1871086 GN=EON89_04655 PE=4 SV=1
MTGRPTRVVVVGADAPLWLSALTIHGALHKAGVTVEAVALPSRADPAEVVEARPAIEALHNRLGIREDRLLAAAKGAFMLGRRLAGDPADGPGAFVGYGANGAAFGQEAFLPHWLRARDAGFDAPLEAFNLVASAALQGRRLVPDAEIAAFARADYGYALPARAYARSLAALAGQDGLTTHQTDGLGVDRGEDGRVTALRLDDGRSIAGDLFVDVSRDAVVSEGALQSPTEDWSLLFPTARIVRATAPPLSAAPAYSRVEAYPWGWLARIPTPAATHLLAVFSEDGDAARELDRMGFGSASSEGLVRFGRTAPWRFNCVAIGPAACRLDPIFGLDLHALQLGLIHFVSRFPTSADAALERDDYNGALSALLENLRDFQIAHYRAQRYRGRVWDEARAGGVPPALAHRLALFAARGLLGPLEHETIPADEWQSLLIGHGLRPASHDPMADINPSEAVLGDLRGMLDFIARKVSAFPMNAVPPARTPTSDRP

SEQ ID NO: 87431 - protein, 507 aa, unidentified
  source 1..507: note = Gammaproteobacteria bacterium
  REGION 1..507: note = tr|A0A534EGU3|A0A534EGU3_9GAMM Tryptophan 7-halogenase OS=Gammaproteobacteria bacterium OX=1913989; GN = E6K39_16100 PE=4 SV=1
MPAQELKSVVIAGGGTAGWMAAAAIAKVMGPRLTITLVESDEIGIIGVGEATIPSIALYNDLLRLDENDFLRQTQGTFKLGIEFVNWYEPGHRYMHAFGGIGKDLAYIPFHHYWLQEVLQGRGDPLWHYSLNWMAAHQDRFARLERIAETPLPGVIYAFHFDASLYAAYLRRLALQMGVRRVEGMIAEVLQNPESGDVSALRLKDGREITGELFIDCTGFRALLIERTLKVGYDDWTRWLPVDRALAIPTERVGPLTPYTRSTALEAGWQWRIPLQHRTGNGHVYSSAFVDDDRAAELLMANLDSRPLADPRPIRFVTGRRRQLWSHNVVCLGLASGFLEPLESTAIHLIQANIQRLILLFPHHGDCDHRRAQFNQAAAAEYEYVRDFIILHYHLNNRVGERFWDTCRQMSVPDSLTHKIELFRETGGIFPTMYDLFHLTSWLQVMWGQGVRPRGAHPFVQTVAPHDRVEYLKNIRDLIAQAASELPRHDEFIARHCRAPAPAAAVT

SEQ ID NO: 87432 - protein, 484 aa, unidentified
  source 1..484: note = Gammaproteobacteria bacterium
  REGION 1..484: note = tr|A0A534JGB5|A0A534JGB5_9GAMM Tryptophan 7-halogenase (Fragment) OS=Gammaproteobacteria bacterium; OX = 1913989 GN=E6K20_00985 PE=4 SV=1
RGVEITLLESPTVGIIGVGEGSTPWLRGFFDSLGLEESEWMPACHATYKCGIRFDGWSTKPGFGSYFHPFASMLDNLTMKQFVHNVEARINGADLEAHPDRYFIAARLAAKRRAPKASESFPFDIWHGYHFDAVLLGQFLHRKAVDRGVRYKSCHVTHANLDADGNIASVGTEEGETIAADLFVDCSGFAGLLIDKALHTPYVSFSSNLFNDAAVAIPSPMEASIPSETVSTAMKHGWAWKIPLTTRFGNGYVYSSRFCSADEAETELRRHLGLLDGDVPARHLKMKIGRVTRHWNRNCLAVGLSQGFIEPLEATALLFIQQTAATFVEFVERGDLSEAAHERFNDMMNTHFEGIRDYIVTHYKTNTRTDTEYWRANAANLNLSDDLKKLYSLWMAGKSIAPAVGQQVLGKGYPVFSWYSIMAGMGIFPDPQDLRPPTVQEARFSEAEIDNLLERSSANYPDHRAALESIPPRRTEPALQVYFW

SEQ ID NO: 87433 - protein, 373 aa, unidentified
  source 1..373: note = Gammaproteobacteria bacterium
  REGION 1..373: note = tr|A0A534B938|A0A534B938_9GAMM Tryptophan 7-halogenase (Fragment) OS=Gammaproteobacteria bacterium; OX = 1913989 GN=E6K48_03440 PE=4 SV=1
RRAPKASESFPFDIWHGYHFDAVLLGQFLHKKALERGVRYQSCHVTRANFDADGNIASVGTEEGEAIAADLFVDCSGFAGLLIDKALHTPYVSFSSNLFNDAAVAIPSPMEGSIPSETVSTAMKHGWAWKIPLTSRFGNGYVYSSRFCSADEAETELRRHLGLLDADVPVRHLKMKIGRVTRHWNRNCLAVGLSQGFIEPLEATALLFIQQTAATFVEFVERGDLSDAAHERFNDMMNTHFEGIRDYIVTHYKTNTRTDTEYWRANAANLNLSDDLKKLYSLWMAGKSIAPAVGQQVLGKGYPVFSWYSIMAGMGIFPDPQDLRPPTAQEARFSVAEIDNLLERSSANYPDHRAALESIPPRRTEPALQVYFW

SEQ ID NO: 87434 - protein, 496 aa, Sphingomonas sp.
  REGION 1..496: note = tr|A0A5E7Y385|A0A5E7Y385_9SPHN Tryptophan halogenase; OS = Sphingomonas sp. EC-HK361 OX=2038397; GN = SPHINGO361_100451 PE=4 SV=1
MTPRRIVIAGGGTAGWMAAAAIMRTMGRTAEVTLIESDAIGTVGVGESTIPPLITFNRLLGINEAEFMAATQATFKLGIAFDGWKAPGHGYFHSFGLTGKDHWAAGFQHFWLNAQTRGQTQSYDDYCLELIAAREGKFAHLPNDRMNYAYQLDSTLYGRFLRRMAEGDGVTRVEGKIAQVDLDGTSGHIAALLLESGVRIEGDLFVDCTGFRALLIEQALHTGFDDWTNWLPCDAAIAVQTESVAAAVPYTRAMAHDAGWQWRIPLQHRVGNGIVYCRRYLDDDAALDRLLNNVEGRVLTTPNKLRFVTGARRKQWHRNCIAMGLSGGFMEPLESTSIHLIQRAILRLIRMMPHGEISARDIDEFNEQQHLDMLQIRDFLILHYKATDRRDSGFWRQCAAMDVPDSLAHRIALFRETGRVFRKNEELFAENSWVQVMMGQGIMPRTWHPIAEKLSDDDLAKFMAGLRDGVTATVRSLPDHASYVASFCGTPRSDAA

SEQ ID NO: 87435 - protein, 174 aa, Brevundimonas sp.
  REGION 1..174: note = tr|A0A519Q8E8|A0A519Q8E8_9CAUL Tryptophan halogenase (Fragment) OS=Brevundimonas sp. OX=1871086 GN=EON88_12025; PE = 4 SV=1
MNGPKKTRVVIAGGGTAGWLAAALLTRQLGPLLDVTLVESEQIGTVGVGESTIPTVTRFHSLIGVEERAFMTATGATFKLGISFEGWGRRGDRYIHSFGDVGKSTWMGDFQHFWLEARARGVAGPLGDYSFEHQAAAAGKFAAGGDARLNYAYHLDAGRYARFLRAHAEAAGLT

SEQ ID NO: 87436 - protein, 535 aa, unidentified
  source 1..535: note = Gammaproteobacteria bacterium
  REGION 1..535: note = tr|A0A534BZ36|A0A534BZ36_9GAMM Tryptophan 7-halogenase OS=Gammaproteobacteria bacterium OX=1913989; GN = E6K46_04705 PE=4 SV=1
MTTATLFNYSYSPTSGRNPDPAPVPLRRIVIVGGGTAGWMTALILARSLIERGVEITLLESPTVGIIGVGEGSTPWLRGFFDSLGLEESEWMPACHATYKCGIRFDGWSTKPGFGSYFHAFASMLDNLTMKQFVHNVEARINGADLEAHPDRYFIAARLAAKRRAPKASESFPFDIWHGYHFDAVLLGQFLHKKALERGVRYQSCHVTRANFDADGNIASVGTEEGEAIAADLFVDCSGFAGLLIDKALHTPYVSFSSNLFNDAAVAIPSPMEGSIPSETVSTAMKHGWAWKIPLTSRFGNGYVYSSRFCSADEAETELRRHLGLLDADVPVRHLKMKIGRVTRHWNRNCLAVGLSQGFIEPLEATALLFIQQTAATFVEFVERGDLSDAAHERFNDMMNTHFEGIRDYIVTHYKTNTRTDTEYWRANAANLNLSDDLQKLYSLWMAGKSIAPAVGQQVLGKGYPVFSWYSIMAGMGIFPDPQDLRPPTAQEARFSVAEIDNLLERSSANYPDHRAALESIPPRRTEPALQVYFW

SEQ ID NO: 87437 - protein, 523 aa, Streptomyces alboflavus
  REGION 1..523: note = tr|A0A3Q8TN42|A0A3Q8TN42_9ACTN Halogenase; OS = Streptomyces alboflavus OX=67267 GN=afnX PE=4 SV=1
MSTKNPDRVVIVGGGTAGWMTASYLKKAFGDKISVTLVESGKIGTIGVGEATFSDIRHFFEFLDLKEEEWMPACNATYKLAVRFQDWRRKGHHFYHPFEQMPTVNGFPLTDWWLQDGPTDRFDTDCFVMANLCDAGRSPRFLDGSLIDQGFTEGAKELSGLTMSEHQGKTQFPYAYHFEAALLAKYLTKYSTDRGVHHVIDEVQDVRLDERGWIDHIVTKDHGSLEGDVFVDCTGFRGVLLNKALEVPFISYQDTLPNDSAVALQVPLDMEKRGINPYTQATAQDAGWIWTIPLFGRIGTGYVYAKDYLSPEEAERTLREFVGPEAAEVEANHIRMRIGRSEQSWKNNCVAIGLSSGFVEPLESTGIFFIHHAIEQLVKHFPAADWSPELRKSYNSSIANVMDGVREFLVLHYQGAGRDDTQYWKDTKTRAVPDGLAERLERWKVQLPDSENVFPYYHGLPPYSYMCILLGTGAIPARATPSLGMSDTAAAHKEFAAIRDKARHLIETLPSTYEYFASMRERA

SEQ ID NO: 87438 - protein, 540 aa, unidentified
  source 1..540: note = Gammaproteobacteria bacterium
  REGION 1..540: note = tr|A0A523LLF1|A0A523LLF1_9GAMM Tryptophan 7-halogenase OS=Gammaproteobacteria bacterium OX=1913989; GN = E2O53_08235 PE=4 SV=1
MQPKRVLVVGGGSAGWMTAAYLNAALNGAGHQVADISLVESPDVPRVGVGEATIPNINHILNVIGIDEVEFMKRVDGTFKQSIRYVNWLHNGGEYYHHPFSRFRPGPVDSTARNWLMSDRSIPFTETVSAQPIICELGLAPKTLAGGNLETPLTYAFHMNALKFADYLTELSTARGVTHYSDHVIDIEMAETGDIQAVVTRGGLRLEADLFIDCTGFAAILIEKKLGVEWIDCSQWLLCDRAITLHVPYDKHYLGFVRPYTTATALSAGWVWDIPLQDRRSLGYVHSSAFLGDAEAEQELRLWEGAHCESLEARSVKFKVGHRAKAWVRNCVAIGLASSFIEPLESTGLYLSDLAAVILTEHFPRDDDMAPMAFRFNRTMTNRFYEILDFINMHYCLTQRTDTEFWREVRKPARINDRLKAKLAFWRIKPPSAADFEDQWFPGQADTPLPTGGLPGDHRSPIDTAGLWNHESYEAILYGMDFLAAECDAWFGKERPRPRMLKKIIEILTAAPRTLPLHDEWLKRVLGMPNYRTSRSKIRQ

SEQ ID NO: 87439 - protein, 81 aa, unidentified
  source 1..81: note = Gammaproteobacteria bacterium
  REGION 1..81: note = tr|A0A534FFW3|A0A534FFW3_9GAMM Tryptophan 7-halogenase (Fragment) OS=Gammaproteobacteria bacterium; OX = 1913989 GN=E6K30_14180 PE=4 SV=1
MTTATLFNYSYSPTSGRNPHPAPVPVRRIVIVGGGTAGWMTALILARSLIERGVEITLLESPTVGIIGVGEGSTPWLRGFF

SEQ ID NO: 87440 - protein, 362 aa, Brevundimonas sp.
  REGION 1..362: note = tr|A0A519JSZ5|A0A519JSZ5_9CAUL Tryptophan 7-halogenase (Fragment) OS=Brevundimonas sp. OX=1871086; GN = EON85_10350 PE=4 SV=1
MSRRVEQVAVIGRDAAVWLTALALQRALGRTGLKVRVIEMPSLLTAADVFAAVPSLGALHTLLGLKEETVLEAAHGLPVLGQRFVGWGGAQAPYIHGYDTHGVTLGDIPFPQIWLKARADGLTVPFEDFCLAAAAAKQGRSPVTRAGRSAGQPVAPGYHLDALAYVDLLRRAALQAGIEARGADVQSVRREGDRIVSVVLTDGETIEADLFIDASGAAAVLASGAPGPGFESWRSWFAADRLLVASAPRLKPLPAFSQITAFPAGWVGLHPLKTRTAVVAAYDSRTMSDQQVLEMLPALTGLPLAGDAAVEHLHAGMRPAWTGNCIAIGASAVSLPPLDAVQLHMIHIGLSTLISLFPAAAE

SEQ ID NO: 87441 - protein, 535 aa, unidentified
  source 1..535: note = Gammaproteobacteria bacterium
  REGION 1..535: note = tr|A0A534FA14|A0A534FA14_9GAMM Tryptophan 7-halogenase OS=Gammaproteobacteria bacterium OX=1913989; GN = E6K31_06015 PE=4 SV=1
MTTATLFNYSYSPTSGRNPHPAPVPLRRIVIVGGGTAGWMTALILARSLIERGVEITLLESPTVGIIGVGEGSTPWLRGFFDSLGLEESEWMPACHATYKCGIRFDGWSTKPGFESYFHPFASMLDNLTMKQFVHNVEARINGADLEAHPDRYFIAARLAAKRRAPKASESFPFDIWHGYHFDAVLLGQFLHRKAVDRGVRYKSCHVTHANLDADGNIASVGTEEGETIAADLFVDCSGFAGLLIDKALHTPYVSFSSNLFNDAAVAIPAPMEGSIPSETVSTAMKHGWAWKIPLTTRFGNGYVYSSRFCSADEAETELRGHLGLLDADVPARHLKMKIGRVTRHWNRNCLAVGLSQGFIEPLEATALLFIQQTAATFVESVERGDLSEAAHERFNDMMNTHFEGIRDYIVTHYKTNTRTDTEYWRANAANLNLSDDLKKLYSLWMAGKSIAPAVGQQVLGKGYPVFSWYSIMAGMGIFPDPQDLRPPTAQEARFSEAEIDNLLERSSANYPDHRAALESIPPRRTEPALQVYFW

SEQ ID NO: 87442 - protein, 160 aa, unidentified
  source 1..160: note = Gammaproteobacteria bacterium
  REGION 1..160: note = tr|A0A534H0U5|A0A534H0U5_9GAMM Tryptophan 7-halogenase (Fragment) OS=Gammaproteobacteria bacterium; OX = 1913989 GN=E6K24_18050 PE=4 SV=1
MAGGAAWAAPSVGAPCGPRHLGRGGHVAGRVTWSAMTTATLFNYSYGPTSGRNPYPAPVPVRRIVIVGGGTAGWMTALILARSLIERGVEITLLESPTVGIIGVGEGSTPWLRGFFDSLGLEESEWMPACHATYKCGIRFDGWSTKPGFESYFHPFASML

SEQ ID NO: 87443 - protein, 512 aa, unidentified
  source 1..512: note = Gammaproteobacteria bacterium
  REGION 1..512: note = tr|A0A534G2R5|A0A534G2R5_9GAMM Tryptophan 7-halogenase OS=Gammaproteobacteria bacterium OX=1913989; GN = E6K30_02775 PE=4 SV=1
MADAQPMRIVIVGGGSSGWMTAAALAKVLKGRYPITLIESEEIGTVGVGEATIPPIIVFNAMLELDENEFVRQTQATFKLGIEFVNWARLGDRYIHGFGVVGQDTWTVDFHQYWLKQYLAGKAKELEYYSINTMACLHDKFMRPRADMPKSPLSQIAYAFHFDASLYARYLRGYSEARGVQRVEGRIVDVELREGDGYVRAVRLNSGATVEGELFIDCSGFRGLLIEGALHTGFEGWSHWLPCDRAVAVPCRSAHQLHPYTRATARQAGWQWRIPLQHRIGNGYVFSSKYLSEDEATAVLLGNLDGEPLAQPRTIRFTTGRRKLAWNRNVVSVGLASGFLEPLESTSIHLVQKSISHLLAFFPSAGFEAQDRDQYNAVMRQEYEWVRDFIILHYKATERTDTPFWNYTRTMEVPEFLQHRLDLFRTHGRVFREGNELFTKLSWLQVMHGQRNRAQSYHPLADLLTEKEIADYLEEVAGVIETCTRVMPSHARFIAENCTAGTQAPAAAGGAA

SEQ ID NO: 87444 - protein, 412 aa, unidentified
  source 1..412: note = Gammaproteobacteria bacterium
  REGION 1..412: note = tr|A0A534E316|A0A534E316_9GAMM Tryptophan 7-halogenase (Fragment) OS=Gammaproteobacteria bacterium; OX = 1913989 GN=E6K39_20955 PE=4 SV=1
RYFHTFGPIGHDYGFLPFHQYWLKLFLSGKAEDIGAYSLHSVAAQRGKFMTSATDVPQNSPLYYVAHAYQFDAGLYARYLRSYSEARGVERTEGRVVDVKLRGTDGFIEAVVLEGGETTSGDLFIDCSGFRGLLIEQALHTGYDDWTHWLPCDRAMAVPSEKVGPATPYTRSTARAAGWQWRIPLQHRTGNGYVYSSKYISDDEVHRTLMSNLDGRALAEPRILKFTTGRRRKFWNRNCVAIGLASGFMEPLEATSIYLIQSGIGRLINLMPDRNFSPVLIDRYNKQAAFEFERIRDFLILHYFATERRDTPFWQYCGNMQIPEQLADNIRLFRDSGRFFRDGDEMFALSSWVQVMMGQHFVPHGYHPAVDLTPEQEVVELVASVRNVIARSVEVMPMHEQFIARYCPAAAA

SEQ ID NO: 87445 - protein, 492 aa, Sphingomonas sp.
  REGION 1..492: note = tr|A0A5E7Z5Z5|A0A5E7Z5Z5_9SPHN Tryptophan halogenase; OS = Sphingomonas sp. EC-HK361 OX=2038397; GN = SPHINGO361_130011 PE=4 SV=1
MTPPSVVILGGGTAGWMTACLIAKAWPDASVTLVESPEIGIVGVGEGSTPQLRHFFRTLGIDERDWMPAAHATYKVGIAFRGWSREPGYEAYFHPFASAVDLHTEPAFHAAHLARRTGRDVPAHPDRFFLNSRLAEGSLAPLPSESFPFDATYGYHFDATLVGQVLRDHAVGRGVTHLPRRVDEVVIGAEGAVTHLVLDGGETLAGDLFVDCSGFGSVIAQGALGVPFVSYADTLFNDRAVVMPTPLTDAGPRPYTTSTALSAGWAWDIPLITRTGNGYVYSSRYIDADAAEAELRANLGDTNATARHLTMKVGRVAESWKGNCLAVGLAQGFIEPLEATALHIVQATVEGFVQAFTDGGFTPKHRDTFNRTIARRYDGIRDYIFAHYRLNRRGDTEYWRDCAANDRLSDSLKRLFTCWFTGGDLLTEIAEQDIARHYAPLSWGCIFAGYGTFPDAAKLTAVPTRDDGLDDFLTRCALNFPSHAKALEALAA

SEQ ID NO: 87446 - protein, 302 aa, Brevundimonas sp.
  REGION 1..302: note = tr|A0A519LC66|A0A519LC66_9CAUL Tryptophan 7-halogenase (Fragment) OS=Brevundimonas sp. OX=1871086; GN = EON87_02905 PE=4 SV=1
MDRPDRVRHIVIVGGGTAGWMTASALSKVAGTQNQSITLIESDEIGIVGVGEATIPPILLFNKLLGIDENEFIRETQATFKLGIQFVDWGRLGHTYMHPFGLFGADMNGINFSHYWLRSVQGGGDPDNHRFVAEAEAMRLNRFARTPPGGSGDMPRINYAFQFDAGLYAAWLRKYAEKRGVVRREGKITTANKDGETGLIRSVTLSDGREVAGDLFIDCSGFRGLLIEQEMQAGYDDWTRWLPANRAVAVPCERVEDPVPYTRSTARESGWQWRIPLQHRTGNGYVFSDAFISEDQATADLM

SEQ ID NO: 87447 - protein, 512 aa, Brevundimonas sp.
  REGION 1..512: note = tr|A0A519L1N7|A0A519L1N7_9CAUL Tryptophan 7-halogenase OS=Brevundimonas sp. OX=1871086; GN = EON87_12780 PE=4 SV=1
MEAKAPNALRKVCIVGGGTAGWIAAALMAEHFKGKLFDIELVESDDIGTIGVGESTVPPFLQLLAKLGVNEQEFIRETQASFKLGIEFRDWLEKGQSYFHPFGTIGLPIDLSDFYQVWLKAKMAGYDRPLQDFAPASVMAREGKFTLPFKAQRTPLAGASYALHVDAKRVAQFLRRFAEARGVTRTEGIVSDVKTRADGFVETLVLKDGRTVEADFFIDCSGFRALLIGKTLDVGYEDWSHWLLCDRAIAVQTENVGPPPPYTLAQAQDYGWRWRIPLQHRAGNGYVFASQYLSDDEATATLMAQVEGKPVVDPMVVPFKTGMRDRIWDKNVLALGLAGGFIEPLESTAIHLIYRGMDFFFRFLPDRDCASSLADEYNRRMRADYEEIRDFIILHYCVTRRTDTPFWDACRSMTVPDSLQRKIDLFRVNGTVSEGLDELFRDPNWQSVLDGMGVVPRTYHPLVDRIPFGRATEGLDEAVANLERMVAGLPDHQSFIAQHCAADRPAAPAAVA

SEQ ID NO: 87448 - protein, 535 aa, unidentified
  source 1..535: note = Gammaproteobacteria bacterium
  REGION 1..535: note = tr|A0A534GRQ5|A0A534GRQ5_9GAMM Tryptophan 7-halogenase OS=Gammaproteobacteria bacterium OX=1913989; GN = E6K27_00495 PE=4 SV=1
MTTATLFNYSYSPTSGRNPYPAPVPVRRIVIVGGGTAGWMTALILARSLIERGVEITLLESPTVGIIGVGEGSTPWLRGFFDSLGLEESEWMPACHATYKCGIRFDGWSTKPGFGSYFHPFASMLDNLTMKQFVHNVEARINGADLEAHPDRYFIAARLAAKRRAPKASESFPFDVWHGYHFDAVLLGQFLHRKAVDRGVRYKSCHVTHANLDADGNIASVGTEEGETIAADLFVDCSGFAGLLIDKALHTPYVSFSSNLFNDAAVAIPAPMEGSIPSETVSTAMKHGWAWKIPLTTRFGNGYVYSSRFCSADEAETELRRHLGLLDADVPARHLKMKIGRVTRHWNRNCLAVGLSQGFIEPLEATALLFIQQTAATFVESVERGDLSEAAHERFNDMMNTHFEGIRDYIVTHYKTNTRTDTEYWRANAANLNLSDDLKKLYSLWMAGKSIAPAVGQQVLGKGYPVFSWYSIMAGMGIFPDPQDLRPPTAQEARFSEAEIDNLLERSCANYPDHRAALESIPPRRTEPALQVYFW

SEQ ID NO: 87449 - protein, 410 aa, Pseudomonas fragi
  REGION 1..410: note = tr|A0A449INC2|A0A449INC2_PSEFR Tryptophan halogenase; OS = Pseudomonas fragi OX=296 GN=pobA_1 PE=4 SV=1
MERRQVVVIGAGPSGAIASALLKRKGHDVLVIERQHFPRFSIGESLLSHCIDFIEEAGMLDAVQAAGFQLKNGAAFAWGEQYSAFDFGDTFSNGKPTTFQVQRADFDKLLADQAALQGVEIRYGETVISTDIERAKPLLHIEREDTSRYQVEADFILDASGYGRVLPRLLDLEAPSNFPLRQAVFTHVEDRIDYAGFDRNKILITTHPTQRDIWFWSIPFSNGRTSVGVVAAAGHFEGRSENLDTCLRSFIDETPSLQRVLANAVWDTPARTLGGYSANVKTLHGPGFALLGNAAEFLDPVFSSGVTIAMRSASMAAGVLHRQLQGEAVDWQSEFAEPLKRGVDTFRCYVEGWYAGTFQDVIYHPGSQPHIRSMISSILAGYAWDESNPFVSESRRRLRMLSDICATEPA

SEQ ID NO: 87450 - protein, 23 aa, unidentified
  source 1..23: note = Gammaproteobacteria bacterium
  REGION 1..23: note = tr|A0A534B6M9|A0A534B6M9_9GAMM Tryptophan 7-halogenase (Fragment) OS=Gammaproteobacteria bacterium; OX = 1913989 GN=E6K52_06580 PE=4 SV=1
MNNPRLKNIVIVGGGTAGWMAAA

SEQ ID NO: 87451 - protein, 519 aa, Sphingomonas sp.
  REGION 1..519: note = tr|A0A5E7XYZ4|A0A5E7XYZ4_9SPHN Tryptophan halogenase; OS = Sphingomonas sp. EC-HK361 OX=2038397; GN = SPHINGO361_100435 PE=4 SV=1
MNQLKRILIAGGGSAGWMTAAMMSRLFQGLYEIILVESDAIGTVGVGEATIPAIKKFNELLGLNENEFLQRTQGTFKLGIRFIDWLRPGSSYTHGFGVIGQDLEWLRCHQYWLKMHGLGRASALDHFSINTAAVHHNKFMRARPDQPQSPIGQIANAFHFDAGLYAAYLADYAQARGVQRREGKIATVTLAPEDGPESGFVRSITMADGETIEADLFIDCSGFRGLIIAEALGAGYDDWSHWLPCDRAVAVPSERSDDFTPYTRSTARPAGWQWRIPLQHRTGNGHVYASRWMNDAEAEAILLDTLDAPAAGDPRRLRFVPGKRTQAWVKNCVAIGLAGGFLEPLESTGLHLIQSAILRLVRLLPDAGFDAANIAEFNRQTDFEYERIRDFIILHYKATERGDTPFWRHVRDMAVPATLQRKIDLFAANGRIFREDDELFAEESWIQVFIGQGIIPRGYDPLVDAKSPDEIAAFLGNIEQVIARCVEVMPTHAEYVAKTCPARPLTASARPVPGFAAAR

SEQ ID NO: 87452 - protein, 218 aa, Brevundimonas sp.
  REGION 1..218: note = tr|A0A519KNB1|A0A519KNB1_9CAUL Tryptophan halogenase (Fragment) OS=Brevundimonas sp. OX=1871086 GN=EON87_20775; PE = 4 SV=1
VYASDHLSDDEAQARLLSSIDGERLIEPGLIRFRTGRRLKTWEGNCIALSLAAGFVEPLESTSIHLIMTGLARLVQAFPFDGISPAVVDRYNAQSREEMERIRDFIVLHYHLNQRDEPFWKAHRENDVPQTLKDRLALFGEQAQAYQAPDELFRVGSWMQVMLGQNLTPRAHHAMARMMPTDQLAGALNDLKSNIDRAVDRLPTHQAFVDSYCAEASA

SEQ ID NO: 87453 - protein, 539 aa, unidentified
  source 1..539: note = Gammaproteobacteria bacterium
  REGION 1..539: note = tr|A0A523LXM1|A0A523LXM1_9GAMM Tryptophan 7-halogenase OS=Gammaproteobacteria bacterium OX=1913989; GN = E2O53_00460 PE=4 SV=1
MTPRKILIVGGGSSGWLTAAYLNAALNRDGRKFAQISLVESPDVPRIGVGEATIPNINHVLSVIGIDQREFMRRVDGTFKQSIKYVNWLHNNGDYYHHPFSRYRPGPIDRSGQRWLMSNRSIPFMETISAQPIICEMNLAPLMLGAWDFGRPLSYAYHLNALKFADYLCELSTARGVTHYLDHVVDVVMAENGDIAAVQTKGGKRLEADLFVDCTGFAALLSEQKLGVQWVDCSQWLLCDRAVTMHVPYEQHYPGYVRPYTTASALSSGWVWEIPLQDKRSLGYVHSSAFIGEDEAERELRAFEGAHAGSLDCRIVHFKVGHREKAWVRNCVSIGLAGSFIEPLESTGLYLSDLAAVMLAEHLPFGDDMAAPAYRFNRIMANRFYEILDFINMHYCLSRRTDTEFWREVQRPERITDRLRGKLEYWRVKPPSPTDFEDQYFPGQPDTPLPSGGLPGDHRPPVDTAGLWSHESYETILYGMDFLDKECDDWYGQQRPDSTLVRHVVEKLQQARQKLPPHDVWLQQVLGMPNYAATGRGSN

SEQ ID NO: 87454 - protein, 111 aa, Brevundimonas sp.
  REGION 1..111: note = tr|A0A519KN20|A0A519KN20_9CAUL Tryptophan halogenase (Fragment) OS=Brevundimonas sp. OX=1871086 GN=EON87_20825; PE = 4 SV=1
MSRPIQRVLIVGRDAALWLTALSLRRALGGLGITVEVVELPSVLRPADAYVSTPSLVSLHHMMGLDEGRVLGATSGSEAYAQRFAGWSKGDHAFMHAYDTVGAGIEQIPFI

SEQ ID NO: 87455 - protein, 530 aa, Brevundimonas sp.
  REGION 1..530: note = tr|A0A519Q565|A0A519Q565_9CAUL Tryptophan 7-halogenase OS=Brevundimonas sp. OX=1871086; GN = EON88_14340 PE=4 SV=1
MGAKRKIVIVGGGTAGWLTAAYLAKALGAGEGGRVDITLLESPDIGIIGVGEGAFPTIRNTLRFLGVDEAEFIREAAATFKQGIRFVDWEREGARFFHPFEAPFFTEEADIVGHWLALDPATRPTFAEAVTIQNRVAEARRAPKRPHEDDFTGPLSYAYHFDAHKLSAVLADCARGLGVRHVEGRLTHVELRSDGAVDHLVTAAGDTFTADLFVDCSGFRAEIIGQALQSPFKSARPILFTDRAVTARVPRAPGEAIESLTVATAHPAGWTWDIGLNGMRGVGCVYSSAHMSDEDAEATLRAYLGAAGADVATRTIAFEAGYREKPWIRNCVAVGLSAGFLEPLEATGLVLIETAVGMIADLLPMSGPIDAPARRFNEVMTARYDNIIAFLKLHYCLSKRPEPFWRDNTDPASIPPRLADLLEQWRYRPPARFDFTLDLESFAFYNYQYILYGMNFGAEPAPEPEEEARVAERVLARIQKFGDQAAHDLPGHDELIAQINRTPQPSGQNSRMAGGPISRTSRLKGAPRRA

SEQ ID NO: 87456 - protein, 506 aa, Brevundimonas sp.
  REGION 1..506: note = tr|A0A519HGQ1|A0A519HGQ1_9CAUL Tryptophan 7-halogenase OS=Brevundimonas sp. OX=1871086; GN = EON90_11220 PE=4 SV=1
MDTRTPEPIRSVVIVGGGTAGWMAAAALVQHFRASPLKITVVESSEIGTIGVGEATIPTIRRFYAQLGISDAEVMRATQATCKLGIRFYDWSGPGSDFIHPFGLYGQDPRGIGFHNFWMQTRKDGDRSALSEFSLGASLAQAGKFTLPSPNPPSPMSVFDWALHLDASLFAQHLRKYAEMGGCERIDAKVQEVRLRPEDGFIRAIALEDGREVEGDLFVDCTGFRGLLIDQALGSRFQDWGQWLPCDAAYAIQSENAPGDDPQPFTRVTARSAGWQWGIPLRHRAGNGLVFSSAHQTDDEAIAELMPELLGKPLMEPRKIPFRPGRRERAWVKNCVSLGLAAGFLEPLESTSIALIETGIERLRALFPDRSFAQPVIDEFNDQSAREMERVRDFIILHYKLNRRDDTAFWRDCRAMAVPDTLQRKLDLWKARGQFVRYRWEMFHPASWLAIYNGFDEMPDVIDPGVAAFDPGQLKASLDEMRAAVAQAVAEAPTHAEFLAPLDRPL

SEQ ID NO: 87457 - protein, 172 aa, Brevundimonas sp.
  REGION 1..172: note = tr|A0A519JZB6|A0A519JZB6_9CAUL Tryptophan halogenase (Fragment) OS=Brevundimonas sp. OX=1871086 GN=EON85_05695; PE = 4 SV=1
MTQPKKTRVVIAGGGTAGWLAAALLTRQLGPLLDVTLVESEQIGTVGVGESTIPTVTRFHALIGVEERAFMTATGATFKLGISFEGWGRKCDRYIHSFGDVGKSTWMGDFQHFWLEARDRGVAGALGDYCFEHQAADASKFASGGDARLNYAYHLDAGRYARFLRAHAEAAG

SEQ ID NO: 87458 - protein, 144 aa, Brevundimonas sp.
  REGION 1..144: note = tr|A0A519L136|A0A519L136_9CAUL Tryptophan 7-halogenase (Fragment) OS=Brevundimonas sp. OX=1871086; GN = EON87_13330 PE=4 SV=1
MSDDQSIRSVVIVGGGTAGWMTAAALVQHFRNAPVRITVVESSDIGTIGVGEATIPTIRRFYAQLGIGDAELMAATEATCKLGIRFHDWSRLGSDFIHPFGLYGQDLNGIGFHHYWRKAHQAGDPAPLADYSLGASLARAGRFT

SEQ ID NO: 87459 - protein, 177 aa, Brevundimonas sp.
  REGION 1..177: note = tr|A0A519Q0R9|A0A519Q0R9_9CAUL Tryptophan halogenase (Fragment) OS=Brevundimonas sp. OX=1871086 GN=EON88_16770; PE = 4 SV=1
WIGNVVAIGLSSGFLEPLESTSIHLIQTAISKLLALFPRGRRDDAMADQFNREMDQQYEGVRDFIIAHYKVSTRDDTPFWRHCRDMAVPDSLAAKLELFRSRGEVMVENHELFRETNWFPILYGQGLTPESYHPLADVLSDDDLRLRLSQIRAAIKQRVDGLPSHDDYLRQCVAAVR

SEQ ID NO: 87460 - protein, 535 aa, unidentified
  source 1..535: note = Gammaproteobacteria bacterium
  REGION 1..535: note = tr|A0A523LXH9|A0A523LXH9_9GAMM Tryptophan 7-halogenase OS=Gammaproteobacteria bacterium OX=1913989; GN = E2O53_00455 PE=4 SV=1
MMKARRVLIVGGGSAGWMTAAYLDAVLNGAGPIPVDIALIESPDVPRIGVGEATIPSINHILAAIGIDEVEFMKRVDGTFKQAIKYVNWLDGQGESYYHAFGRYRESPYDVSSLNWLMSDRSLPFSETISAQPVICEKFFAPKMNGQWDMGAQFTYAFHMNALKFADYLCEIATSRGVKHHRDHVVDVEMAENGDIAALRTRGGDRLEADLFIDCTGFASVLIEKKLGVGWVDCSQWQLCNRALTLQVPYEHNYPGYVRPNTLATALSAGWVWEIPLQNRRAWGYVHASEFISEDDAEKELRAFAGPLGDAFETRMVPFKVGYRTKTWVRNCIAVGLSAGFIEPLESTGLYLSDLAAVMLTEHFPYGGDMAPLAFRYNRIISNRFHEILDFINMHYCLTRRTDTEFWREVQRPERINDRLKAKLDFWRIKPPSPADFEDQWFPGQPDTPLPSSGLPGDHRSPVDTAGIFTLSSYEAILYGMDFLSAECDQWFGKNRPASQVPSGILKRLQVAPQKLVPHDVWLQRFCGMPDYSQD

SEQ ID NO: 87461 - protein, 194 aa, Brevundimonas sp.
  REGION 1..194: note = tr|A0A519Q801|A0A519Q801_9CAUL Tryptophan 7-halogenase (Fragment) OS=Brevundimonas sp. OX=1871086; GN = EON88_13180 PE=4 SV=1
IRNCVAVGLSAGFLEPLEATGLVLIETAVGMIADLLPMSGPIDAPARRFNEVMTARYDNIIAFLKLHYCLSKRPEPFWRDNVDPASIPPRLADLLDQWRYRPPARFDFTLDLESFAFYNYQYILYGMNFGAEASSEPADEARVAEKVLARIQKFGDQAAHDLPGHDELIAQINRAPQPKPAPIPAPPRKTRARA

SEQ ID NO: 87462 - protein, 510 aa, Brevundimonas sp.
  REGION 1..510: note = tr|A0A519HY11|A0A519HY11_9CAUL Tryptophan 7-halogenase OS=Brevundimonas sp. OX=1871086; GN = EON89_04650 PE=4 SV=1
MVDQTQRYRIVILGGGSAGWMTAAMLVSRLSPANYEIALIESDLIGTVGVGEATLPHIKHFNDTLGIDEADFVAQTQATFKLGIEFVGWGRPGERYIHPFGAFGEPWRGVEFQHQWLRNRAMGRPTLPLAAYSYAVAAAEARRFDLPDEDRRSIRSTYAYAYHFDAGLYAAYLRRWAVARGVDRTEGLVEGVDRDAQSGDVTGLRLQSGVTIQGDLFVDCSGFRSVLVGDAQAVPWRDWSAWLPCDRALAVPSARAGDFTPFTRSTAQTAGWTWRIPLQHRTGNGYVYSSQFIDEAAARATLLGAVDSEPLDEPRLLRFQAGRREKAWARNCVAIGLASGFLEPLESTSIFLIQAAAHDLATLMPARGERRVDCRLSDEFNRLFEIHYERARDFLILHYALNGREGEPLWDHVRRMPLPESLAHRIALFRTRAALPSYELGLFSRDSWLSVLVGQGLAPDGYDRLAYALDPEALEARLAAFADRIASNVSTMTSHEDFVAAYRAGAGAAT

SEQ ID NO: 87463 - protein, 134 aa, Brevundimonas sp.
  REGION 1..134: note = tr|A0A519QLB4|A0A519QLB4_9CAUL Tryptophan halogenase (Fragment) OS=Brevundimonas sp. OX=1871086 GN=EON88_01650; PE = 4 SV=1
KLADQFNRDMAFDYDNVKDFLIAHYKVTEREDTPFWAYCKHMDIPEALKTRLQIFQERGDAMVRQYELFKEGSWWAVLSGQGMIPDSYHPVADVISEEDLRQRLSRIRTAIQDRVNTMPVQEAYLRDAKLSATA

SEQ ID NO: 87464 - protein, 336 aa, Brevundimonas sp.
  REGION 1..336: note = tr|A0A519K773|A0A519K773_9CAUL Tryptophan 7-halogenase (Fragment) OS=Brevundimonas sp. OX=1871086; GN = EON86_20425 PE=4 SV=1
RLVQPQQAVQGADAYTAVPSLGALHSLLGLDEATVLEATRGLPVLGQRFANWSRAKAPFTHGYDTHRVALNDIDFLQFWVKARGEGMGVDLDDFSLAVAAAKQGRSPVSRDGDRPELPVSPGYHLDARAYVDLLRRTALQAGIEGRGADVRSVQRDGARIASVTLADGLTVQADLFIDASGPAAVLASSAPDAAFESWRHWFGADRLLVASAPRLKPLPAFAQIAAFPAGWIGLHPLKDRTAIVAAYDSRMMGDQAVLDALPVLTGLPVSGDAAVEDFHAGVRPAWTGNCVAIGSAAVSLEPLDAVQLHLIHTGLSNLIGLFPTEAAAMPEAEAYN

SEQ ID NO: 87465 - protein, 512 aa, Brevundimonas sp.
  REGION 1..512: note = tr|A0A519KX47|A0A519KX47_9CAUL Tryptophan 7-halogenase OS=Brevundimonas sp. OX=1871086; GN = EON87_15825 PE=4 SV=1
MEAKAPNALRKVCIVGGGTAGWVAAALMAEHFRGKLFEIELVESDDIGTIGVGESTVPPFLQLLAKLGVNEQEFIRDTQASFKLGIEFKDWLEKGQSYFHPFGTIGLPIDLSDFYQVWLKAKMAGYDRPLQDFAPASVMAREGKFTLPFKAQRTPLAGASYALHVDAKRVANFLRRFAEARGVTRTEGIVSDVQTRADGFVEQLVLKDGRTVEADFFIDCSGFRALLIGKTLDVGYEDWSHWLLCDRAIAVQTENVGPPPAYTLAQAQDYGWRWRIPLQHRAGNGYVFASQYLSDDEATATLMAQVEGKPVVDPMVVPFKTGMRDRIWDKNVLALGLAGGFIEPLESTAIHLIYRGMDFFFRFLPDRDCAPELASEYNRRMRADYEEIRDFIILHYCVTRRTDTPFWDACRTMTVPDSLQRKIDLFRINGTVAEGLDELFRDPNWQSVLDGMGVVPRTYHPLVDRIPFGRATDGLDEAVGNLERMVSGLPDHQSFIAQHCAAERPVAPATVA

SEQ ID NO: 87466 - protein, 257 aa, Brevundimonas sp.
  REGION 1..257: note = tr|A0A519L0G7|A0A519L0G7_9CAUL Tryptophan halogenase (Fragment) OS=Brevundimonas sp. OX=1871086 GN=EON87_13830; PE = 4 SV=1
AMPCAPVPGITPYTRSTAMDAGWRWRIPLQHRTGNGHVYCSDHIDDETALNQLVEGLDGEAMADPRVIKFQTGKRKAFWAKNVCALGLATGFIEPLESTSIHLIHVGIAKMLQHFPDRDFSPANIDIYNRRMDREVQQVRDFVILHYHASERDDSEFWRRVRDMPIPDTLAERVEAFRDRGMIYQVAADEYFSMASWMAVMVGQGIEPRMANPLYRFQNLERAAEGFERVRTTFAQAAEALPTHEAFLRAENLWKTA

SEQ ID NO: 87467 - protein, 454 aa, Brevundimonas sp.
  REGION 1..454: note = tr|A0A519JRQ0|A0A519JRQ0_9CAUL Tryptophan 7-halogenase (Fragment) OS=Brevundimonas sp. OX=1871086; GN = EON85_11295 PE=4 SV=1
MERSNRVRDIVIVGGGTAGWMTASAMAKVIGARDLSITLIESEEIGIVGVGEATIPPIQLFNRLLGVDENEFIRETQATFKLGIQFVDWGRKGHAYMHPFGLFGPEMNGINFSHYWLRALQAGGDADNHRFIAEAEAMRLNRFARTPPGGSGEMPRINYAFQFDAGLYARWLRKYAEARGVVRCEGKITHADRDGESGLIRSVTLADGREVKGDLFVDCSGFRGLLIEQEMQAGYEDWTQWLPANRAVAVPSDRVEDPVPYTRSTARDAGWQWRIPLQHRTGNGYVFSDAFISEEQATSDLMGSLDGAAQAEPRVLRFVTGRRRKGWVGNVVAIGLSSGFLEPLESTSIHLIQTAISKLLALFPRGPRDDLMADQFNHEMDQQYESVRDFIIAHYKVGARDDTPFWRHCRDMDMPDSLKAKLERFRARGEVMVERHELFGESNWFPILYGQGLV

SEQ ID NO: 87468 - protein, 169 aa, Brevundimonas sp.
  REGION 1..169: note = tr|A0A519J7R2|A0A519J7R2_9CAUL Tryptophan 7-halogenase (Fragment) OS=Brevundimonas sp. OX=1871086; GN = EON85_15840 PE=4 SV=1
NCIAIGASAVSLPPLDAVQLHMIHIGLSTLISLFPAAAETMPEAAAYNRAMVSHVVNVRDFQLTHTVLNGRVGEPFWDRARAMELPASLRTRLRIFAARGRVLLNEDESFQPHNWTQILLGHGLMPSDHDPAVDAVPAGDQMARVQGLLTRIAGEVKAMPALDPEFGAV

SEQ ID NO: 87469 - protein, 536 aa, Calothrix sp.
  REGION 1..536: note = tr|A0A2H2XG81|A0A2H2XG81_9CYAN Tryptophan halogenase; OS = Calothrix sp. NIES-4071 OX=2005469 GN=NIES4071_25750; PE = 4 SV=1
MNFDTKIQSIAIVGGGSTGWMAAAYLAKALQGSVKITLIESDRIPTVGVGEATVPSIQPDLFGFLGIPESEWMPECKATFKIGIKYVNWAYQPSVTENNTFYHIFGEAKDCDGIPLTHYWLKKRLEGYQNPMASSCYSSPALCQNYKSPKYLNGDMAANYAYHFDASLVAKFLTRWSTERGVVHVIDDVSDVILDDTGAISYLKTQKGDTYTADLYLDCSGFRGLLINQALKEPFLSYSDNLLCDSAVATAIPTDDNDDNFRPYTTATALSSGWVWEIPLYGRVGTGYVYSQKFLDPEAAEQEFRDFHGLAKDFPVKHLKMRVGRTERAWVKNCVSLGLASGFIEPLESTGIYFIYSALKQLVRYFPDKTMSPALRDKFNERIAYMVDDVRDFIVLHYCTTSREDTPFWKANKYDLKIPESLQELLEVYLAGAPINIPYSDDDGYNRIFDAGFDRFWTNSNYMAILAGVNYLPNSVLPSLNHKPQSLEKAEKIFKNVENTTKNLLQELPSHYEYIRSLNVKAQPSRIKLPLEAVLH

SEQ ID NO: 87470 - protein, 131 aa, Brevundimonas sp.
  REGION 1..131: note = tr|A0A519KSZ7|A0A519KSZ7_9CAUL Tryptophan halogenase (Fragment) OS=Brevundimonas sp. OX=1871086 GN=EON86_13065; PE = 4 SV=1
DNEYDRVRDFLILHYHANTRTDSELWRHCREMDIPDTLKEKMALFGHRGHIAQYKDGLFSPPSWLSVFVGQGVVPTGYHPMADNLPLATALEEMESIRRRISDRVDAMPGHAEFVRDYCAGEAPLKAGGMA

SEQ ID NO: 87471 - protein, 502 aa, Brevundimonas sp.
  REGION 1..502: note = tr|A0A519QB09|A0A519QB09_9CAUL Tryptophan 7-halogenase OS=Brevundimonas sp. OX=1871086; GN = EON88_10200 PE=4 SV=1
MRPLKRILIVGGGSAGWMAAALLSKLFKGLYEITLIESDAIGIIGVGEATIPAIKKYNELLDLDENAFMQRTQASFKLGIQFVDWDRLGDSYIHGFGVIGRDLGWLRAHHYWLQANQRGTAPDFADLSINTAAALENRFMRAEPKMAESPLGHIGHAFHFDAALYVRYLRGRAEAAGVTRLEGKVEDVTLDPDDGFVRSVTMEGGQVVEADLFIDCSGFRGLITEQALKTGYDDWSRWLPCDRAIALPCPRVEPLLPYTRATARPAGWQWRIPLQHRTGNGHVYSSKFMDDAEAERILVENLDGPALAEPNRIRFLTGKRKKVWNKNCVALGLASGFLEPLESTSIHLVQSILIRLIRLLPDAGFDEATVAEFNRQTDFEYERIRDFIILHYKATHRDDTEFWRYCRDMEVPETLQRKMDLWLANGRIFREDEELFAEESWIQVFLGQGMVPRGHDPMVGLRPDAEIDAFLGNITGVIRKCVDRMPDHAAYVAKVCPATPPT

SEQ ID NO: 87472 - protein, 456 aa, Mycobacterium kansasii
  REGION 1..456: note = tr|X7Z701|X7Z701_MYCKA Tryptophan halogenase family protein OS=Mycobacterium kansasii 732 OX=1299327; GN = I546_0044 PE=4 SV=1
MRNSAANPRAHAVVIGASVAGLCAARALADFYATVTVFERDDLPDTPSYRGAVPQDRHLHLLMARGALEFEALFPGLLAELASAGVPMLDNRPDCIYLGAVGHVLGIGRQLRQQFTAYLPSRPHLEWQLRRRVLALSNVEIRQHNVSRPQFDGARDRVTGVLLETGAGDPEFVAADLVIDAAGRGSRLPVWLAQWGYQRPAEDTVDVGIGYASHRLTIPDGLIREKIVVTGVGPGQSLGLGMLCYEDGSWILTTFGVAKATPPGTFEEMRELGYRLLPTRFVDALAQAEPVGGPAFHAFPVSRWRRYDKLSRFPAGIIPFGDAVASFNPTFGQGMTMTALQAGQLRQALQSAPGEPATEFNRAAAKITRPVWTMNAIADRCFQHADGPMPRWYRPVGALYDQFLGAAETNPVLAEWFLRRISLLDSLYTVPSAPIIGRAVAHNMRLWLRERRLGRR

SEQ ID NO: 87473 - protein, 98 aa, Brevundimonas sp.
  REGION 1..98: note = tr|A0A519KMG4|A0A519KMG4_9CAUL Tryptophan halogenase (Fragment) OS=Brevundimonas sp. OX=1871086 GN=EON87_21170; PE = 4 SV=1
MSRPIQRVLIVGRDAALWLTALGLRRALGGLGITVEVVELPSVLRPADAYASTPSLVSLHHMLGLDEGRVLGATSGSEAYAQRFAGWSKGDHAFMHAY

SEQ ID NO: 87474 - protein, 137 aa, Brevundimonas sp.
  REGION 1..137: note = tr|A0A519PFM7|A0A519PFM7_9CAUL Tryptophan halogenase (Fragment) OS=Brevundimonas sp. OX=1871086 GN=EON88_26785; PE = 4 SV=1
DAATTAEFNRQTDFEYERIRDFIILHYKATRRDDTEFWRHCRDMEVPETLQRKMDLWMANGRIFREDEELFAEESWIQVFLGQGIVPRGYDPMVGLRPDAEVDAFLGNITGVIRKCVDRMPDHAAYVAQVCPATPPT

SEQ ID NO: 87475 - protein, 138 aa, unidentified
  source 1..138: note = Gammaproteobacteria bacterium
  REGION 1..138: note = tr|A0A534GYM4|A0A534GYM4_9GAMM Tryptophan 7-halogenase OS=Gammaproteobacteria bacterium OX=1913989; GN = E6K24_18060 PE=4 SV=1
MMNTHFEGIRDYIVTHYKTNTRTDTEYWRANAANLNLSDDLKKLYSLWMAGKSIAPAVGQQVLGKGYPVFSWYSIMAGMGIFPDPQDLRPPTAQEARFSEAEIDNLLERSSANYPDHRAALESIPPRRTEPALQVYFW

SEQ ID NO: 87476 - protein, 498 aa, unidentified
  source 1..498: note = Gammaproteobacteria bacterium
  REGION 1..498: note = tr|A0A534C9X9|A0A534C9X9_9GAMM Tryptophan 7-halogenase OS=Gammaproteobacteria bacterium OX=1913989; GN = E6K43_06505 PE=4 SV=1
MAAAALAKVLGRECAIRLIESEEIGTVGVGEATVPHLKLFNSVLEIDEVEFIREVRGTFKLGIQFVDWGRCGDRYIHGFGTIGHDYGLLPFHQYWLKLFLAGKAADIGAYSLNTAAAPLGKFMSSAHDVPATSPLANITYAYHFDAGLYAAYLRRYAEARGVRRTEGKVVDVRLRDTDGFIEAVVLEGGEEASADLFIDCSGFRGLLIEQALHTGYEDWTHWLPCDRAMAVPCEKVGPPTPYTRSTARSAGWQWRIPLQHRTGNGYVYSSAYIKDDAVADTLMSNLDGRPLAEPRVLKFTTGMRRKFWNRNCVAVGLASGFMEPLESTSIYLIQSGIARLINLLPDRSFSPVLIERYNEQAAFEFERIRDFLILHYFATERRDSPFWQYCSSMEIPSQLADNIRLFRDSGRFFRNAEEMFAITSWVQVMLGQHILPRNYHPAVDLIPEAELNELVGAVRNVISTCVAAMPMHEQFIARYGQTAAQQAAERPATTRQGR

SEQ ID NO: 87477 - protein, 445 aa, Brevundimonas sp.
  REGION 1..445: note = tr|A0A519KZB8|A0A519KZB8_9CAUL Tryptophan 7-halogenase (Fragment) OS=Brevundimonas sp. OX=1871086; GN = EON86_07610 PE=4 SV=1
MSAAGLVGVLKPDQVRVRLVESDDIGTVGVGEATLPQMREFNDRIGIVESEMMRKTNATFKLGIEFRDWGFRGSSYVHPFGAHGHPMGGVGFHHQWTRARLAGEAHDIGDYSYAIVASRRNRFDFPAADKSAVNSTYDYAYHFDAGLYARYLRDWCEARGLTRTEGKVKEVRLNPHSGDVAAIVLESGEAITGDLFIDCSGFRGLIIGGALNGPFEDWTRWLPCDRALAVPTERSEDFTPYTRSTALEAGWQWRIPLQHRTGNGYVYSSSFISDDEAATRLLGNLDGKPLADPKPIRFRSGRRTASWTKNCIAVGLASGFLEPLESTSIYLTQVAVLTLLDLLPRGPIDPVLAEEFNRVVDNEYDRVRDFLILHYHANTRTDSELWRHCREMEIPDTLREKMALFGHRGHIAQYKDGLFSPPSWLSVFVGQGVVPTGYHPMADTL

SEQ ID NO: 87478 - protein, 507 aa, unidentified
  source 1..507: note = Gammaproteobacteria bacterium
  REGION 1..507: note = tr|A0A534JDA1|A0A534JDA1_9GAMM Tryptophan 7-halogenase OS=Gammaproteobacteria bacterium OX=1913989; GN = E6K20_05080 PE=4 SV=1
MPAQELKSVVIAGGGTAGWMAAAAIAKVMGPRLAITLVESDEIGIIGVGEATIPSIALYNDLLRLDENDFLRQTQGTFKLGIEFVNWYEPRHRYMHAFGGIGKDLADIPFHHYWLQEVLQGRGDPLWHYSLNWMAAHQNRFARLERIADTPLPGVIYAFHFDASLYAAYLRRLALQMGVRRVEGMIAEVLQNPESGDVSALRLKDGREITGELFIDCTGFRALLIERTLKVGYDDWTRWLPVDRALAIPTERVGPLTPYTRSTALEAGWQWRIPLQHRTGNGHVYSSAFMDDDRAAELLMASLDSRPLADPRPIRFVTGRRRQLWSHNVVCLGLASGFLEPLESTAIHLIQANIQRLILLFPHHGDCDHRRAQFNQAAAAEYEYVRDFIILHYHLNNRVGERFWDACRQMSVPDSLTHKIELFRETGGIFPTMYDLFHLTSWLQVMWGQGVRPRGAHPFVQTVAPHDRVEYLKNIRDLIAQAASELPPHDEFIARHCRAPAPAAAVT

SEQ ID NO: 87479 - protein, 362 aa, Brevundimonas sp.
  REGION 1..362: note = tr|A0A519KN28|A0A519KN28_9CAUL Tryptophan 7-halogenase (Fragment) OS=Brevundimonas sp. OX=1871086; GN = EON87_21745 PE=4 SV=1
QAADASKFASGGDARLNYAYHLDAGRYARFLRAHAEAAGLTRVEGKIETVERDAGSGLITALALDGGRRVEGDVFLDCTGFRGLLIGEAMGVGFEDWGHWLPTNRALAVQTVSTEPAAPYTRAIAHDAGWRWKIPLQHRVGNGLVYASDHLSDDEAKARLLSSIDGERLIEPALIRFRTGRRVKTWEGNCIALSLAAGFVEPLESTSIHLIMTGLARLVQAFPFDGISPAVVDRFNAQSREEMERIRDFIVLHYHLNQREEPFWKAHRENDVPQTLKDRLALFGEQAQAYQAPDELFRVGSWMQVMLGQNLTPRAHHAMARMMPTDQLAGALNDLKSNIDRAVDRLPTHQAFVDSYCAEASA

SEQ ID NO: 87480 - protein, 309 aa, Brevundimonas sp.
  REGION 1..309: note = tr|A0A519KN08|A0A519KN08_9CAUL Tryptophan 7-halogenase (Fragment) OS=Brevundimonas sp. OX=1871086; GN = EON87_20830 PE=4 SV=1
NGHIASVTLESGEVVTGDLFIDCSGFKGLLIGETMESPFEDWTKWLPCDRAMAVPCARSDDFTPYTRSTAREAGWQWRIPLQHRTGNGYVYSSAFISDDEAARTLMDNLDGEALADPRPIRFKAGRRTESWKGNCVAIGLASGFLEPLESTSIYLVQIAINNLVQLWPRKAMDPVLIKEFNRLVDNEYDRVRDFLILHYHANTRDDAELWRYTREMSVPDSLQDKIDRFRHRGDIPFYRSGLFAPPSWVSVMFGQGLKPEGHDRLTERLKLEDVQQRLETLRRKISNRVDAMPTHDQFVRDYCGVKEAA

SEQ ID NO: 87481 - protein, 433 aa, unidentified
  source 1..433: note = Gammaproteobacteria bacterium
  REGION 1..433: note = tr|A0A534H1X5|A0A534H1X5_9GAMM Tryptophan 7-halogenase (Fragment) OS=Gammaproteobacteria bacterium; OX = 1913989 GN=E6K24_16425 PE=4 SV=1
MAAAAIAKVMGPRLSITLVESDEIGIIGVGEATIPSIALYNDLLRLDENDFLRQTQGTFKLGIEFVNWYEPGHRYMHAFGAIGKDLAYIPFHHYWLQEVLQGRGESLWHYSLNWMAAHQDRFARLERIADTPLPGVIYAFHFDASLYAAYLRRLAQQMGVRRVEGMIAEVLQNPESGDVSALRLKDGREISGELFIDCTGLRGLLIERTLKVGYDDWTRWLPVDRALAIPTERVGPLTPYTRSTALEAGWQWRIPLQHRTGNGHVYSSAFVDDDRAAELLMANLDSRPLADPRPIRFVTGRRRQLWSHNVVCLGLASGFLEPLESTAIHLIQANIQRLVLLFPHHGDCNHRRAQFNQAAAAEYEYVRDFIILHYYLNNRVGERFWDECRHMSVPDSLTHKIELFRETGGIFPTMYDLFHLTSWLQVMWGQGVR

SEQ ID NO: 87482 - protein, 510 aa, Brevundimonas sp.
  REGION 1..510: note = tr|A0A519HGP7|A0A519HGP7_9CAUL Tryptophan 7-halogenase OS=Brevundimonas sp. OX=1871086; GN = EON90_11215 PE=4 SV=1
MTDRPRPLKKICIVGGGSAGWIAAAIMSEFFKGSVAEIELVESDDIGIVGVGESTIPPFLQMLQRLGINEQDFLKEVQGSFKLGILFKDWKEKGEDYIHPFGKFGPPVDHEETYDAWLRARAEGYTRPLEEFAPASVMIREDRFTLPFKATRTPIGDAAYSVHIDARKMARYLRRYSEARGVTRTEGIVEQVVQRPDGFVEAVVLKDGRRVEADFFIDCTGFRALLIGKTLGVGYHDWSPWLLCNRAVALQVTNPTPPGPYTLAHAQDAGWCWRIPLQQRSGVGYVFCDRFISDDEALATLLAQAGGEPVVDPWIIPFKSGMRERLWEKNVLSLGLAGGFIEPLESTALHLIYRGMDFFMRFLPDVDCDANLITEYNRRMEQDYEEIRDFVILHYATTQRDDNAFWRECRDMELPESLQSKIDLFKVNGTVREGVDLMFRSVSWQSVLEGMGQKPRGYHPLMNRLAIEKLPAYLDQGAAAIRQAVAGLPTHEEFLKAHCTAPSADWQAPV

SEQ ID NO: 87483 - protein, 169 aa, Brevundimonas sp.
  REGION 1..169: note = tr|A0A519JRP9|A0A519JRP9_9CAUL Tryptophan 7-halogenase (Fragment) OS=Brevundimonas sp. OX=1871086; GN = EON85_11290 PE=4 SV=1
NCIAIGASAVSLPPLDAVQLHMIHIGLSTLISLFPAAAEAMPEAAAYNRAMVSHVVNVRDFQLTHTVLNRRVGEPFWDRARAMELPASLRTRLRIFAARGRVLLNEDESFQPHNWTQILLGHGLMPSDHDPAVDAVPTGDLMARVQGLLTRIAGEVKAMPALDPEFGGV

SEQ ID NO: 87484 - protein, 82 aa, unidentified
  source 1..82: note = Gammaproteobacteria bacterium
  REGION 1..82: note = tr|A0A534E4L7|A0A534E4L7_9GAMM Tryptophan 7-halogenase (Fragment) OS=Gammaproteobacteria bacterium; OX = 1913989 GN=E6K36_18075 PE=4 SV=1
YIGLFGEAGRFFRNGTELFAVTSWVQVMLGQGIMPRSYHPVVDWVSDDDLKSFVETVEKLIARCVSIMPRHEDFIARHCAAV

SEQ ID NO: 87485 - protein, 514 aa, Sphingomonas sp.
  REGION 1..514: note = tr|A0A0A1Y984|A0A0A1Y984_9SPHN Tryptophan halogenase; OS = Sphingomonas sp. BHC-A OX=322611 GN=AI27_06745 PE=4 SV=1
MIHPVRNIVIVGGGTAGWLTAGVIAARHRSRIGNGFTVTLVESPNTPIIGVGEGTWPTLRTTLSRMGISETDLFRECDAAFKQGARFARWTTGTPDDGYYHPLMLPQNFGQVNLAPHWLAGEGDESFCDSVCSQGRICDDGLAPKTIATAEYDALANYAYHLDAGKFAPFLQRHCCEKLGVRHVLADVEQVLMKEDGDIRAIRTTQAGEIEGDLFVDCTGFKALLIEGAMKVPFRDCNDVLFCDTALAMQVPYDRPDSPMASHTISTAQSAGWIWDIGLPTRRGIGHVYSSNHISDEEAERELRAYIGPPAEGLSARKIAIRSGHRETFWKGNCVAVGLAAGFLEPLEASAIVLIELSAKIIAEQMPACREVMDIVASRFNATTYYRWGRIIDFLKLHYVLTKRTDSDFWRDNVREETIPDRLQELMLLWRYQSPWFLDEFDRVEEVFPAASYQYVLYGMGFRTEIDRPALARDAHLADRARRENAAMTAKLRAGLPRHRDLIDKIVTHGLQPV

SEQ ID NO: 87486 - protein, 382 aa, Brevundimonas sp.
  REGION 1..382: note = tr|A0A519KSW5|A0A519KSW5_9CAUL Tryptophan 7-halogenase (Fragment) OS=Brevundimonas sp. OX=1871086; GN = EON86_13060 PE=4 SV=1
MNRRVEQVLVVGRDAAVWLSALALNRALGRTGVKVRVVEMPSLLTPADVYAAVPSLGALHSLLGLEEATVLEATRGLPVLGQRFANWSRAKAPFTHGYDTHRVALNDIDFLQFWVKARGEGMGVDLDDFSLAVAAAKQGRSPVTRDGDRPELPVSPGYHLDARAYVDLLRRTALQAGIEGRGADVRSVQRDGDRIVSVTLADGLTVQADLFIDASGPAAVLASGAPDAPFESWRHWFGADRILVASAPRLKPLPAFAQIAAFPAGWIGLHPLKDRTAIVAAYDSKVMGDQAVLDALPVLTGLPVSGDAAVENFHAGVRPAWTGNCVAIGAAAVSLEPLDAVHLHLIHTGLSNLIGLFPTEAAAMPEAEAYNRAMTSHVGNIR

SEQ ID NO: 87487 - protein, 499 aa, Brevundimonas sp.
  REGION 1..499: note = tr|A0A519HKN7|A0A519HKN7_9CAUL Tryptophan 7-halogenase OS=Brevundimonas sp. OX=1871086; GN = EON90_05590 PE=4 SV=1
MQQLRKILIVGGGTAGWMTAALLSKLFKGLYEITLIESEAIGIIGVGEATIPAIKKYNELLGLDENEFMRKTQGSFKLGIQFVDWFDHGTSYIHGFGVIGRELGWLRCHQYWLQANARGKASDLAAFSINTVAALDNKFMRADPKMVESPLGHIAHAFHFDAALYAKYLRGLAEAAGVRRREGKVADVTLRSEDGFVQSVTMEDGEVIEADLFIDCSGFRGLITEQALKTGYETWTHWLPCDRAMAVPCARVEPFTPYTRATARPAGWQWRIPLQHRTGNGHVYSSQYMDDDEAERILLSNLDGEQLAEPNRIRFVTGKRKKIWNKNCVALGLASGFLEPLESTSIHLIQSSIVRMVRLLPDAGFDEATVAEFNRQTDFEYERIRDFIILHYKATRRDDTPFWRYCRDMEVPDTLQRKMDLWRANGRIFREDEELFAEESWIQVFLGQGEIPRAYDPLVDLKTDEEIDAFLGNVETVIGKCAALMPDHAAYVAKICPAD

SEQ ID NO: 87488 - protein, 498 aa, Brevundimonas sp.
  REGION 1..498: note = tr|A0A519LDC8|A0A519LDC8_9CAUL Tryptophan 7-halogenase OS=Brevundimonas sp. OX=1871086; GN = EON87_02910 PE=4 SV=1
MSRPMKPRVEQVLVVGRDAAAWLTALALHRALGRTGVKVRVVEMPSLLTPADVYSAVPSLGGLHALLGLDEGAVLEATRGLPVLGQRFANWSRARAPFIHGYDTHRVALNDIDFLQFWVKARGEGMRVELEDFSLAAAAAKQGRSPVARDGERPEAPVSPGYHLDARAYVDLLRRTALQAGIEGRSADVRSVERSGDRITSVTLSDGLKVQADLFIDASGPAAVLASGAPDAPFESWRRWFGADRILVASAARLSPLPAFSHIAAFPAGWVGLHPLRDRTALVAVYDSKVMSDQAVLEALPVLTGLPLTGDAAVEDFHPGARPPWSGNCVAIGPAAVSLEPLDAVQLHLIHTGLSTLIGLFPTEADAMPEAEVYNRSMASHLANIRDFLITHYALNQRFDEPVWDRARDMVLPDKLQTRLRVFAARGRVPLYEDESFQQQNWVQILIGHGLIPASYDPMVDTVPVDEQMDKVRGLLARIAEEVQSMPDLDAEFGGSAG

SEQ ID NO: 87489 - protein, 511 aa, Streptomyces olivaceus
  REGION 1..511: note = tr|A0A2R3ZQ24|A0A2R3ZQ24_STROV Tryptophan halogenase; OS = Streptomyces olivaceus OX=47716 GN=mymM PE=4 SV=1
MIRNIVVVGGGTAGWMTATYLKRTFGDRLDITLVESARVGTVGVGEATFSTIRHFFAHLGLQERDWMPHCAASYKSAIRYADWRKPGTHFYHPFERLRSVDDFSLDEWWLRLDGDVESFDTATMLIPALCENNRSPRFMDGSLFASRLTHAVADIGEQRAQFPYAYHFDAGLLADFLRDYGTARGVRHILDDVVEVRQDERGWISAVTTREHGDIAGQLFVDCSGFRGMLVNQVLNEPFLSYEDVLPNNRAVALRVPVDVEEQDLAPYTTATAVDAGWIWTIPLYGRIGTGYVYSDEFCDPEGAERTLRAFAAPDQPELEANHIRMRVGRNRNSWVKNCVAVGLSSGFVEPLESTGIFFIQQAVEQLVRHFPDDRWDPGLAKAFNARMAEVLDGVKEFLVLHYRCAARDDTPYWKAAKSRPLPDGMAERIEAWRTLMPEDTSIYQPFHGFEGYNWKIMLIGLGAQPPAARPALAGLDPAPARAELAHVRAEAARLVDELPSVHEYLRHLHS

SEQ ID NO: 87490 - protein, 332 aa, Brevundimonas sp.
  REGION 1..332: note = tr|A0A519PME6|A0A519PME6_9CAUL Tryptophan 7-halogenase (Fragment) OS=Brevundimonas sp. OX=1871086; GN = EON88_23875 PE=4 SV=1
MRPLKRILIVGGGSAGWMAAALLSKLFKGLYEITLIESDAIGIIGVGEATIPAIKKYNELLDLDENDFMQRTQGTFKLGIQFKDWDRLGDSYIHGFGVIGRDLGWLRAHHYWLQANQRGTAPDFADMSINTAAALENRFMRAEPKMAESPLGHIGHAFHFDAALYVRYLRGRAEAAGVTRIEGKVEGVALDPEDGFVRSVTLEGGQVVEADLFIDCSGFRGLITEQALKTGYEDWSRWLPCDRAIALPCPRVEPLLPYTRATARGAGWQWRIPLQHRTGNGHVYSSAYMDDAEAERILVESLDGPPLAEPNRIRFLTGKRKKVWNKNCVALG

SEQ ID NO: 87491 - protein, 502 aa, unidentified
  source 1..502: note = Gammaproteobacteria bacterium
  REGION 1..502: note = tr|A0A534I1H3|A0A534I1H3_9GAMM Tryptophan 7-halogenase (Fragment) OS=Gammaproteobacteria bacterium; OX = 1913989 GN=E6K32_01515 PE=4 SV=1
RLRSILIVGGGTAGWMAAAALAKVLERSCAIRLIESEEIGTVGVGEATVPHLKLYNTILEIDEAEFIREVRGTFKLGIQFVDWGRIGDRYIHGFGTIGHDYGLLPFHQYWLKQFLAGKAADIGAYSLNTAAAPLGKFMTSAQDVPPTSPLANITHAYHFDAGLYAAYLRRYAEARGVRRTEGKVVDVDLRGSDGFIEAVKLEDGERVSADLFIDCSGFRGLLIEQALHTGYENWTHWLPCDRAMAVPCENVGPPTPYTRSTARTAGWQWRIPLQHRTGNGYVYSSAYISDDAARETLMPNLDGRALAEPRILKFTTGKRRKFWNRNCVAIGLASGFMEPLESTSIYLIQSGVARLLNLMPDRSFSPVLIERYNAQAAFEFERIRDFLILHYFATERRDSPFWQYCANMSIPEQLADNIALFRDSGRFFRHAEEMFALTSWVQVMLGQHILPRNYHPAVDLIPEREVNELVSGVRNVIANCVQAMPTHEQFLARYVQAGAAAA

SEQ ID NO: 87492 - protein, 303 aa, Brevundimonas sp.
  REGION 1..303: note = tr|A0A519L4A5|A0A519L4A5_9CAUL Tryptophan 7-halogenase (Fragment) OS=Brevundimonas sp. OX=1871086; GN = EON87_10605 PE=4 SV=1
MAQPLEVVIVGGGTAGWMTAAALTSVVRPEFRRVRLIESDQIGTVGVGEATLPQMKDFNDWIGVIESEMMRETSATFKLAIEFRDWGFKGSSYLHPFGAHGQPISGVAFHQHWLRAAQAGPTPDIEDYSYAIVAARRNRFEFPVADKAAINSTYAYAYHFDASLYAAYLRRFAEARGLARTEGKIVSVHRKPENGHIASVTLESGEVVTGDLFIDCSGFKGLLIGETMESPFEDWTKWLLCDRAMAVPCARSDDFTPYTRSTAREAGWQWRIPLQHRTGNGYVYSSAFISDDEAARTLMDNLD

SEQ ID NO: 87493 - protein, 345 aa, Brevundimonas sp.
  REGION 1..345: note = tr|A0A519JSZ8|A0A519JSZ8_9CAUL Tryptophan 7-halogenase (Fragment) OS=Brevundimonas sp. OX=1871086; GN = EON85_10345 PE=4 SV=1
YARYLRGWCEARGLTRTEGKVREVRLDPGSGDVAALVLENGEVITGDLFIDCSGFRGLIIGGALNGPFEDWTRWLPCDRALAVPTERSEDFSPYTRSTALEAGWQWRIPLQHRTGNGYVYSSSFISDDEATTRLLGNLDGAPLADPKPIRFRSGRRTASWTKNCIAVGLASGFLEPLESTSIYLTQIAVLTLLDLLPRRTVDPVLAEEFNRIVDNEYDRVRDFLILHYHANTREDSELWRHCREMDIPDSLREKIELFTHRGQIPQYRNGLFSPPSWVSVFVGQGMVPTGYHPMADTTALEVVVAEMEAIRRRVSDRVDAMPTHADFVRDYCQGEPPLKATGAIA

SEQ ID NO: 87494 - protein, 364 aa, Brevundimonas sp.
  REGION 1..364: note = tr|A0A519KTN1|A0A519KTN1_9CAUL Tryptophan 7-halogenase (Fragment) OS=Brevundimonas sp. OX=1871086; GN = EON87_18175 PE=4 SV=1
MPANKIRDIVVVGGGTAGWMCAAALSKVMGTEQYNLTVIESDQIGTVGVGEATIPMILLFNNVLGIDEDEFVRETNGTFKLGIEFVDWRRLGHSYFHPFGLFGQDMDGVPFHNFWLRWAKSGGGNGDSGRFNAETEAARLNRFMRTPDPQNGNLPRINYAYQFDAARYAAYLRKFSEKRGANRIEGKITQVHQNPSDGFITSVELEDGQQIRGDLFIDCTGFRGLLIEQTLKAGYDDWSHWLPANRAVAVPCAKSGEMTPYTRATAREAGWQWRIPLQHRTGNGYVFSSEYISEDEATAKLMSRLDGEPLAEPRVLRFVTGRRKKSWDKNVIAMGLSSGFLEPLESTSIHLIQVAISRILAYFP

SEQ ID NO: 87495 - protein, 502 aa, Brevundimonas sp.
  REGION 1..502: note = tr|A0A519L3W1|A0A519L3W1_9CAUL Tryptophan 7-halogenase OS=Brevundimonas sp. OX=1871086; GN = EON87_10960 PE=4 SV=1
MAEPIRSVLVVGGGTAGWMAAAALNSALGPHCKVRLVESDEIGIVGVGEATVPTVRDFNNLIRLNEAEFMRETRATLKLGIEFVDWGRKGTAYFHPFGTFGGGATLGEFAQTWLTLNQRGLKGDVTDWSICAQAAKRGRVGARQADPRSPYLNLYTAFHFDAGLYALYLRKVCEARGVERIEGKITEVVQRPEDGFVNGVKLADERVLEADLFIDCTGFRGLLIEGAMKAGFEDWSHWLPMNRAVAMPCAPVPGITPYTRSTAMDAGWRWRIPLQHRIGNGHVYCSDHIDDETALNQLVEGLDGEAMADPRVIKFQTGKRKAFWAKNVCALGLATGFIEPLESTSIHLIHVGIAKMLQHFPDRDFSPVNIDIYNRRMEREVQQVRDFVILHYHASERDDSEFWRRVRDMPIPDTLAERVEAFRDRGMIYQVAADEYFSMASWMAVMVGQGIEPRIANPLYRFQNLERAAEGFERVRTTFAQAAEALPTHEAFLKAENLWKTA

SEQ ID NO: 87496 - protein, 199 aa, Brevundimonas sp.
  REGION 1..199: note = tr|A0A519K395|A0A519K395_9CAUL Tryptophan halogenase (Fragment) OS=Brevundimonas sp. OX=1871086 GN=EON85_03325; PE = 4 SV=1
MNIIIVGGGTAGWMSAAGLLGGLKPGQATVRLIESDDIATVGVGEATLPHVRAFNDRIGIEEADMMRATNGTFKLGIEFRDWGFLGSSYVHPFGAHGHAIGGVAFHQQWARARLAGQAADIGDYSYAIVASRRNRFEFPSKDLTAINSTYDHAYHFDAGLYARYLRGWCEARGLTRTEGKVREVRLDPGSGDVAALVLE

SEQ ID NO: 87497 - protein, 501 aa, Brevundimonas sp.
  REGION 1..501: note = tr|A0A519QAK1|A0A519QAK1_9CAUL Tryptophan 7-halogenase OS=Brevundimonas sp. OX=1871086; GN = EON88_11595 PE=4 SV=1
MCIVGGGTAGWIAAALMGEHFKNKLCEIELVESDDIGTIGVGESTVPPFLQMLAKMGVNEQAFVRETQASFKLGIEFKDWLEKGQSYFHPFGAIGVPVDLSDFYQLWLKARLGGYQRPLQDFAPASVMAHAGKFTLPHKAMKTPIGGATYAVHVDAKRVAQFLRRFAEARGVTRTEGIVSDVKTRADGFVEQLVLKDGRTVEADFFIDCSGFRSLLLGKTLGVGYEDWSHWLLCDRAIAVQTENVGPPPPYTLAEAQDYGWRWRIPLQHRAGNGYVFASRYLSDDEATATLMRQVEGRAVVDPMVVPFKTGLRDRCWDKNVLALGLAGGFIEPLESTAIHLIYRGMDFFFRFLPERNCAPDLSREYNRRMRADYEEIRDFIILHYCTTQRTDTPFWDACRTMTVPESLQRKIDLFRVNGTVAEGLDELFREPNWQSVLDGMGVVPRTYHPMVDRIPFGRANQGLDEAHANLQRMVAGLPDHQAFIAQHCAAERPAAPAAVA

SEQ ID NO: 87498 - protein, 504 aa, Brevundimonas sp.
  REGION 1..504: note = tr|A0A519LCS1|A0A519LCS1_9CAUL Tryptophan 7-halogenase OS=Brevundimonas sp. OX=1871086; GN = EON87_02080 PE=4 SV=1
MSDNRLRRIIIVGGGTAGWMAATVIAKSLTPGYCEIDLIESPEIGTVGVGEATIPPLLALNRQLGIDEDEFIRRTQATFKLGIQFRNWGRLGHEYVHPFGVYGADLEGVDFHHHWLRLRDAREAHSLEDYSLATAAMKAGRFIRPATDPRNVLSRMAYAFHFDAGLYGGFLREIAMERGVRRHERKIVDVDLNAETGFVEALKLEDGSRMEGDLFIDCSGFRGLLIEQALKTGYEDWSQWLPMDRAFAVPCEAVGAPTLYTRSTAHEAGWQWRIQLQHRTGNGHVFCSSFTDEDTARERLLQNLDGQALAEPRLLRFVTGRRKKAWNKNVVSLGLASGFIEPLESTSIHLVQSGATTLMSFFPDRSFDQADIDRYNEIIQEEYEHARDFVILHYHATQRDDSAFWRHVAAMDIPDSLKARVELFRSRARISGRREDLFAFTSWVAVMLGQGITPTGHDPMADQMPLDELEQKLTRMREVTGNAVQSMPTHQQFIDRFCKAQPLP

SEQ ID NO: 87499 - protein, 452 aa, Brevundimonas sp.
  REGION 1..452: note = tr|A0A521PAJ6|A0A521PAJ6_9CAUL Tryptophan 7-halogenase (Fragment) OS=Brevundimonas sp. OX=1871086; GN = EPO49_00255 PE=4 SV=1
MSEPIRSILIVGGGTAGWMAAAALQRSLGPHARVSLVESDEIGIVGVGEATVPPIRDFNAMIGLDEAEFMRETKATLKLGIVFRDWGRIGNRYVHPFGTFGRGPTLADFQQTYFALKARGLAGELGDYSICWRAAEAGRVGDRDPDFNSPKNTLFSAYHFDAGLYARYLRKVCEGRGVERIEGRIVDVVQRGEDGFVEGVTLEDGRVLTADLFIDCTGFRALLIEGALKAGYEDWSHWLPVNRAMAVPCAGVKPLTPYTLSTAREAGWQWRIALQHRTGNGYVYCSDHLSDEAARETLLANLDGEALAEPRPLRFVTGRRRKYWDRNVVSLGLSSGFIEPLESTSIHLVQAGIFRLLQHFPDRDFSPVNIQAYNRRLGREVELIRDFVILHYHASQRDDSAFWRQVAAMPIPDTLAERVEAFRERALLYQVGADEYFSQASWLAVMYGQGIV

SEQ ID NO: 87500 - protein, 331 aa, Brevundimonas sp.
  REGION 1..331: note = tr|A0A519L0N0|A0A519L0N0_9CAUL Tryptophan 7-halogenase (Fragment) OS=Brevundimonas sp. OX=1871086; GN = EON87_13605 PE=4 SV=1
EGLGVTRVEGRIADVRMAEHGAVAGVTLADGRTLDADFFLDCSGFRGLLIEQALKAGYEDWSHWLPCDRAVAVPCESSGPPTPFTRSTAREAGWQWRIPLQHRIGNGYVHCSRFISEEDATATLMANLDGRALADPRMLRFKTGRRMASWVKNVVAIGLASGFLEPLESTSIHMIQSAIARLMTLFPDRRFDPAVTAEYNRQTRIEAEQIRDFIILHYHATARMDSPLWNHVRTMEPPESLRQKIDLFRSSGRFFREGDELFSETSWAAVLTGQNVIPERFDPMAATHDPQMMAAKMTRMRDVIGRAVADMPSHADYIARHCRAPHVAFAA

SEQ ID NO: 87501 - protein, 183 aa, Brevundimonas sp.
  REGION 1..183: note = tr|A0A519KTN0|A0A519KTN0_9CAUL Tryptophan 7-halogenase (Fragment) OS=Brevundimonas sp. OX=1871086; GN = EON87_18180 PE=4 SV=1
RPWIGNCVAIGEAAASLEPLDATILQFIHVGLSHLISQFPVDADNQIERDAFNEAFAQHTGNIRDFALMHYTLNRRFDQPMWDWAREVPPSPVLAQKIELFGARGGVALRDGETFEEGSWASCFVGHGLIPKSWNPLVDQLRRAEQIEHFQKILGFVAAHAQDMPSLEAHLEFNAAPPGRGLF

SEQ ID NO: 87502 - protein, 255 aa, Brevundimonas sp.
  REGION 1..255: note = tr|A0A519KUX3|A0A519KUX3_9CAUL Tryptophan halogenase (Fragment) OS=Brevundimonas sp. OX=1871086 GN=EON86_11630; PE = 4 SV=1
AAVRAPDLFTTSKAFTAGWRWRIPLQHRVGNGYVYASAFTDDDTALQELLADLEAPPAADPNRLRFVTGRRKSAWKGNVVALGLASGFLEPLESTSINLIQTGIGRLLELFPDRDFDPVLSAEYNRRTEQEWLGVRDFIIAHYHLADRTEGALWRHCRETPPPDSLAERLDLFRARGEIEPSTYDSFRQASWTSVLTGLGVWPRKVSPQVAGLDLEQVAQQADRVSALIARAVDTLPDSSAFFATRRVRTAEGLS

SEQ ID NO: 87503 - protein, 127 aa, Brevundimonas sp.
  REGION 1..127: note = tr|A0A519L3A3|A0A519L3A3_9CAUL Tryptophan 7-halogenase (Fragment) OS=Brevundimonas sp. OX=1871086; GN = EON87_12775 PE=4 SV=1
EQSAEEMERVRDFVILHYKLNQRTDTAFWRDCRDREIPETLQRKIALWRARGQFVRYRWEMFHPASWLAIYDGFDVWPDRVDPAVEALDPEQLKRSLEAMRRAVADAVAQTPTHAQFLSAVGRQAVA

SEQ ID NO: 87504 - protein, 413 aa, Brevundimonas sp.
  REGION 1..413: note = tr|A0A519QJX1|A0A519QJX1_9CAUL Tryptophan 7-halogenase (Fragment) OS=Brevundimonas sp. OX=1871086; GN = EON88_00215 PE=4 SV=1
GHSYFHPFGLFGQDMDGVPFHNFWLRWAKSGGANADSGRFNAETEAARLNRFMRTPDTQGGSLPRINYAYQFDAARYAAYLRKFSEKRGANRIEGKITQVHQNPSDGFITSVELEDGQQIRGDLFIDCTGFRGLLIEQTLKAGYDDWSHWLPANRAVAVPCAKSGDMTPYTRSTAREAGWQWRIPLQHRTGNGYVFSSEYISEDEATAKLMSRLDGEPLAEPRVLRFVTGRRKKSWDKNVIAMGLAGGFLEPLESTSIHLIQVAISRVLAYFPRDFIDPKLADQFNRDMAFDYDNVKDFLIAHYKVTEREDTPFWAYCKHMDIPEALKTRLQIFQERGDAMVRQYELFKEGSWWAVLSGQGMIPDSYHPVADVISEEDLRQRLSRIRTAIQDRVNTMPVQEAYLRDAKLSATA

SEQ ID NO: 87505 - protein, 309 aa, Brevundimonas sp.
  REGION 1..309: note = tr|A0A519KMB1|A0A519KMB1_9CAUL Tryptophan 7-halogenase (Fragment) OS=Brevundimonas sp. OX=1871086; GN = EON87_21165 PE=4 SV=1
NGHIASVTLESGEVVTGDLFIDCSGFKGLLIGETMESPFEDWTKWLPCDRAMAVPCARSDDFTPYTRSTAREAGWQWRIPLQHRTGNGYVYSSAFISDDEAARTLMDNLDGEALADPRPIRFKAGRRTASWTGNCVAIGLASGFLEPLESTSIYLVQIAINNLVQLWPRKAMDPVLIKEFNRLVDTEYDRVRDFLILHYHANTRDDAELWRYTREMSVPDSLQDKIDRFRHRGDIPFYRSGLFAPPSWVSVMLGQGLKPEGHDRLTERLKLEDVQQRLETLRRKISDRVDAMPTHAQFVRDYCGVKEAA

SEQ ID NO: 87506 - protein, 504 aa, Brevundimonas sp.
  REGION 1..504: note = tr|A0A519JWF3|A0A519JWF3_9CAUL Tryptophan 7-halogenase OS=Brevundimonas sp. OX=1871086; GN = EON85_07815 PE=4 SV=1
MSDNRLRRIVIVGGGTSGWMAAAVIAKSLARGYCQIDLVESPEIGTVGVGEATIPPLIALNRQLGIDEDEFMRRTQGTIKLGIQFRNWGHLGNEYIHPFGVYGADLEGVDFHHHWMRQRATGDTRSIEDYSLATVAIKHDRFIRPATDPRNVLSRMAYAFHFDASLYAAFLREMAMERGVRRHERKIVDVELNGETGFVEAVKLEDGSRLEGDLFIDCSGFRGLLIEQALKTGYEDWSQWLPMDRAWAVPCEAVGAPTLYTRSTAHEAGWQWRIQLQHRTGNGHVFCSSFTDEETARDRLMQNLDGAALAEPRLLRFLTGRRKKAWNKNVVSLGLASGFIEPLESTSIHLIQSGVTTLMSFFPDLNFNQADIDRYNAIVQEEYEHARDFVILHYHATQRDDSAFWRHVAAMDIPDSLKARVDLFRSRARISGRYEDLFAFTSWVAVMLGQGIIPTGHDPMADQMSLDELQTKLGRMREVIGNAVQAMPTHQQFIDRCCKAPALP

SEQ ID NO: 87507 - protein, 298 aa, Brevundimonas sp.
  REGION 1..298: note = tr|A0A519KUW1|A0A519KUW1_9CAUL Tryptophan 7-halogenase (Fragment) OS=Brevundimonas sp. OX=1871086; GN = EON86_11635 PE=4 SV=1
MTPEPLRKILIVGGGTAGWMTAAALSHVLRGTVRIELVESDAVGTVGVGEATIPPILLFNALLGIDENEFIRETRATIKLGIQFRDWYRQGHEYFHPFGQYGSRIDAASFHQYWLRLNAEGLDDNLDDYSAPAVAARLGRFSRPLADPRSVQSQMTYAFHFDATLYARFLRRRAEAAGVIRHEGRISDVPLTDDGAIAAVRLDDGRALDADFFIDCSGFRGLLIEGALKTGYEDWTHWLPCDRAVALPCARVEPPVPYTRSTALEAGWRWRIPLQHRTGNGYVYCSAHISDDEALARL

SEQ ID NO: 87508 - protein, 542 aa, unidentified
  source 1..542: note = Westiella intricata
  REGION 1..542: note = tr|A0A075XCQ3|A0A075XCQ3_9CYAN Halogenase; OS = Westiella intricata UH HT-29-1 OX=1524912 GN=welH PE=4; SV = 1
MLTQNTTNVVIVGGGTAGWMTASYLSKALHKNVSITLIESSNITKIGVGEATFSSIKSFFDFLGLQEHEWMPKCNATYKMAIKFVNWNTNKKHFFHPFERLDIVDGFSISEWWMKLKKHSEPFDYSCFAAPTLCDSQRSPRYFNGEVFDSRVKQLFSDEHFSEKRLITLADAEGQYPYAYHFDANLIAKFLKDYAMQRGVKQIVDDVIDVKLTPEGSIDCVHTKGNRRISGDLFVDCTGFRGLLINKALGEPFISFSESLLCDSAIAMQVPTNIKKDGINPYTKATALSSGWVWEIPLYGRNGAGYVYSSAFISKEDAEQEFRQHLGPVCQHQQASHIKMRIGRNRNSWVKNCVAIGLSSGFVEPLESTGIFFIQHGIEELVSHFPSNSLNEELIKSYNQAIAKCIDGVRDFLILHYHASDRTDTPFWKATKHDIQLPDELSQRFKLWKKRLPNKKNINPYFHGFETYSYSVMMLGLNHVPENSLPIMEYMDDHKATAQFRSIKEKTELLNSTLPSQYEYLTYVMKSQEQSEYLNENLLDAV

SEQ ID NO: 87509 - protein, 502 aa, unidentified
  source 1..502: note = Gammaproteobacteria bacterium
  REGION 1..502: note = tr|A0A534HGL8|A0A534HGL8_9GAMM Tryptophan 7-halogenase OS=Gammaproteobacteria bacterium OX=1913989; GN = E6K32_12895 PE=4 SV=1
MDKRVEDIVIVGGGTAGWMTAAFFSKLLKSGVRIRLIESDEIATIGVGEATIPAIKHYNAALELDENEFLARTQGTFKLGIEFVDWAKLGDFYIHGFGRIGQDLGILKCYQYWLKMRARGLVPGLEHYSINTVAPRQSKFMRSVPEMKQSPLGDIANAFHFDARLYALFLRAYAEARGVTRTEGKIVGIELRAGDGYIDALRMEGGERIPGDLFFDCSGIRGLLIEQALHTGFESWNHWLPCDRAVAVPCESVDPLLPYTRATAHKAGWQWRIPLQHRIGNGYVYSSQYISDDEATAVLLARLDGKASGPPRYIKFLPGKRRKLWNKNCVAVGLSSGFLEPLESTSIHLIQTVIVRLARFFPSCGFNPIDVEEFNRRSDFEYERIRDFIILHYKATERNDSPFWDYCRSMEIPDTLRVKIDLFRSHGRIFRDNEELFAEESWLQVMLGQGIIPEDYDPMVDQYPDEEVMRYLNDIQAVIEKCVAVMPLHKDYIAQQCAAGRG

SEQ ID NO: 87510 - protein, 503 aa, Sphingomonas sp.
  REGION 1..503: note = tr|A0A5E7ZSJ9|A0A5E7ZSJ9_9SPHN Tryptophan halogenase; OS = Sphingomonas sp. EC-HK361 OX=2038397; GN = SPHINGO361_50017 PE=4 SV=1
MTPIESVVIVGGGTAGWMAAAAAARFLDDGHRRITLVESDAIGTVGVGEATIPPILGFNRLLGIDEAEFVRETGATFKLGIEFVDWGGRGERYFHPFGEHGRDFQGVAFHQYWLKHRHAARIGVLSDYAMAGVAAAAGRFAPPATDPRAPLSQLAYAYHFDAGLYAAFLRRRAEAQGVVRIEGRISGVETDAQTGFVGAVVLEDGRRVAGDLFIDCSGFRSLLLGETLGVGYRDWSHWLPCDRAVAVPAARAAPLPPFTRATAQAAGWQWRIPLQHRTGNGLVYASAHLSDDAAEDALVAGVDAPLAAPRRLSFTAGVRERLWDRNVVALGLAGGFIEPLESTSIHLIQTGISKLFWLFPDKGFSAVERDTYNRLMTEQFEYVRDFIVLHYKATRRDDTPFWRYVRNMAIPDSLAHKIALFREKGRVMRFDHDLFAVPSWVAVMLGQGIAPQGYDPLVDAMDDARICAAMAEMRAGYAAQALRMPLHADYVAAHCPMPGVSGG

SEQ ID NO: 87511 - protein, 501 aa, Sphingopyxis sp.
  REGION 1..501: note = tr|A0A1Y5PPW5|A0A1Y5PPW5_9SPHN Tryptophan halogenase PrnA OS=uncultured Sphingopyxis sp. OX=310581; GN = SPPYR_0958 PE=4 SV=1
MGDKFEIVIVGGGTAGWMCAAACAVKLDPARFRVRLVESEEIGTVGVGEATLPQMKDFNDFLGLDEAEFMKATQASFKLGIEFVNWGRAGDRYVHPFGTFGRPIGEADFFSYWIRARRAGTAAPLSDYCFPIVTALQNRFMLPNGDANDVRNAFAYAYQFDAFLYARYLRQWAEARGIERVEGRIVEVEQDGGTGDIAAVKLASGARIAGDLFVDCSGFRGLLMAQTLGVGIEDWSYWLPCDSAAAVPSARSADFHPYTRSTRRTAGWQWRIPLQHRTGNGYVYSSADISDDEAAATLLANLDGEAMAEPRVLRFKACKREKAWAHNCIAMGLASGFLEPLESTSIYLVQMAIMHMLTLLPSGPGIDPALPCELNRVMDVEYDRIRDFLILHYVANEPDAPLWERVTTMAVPDTLADKIDRFRHRGHVQAYRDGLFGPPSWQAVFVGQGIEPLAADRLADALPAATVEERLANLAAMIADAAAAVPSHADFIARYCPAPAP

SEQ ID NO: 87512 - protein, 281 aa, unidentified
  source 1..281: note = Gammaproteobacteria bacterium
  REGION 1..281: note = tr|A0A534IIA5|A0A534IIA5_9GAMM Tryptophan 7-halogenase (Fragment) OS=Gammaproteobacteria bacterium; OX = 1913989 GN=E6K22_09580 PE=4 SV=1
SFSSNLFNDAAVAIPSPMEASIPSETVSTAMKHGWAWKIPLTTRFGNGYVYSSRFCSADEAETELRRHLGLLDGDVPARHLKMKIGRVTRHWNRNCLAVGLSQGFIEPLEATALLFIQQTAATFVEFVERGDLSEAAHERFNDMMNTHFEGIRDYIVTHYKTNTRTDTEYWRANAANLNLSDDLKKLYSLWMAGKSIAPAVGQQVLGKGYPVFSWYSIMAGMGIFPDPQDLRPPTVQEARFSEAEIDNLLERSSANYPDHRAALESIPPRRTEPALQVYFW

SEQ ID NO: 87513 - protein, 506 aa, Sphingomonas sp.
  REGION 1..506: note = tr|A0A5E7Z1C0|A0A5E7Z1C0_9SPHN Tryptophan halogenase; OS = Sphingomonas sp. EC-HK361 OX=2038397; GN = SPHINGO361_130016 PE=4 SV=1
MDKTKTTPSPNVVIVGGGTAGWMAAAAFARFLPAGWTVRLIESDAIGTVGVGEATIPQLRLFNAHLGIDEDAFVRATLGTFKLGIEFVGWSGPKSSGDSRYLHAFGTIGRGMGLVPFHHYWLRGGEAAGDLWDYSPTAIAARGNRFARDLGRTELPSGVAWAFQFDAALYAAFLRRYAEARGVERIEGQVVHVAVDDGNIASITLEGDRKVAGDLFIDCSGFRGLLIEEALHAGYEDWTHLLPCDRALAVPSANAGALTPYTRATAKEAGWQWRIPLQHRCGNGIVYSSAHLSDDRAADILLAGLDGAPLADPRPLRFRAGRRKRAWVGNCIALGLAAGFMEPLESTSIHLVQSGIARLLQLLPAGDSPASAAEFNRQTAREWEAIRDFLIFHYHANGRDEPFWRACREAAIPDSLAARIALFRESGRIVHESHELFTEVAWLQVMTGQGIRPQAYHPLADDLSAAELAEYLALARRHAQGVAARMPTHDAFIAAHAAAAPTTVAA

SEQ ID NO: 87514 - protein, 499 aa, unidentified
  source 1..499: note = Paraglaciecola sp.
  REGION 1..499: note = tr|A0A2N1DCG4|A0A2N1DCG4_9ALTE Tryptophan halogenase; OS = Paraglaciecola sp. MB-3u-78 OX=2058332 GN=CXF95_08365; PE = 4 SV=1
MKKQDRKINKVVIAGGGTAGWMAAAALSKLIGKNLEVVLVESDEIPTVGVGEATIPSLHTFHQLLKINEQEFMAATNATFKLGINFENWRDVNKDYLHSFGFLGQGCWAADFQHFWLKGQKRGIVSDIGDYVPEHLGAREGRFGVMAGQELNHAYHLDAGLYAKFLRKIAEKNRCIRIEGKIDKVSLDDDSGYIDSLTLDSGQLIEGDLFIDCTGFRGLLIEEALHTGYDDWSHVLPCDSAIAVQTKTVSKPIPYTRAIARDAGWQWRIPLQNRTGNGFVFCSKYLSDAEATKILLNNIEGERLNEPRVIKFKTGQRRKRWNKNCIAMGLSSGFIEPLESTGIHLFQKAILRLLLMFPSQGIKQSDVEEYNDQTREEAENIKDFIILHYHLTDRKDTPFWRYCKTMDVPESLKHRMALFKESAQAFQKDEELFGETSWVQVMLGQGLMPEQYHPIVDMMGDEELRNFLNTIKSGVKKKVQSWPDHNDFIKHYCPSSVNT

SEQ ID NO: 87515 - protein, 500 aa, unidentified
  source 1..500: note = Marisediminitalea aggregata
  REGION 1..500: note = tr|A0A1M5RY03|A0A1M5RY03_9ALTE Tryptophan halogenase; OS = Marisediminitalea aggregata OX=634436; GN = SAMN05216361_4280 PE=4 SV=1
MHSPLKKIIILGGGSSGWMTAAALGKILKNHPCEIQVIESEDIGTVGVGEATIPQILLFNDLIGLDEDTFIKRTKGTFKLGIQFKDWRKVGHSYYHAFGEVGKNMEGVHFYHYWLKMRQQGKAAPLDEYTLSSLACNEKRFMRPFDAGNSPLSNIAYAFHFDAGLYAKFLRESAEGHGVVRTEGKVSQVTQHPNGDIRSLILENGEEHQADFFIDCSGFRALLIEQTLKAGYEDWHHWLPCDRAVAAPSALTEEPWPFTRAAAQQAGWQWRIPLQHRVGNGHVYSSEFMSDHDAERTLRENIDGELLADPRLIKFVTGKRNKFWHKNCLAVGLAGGFMEPLESTSLHLVQVAISKFFSFFPFQTPTQSDIDEYNAQMDFEFTRIRDFLILHYHVTEREDTPFWRYCKNMSIPDTLQEKIDQFKANGRINRFNNELFNDLSWFEVMYGQGLRPEGYNALADIFPDDELAKRLEGIQRVVRKSVDYMPSHAEFIANTCPAKP

SEQ ID NO: 87516 - protein, 514 aa, Massilia sp.
  REGION 1..514: note = tr|A0A0Q6SVL7|A0A0Q6SVL7_9BURK Tryptophan halogenase; OS = Massilia sp. Root335 OX=1736517 GN=ASC93_19440 PE=4 SV=1
MSKPIEHVVVVGGGSAGWLTAAILAVEHPRLTVTLVESPGVPPIGVGEGTWPSMRETLQRIGVSEAAFFRECDAAFKQGSRFDRWVDGGDADIYFHPFSLPQGYGEANLAAAWQHGHRDVPFADLVSYQPHLCHQGRAPKQPQTPEYAGVANYGYHLDAGKFGAFLQKHCTEKLRVRHVLAHVVDIISTDAGDAAGDIQALRTREAGVVEGDLFVDCTGMASLLLGRHYGVPFVSQRDVLFNDRALAVQVPYPAPDAPIASQTTSTAQSCGWIWDIGLPARRGIGYVYSSAHCADDAAEQTLRAYLSATGIEGDIPAPRKIAFDPGYRARFWERNVVAIGLSAGFIEPLEASALALVELSAAWLADDLPATRAQMDTIAARFNEAFTYRWERIIDFLKLHYVLSRRTDSAYWLDHRTARTQSQRLRELLALWRTRAPSRRDFPRIEEIFPSASWQYILYGMGFRPEFSGRASDLPEAAAQYFREAARLTARMLPLLPANRAMLDHIRQYGMPAP

SEQ ID NO: 87517 - protein, 505 aa, Massilia sp.
  REGION 1..505: note = tr|A0A0Q6T0I0|A0A0Q6T0I0_9BURK Tryptophan halogenase; OS = Massilia sp. Root335 OX=1736517 GN=ASC93_16405 PE=4 SV=1
MSDMAIRNIVIVGGGTAGWMTAAPLALRLGTSCNIVLVESPEIGTVGVGESTLPTIRYYNLALGLDGADFIRRTKATFKLGIEFQDWGHVGNRFFHGFSDFGPAIENRPAYMYWLRLSRARKDMPSYEEWSVATAMARAHRFIPPYGDRPSVTNAYSYAFQFDAGLYAAYLRDYATERGVTRIEGTVGDVELHPDTGFITAVTLRDGRRVEGDLFIDCTGFRGLLIEGVYKAGYEDWSAMLPCNSAQAVPSASADKLTPFTRAAAKSAGWTWRIPLQHRTGNGHVYCDAFMSDEEAGRVLLDGLDTEALDAPRQLRFTAGRRRKSWVKNCVAVGLSSGFLEPLESTSINIIELAVGWLLQYFPDRDCRPELADEFNRLVAQRYEFVRDFIVLHYKLTNRDDSEFWRYCANMPIPDSLRHQIDLFRASGRVTLYDPEGFSMDSHASIMLGLGLRPETDDPLIDRMDLKRLDEHFGKVHATIRQAVGAMPDHGEFVAQLAAGTMRKP

SEQ ID NO: 87518 - protein, 519 aa, Caulobacter sp.
  REGION 1..519: note = tr|A0A0Q7TUI0|A0A0Q7TUI0_9CAUL Tryptophan halogenase; OS = Caulobacter sp. Root1455 OX=1736465 GN=ASD21_22405 PE=4; SV = 1
MDRRRRLLIVGGGTAGWLTAAYLAKSLRVAEQAHLEITLLESPDVGIIGVGEATFPTIRTTLRFLGIDEARFIRETSATFKQGIRFNDWAWAPTDSGERHQYFHPFEAPFSTDGASLAPYWLLQNEATRAPFAEAMTIQARVADAQRAPKRPHEGNFSGPLNYAYHFDAAKLAQVLAERARELGVRHLQGLLTGVELDATGAIDHVICAEHGRLDADLYIDCTGFHAELIGQALKAPFKSARPILFADRALACKIPYDRPDAPIQSFTIATAHEAGWTWDIGLNGARGVGTVYSSDHIDDDRAQAILRGYVGEGVEIAPRALSFEAGYRTKQWVKNCVAVGLSAGFLEPLESTGVVLIEAAVAIIAELFPHNGPISAPAFRFNELMTARFDNIITFLKLHYCLSQRTEPFWRENADPASMPERLVDLLEQWRWRPPTRYDFILDLETFAFFNYQYILYGMGFKTDLSPGRSEFPDVAAADKLFAKIKSFGERATHDLPSHRDLIAQINRFGFDRSLEPA

SEQ ID NO: 87519 - protein, 506 aa, unidentified
  source 1..506: note = Marisediminitalea aggregata
  REGION 1..506: note = tr|A0A1M5RDG9|A0A1M5RDG9_9ALTE Tryptophan halogenase; OS = Marisediminitalea aggregata OX=634436; GN = SAMN05216361_4143 PE=4 SV=1
MTTPQHICIAGGGTAGWMTAAALANRLPHSHYRITLVESAQIGTVGVGESTIPHIRQFNSALGITEDEFIAATSATCKLGIEFTDWGKVGESYIHPFGELGKPLAGIEFHHLWQAASLQGLDVPIESFSVAAVAARQRKFSPPHASREHLLSTYTYAYHLDASAYARFLRDYAEQRQVIRVEAQIREVKRDHEGGPITALSLDNGEQISADWFIDCTGFRSLLIGDYSQAEFIDWSEWLKTNRAVVLPCEKDGPSRPYTKAMARDAGWQWQIPLQHRIGNGYVYCSDYISDEEAEHTLRSTLPGEALADVRFLDFKAGCRKQLWVQNCVAIGLSAGFLEPLESTSIFLIQMGIAKFLEHLPGTHNDAARNQYNRELTEQYQVIRDFIILHYYLTQRHDTPFWRDCQAMTLPDSLTELILAFRDSGLVDKKQYGLWPAVCIGQHLHPKQVDSRVAAIPPQQLIGMLNQLKSDIAAQVATLPNMDDYLSSLVAQTPLQKSGMRAGGQV

SEQ ID NO: 87520 - protein, 501 aa, Massilia sp.
  REGION 1..501: note = tr|A0A0Q6SD44|A0A0Q6SD44_9BURK Tryptophan halogenase; OS = Massilia sp. Root335 OX=1736517 GN=ASC93_21745 PE=4 SV=1
MNDNHIRKVVIVGGGTAGWMTAAPLALKLGGRCEIVLVESPEIGTVGVGEATLPTIRYFNHALGIDDADFVRKTQATFKLGIEFKDWGHVGNRFFHGFGDFGPPIEHRPAYMYWLRLSRTFKDMPSYEQWSMATAMARNNRFAPPHDEMPSVSDAYSFAYHFDAGLYAAYLRDYAMGRGVTRVEGMIDGVEQHPETGFITALKLRDGLRVEGDLFVDCSGFRGLLIEGVFKAGYDDWSDMLPCNSAQAVPCAKAEQLTPYTISTAQSAGWTWRIPLQHRTGNGHVYCDAFTSDEEAGRVLMAGLDGEAQGAPRQLRFTTGRRRKSWIKNCVAIGLSSGFLEPLESTSINIIEVAVGWLVEFFPQRDCRPELAAEFNRMITERYQFVRDFIVLHYKVTQRSDSEFWRYCANMPIPDTLKHQIELFRETGHVAIYDPQGFSASSYFSILMGLGVVPKADDPLIDALQFDQLLGHFATRREFINKMVNAMPDHGLYISRHCKAP

SEQ ID NO: 87521 - protein, 491 aa, Sphingomonas aquatilis
  REGION 1..491: note = tr|A0A511PZ35|A0A511PZ35_9SPHN Tryptophan halogenase; OS = Sphingomonas aquatilis NBRC 16722 OX=1219039; GN = SAQ01S_00970 PE=4 SV=1
MTPPPPSIAILGGGTAGWMAACLMARAWPQARITVIESPDIGIVGVGEGSTPQLKALFDTLGLAEADWMPAADATYKAGIAFHRWADDTPAYFHPFAGQIDLHTQGAFFASTRARRHGADVPAHPDRFFLNGRLAEAGRAPIAPAHFPFRIGYGYHFDAHKVGHVLRDAALARGVVHLPRRVRDVVVDAAGQVAALTLDEGDAIHAELFVDASGFASVIAQKALGVPFRSFADSLLADRAVVMPTPRQSALPVQTKATALSAGWAWDIPLTSRTGNGYVYASRYLSPDAAETELRRHLGLLDAEVAARHLSMRVGRVETSWTANCLAIGLAQGFIEPLEATALHIVQATIEGFIGAYQAGSRDAFNAAIARRYDGIRDYIVAHYRLNRRSGSFWRDVAANDDLSDDLKAIMTAWFTGGDVAAVVEGRGLAGYYAPMSWEVLLAGYGTFPDATRLRTAPPVADLAAIETLLSGCLLNFPDHQAALDGHRRMP

SEQ ID NO: 87522 - protein, 502 aa, Sphingomonas sp.
  REGION 1..502: note = tr|A0A1H7UNU5|A0A1H7UNU5_9SPHN Tryptophan halogenase; OS = Sphingomonas sp. JS21-1 OX=1855283 GN=SAMN05216382_3048; PE = 4 SV=1
MTPTNIVIAGGGSAGWMVAAAFAHFLPPNAYRIRLVESEAIGTIGVGEATIPQIQLFNQALGLDEDAFLRATGGTFKLGIEFAGWTRPGERYMHAFGDVGRESGLLGFHHRWLRARAERDGEIAALGDYSLNEVAARANRMQRGPARTAAMLPAMPYAFHFDAALYARLLRRFAEARGVERVEGRIVSVERSGETGDVAGLVLDGGARVEGTLFVDCTGFRALLIGEAMGASYDDWTRWLPCDRALAVPSARATDFTPYTRATAHGAGWQWRIPLQHRTGNGIVYSSAHLSDDAAAAQLLANLDGAAEGDPRPIRFTTGKRREMWRGNVVAVGLASGFMEPLESTSLHLVQTAIARLLKMLPGRATGQVQRDEYNRQADFEYERIRDFLILHYWANARDEPFWQERRAADLPDTLRHKIALWQEQAHVTREHEELFTEVAWIQVLIGQGVIPHGYHPIADAETRADNDEYLELMRQLIAREAAQMPRHDAFVAQHCAARASV

SEQ ID NO: 87523 - protein, 506 aa, Caulobacter sp.
  REGION 1..506: note = tr|A0A0Q7TJY3|A0A0Q7TJY3_9CAUL Tryptophan halogenase; OS = Caulobacter sp. Root1455 OX=1736465 GN=ASD21_08440 PE=4; SV = 1
MTDNRIRKIVVVGGGTAGWMAAAALSRFIEGAPVAIEVVESAEIGTVGVGEATIPPIRLFNATLGLDEIDFIKKTQATFKLGIEFNGWGKPGSRYFHGFGDFGPPIDGVPPHHHWLRMRAAGETAGLQEHSLVTMMADLGRFRPPTPDPRSVYSTYSYAFQFDATLYGRYLRGFAEANGVRRTEGKIVDVALRADDGFVEAVVLESGARVEADLFVDCSGFRGLLIEGALKTGYEDWSRWLPVDRALAVPSQNVGPPTPFTSATARSAGWQWRIPLQHRTGNGYVYCSQYIDDDAAAQTLLANLDGAALDVPRPLRFVTGRRRKFWNRNVVALGLAGGFMEPLESTSIHLIQNGIGHLIEFFPDRACDPKLADAFNAKSGEEYERIRDFLIAHYCTNQRVGEPFWDAVRTMSLPDSLKATLETFRATGSMGLNTYEAFFEPSWLSVLLGQQVWPKDYDRRADALPLAELSHGLKLRRGAVRQAAEASPGHADFIARYCRADPPPDA

SEQ ID NO: 87524 - protein, 504 aa, Sphingomonas aquatilis
  REGION 1..504: note = tr|A0A511PZ59|A0A511PZ59_9SPHN Tryptophan halogenase; OS = Sphingomonas aquatilis NBRC 16722 OX=1219039; GN = SAQ01S_00920 PE=4 SV=1
MADTPLTTPMTTIVIAGGGTAGWMAAAAFGGLLESGYRIRLVESEEIGTVGVGEATIPQIRLFNQALGLDEDAFLRATGGTFKLGIAFDGWREPGHSYMHAFGDVGRDVGLIAFQHYWLRARQLGLAKSLDAYALNEVAARAGRMHRGGPITAQTLPTMPYAFHFDAGLYAAYLRRFAVNRGVERTEGTIDRVERNGDTGDIAALVLASGERVVGDLFLDCTGFRGLLIEGALETGYDDWTHWLPCDRAVAVPSANIDAPLPYTRAIAREAGWQWRIPLQHRTGNGYVYCSRYLSDDAAAAALLANIEGEAQSDSRHLRFVTGRRKRAWNRNVVALGLASGFLEPLESTSIHMIQSAIARLVKLLPALPIPQALRDEYNRQTDFEIERIRDFLILHYWANGRTEPFWKERREADLPDTLRTKIALWQQAGTITREHEELFTEDGWLQVLAGQGVEATAYHPLADQIGVEDLGEYMETLELLYRREAQAMPPHADVIARHCAVRP

SEQ ID NO: 87525 - protein, 506 aa, Xanthomonas bromi
  REGION 1..506: note = tr|A0A1C3NPR2|A0A1C3NPR2_9XANT Tryptophan halogenase; OS = Xanthomonas bromi OX=56449 GN=XBLMG947_3119 PE=4 SV=1
MIPAPLRNIVIVGGGTAGWMAAAAFARVLGPTFNVQLIESEQLGTVGVGEATVPHIKAFNNLLGIDEAEFVRQTQGSFKLGIEFVDWQRPGTAYMHGFGTQIGHPLGLLPFHQYWIKQHARGKAQPLGAYTLNTVAAARGKFMTSAGDVPANSPLANIAYAYHFDATHYAHFLRRYSEQRGVTRIEGLVEQVQLHPESGHVQSLQLASGQVVHGDLFIDCSGFRGLLIEEALHTGYHDFTHWLPCDRAFAVPCEKVGPPTPYTRSTARAAGWQWRIPLQHRTGNGYVYCSAHISDDEAAATLLANLDGKPLADPRPLRFTTGRRKQFWNRNVVALGLASGFLEPLESTSIHLIQSGISKLLELFPREGISPVLVQRYNDRSAFEFDRIRDFLLLHYHATERDDSAFWRHCRSMPITPELQTTLDLFRDSGRFYRNAEEMFAEISWVQVMVGQGIVPQGYHPLVDQVPDRDAEGFLASVAQTISHCVDVMPTHQQFIDRYCKAPALP

SEQ ID NO: 87526 - protein, 512 aa, Caulobacter sp.
  REGION 1..512: note = tr|A0A0Q7T4F0|A0A0Q7T4F0_9CAUL Tryptophan halogenase; OS = Caulobacter sp. Root1455 OX=1736465 GN=ASD21_16160 PE=4; SV = 1
MQDSAHEGRIRDIVIVGGGTAGWMAAASLRRHFGAAPVNITLIESSEIGTIGVGEATIPTIRRFYQSMGLSDIDVLRATGGTCKLGIRFNDWLTPGSSFIHPFGLYGQDLKGVSFHHYWMRLRALGEAAPIGEYSLGASLAAGGKFTTPSRNPPSTLSVFDWALHFDASLFARLMRQVAEQNGVKRIDAKIVEVNLRAGDGFIESVSLDTGATVPGDLFIDCSGFRGLLIEEALHTGYEDWSQWLLCDSAMAVQSEGKGDPPPYTDVTAREAGWQWRIPLQHRWGNGYVYSSRHTSDEEARAVLTGSLDERLLHEPRKIGFHPGRRLKAWNKNCIALGLASGFLEPLESTSIALIETGIEKIKSLFPNRDFDPAVVEEFNEMSRLEMERVRDFIILHYKLNQRTDDPTGFWTHCREMSVPDSLQKKMDLWRVQGHFVRYRWEMFAPPSWLAIYAGFDLLPRTYDLSVDGFDAAQLSGALAEMRKAVADTVAATRAHGEFIEQYARPQSVAAE

SEQ ID NO: 87527 - protein, 517 aa, unidentified
  source 1..517: note = Paraglaciecola sp.
  REGION 1..517: note = tr|A0A2N1D8Z9|A0A2N1D8Z9_9ALTE Tryptophan halogenase; OS = Paraglaciecola sp. MB-3u-78 OX=2058332 GN=CXF95_16810; PE = 4 SV=1
MKTRVVIVGGGTAGWLTAGIIAARHCADSTSSEQTEVVLVESPEVKNLGVGEGTWPTMRDTLRQIGISERMFLSCCDASFKQASKFVGWSQGKNEHYYHPFTAPVGYGGISAAEHWLATAQEVDFESWVCAQGAVCKETLAPKLPQMPEYAFHLNYGYHLNAGKFVTMLQHHCVEKLSVKYIQGHVQHVLPADNGDIKAIELADGEQITGELFIDCSGFAAILIAKHYQIPITSKQHILFNDTALALQVDHATDEVPIASCTVASAQESGWIWDIALQNRRGIGHVFSSDFTSAEQAEQALLKYVQNDPYLAAQEISPRTIKFTPGHRETFWHHNCVAIGVSAGFVEPLEATALVLIEKSAEWISEQLPRERSAMTVLAKRFNTLTRQRWQEIIDFLKLHYVLTQRQDSEYWREHQQLDSIPDSLQEALTLWRSQAPGLYESNQRFELFSSASKQYVLYGMDLKSEQKHPASFAQKEASLIKRLRNETVHTTEKLLSVLPTNRQFLRRVMEGQGQKK

SEQ ID NO: 87528 - protein, 512 aa, unidentified
  source 1..512: note = Altererythrobacter atlanticus
  REGION 1..512: note = tr|A0A0F7KRZ8|A0A0F7KRZ8_9SPHN Flavin-dependent tryptophan halogenase RebH OS=Altererythrobacter atlanticus OX=1267766 GN=rebH PE=4 SV=1
MDKVENIVIVGGGTAGWLTAGVIASRHQGRRPHGFSVTLVESPNVPTIGVGEGTWPTLRTTLRKMGVSETEFFRECDAAFKQGARFNRWTTGEADEGYYHPLMLPQGFARLNLVPHWLEDGEDSFCDAVTPQGRLCDRGLAPKTIATPEFESVANYAYHLDAGKFSDFLRRHCCEKLGVRHVLADVTEIETGPNGDVTRLKTEQGPSISGDLFVDCTGFRALLIGGAMQVPFRECSDVLFCDTALAVQVPYQDPADPVASHTISTAQSAGWIWDIGLPTRRGVGHVFSSAHIDADEAERELRAYIGPAADDLTVRRIPIRSGHRETFWKGNVVAVGLSAGFLEPLEASAIVLIELSAKMIAEQLPPNRAVMDVIARRYNDTTAYRWGRIIDFLKLHYSLTKRTDTDFWRDNTRPETIPDRLRGLMELWKYQAPWLHDEFDRAEEVFPAASYQYVLYGMGYRTALPRGAHDAERELAQRALRENRAHTARLMDGLPPHRDLLDKITEHAMMPV

SEQ ID NO: 87529 - protein, 495 aa, unidentified
  source 1..495: note = Marisediminitalea aggregata
  REGION 1..495: note = tr|A0A1M5H348|A0A1M5H348_9ALTE Tryptophan halogenase; OS = Marisediminitalea aggregata OX=634436; GN = SAMN05216361_1289 PE=4 SV=1
MPQTIQNVVIAGGGTAGWMTAALLRRVLSPTIRIELVESEQIGIVGVGEATIPPIQTFNQFLGIDEKAFLRETHATIKLAIKFENWKTQGDSYYHTFGAPGTTMGFCSFHHYWLKAKQAGLAQSLWDFDLNYLSCLQGKFNKINTPNPLYEMQYAYHFDSALYGQFLRKTAEQAGVVRTEGIIEYVQQDPDSGFITALQLTNGQQIQGDLFIDCTGLSGLLIQQALGVSYEDWSHWLPADSAQAVPSERFDKTLPYTRSIAHRVGWQWRIPLTHRNGNGIVYSSQYLSDDEAGQTLLNNLDTKALDTPRTIRFKTGRTDQQWCKNVVAIGLSSGFLEPLESTSIHLIQSGIVRLMKMFPNQGISQAMVDLYNAESKDEFETIRDFIILHYHVNQRDDSDFWRDMRNMAIPDRLAQKIAAFEDTAAIFNEQSDIFRDASWVQVMMGQGLDPKDYHPAADAMDNAQLMDAMQQIYKAKQQPLDKLMNHDEFIKRYTA

SEQ ID NO: 87530 - protein, 510 aa, Caulobacter sp.
  REGION 1..510: note = tr|A0A0Q7T9L3|A0A0Q7T9L3_9CAUL Tryptophan halogenase; OS = Caulobacter sp. Root1455 OX=1736465 GN=ASD21_17370 PE=4; SV = 1
MTDQAVRNILIVGGGTAGWMTAAALSAKLAGLPIAIRLVESAEIGTVGVGEATVPHIRHFNAALGLDEADFMRKTQATYKLGIEFRDWGKLGDSYVHPFGAYGAAIGGVGFHHHWLRARQGGDPTPLEAYSLPIQAARLGRFVPPSSDPRSLASTYSYAYQFDAGLYALYLRAYAEARGVVRTEGKVADVVLRGEDGFIEAITMENGERVEADLFIDCSGFRGLLIEQTLKAGYEDWTRWLPCDRAAAVPCDTVEPSAPYTRSIADKAGWRWRIPLQHRVGNGYVYCSDHISDDEAAAALLAGLEGKALAEPRFLRFVTGRRKKQWSKNCVAVGLSSGFLEPLESTSIHLIQVAVTTLLELFPDRGCDQADQDEYNRVMDLEFERIRDFLVLHYHATQRTDAPFWNERRTMSIPDSLAYKMDLFRERGVVVKYKDGFFLEPSWLAVYLGQNVVPRAYDPVSDSVPDAVLTQRLKAIRDSVADTTRSMPSHADWIARFCAAAPPSASGEAA

SEQ ID NO: 87531 - protein, 519 aa, Novosphingobium sp.
  REGION 1..519: note = tr|A0A2V5BLF5|A0A2V5BLF5_9SPHN Tryptophan halogenase; OS = Novosphingobium sp. GV010 OX=2135477 GN=C7493_10734; PE = 4 SV=1
MHATTSPPPHADAPGAIRSVLIAGGGTAGWMAATYLAARLQGTGVAITVLESSAIGTVGVGEATVPAIRDFFRAIGLHDFDVLRATGGTPKLGIDFHDWAGEGTRFFHPFGLYGLPSRGVPFHHYWLKLARAGDRRDLGDYSLCTEMARGGNFMLPVDHPVNDLATFNWAVHFDAARFAAMLRDHGQRQGITRIDDIITHVARDAQSGHIAAVDTQGGLALTADLFIDCTGFRSLLLGQTMGSAWVDWTNLLPCDRAVAMPCASAGTFDRPYTTSTARDAGWQWRIPLQERVGNGYVYASACLSDDEAVSILRGSLEGEALAEPNLIRFGAGHRRAFWSGNCVGLGLAAGFLEPLESTAITLIQTGLEKLVDLFPDRACSPALASEFNRATTLEYERIRDFILLHYHGNRRHGQPLWDNMRAAALPDKLAHKLDLWRARGKLVRYEWEAFLDPSWLSMYAGFGLMPAAHDPLADYFDTAQMADALDHMREAIRAAAAHARPARDFLARLAGAAMPAGTA

SEQ ID NO: 87532 - protein, 499 aa, Pseudoalteromonas tetraodonis
  REGION 1..499: note = tr|A0A1E3WWD8|A0A1E3WWD8_9GAMM Tryptophan halogenase; OS = Pseudoalteromonas tetraodonis OX=43659 GN=BCD66_09370; PE = 4 SV=1
MQNKQIKDVVIAGGGTAGWITAALLNKVLGNVVNITLVESEQIGTVGVGEASIPPILHLNAALGIPENEFIKATQATIKLGIEFENWRAPQHSYMHAFGDIGKDFPLCEFYHFWLRAKQQGSKTDFWDFSLNYQAAKKHKFTYLKQIPNTQLTGLNYAYHFDATLYGEFLKELTISRGVKRVEGKIAHVHQCEESGFVRALKLDDGQLISGDLFIDCTGLNALLIEQTLNTGFEDWSHWLPCDSALAVQTKSANDPVPYTRSIAHDAGWQWQIPLQHRIGNGLVFSSRHMTDEQAKQQLLDNLPGEPITEPRVIRFKTGRRRKQWHKNVVAIGLSSGFLEPLESTSIHLIQSAVTRLIKLFPHHGVSDALVTEFNKQSITEIEHIRDFIILHYKLTERKDTPFWRQCKQMEIPQSLAHKMDLFKQTGKVVRENDELFAEVAWQQVMIGQGLLPDDYGALADSLTNEQLAELFSNLKTLINSTVEQLPSHTVFLSSLKPK

SEQ ID NO: 87533 - protein, 476 aa, unidentified
  source 1..476: note = Marisediminitalea aggregata
  REGION 1..476: note = tr|A0A1M5RDF4|A0A1M5RDF4_9ALTE Tryptophan halogenase; OS = Marisediminitalea aggregata OX=634436; GN = SAMN05216361_4142 PE=4 SV=1
MSKLFQRDLFETPTNTHGRALKSIWVVGDDVHGLSTAVAFATALKPFGIKVGVVSLTTATAKQASLHSCNGHLFEFHRRYQIPERAFMQSQGVAFFTAMSLATASRPNEPVWLANDTWLPLFNGIELHQVKRWLSDVAPVETSFAAAAAKAGKTVFPSGQQGTLGNSFELGAVVDTKAYCAFLTQHAVERGVTFVTSEDIAFEQCPHSGDITTLVLSNNQRIQCDWVVDATGPQARVIGQALKRPFESWHAYSPISLLGETTEQSASNTPGIAVSVNYTGYQQVQYLGGKKRTATFAVVRSGVGESEAGFREPVSNNCLAVGPAAYHIDVPGMSSLHITHRIIERFLNVVPCLPAPVTWGRAFNRSTKQDCEHLRDFGCLLLSAMATRQQETGKPWQVLPKLSDSLDQALTLFNESARCTVPPDAMIHRQRWLDALALASSNEQAFEPLLNAVSQTSGQQFLQRIATQIQSLVSQC

SEQ ID NO: 87534 - protein, 512 aa, Sphingopyxis sp.
  REGION 1..512: note = tr|A0A0Q7YGF4|A0A0Q7YGF4_9SPHN Tryptophan halogenase; OS = Sphingopyxis sp. Root1497 OX=1736474 GN=ASD67_15110; PE = 4 SV=1
MAKRSILIVGGGTAGWLTAAYLARFFDLARNPRLSITLLASDEIGSIGVGEGAFPTIRNTLQYIGVDESEFVRRASATFKQGIRFDDWVRTPRDGRSSHFLHPFEAPYHGDGHSLVSYWLLQDEATRRPFAEAMTIQNRVAEAQRAPKRPGEEAFGGPLNYAYHFDATRLAQVLSNQARALGVDHLPGTLTGVGLHPESGAIDHVVTAEHGVLTADLYIDCSGFRAELIGALGAPFRSVKHQLFTDRALACKIPYDAPDAPLESYTIAAAHEGGWTWDIGLAGARGVGCVYSSDHLSDDRAADILSGYTGGRSQDVGVRSIPFAAGYRPTPWVKNCVAVGLSGGFLEPLESTGLVTIETAAAMIAEMFPLGGPVAAPARRFNELMTARYENIVNFLKLHYCLSRRDEPFWRDNADPASIPDRLKELLDEWRYRPPGRFDFILDLESFAFFNYQYILYGMEYRTDLTPVREEFPDVAEAERIFARIRSFGAQAAHELPLHRALVDQINAASYA

SEQ ID NO: 87535 - protein, 503 aa, unidentified
  source 1..503: note = Marisediminitalea aggregata
  REGION 1..503: note = tr|A0A1M5ELS2|A0A1M5ELS2_9ALTE Tryptophan halogenase; OS = Marisediminitalea aggregata OX=634436; GN = SAMN05216361_0448 PE=4 SV=1
MSGIKHIVIAGNGLAVNMTALALQQQLPPDINLTLINSAKYADLDCLYGSTSAPDMYAFNLMLNVSEPDLLFNTNSTFCWGNYFDRWAMTPCSWLQGFHLPFPAMRGVGLHHFVTRHGETELASYLINTQADKTGKFAHPPEDNRHPLSRAEYGYQFDASALSALYASKLSSKVTVINASIADVITNPAADSTGNINITGLQLDNGQRIEADLYIDCTGPNAKVYSALEQNSQDANSQQKSARTLFAIHSTLQRGEALPTHRRIRACEFGWQADTYLRDSIQRLTVCTPEQKSQAIDAHGIEASIAMAFSAGHRQQAWTGNCVAIGQAASVIEPLTPAPLMMLMRDIQRLLELIPVTNSMSAEATEYNRRFIADVEHTGLFQGALFALEHLPDSLPEQAYWQQAAQFVQSEKLSRKLTQYHHRGILVKYDLEPFNEQDWLILHSGMQRRPQTYDIVADQVPRAEMANQLNGMGNVIQQVVSQMPPHGIYLEKLMAYLSQKRNQ

SEQ ID NO: 87536 - protein, 498 aa, unidentified
  source 1..498: note = Marisediminitalea aggregata
  REGION 1..498: note = tr|A0A1M5RXJ1|A0A1M5RXJ1_9ALTE Tryptophan halogenase; OS = Marisediminitalea aggregata OX=634436; GN = SAMN05216361_4276 PE=4 SV=1
MNSTQPATKPHVVIAGGGTAGWMTAAALARKLGPLVRITLVESSDIPTIGVGEATIPPLRVFHQLLGINEAEFMRATSATFKLGIEFADFGQLNQRYIHSFGQTGQSSWLAEFIHFWREGLDRGIATDYGSYCLELEAAKANKFYTSAQNAPLNYAYHLDAGAYATFLKHISVQAGVNHVVDTIEQVTLNDAGHIDALQLRQTGNLHGDLFVDCTGFRARLLGESLDVGYEDWSHWLFCDRALAVQTELTPPLKPYTIASAHSAGWRWEIPLKHRMGNGFVYSSQYLDETTAHDTFTALLRNTPLQDVRSLQFTTGRRLKAWHKNCVAIGLSSGFVEPMESTSIHLIVMGITRLMQLFPYSGDYQHLQDEYNAQTQIELERIRDFIVLHYHVTQRDDSAFWRACKDMVIPDSLSERIELFKEHGHAFQKANELFRVDSWSQVMLGQGLLPKNWHPAAKMMSDEQLAGALKKGQMEISQRVAQLPDHEAFVAQYCGQNR

SEQ ID NO: 87537 - protein, 506 aa, Massilia sp.
  REGION 1..506: note = tr|A0A0Q6SXY7|A0A0Q6SXY7_9BURK Tryptophan halogenase; OS = Massilia sp. Root335 OX=1736517 GN=ASC93_17035 PE=4 SV=1
MSLKQLRRVVVVGGGSAGWMVAAALSRLLLRDEGRQHWEIELVESEEIGTVGVGEGTIPAIRAFNAALGISEDEFLRETKGTFKLGIEFVDWNAPGSRYFHGFSDVGRPIDGLPFHQYWLRLRKAGLAHDFADYSVNSVAALQGRFMRPRPDMAHSPLGEIGHAFHFDANRYGRYLRRRAEQQGVVRTEGRIDEVLRDPHNGNIAGLRLAGGRLIEGDLFIDCSGARALLIEQACAAGFEDWSHWLPCDRALAVPSEPALPPSPYTRSTARSAGWQWRIPLQHRIGNGHVYSSAFMQDGDAADVLLSTLDGKPLAEPRLIRFAAGRRKRTWVGNCVAIGLSSGFVEPLESTSIHLVQSAITRLMDLFPHAGLDAADIAVYNRQTQFELERIRDFIILHYKLTTRADSPFWNYCRQMPIPDTLAEKMALFATNARVYRTEMELFREASWVQVMLGQGLVPSGYHPVCDIHPLQRLQAFADDVRDVVRRCVATMPMHADLVAGLAVPA

SEQ ID NO: 87538 - protein, 519 aa, Caulobacter sp.
  REGION 1..519: note = tr|A0A0Q7SUU3|A0A0Q7SUU3_9CAUL Tryptophan halogenase; OS = Caulobacter sp. Root1455 OX=1736465 GN=ASD21_17380 PE=4; SV = 1
MTPSPIGAPIRPSPIRKVLVLGGGTAGWMTAAALSKVLGGQVEVVLIESEQIGTIGVGEATIPPILTFNAMLGIDEREFMRATRATFKLGIEFRDWTRIGDRYIHPFGSFGLDIEALKFHQVWRKVRDQVGPIEDFNLAAVAARQNRFAMPDPDPAKVLSSLKYAFHFDAGLYARFLRGFAEARGATRVEGKVRDVALRGEDGFIQSVTLEDGRVFEADLFIDCTGFRALLIGQTLGGTYVDWSHWLPNDRAVALPCDTGGDGLTPYTRATADKAGWRWRIPLQHRTGNGYVYSSAHIGDDQALDSLLAGLDGPAQADPNFLRFQPGRRDRAWIKNCVAIGLSSGFLEPLESTSIHLIQAAITKLLALFPDTSFDPLEIDEYNRLTAQQVELVRDFIILHFKATERSDTPYWDYLRTMEIPESLARKIDLFAGRGRLFQSDYDLFAEPSWIAVLMGQGIVPRQYDALVDSLPQAALVQRLQRMSALIGQTAQAMPSHQVFIARYCAAEAAANTPVSRPA

SEQ ID NO: 87539 - protein, 496 aa, Caulobacter sp.
  REGION 1..496: note = tr|A0A0Q7UEC5|A0A0Q7UEC5_9CAUL Tryptophan halogenase; OS = Caulobacter sp. Root1455 OX=1736465 GN=ASD21_00195 PE=4; SV = 1
MQEQVVKRVVVAGGGTAGWMAAAALAKQLGPLLEISLIESDEIGTVGVGESTIPTARTFNALLNIDEPAFMRATQATFKLGISFENWGQVGDRYIHSFGQVGKSNWMGSFHHFWLQAKAAGFGGELGDYCFELKAALADKFSVGEGPELNYAYHLDATLYGRFLRQMSEGLGVKRIEGKISQVQQNAETGFIEALVMENGDRVEGDLFIDCTGFRGLLIEQTLKAGYEDWGQWLPTNTALAVQTKSTGPAVPYTRAIAHKAGWRWKIPLQHRVGNGLVYCSDYMSDDEARETLLSALDGERLIEPRLIRYATGRRRKTWHKNCVALGLASGFVEPLESTSIHLIMIGVTRLMQLFPFNGVSDALVDRYNQQAVDELEKIRDFIILHYKLTERTDSPFWDHCRTMTVPDSLAQRIELFRDSAQAYQAPGELFQVDSWLQVMLGQRLQPTGYHQMGRLMPPEQLRGALADLSGNIARAVGALPGHQAFLDRYCGIPAS

SEQ ID NO: 87540 - protein, 497 aa, unidentified; identical to SEQ ID NO: 82350
  source 1..497: note = Mycobacteroides sp.
  REGION 1..497: note = tr|A0A0R3FQP4|A0A0R3FQP4_9MYCO Tryptophan halogenase; OS = Mycobacteroides sp. H002 OX=1720566 GN=AOT84_19605 PE=4; SV = 1

SEQ ID NO: 87541 - protein, 497 aa, Pseudoalteromonas tetraodonis; identical to SEQ ID NO: 83404
  REGION 1..497: note = tr|A0A290TES3|A0A290TES3_9GAMM FADH2 O2-dependent halogenase I OS=Pseudoalteromonas tetraodonis OX=43659; GN = prnA PE=4 SV=1

SEQ ID NO: 87542 - protein, 492 aa, Caulobacter sp.
  REGION 1..492: note = tr|A0A0Q7U904|A0A0Q7U904_9CAUL Tryptophan halogenase; OS = Caulobacter sp. Root1455 OX=1736465 GN=ASD21_00130 PE=4; SV = 1
MGAPSSIVVAGRDAALWLSACVLRAALRPAGVSVTAVELPTRLGVADVHATLPPLEALHGLLGLDEAALLRATRGAFSLGQNFADVSGATPAFFHAHGAYGAPIDNRDFFPFWLKARRLGLDVELDAFSLTAAAARQGRVLLPDEETEAFGRADYGYHLPAIAYAASLKTLAGRLGVEMHQALAVTPTLDADGEIAALDLGEGRCVGGDLFIDATGAEGVLMTALGVARESWRDRFPADRVLRAQGPRLAALPPYADIRAWARGWVGLYPSQAATHVVQVYAGDLCADDQALEMAGRISGQALTDAVVSISDPGRRAQAWAGNCVAVGEAACAFDPVHGVELQAVQLGLVHLLSLFPVAAAFGAERAEYNATIRQVHERLRDFQSAHHLANRYAKAPFWDRARAATASDVLAHKIVVFQARGEIPPSEHETFAADSWRALFSGHGLTPETHAPMIDRTTPETMKGEFRRILGFIKEQVLKQPTHDLYLESFC

SEQ ID NO: 87543 - protein, 503 aa, unidentified
  source 1..503: note = Unknown
  REGION 1..503: note = tr|J9A264|J9A264_9PROT Uncharacterized protein; OS = alpha proteobacterium IMCC14465 OX=1220535; GN = IMCC14465_18450 PE=4 SV=1
MSRDMSADDKSKLRKIVIAGGGTAGWMAAAALSKTLGELVDIKLVESEQIGTVGVGEATIPPIITFHRMLDIAENEFMRETQATFKLGISFENWRVEGEKYIHSFGTTGKDHWTSGFQHFWLNGLKRGHDMAYDDYCLELKAALDNKFSHLPNEGMSYAFHLDSSRYAKFLRGFSEKNGVVRVEGKINKVNLNGETGFISSLDLDNGITLEGDIFIDCTGFRGLLIGEALGIDFEDWTDHLPCNGAIAVQTESVRPAVPYTRSIAHHAGWQWRIPLQHRAGNGIVYCNEFMDENQALDKLLQTVDGKTITDPNFIKFRAGTRKKQWHKNCIAVGLSSGFMEPLESTSIHLIQRNILRFIRMMPFQEISQRDIDEFNNQADLDMETIRDFLVLHYVANERDDPFWKMCASIKMTDSLKQKIELFRETGRVFRHNEELFAENSWIQVMLGQGIMPEAYHPIADKMTDNELNVFLKTIREGVEKTVQNLPMHHDYVKQYCGVKEPA

SEQ ID NO: 87544 - protein, 537 aa, Burkholderia contaminans
  REGION 1..537: note = tr|A0A1E3FVP9|A0A1E3FVP9_9BURK Tryptophan halogenase; OS = Burkholderia contaminans OX=488447 GN=BGI28_10300 PE=4; SV = 1
MSHPIKNIVIVGGGTAGWMSASYLVRALQQQANITLIESEAIPRIGVGEATIPNLQKVFFDFLGIPEREWMPQVNGAFKSAIKFVNWRKSPDRSRDDHFYHLFGSVPNCDGVPLTHYWLRKREQGFQQPMEYACYPQPEALDARLAPCLLDGTRQMPHAWHFDAHLVADFLKRWAVARGVKRVVDEVVEVHLNERGDIASLSTKEGRTLEADLFIDCSGMRGLLINQALKEPFIDMSDYLLCDSAVASAVPNDDARVGIEPYTSAIAMNSGWTWKIPMLGRFGSGYVFSSKFTSRDQATADFLNLWGLSDKQPLNQIKFRVGRNGRAWVNNCVAIGLSSCFLEPLESTGIYFIYAALYQLVKHFPDTGFDPRLRDAFNAEIVYMFDDCRDFVQAHYFTASRDDTPFWLANRHDLRLSDAIKDKVERYKAGLPLTTTSFDDATYYETFDYEFKNFWLNGNYYCIFAGLGLLPDRSLPLLQHRPASVDKAEAMFARIRREAERLRASLPTNYDYLRSLRDGEAGRVRSQPGPVAAPETL

SEQ ID NO: 87545 - protein, 513 aa, Massilia sp.
  REGION 1..513: note = tr|A0A0Q6SJC6|A0A0Q6SJC6_9BURK Tryptophan halogenase; OS = Massilia sp. Root335 OX=1736517 GN=ASC93_17050 PE=4 SV=1
MDGNRVRDVVIVGGGTAGWMTAAALSRLLPDGYRLRLVESDEISTIGVGEATIPNIRNYNHALGIDEDDFIRNTQGTFKLGIEFVDWKNIGESYFHGFGKIGRDLGPLKFYQYWLKLHQAGEAPDLDEFSINTLAPRHAKFMRDIQSAPDSPVADIGYAFHFDAGLYARYLRRYSEARGVVRIEGRIVDTRLRAGDGFIEAVVMENGDRIAGDLFVDCSGMAGLLIEKALHTGFEDWSHWLPCNHAIAVPCASVDPLLPYTRSTARAAGWQWRIPLQHRIGNGHVFSSDFMAPKEAEEILMSNLDGEPLAAPRHIRFTTGKRKKGWSKNCVAIGLAGGFLEPLESTSIHLIQTAIARLVEFFPDKTFNSADIDAFNAQVDFEYERIRDFLILHYKLNERTDSAFWAYCRDMEIPATLQEKIDLFQGHGRILRAGEELFTDVSWLQVMHGQGLRPRGYHPLVDQRSQDDIRKFVTDVRAVIRKCVDVMPTHAEFIRKHCAASTANPVQRSGSVN

SEQ ID NO: 87546 - protein, 492 aa, Massilia sp.
  REGION 1..492: note = tr|A0A0Q6SL00|A0A0Q6SL00_9BURK Uncharacterized protein OS=Massilia sp. Root335 OX=1736517 GN=ASC93_21750; PE = 4 SV=1
MTLSFKRIVVVGGGTAGWMAAAALATALKGSSVELVESDEIGIVGVGEATFPSIRNFHRLLGIDEAEFLRATKGSYKLGIEFRDWRAVGESYFHTFGDFGELSGPNAVWGQYHRLGEASLGALGEQCLSSVMASKGRFMVPRVEHRFDYAYHFDAVLYAAFLRKLAEQRGVRRTEGRIVDVARRADGAIDRLLLADGRVVAGDLYIDCSGFASLLLGRALEEPFVDFSHWLPVDRAWAVPSERIGTELTPCTRATALEAGWAWRIPLQDRIGNGHVFASRYLDEESARAQLLQQLDGPALAEPRLLRFQTGHRARAWVHNVVALGLSGGFLEPLESTSIFLIQRGLGKLIDLLLSGAPLSEPVVADYNGLNARQFARVRDFIILHYCLSARRDSALWRAMTTMELPDTLAFKIHAWRKAGALQQYDLEGFDATSWLAIHAGMGHWPEHTDPSLGDMTRAEALAGLQWRRERIIEAVAAMPTHGAFLRGMLGR

SEQ ID NO: 87547 - protein, 515 aa, Sphingomonas aquatilis
  REGION 1..515: note = tr|A0A511Q4R1|A0A511Q4R1_9SPHN Tryptophan halogenase; OS = Sphingomonas aquatilis NBRC 16722 OX=1219039; GN = SAQ01S_20140 PE=4 SV=1
MTLPVPDHAIRNIVIVGGGTAGWMAAAAFSRLLNTGYTRVTLIESEEIGTVGVGEATIPPLLNFNRMLGIDENEFLAATAGTFKLGIEFRDWGAIGDRYIHPFGTFGQDLQGISFHQLWLRERSRRTIPDITAWSMSAQAAARGRFGRAREDARSPVRELFYAYHLDASLYARYLRGYAERGGVTRIEGRIVDVRLRGEDGYVEALTLADGRQVAGDLFIDCSGFRGLLIEEALHTGYESYAQWLPCDRAVAVPCALPNAREPDPYTRATARAAGWQWRIPLQHRMGNGYVYCSDVLSDEAAEFDLLASLEGGPLGDPRRLRFTAGRRRQSWNRNVIALGLSSGFIEPLESTSIHLVQAGIQRIVAMFPDTRFDPAERDEFNRQLHDLYEDIRDFIILHYAQTRRTDTAFWDRVRTMPLPDSLTRKLDLWRGKGRLFREGYDLFSVPSWVAVCLGQGLVPSTWEPAADALDETLVAEAIETMRRGYADTAERLPTHGDFLRMVAPSPLANWGQTR

SEQ ID NO: 87548 - protein, 513 aa, Caulobacter sp.
  REGION 1..513: note = tr|A0A0Q7UAD9|A0A0Q7UAD9_9CAUL Tryptophan halogenase; OS = Caulobacter sp. Root1455 OX=1736465 GN=ASD21_19510 PE=4; SV = 1
MRPIKNIVIVGGGTAGWLTAGLIAAKHRARMAAGFTVTLVESPNTPIIGVGEGTWPTLRTSLAKIGVSEADFFRECDAAFKQGAKFARWTTGAADDAYYHPLMLPQGFSQVNLAAHWLASGGAQSFCDAVSPQGRLCDDGLAPKTITAGPYQGAANYAYHLDASKFAPFLQRHCCDKLGVRHVLADVQSVAMAEDGDIRGVVTQQRGEIQGDLFVDCTGFRALLLGDALGVPFRDCGDVLFCDTALAIQVPYESETSPIASHTISTAQSAGWIWDIGLPTRRGVGHVYSSRHISDEDAERELRAYIGPAGRDLSARKIPIRSGHRETFWERNCVAVGLAAGFLEPLEASAIVLIELSAKMISEQMPACREVMDVVAARFNATTHYRWGRIIDFLKLHYVLSKRSDSAFWRDNRASETVPERLADLLRLWRHQPPWLHEEFDRVEEVFPTASYQYVLYGMGFRTEIEPEALADERAMAERALRENAVQTDRLLASLPRHRDLIRKIVEHGLQPV

SEQ ID NO: 87549 - protein, 514 aa, unidentified
  source 1..514: note = Marisediminitalea aggregata
  REGION 1..514: note = tr|A0A1M5EM33|A0A1M5EM33_9ALTE Tryptophan halogenase; OS = Marisediminitalea aggregata OX=634436; GN = SAMN05216361_0449 PE=4 SV=1
MKDSTPNILKQITIVGGGSAGWMTAAALSRMLPTGDVKITLVESEQIGTIGVGEATIPDMINFNKLLGISESEFIKATNGTFKLGIEFNDWGKLGDSYFHPFGGHGVDMNGVDFHQYWLHTLAAGNTCDLEDYSICAVAAKQNKFVLPEQNPNSVLSHLRYAYHFDATAYAAYLRKYAEQRGVKRIEGKIASVQQHTDTGNIAGLTLEDGTTVGGELFFDCSGFRSLLLGDTLGVKFRDWSHWLPCNTAQTVATEQTDKVLPFTRSTAKTAGWQWRIPTQQRVGNGHIYCDRFMGHDLARQILLDGLDSKPISEVRTIQFKTGCQEAFWEKNCIGIGLSAGFLEPLESTSLFLIQQGISRFISLYPDAGLHPVIRNEYNRLMTREFEQVRDFIILHYKATTRDDSPFWRYVRDMEIPDSLTHKMTLFQQGGRVFRDDHELFTRSSWVAVMVGQGIFPKTFDPILANIPVADIQRSLNSMKQAMEQSVARLPDHAMFIEKYTAMQPNPTFSMGRQ

SEQ ID NO: 87550 - protein, 498 aa, Sphingobium sp.
  REGION 1..498: note = tr|A0A560X5G0|A0A560X5G0_9SPHN Tryptophan halogenase; OS = Sphingobium sp. AEW013 OX=2572915 GN=FB596_106175 PE=4; SV = 1
MNSGHLRDIVILGGGAAGWIAAALLAKKIDCEQTRITLVESEQIGTIGVGEATVPILAQYNAMVGIDEFDFVRSTQGTFKLGIEFCDWGTAGNRHFHAFSDFGHPVEGISTHHYWLRLRQSGEDYPIEDYSFAYAVGKNNNFAPHNERYHYAYHFDAGLYARYLRDVATELGVQRIEGKMTHFDLDPESGNISAIHLADGQTIPGDFFLDCTGFASELLGKALDTPFVDWSHWLLCNSAIAVPSTRIDTPMPFTRSTAHAGGWRWTIPLQHRNGNGMVYSSDYWSDDAARDELLGSISSEPLAEPRLFRFTSGHRKQFWNRNCVGIGFASSFLEPLESTGIQLIVMGVLKLLRYFPQRVIDPVLRNEYNRLSTIEIERIRDFIIAHYYLSRRPEPLWAACRNIEIPDSLRHKIEIWKASGQIPLGDLESYMEPSWVAILLGNNLVPSRYSVSADKHPLDQIRNGMKLRREEIVRSARAVTSHRDFIDGHCKAVQLEFD

SEQ ID NO: 87551 - protein, 521 aa, unidentified
  source 1..521: note = Litorilituus sediminis
  REGION 1..521: note = tr|A0A4V0ZFU5|A0A4V0ZFU5_9GAMM Tryptophan 7-halogenase OS=Litorilituus sediminis OX=718192; GN = EMK97_04355 PE=4 SV=1
MEKELSRISRVVIVGGGTAGWLAASHLANKLKPLAENGVKVTLIESPNIPTIGVGEGTVPMMRNTLKDLGISETEFFKTCDATFKQGIKFVDWLDNPTPGQASYYHHLFDYPEISHFDVTPYWLKGLAGEKRSFADSVSQQGIVCDAELAPKLITTPEYEGITSYGYHLDANKFSALLTRNAVERHGVEHIQAHVEQVCLNDDGEIASVITKEAGEISGDFFVDCTGFDCLLLGKAMQVPFVDKSDVLFVDHALTIQIPYEKLDEVIPSYTISTAMEAGWVWDIGLLERRGVGHVYSSKYTSHEAAEQALRDYVGPAFDDYPTRLIKMNIGHREKFWHKNCVALGLAQGFVEPLEATGLLVFDATAKMLASQFPTHKENMAIVAKQFNQRIKLSWESVIDFVKLHYYLSRRDDNQFWLDNRKPETTPDTLLERLALWKTQLPNPLDFYSGYEIFKLENYLYVLYGMEFDTDIEALSHRYPDIDKAKQFFTAMENSAHALTKTLPSNRELVNKILKFGLQKI

SEQ ID NO: 87552 - protein, 511 aa, Novosphingobium sp.
  REGION 1..511: note = tr|A0A2V5BC21|A0A2V5BC21_9SPHN Tryptophan halogenase; OS = Novosphingobium sp. GV010 OX=2135477 GN=C7493_101507; PE = 4 SV=1
MRQLVIMGGGTAGWMTAATLARALPRDWSITLVESADIGIIGVGEGSFPTLRSTLARIGEGLPGGDERSFMRAARATFKQGVRFVGWAGKPGADDYFHPFDLPRDGADDALLPFWLDSGVDPRRPSWASALTVQEAVIRAGRAPKRAADPDFTGPLNYAYHFDAVALAAWLRQMAEARGVRRIESTIGSARLHADGRIAAIVPQDGAPEIAGDVFIDCSGLAAKLIGETLGSPFVPLGDVLFNDRAIAMQIPAADQPIAPYTLATAHDAGWIWDIALPDRRGTGCVYSSAHMSDDEAEATIRRYAGPAGKTLSTRRLQFQTGYRARQWIGNCVAVGLSAGFFEPLESTGIMLIEVAAHMLGEMLAVPLTPAVMEASARSYNRHMVARFAAIADFLKLHYCISDRRDTAYWRDNTDPASWTATLRDRIEQWRHRTPSRFDFVVDHETFLPPSWGYILHGMGFATQAGLGAIERDPAGAGNALSAVGALRAAAPQAIAALPDHRALIDQIHRS

SEQ ID NO: 87553 - protein, 521 aa, Xanthomonas arboricola
  REGION 1..521: note = tr|A0A2S7AEU0|A0A2S7AEU0_9XANT Tryptophan halogenase; OS = Xanthomonas arboricola OX=56448 GN=XarjCFBP7645_12165; PE = 4 SV=1
MTDTAPSDPQQRPVRRVVIAGGGTAGWMAAAALSKVLGRHLQIVLVESDEIGTVGVGEATIPSLVTFHRLLEIDEAAFMAATQATIKLGIGFEHWRDVDRHYIHSFGHTGTDHWSAGFHHFWLKGRQRGVARDFGDYCLELRAAQEGRFAHLPNGGMNYAYHLDAGLYARFLRRFSEGFGVQRIEGRIGNVETDPHSGYLTALMLDNGTRVEGDLFLDCTGFAGLLIGKTLGVGTDDWSQWLFADSALAVQTESVGAPVPYTRSRADRAGWMWRIPLQHRVGNGIVYSSRYMDQDSAAQALQRNLSGRALTQPRALRFTPNQRHRVWEKNCVALGLASGFLEPLESTNIHLIQRGIIRLMQTFPQVINDVDIAEYNRQAAAEITHIRDFVILHYHATDRRDTPFWRDCAAMDIPDTLRHRVELFRQSGRVFHQANELFAENSWVQVMLGQGITPKQHHPVADLMGDAELRHFLESIRTRVDAALARLPAHADFLRRYCPAPPLPEPATGLPADAALATGAE

SEQ ID NO: 87554 - protein, 498 aa, Sphingopyxis sp.
  REGION 1..498: note = tr|A0A0Q7Z229|A0A0Q7Z229_9SPHN Tryptophan halogenase; OS = Sphingopyxis sp. Root1497 OX=1736474 GN=ASD67_13795; PE = 4 SV=1
MSARTRPVRRIVIVGGGSAGWMTAAALGRALAGQDRTITLVESETIGTVGVGEATVPPIHEFNRYLRMDPADFLRATHGTIKLGIAFDGWGGADNSYFHPFGYLGVEMAGVHFHHYWLRHLAAGGDPDHGPYNLETMAARAGRFAPATRHGPVHHAVHFDAAAYARFLRAYAEDKGVARIEGKVADVSLDPEDGYIEALTLDDGRRIVEGDLFIDCSGFRGLLIEGALQTGYTDWNHWLPCDSAVAMPTERSGDPPPFTRSTARAAGWQWRIPLQHRDGNGYVYSSAHLGHDDAEAALRANLSGAPLADANRLRFTAGHRKHIWNRNCVAIGLAGGFLEPLESTSIHLIQTTIIRLLALLPRDGFDPHVVARFNRDALHEYAVIRDFVIAHYATANRDDTPFWRDVVAAGVPDSLAERIEAYRATGNILFEPGDLFGPTNWYAVLTGQGVKPRSWHPIADGLSSEDLSARLATLRGRVAEQLSELPPHSEFLRRLSAV

SEQ ID NO: 87555 - protein, 513 aa, Novosphingobium sp.
  REGION 1..513: note = tr|A0A2V5BY78|A0A2V5BY78_9SPHN Tryptophan halogenase; OS = Novosphingobium sp. GV010 OX=2135477 GN=C7493_10639; PE = 4 SV=1
MQATRDRQDERAIRSIVIVGGGSAGWMTAAALANSLQQGCAITLVESEEIGIVGVGEATIPTIRLFNDMLGIDEAEFIRATHGSFKLGIQFVDWSAPGARYFHPFGSYGKAFDTVAFHQFWLAARHTQGIDNLDHYCMAWTLAEAGKFAPPSRDPRTVLSTYDYAYHFDAARYAAFLRRYAEAKGVTRLEGKVASVTQHGDTGFVESVTLTDERVVTGDLFIDCSGFAGLLIEKTLRTGYEEWSHWLPCDRAVAVPSAPTADILPYTRSTARNAGWQWRIPVQGRIGNGYVYASRFIDDDTATRDLLRSLDGKALADPRPLRFTTGRRRQAWNRNVIAIGLSSGFLEPLESTGLHLIQANISKLLAFFPDKDFDPLVIAEFNHVAATETERIRDFLVLHYHLTTRDEPLWRHTATMPIPDTLATRIDHFRRYGRLISRDMDLFGPASWTAVHIGQGNLPRACDPLKTYRTADGVQWLTRFRNAMQAEAAQVSSHRAYIETHCAARESTAVVGV

SEQ ID NO: 87556 - protein, 497 aa, unidentified
  source 1..497: note = Marisediminitalea aggregata
  REGION 1..497: note = tr|A0A1M5N9D3|A0A1M5N9D3_9ALTE Tryptophan halogenase; OS = Marisediminitalea aggregata OX=634436; GN = SAMN05216361_3130 PE=4 SV=1
MHTSAIHHYVIAGGGTAGWMTAALLGKLLNGTGARITLVESPDQPGVGVGEATVPSFVDFIKLLGIDEQTFVKATQATFKLGIQFSHWQTTGHSYWHPFGHVGARIDGKPFFQQWLHAHRSGLTQTYTDFSASARMAQENKFYIPNPQQPNNLSQMGYAYHFDAQQVAVFLRDFAVSKGVVHKQAHIEHVQMCPDNSAIQRLITRTGEHIDGDFFIDCTGTQARLMGQALNTGFTDWQRYLPVDRAWVVQTENTEEPVPYTKAIAEPMGWRWQIPLQHRTGNGLVFCSQYTSPDEAKRYLQTQLTTPLLNEPRLLTFKTGHLEQFWRSNCVAIGLSAGFLEPLESTGIYLIMRGILNLAKLLPSSPPCKATIHEYNQLMLAEYQHIRDFIVLHYCVSLRNDTCFWQSWQQREIPTTLAHKLALYRTRGVVSHGQSDLFADHSWHAVATGMNVLPRDVDPIVATTDIKPLHDLLARIDHALAHSVGQLMPHGEYLKAW

SEQ ID NO: 87557 - protein, 506 aa, Rhodanobacter lindaniclasticus
  REGION 1..506: note = tr|A0A4S3K9Y6|A0A4S3K9Y6_9GAMM Tryptophan halogenase; OS = Rhodanobacter lindaniclasticus OX=75310 GN=B1991_16715; PE = 4 SV=1
MAESCIRNVVIVGGGTAGWMTAAALARTFGAQLAVRLVESSEIGTVGVGEATVPHLKLFNNLLQIDEIEFIRRTSATFKLGIQLNDWHHLGDSYIHGFGTTIGRGLGLLPFHQYWLKAARAGRAGPLGDYTVHTLAAPRGKFMSSASDVPRDSPLADIPYAYHMDTARYALFLREYAAARGVRRTEGKVAEVKLRPDDGFVESVVLEGGEVVAGDLFIDCSGFRGLLIEQALHTGYIEFKDWLPCDRAVVVRTESVGPPPPFTRANAQAAGWQWRIPLQHRTGNGHVYSSAYISDDEATATLLRNIQGRPLGEPFQLRFTAGMRRKLWNRNVVAIGLSGGFMEPLESTGIHLIQMGITRLLGLFPRDGFDPVLSERYNAQLKFDTERIRDFLILHYHATEREDTPFWQQCQHMSVPPSLQDNIDLFADSGRFFRNADELFAEISWVQVMIGQGIVPRSWHPLVDQVPETDLYRFVDDVARLMADCVEVMPSHQAFIDRHCAIARAG

SEQ ID NO: 87558 - protein, 499 aa, Sphingopyxis sp.
  REGION 1..499: note = tr|A0A0Q7YW23|A0A0Q7YW23_9SPHN Tryptophan halogenase; OS = Sphingopyxis sp. Root1497 OX=1736474 GN=ASD67_01295; PE = 4 SV=1
MTDPIRTIVIVGGGTAGWMAAAAAARFLNDGQRRILLVESDAIGTVGVGEATIPPIRDFNNMLGIDEAEFLRETGATFKLGIEFVDWGALGERYLHPFGDPGHNFEGIAFHQYWLKHRHDPRIGPFTDYFITAAAVRHRGCAPQSGDPRSPLHQMAAAYHFDAALYASYLRRRAEAQGVERIEGRITGVARDGGSGHVAALRLADGRDVAGDFFIDCSGFVSLLLGKEMGVAYRDWSRWLPCDRAFAVPSARTDPLIPATRATAHGFGWQWRIPLQHRTGNGIVWSSAHAGDDEARDTLLANLDSEELAEPRQLRFTAGVRERLWEGNVVALGLAGGFIEPLESTSIHLIQTGINKLFWLFPDRRFSAVERDEYNRLMIDQYEYVRDFIILHYKATARTDTSFWRDMAAMEIPDSLAQKIELFRTKGRIRRFDHDLFGVANWAAVMLGQNIVPDGYDPLVDATDDDRIIAAMQRIASVFDQQARAMPPHADYIARLVAR

SEQ ID NO: 87559 - protein, 484 aa, Sphingopyxis sp.
  REGION 1..484: note = tr|A0A0Q7Z6C1|A0A0Q7Z6C1_9SPHN Tryptophan halogenase; OS = Sphingopyxis sp. Root1497 OX=1736474 GN=ASD67_01315; PE = 4 SV=1
MTAAALAKLLPGQADIQLIESEEIGIVGVGEATLPHLREFIRRLGLDEMEFMRTTRATFKLGIDFVDFGAIGERYIHPFGAYGTDIAGVGFHHYWLRMQAAGQVPPICDFSLPIVAARGKRFAPVPEGGDLLDSSYSYAYQFDATRMAPMLRRFAEAHGTRRTEGKVVAVERDGASGDVARLRTDRGDVIGGDLFIDCSGFRALLIGETLKSPWEDWSEWLPCDRAAALPCAAPDGPIEPYTRATAMPAGWRWRIPLQHRVGNGYVFSSNHVSEDEACAAILGAVEGEPLADPRVLRFRAGRRTKSWDRNVVAIGLASGFLEPLESTSIHLVQQAVTRLVELFPERRIDPADRDSFNALVDREYDRIRDFLILHYHATRRDDSDFWSHVRTMALPDELARKMALWKESGRVELYTEGLFLEASWIAVYLGQGVVPQGYDQRADIPPQDRIAASLAELGGAIRQRVAAWPDHAEYLRQAGAWEAA

SEQ ID NO: 87560 - protein, 514 aa, unidentified
  source 1..514: note = Sphingomonadales bacterium
  REGION 1..514: note = tr|A0A1G3JLH6|A0A1G3JLH6_9SPHN Tryptophan halogenase; OS = Sphingomonadales bacterium GWF1_63_6 OX=1802168; GN = A2095_07010 PE=4 SV=1
MVHPVRNIVIVGGGTAGWLTAGIIAARHRTRIGQGFSVTLVESPNTPIIGVGEGTWPTLRTTLSRMGVSESDFFRECDAAFKQGARFDRWTTGAVDDGYYHPLMLPQNFGQVNLAPHWLASNQGESFCDSVSAQGRICDDGLAPKTIATAEYDALANYAYHLDAGKFAPFIQRHCCEKLGVRHVLADVEQVLMHENGDIRAIQTAQAGEIEGDLFVDCTGFKALLIEGAMNVPFKDCNDVLFCDTALAMQVPYERPDSPMASHTISTAQTSGWIWDIGIQTRRGVGHVFSSSHSSDEEAERELRAYIGPAADGLNARKIKIRSGHRETFWKGNCVAVGLAAGFLEPLEASAIVLIELSAKIIAEQMPACREVMDIISSRFNATTHYRWGRIIDFLKLHYVLTKRTDSDFWRDNVRDETIPDRLKELLLLWRYQSPWFHDEFDRAEEVFPAASYQYVLYGMGYHTEVDAASLSRDHRLADRARRENAALTDKLCAGLPRHRDLINKIVAHGLPPV

SEQ ID NO: 87561 - protein, 514 aa, Massilia sp.
  REGION 1..514: note = tr|A0A0Q6S3L2|A0A0Q6S3L2_9BURK Uncharacterized protein OS=Massilia sp. Root335 OX=1736517 GN=ASC93_27135; PE = 4 SV=1
MSYQSIAIVGGGTAGWLAACYLQRALNGNPAHPVRITLIESPDVAAIGVGEATVPTLRMMLRTIGIPEAALFASAEATLKNGIRFVGWHDGTDSFDHPFDMPIVADGYSTMTHWLNLKQRGLTRQPFGEAGVVQPALMDALRSPKLMSSAPYEAPVPYAYHLDAVLLARLLRDTAKERGVVHVEGTVEQVDVDETGIRAVCLADGTRHAADLFVDCTGFASLLLGKTLDVPFHSYADTLLCDRALACPVAHEASDAPLRSHTVATAQDAGWTWDIELQTRKGTGYVYSSRHCSDDEALATLRRYNAGRTELAEPRLLRMRVGRHTRMWEKNCLALGLAGGFIEPLESTGIYLIEYALQMWLDYLPTPAGAAPMRDRYNMLMAEHYDELHDFVLAHYVLSARRDTAFWRACTEEVKVSDRLAALLALWKHKLPGTADIDARRQVLFGPHNWFFILAGQRCLPEHGIGQMPYIAPERSQAALARIAEIRKAAVSQSPSMREYAQKIRAAAANAPRR

SEQ ID NO: 87562 - protein, 520 aa, Xanthomonas arboricola
  REGION 1..520: note = tr|A0A381LV49|A0A381LV49_9XANT Tryptophan 7-halogenase OS=Xanthomonas arboricola OX=56448; GN = CPBF424_38460 PE=4 SV=1
MTDTTPADPQQRPVRRVVIAGGGTAGWMAAAALSKVLGRHLQITLVESDEIGTVGVGEATIPSLVTFHRLLEIDEAAFMAATQATIKLGIGFEHWRDVDRHYIHSFGHTGTDHWSAGFQHFWLKGRQRGVARDFGDYCLELRAAQEGRFAHLPNGGMNYAYHLDAGLYARFLRRFSEGFGVQRIEGRIGSVETDAHSGYLTALTLDNGMRVEGDLFLDCTGFAGLLIGKTLGVGTDDWSHWLFADSALAVQTESVGAPVPYTRSRADQAGWMWRIPLQHRVGNGIVYSSRYMDQDSAAQVLQRNLSGRALSQPRALRFTPNQRHRVWEKNCVALGLASGFLEPLESTNIHLIQRGIIRLMQTFPQVINDVDIAEYNRQAAAEITHIRDFVILHYHATDRRDTPFWRDCAAMDIPDTLRHRVELFRQSGRVFHQANELFAENSWVQVMLGQGITPKQHHPVADLMGDAELRHFLETIRTRVDAALLRLPAHADFLRRYCPAPLPEPATRLPTDTALVTGAE

SEQ ID NO: 87563 - protein, 524 aa, Caulobacter sp.
  REGION 1..524: note = tr|A0A0Q7TFT2|A0A0Q7TFT2_9CAUL Tryptophan halogenase; OS = Caulobacter sp. Root1455 OX=1736465 GN=ASD21_05225 PE=4; SV = 1
MTKPINEVLIVGGGTAGWITAAYLARKLGANRPDGVKITLIESSEIGIIGVGEGTIPTIQTTMREIGIDEARFMRGAGATFKQGIKFVDWTTAPVGGAHSHYYHSFSRPHTLGGLDLAPYWMLGCAGDAPFSEAVTLQDTVCEAGKGPKLIDDPQYSSPLGYAYHFDAGKLATLMRDVGKELGVRHLIGNVEGARLDETGAIAAIVTREHGELTAGLYVDCSGFSAKLIGEAMGVAFVDDSDTLFVNRAVAIQVPYDRADAPVATTTISTAREAGWTWDIGLPERRGVGYVYSNNHTSDDRAEEVLRAYVGPAAEGLNARQLKLPIGHRQKLWVKNCVAIGLSGGFLEPLEATGIMLIEAAAWMLGRLFPRSGELEPTAAQFNEAMGLRYKGVLDFIKLHYCLTQRTDNDFWIDNARPESIPDSLRALLEMWKTRAPDPFDFGTVHDSFEVFNYQYVLYGMGFKTDLSANLSAYPHLEAARREFARLKNAAGRAAAAMPDHRTLLDEIYRSGFRRPTPLGAAAR

SEQ ID NO: 87564 - protein, 530 aa, Saccharopolyspora shandongensis
  REGION 1..530: note = tr|A0A1H3BEN2|A0A1H3BEN2_9PSEU Tryptophan halogenase; OS = Saccharopolyspora shandongensis OX=418495; GN = SAMN05216215_1010152 PE=4 SV=1
MEDHRIKDVVVLGGGTAGWMTAAYLGKALGQHARITVLEAPSIPKIGVGEATVPNLHKTFFDFLGLSEEEWMRECNASFKMGIKFINWRTDGTGQADARPHGGGTDHYYHLFGILPNHENLPLSHYWAAKKLSGQTDEAFDYACYREPAIIDQKLSPRHSDGTKWTNYAWHFDAHLVADFLRRFATQKQGVVHVEDEMVDALIDQRGHITALKTKAGRTIEGDLFIDCSGFRSLLINKVMREPFLDMSDHLLNDSAVATAVPHDDETNGVEPYTSSIAMSSGWTWKIPMLGRFGTGYVYSSRFADADTATAEFCRMWGLDPETQPLNHVKFRVGRNRRAWVKNCVSIGLSSCFLEPLESTGIYFITAALYQLGKHFPDKRFDPVLADSFNREIEIMFDDSRDFLQAHFTLAPRTDTPFWRACKELELADDIKHKIAAYRAGLAINMPITDEVNYYANFEAEFRNFWTNSSYYCVFAGLDVLPSHPLPAMTYRPDAFEGAEAVFAEIKRSRAELVAKLPSTYEYLRNLHGR

SEQ ID NO: 87565 - protein, 517 aa, Rhodanobacter lindaniclasticus
  REGION 1..517: note = tr|A0A4S3KH05|A0A4S3KH05_9GAMM Tryptophan halogenase; OS = Rhodanobacter lindaniclasticus OX=75310 GN=B1991_07190; PE = 4 SV=1
MRHDQRGEFDVGTHRIRKVVVAGGGTAGWIAASALAYQLKDQLEVTLVESSAIATVGVGEATVPPIRNFHRFMNIDEQEFLRAVAGTFKLSISFENFVRPGHRYIHPFGITGKGTLVAGFEHFWLDSLRRGMKSELHNYSLEAMASLGNQFALTDEPEINYAYHMDAALYVKFLREKFQPCGIRQIDGKIKEVRQHPESGYVEALVLEGGQVIEGDLFIDCTGFRGLLIEQTLETGYEDWHNWLPCDRAIALQTKSVDPSPVPYTRAIAHEAGWRWHIPVQHRVGCGLVYDSRHMSDDEAQAKLLRDVGAEPVRDPWPVRFRTGRRLKAWNKNVVALGLASGFIEPLESTSIHLAMSAVMQLVELFPSEGIPDSLVRIYNDNCRRELEHVRDFIILHYHANQRDEPMWKGCREMSLPDSLQIRIDAWRDRAHVWRDQSELFATTSWIHVLLGQGVMPKQHHPLPRELSDADLRRLLDSIRGPIDRAVPRMPLQQVFIDRYCKAAPEVWNMKRPTATA

SEQ ID NO: 87566 - protein, 530 aa, Rhodanobacter lindaniclasticus
  REGION 1..530: note = tr|A0A4S3KHW9|A0A4S3KHW9_9GAMM Tryptophan halogenase; OS = Rhodanobacter lindaniclasticus OX=75310 GN=B1991_06425; PE = 4 SV=1
MPRIKKVLVVGGGTAGWLAACYLAKAMNSAAPDSVQVELVESPNIRLLGVGEATFPSIRGTLAAIGLDERRFLVGATATFKQGIQYVNWVRPPGTPGADRFFHPFNTPSRRPGSPELLPYWLLGAAPAGTPFAEAVTMQSRLVEHGRAPKHASDADYQAPMNHAYHFDAAAFAATLAEHGQGLGVKRHLATVERTELDERGNIARVVTAELGALTADLYVDCTGLRGSLIGGAMRSAFRSRRDVLFVDRAVALQVPYPAPDTPILPYTRATAQSAGWIWDIGLQQRRGIGHVYSSRHMDATQAEEIARRYVGAAADKLEAQHLKFETGYRPEHWRGNCVAVGLAGGFVEPLESTGIALVELAVCMLTHLFPADHDDMERTARRFNEMMVARYERIIDFIKMHYCLSQRRDSAFWIDNSNPASIPQSLRDRLQLWRRRPPHRLDFVTDLEMFMPASWQYVLYGMEFKTDLEHARSAWPQMDEARREFAMIQQMAGRALQDLPDHRALVEQLCRQHAQRNPVRAGEPVAIGG

SEQ ID NO: 87567 - protein, 506 aa, Xanthomonas arboricola
  REGION 1..506: note = tr|A0A381LVN6|A0A381LVN6_9XANT Tryptophan 7-halogenase OS=Xanthomonas arboricola OX=56448; GN = CPBF424_40290 PE=4 SV=1
MLPAPLRNIVIVGGGTAGWMAAAAFARVLGPGFKVQLIESEQLGTVGVGEATVPHIKAFNNLLGIDEAEFVRQTQGSFKLGIEFVDWQRPGTSYIHGFGTQIGHPLGLLPFHQYWIKQRARGKAQPLGAYTLNTVAAVRGKFMTSAGDVPANSPLANIAYAYHFDATQYARFLRTYSEQRGVTRIEGLVEQVQLHADTGHVQSLQLASGQVVSGDLFIDCSGFRGLLIEEALHTGYHDFTHWLPCDRALAVPSENVGPPTPYTRSTARAAGWQWRIPLQHRTGNGYVYSSAHISDDEAAATLLANLEGTPLADPRPLRFTTGRRKQFWNRNVVALGLASGFLEPLESTSIHLIQAGISRLLELFPREGISPVLVQRYNDRLAFEFDRIRDFLVLHYHATERDDSAFWRHCRTMPITPELQTTLDLFRDSGRFYRNAEEMFAEISWVQVMIGQGILPQGYHPLVDQVPDHDAERFLASVAQTIGHCVDVMPTHQQFIDRYCKAAAPR

SEQ ID NO: 87568 - protein, 521 aa, Xanthomonas arboricola
  REGION 1..521: note = tr|A0A2S6YV53|A0A2S6YV53_9XANT Tryptophan halogenase; OS = Xanthomonas arboricola OX=56448 GN=XarjCFBP7652_07440; PE = 4 SV=1
MTDTAPSDPQQRPVRRVVIAGGGTAGWMAAAALSKVLGRHLQIVLVESDEIGTVGVGEATIPSLVTFHRLLEIDEAAFMAATQATIKLGIGFEHWRDVDRHYIHSFGHTGTDHWSAGFQHFWLKGRQRGLARDFGDYCLELRAAQEGRFAHLPNGGMNYAYHLDAGLYARFLRRFSEGFGVQRIEGRIGNVETDAHSGYLTALTLDDGTRVEGDLFLDCTGFAGLLIGKTLGVGTDDWSQWLFADSALAVQTESVGAPVPYTRSRADQAGWMWRIPLQHRVGNGIVYSSRYMDQDSAAQVLQRNLSGRALTQPRALRFTPNQRHRVWEKNCVALGLASGFLEPLESTNIHLIQRGIIRLMQTFPQVINNVDIAEYNRQAAAEIAHIRDFVILHYHATDRRDTPFWRDCAAMDIPDTLRHRVELFRQSGRVFHQANELFAENSWVQVMLGQGITPKQHHPVADLMGDAELRHFLETIRTRVDAALARLPTHADFLRRYCPAPPLPEPATRLPADAALVTGAR

SEQ ID NO: 87569 - protein, 505 aa, Xanthomonas arboricola
  REGION 1..505: note = tr|A0A2S7AGJ9|A0A2S7AGJ9_9XANT Tryptophan halogenase; OS = Xanthomonas arboricola OX=56448 GN=XarjCFBP7645_01445; PE = 4 SV=1
MSQAPIRRVVIAGGGTAGWIAACALSHQFRELLEITLVESEQIGTVGVGESTVPPIRTFHRFLQIDEQEFLRAVAGTFKLSISFEHWRRQGERYLHPFGITGQSTLVCAFHHLWLESQRRGMPGSFGDYCLETVASRVDRFALLREPAVNYAYHLDAALYARFLRARSEACGVKRIEGRIQQVTLQPDSGDVASLLLEDGQLLEGDLFIDCSGFRGLLIEQALHTGYEDWSHWLPCDRAVAVQTEALGPPVPYTRAIAHEAGWRWHIPLQHRVGNGLVFSSRHLSDDEAHARLLRDVAAPALKDPWLVPFRTGRRRKAWNRNVVSLGLASGFIEPLESTSIHLTIAAVVRLITLFPAEGIAPSQVELFNDISRAEMEHVRDFIILHYHATQRDEPLWRQCRAMELPDSLTLRLRAWRERAHAWQAADELFRVDSWTHVLMGQGIVPEQHHPLARAVSDRDLRRLLDGIAQPIRHAVDQMPAQQAFIDAYCKAGASVWGLRSPVGT

SEQ ID NO: 87570 - protein, 485 aa, unidentified
  source 1..485: note = Alphaproteobacteria bacterium
  REGION 1..485: note = tr|A0A1F3AIP4|A0A1F3AIP4_9PROT Tryptophan halogenase; OS = Alphaproteobacteria bacterium RIFCSPHIGHO2_12_FULL_63_12 OX=1797224 GN=A3E78_15075 PE=4; SV = 1
MTASALAKSFGPRLRIELLESDEIGTIGVGEATIPTIHWFNQLVGLDEAEFLRATMASYKLGIEFVDWTRPGGRYIHPFGYYGITLPGVSFFPRWLKARREGRAAELARYSMAGELARAGRVAFPVDDQKSILSTLGYAYHFDAGLYGRHLRTIAEANGAVRHEGKLAQVERDPESGFVTALTTERGERFDGDLFIDCSGFRALLIEGALGAGFEDWSHWLPCDRAVAVPCEKVDGITPFTRSTARAAGWQWRIPLQHRTGNGYVYSSNYISDVDAARVLLENLDGVALADPRIIRFKAGRRRKCWDRNVVAIGLSTGFLEPLESTSLHLIQSGIAKLLSLFPDRDCDPGLAAQFNRLFAADMDNIKDFIILHYHAAPEKKDPLWEYCRHMPIPENLSQRIEDFRRSGRLMLGTDDLFKETSWVAVLHGQGIEAGSYHPLTDTLDSDLNAAQLAQIEQVIARSVPTLPLHEDALKAMLAGGAARR

SEQ ID NO: 87571 - protein, 500 aa, Sphingopyxis sp.
  REGION 1..500: note = tr|A0A0Q7Z5N3|A0A0Q7Z5N3_9SPHN Tryptophan halogenase; OS = Sphingopyxis sp. Root1497 OX=1736474 GN=ASD67_01385; PE = 4 SV=1
MEATRIQSIVIVGGGTAGWMTAAALARILGPDYASITLVESDEIGTVGVGEATIPQINIFNRMLGIDEDDFVRRTKGSFKLGIEFVDWGGIGQRYFHPFGNIGVDMGGVSFHAFWQRLRGEAEFADVEDYSVMAKAARHGKFMRPTTAPGSLLSSIAYAFHFDAGLYALYLRELAEGSGVTRIEGKITGVTRNGETGHIENVTMHDGRTVGGQLFIDCSGFAGLLIGRELGVPYIDWSAYLPCNRAVAVPCELGEDFSPYTRSTARSAGWQWRIPLQHRVGNGHVYCSDYIGDDEAAAVLLANLGGKPLADPRFLKFTTGHRARFWEKNCVSIGLSAGFMEPLESTSIWMIQTGIARLLSNFPDTGFEAASIDRYNRLMVEESELVRDFLVLHYHVTTRDDSDFWNYCRTMPIPDRLAEKIRVFQSSGRAFREHEELFNDTSWFAVMEGQRLGARRYDPVAELMPIEQTRDRLRQIKAAVTASVDHMPRHRDYIRDHCAA

SEQ ID NO: 87572 - protein, 520 aa, Xanthomonas arboricola
  REGION 1..520: note = tr|A0A2S6Y7M0|A0A2S6Y7M0_9XANT Tryptophan halogenase; OS = Xanthomonas arboricola OX=56448 GN=XarjCFBP7653_15850; PE = 4 SV=1
MTDTTPADPQQRPVRRVVIAGGGTAGWMAAAALSKVLGRHLQITLVESDEIGTVGVGEATIPSLVTFHRLLEIDEAAFMAATQATIKLGIGFEHWRDVDRHYIHSFGHTGTDHWSAGFQHFWLKGRQRGVARDFGDYCLELRAAQEGRFAHLPNGGMNYAYHLDAGLYARFLRRFSEGFGVQRIEGRIGSVETDAHSGYLTALTLDNGMRVEGDLFLDCTGFAGLLIGRTLGVGTDDWSHWLFADSALAVQTESVGAPVAYTRSRADQAGWMWRIPLQHRVGNGIVYSSRYMDQDSAAQVLQRNLSGRALSQPRALRFTPNQRHRVWEKNCVALGLASGFLEPLESTNIHLIQRGIIRLMQTFPQVINAIDIAEYNRQAAAEITHIRDFVILHYHATDRRDTPFWRDCAAMDIPDTLRHRVELFRQSGRVFHQANELFAENSWVQVMLGQGITPKQHHPVADLMGDAELRHFLETIRTRVDAALVRLPAHADFLRRYCPAPLPEPATRLPTDAALVTGTR

SEQ ID NO: 87573 - protein, 510 aa, unidentified
  source 1..510: note = Alphaproteobacteria bacterium
  REGION 1..510: note = tr|A0A2N3DID6|A0A2N3DID6_9PROT Tryptophan halogenase; OS = Alphaproteobacteria bacterium HGW-Alphaproteobacteria-14 OX=2013660 GN=CVT75_00425 PE=4; SV = 1
MAERGVEKLVIVGGGTAGWITAAAFARLLGQRLTIELVESEAIGTIGVGEATIPQIIRLNTILGLDEHEFLRRASGTYKLGIEFVDWGRIGSRYLHTFGDTGMNLGNVAFHHYWRRSVMGEAAPDARGLWHYSLHQLAADQARFGKLDRVGSTAMAGLAYAYHFDASRYALHLREYAEARGVTRTEGMVESVERDGTSGDITAITLAGGKRVTGDFFVDCSGFRALLLGDALGVGYQDWSHWLPCDRALAVPSERLPTLVPFTRATAKDAGWQWRIPLQHRTGNGHVYSSGFTTDDAAADTLLAGLDTKPLGDPRPIRFTTGRREALWAHNCVGVGLSSGFLEPLESTSIHLIQSHVSRLIQLFPRAKNAAAERAEYNRRCMAEFDQIRDFLILHYHRTDRDDTEFWRYCRNMAVPDSVTHKLELFSASGRVGRDADDLFREASWVQVMLGQGIMPADYDPMADQIAPSQLAEFLANLRTLIERSVAGLPNHAEYVQRHCPADTGSITAR

SEQ ID NO: 87574 - protein, 505 aa, Xanthomonas arboricola
  REGION 1..505: note = tr|A0A0E3UE61|A0A0E3UE61_9XANT Tryptophan halogenase; OS = Xanthomonas arboricola OX=56448 GN=XB05_09710 PE=4 SV=1
MSQAPIRKIVIAGGGTAGWIAACALSHQFRELLEITLVESEQIGTVGVGESTVPPIRSFHRFLQIDEQEFLRAVAGTFKLSISFEHWRRQGERYIHPFGITGQSTLVCAFHHLWLESQRRGMPGSFGDYCLETVASRVDRFALLREPVVNYAYHLDAALYARFLRTRSEACGVRRIEGRIQQVTLQPDSGDVASLLLEDGQVIEGDLFIDCSGFRGLLIEQALHTGYEDWSHWLPCDRAVAVQTEGLGPPVPYTRAIAHEAGWRWHIPLQHRVGNGLVFSSKHLSDDEAHAKLLRDVAAPALKDPWLVPFRTGRRLKAWNKNVVSLGLASGFIEPLESTSIHLTIAAVVRLISLFPADGIAPSQVELFNDISRAEMEHVRDFIILHYHATQREEPLWRQCRAMELPESLALRLRAWRERAHAWQAADELFRVDSWTHVLMGQGILPEQHHPLARALSDRDLRRLLDGIAQPIRHAVEQMPSQQAFIDAYCKAGAGVWGLRSPVVT

SEQ ID NO: 87575 - protein, 501 aa, unidentified
  source 1..501: note = Alphaproteobacteria bacterium
  REGION 1..501: note = tr|A0A2N3D337|A0A2N3D337_9PROT Tryptophan halogenase; OS = Alphaproteobacteria bacterium HGW-Alphaproteobacteria-14 OX=2013660 GN=CVT75_11625 PE=4; SV = 1
MQIQRIIIVGGGTAGWMAAAALSRIKAGRPVEITLIESEAIGTVGVGEATIPPFVGFNDLLGVNEAEMLAAVGGTFKLGIQFENWNRIGDSYIHPFGAYGYTMGGISFHHVWHRMANAGDKRPIQVFNLETMAAYFGKFARTQDFARDDLPPVNYAYHLDATRYAAFLRRFAEARGVVRQEGRIADVALDGETGFVTTVTLDNGQQFAGDLFIDCSGFRGLLIEQALQTGYDDWSHYLPCNRAVALPCLREDGSPPPPFTRATAHRAGWQWQVPLQHRNGNGHVYCSSFMEDSEALDILVGNIAGKPQAEPNFLRFVTGRRKKFWNKNVVALGLAAGFMEPLESTSIHLVNTGIDKLISLLSLDGITQAQEDAFNRLTGREYARIRDFLILHYNATSRDDSDFWNYVRTMQVPETLTEKIEIFKANGQIFREEDELFTETSWAAVMMGQGIAMGGHNAMADALDPAKTREEADEMEKSIRYLVQHMPGHGDYVARYCPAAT

SEQ ID NO: 87576 - protein, 498 aa, Sphingopyxis sp.
  REGION 1..498: note = tr|A0A0Q7Z0Q4|A0A0Q7Z0Q4_9SPHN Tryptophan halogenase; OS = Sphingopyxis sp. Root1497 OX=1736474 GN=ASD67_13905; PE = 4 SV=1
MTDTKQRIVIAGGGTAGWMAAAAIARTMGNAVDLTLVESEAIGTIGVGESTIPPLVNYNRLLGINEADFMRATQATFKLGILFDHWKEPGHRYFHSFGLTGKDHWSAGFQHFWLHGRTRGHEQSYDEYCMELVAALEGKFAHLPNEGINYAYQLDSGLYARFLRQMAEADGTKRIEGKIARVELDGTSGDIAALLLDGDRRIEGDLFLDCTGFRALLIEGALHAGFDDWTHWLPCDSAIALQTPNVRPPVPYTRAMAHDAGWQWRIPLQHRTGNGLVYCSRYLDRDAALDRLLGNIEGEALTEPNFLRFTTGVRRRQWYRNCIAVGLSSGFTEPLESTSIHLIQRAVLRFIRMLPLGKVSERDIAEYNDQQMQDNLQIRDFLILHYKATERRDSAFWRQCADMPIPDSLAQKIELFRETGRVFRKNEELFAENSWVQVMMGQGIAPQSHHPIATKLSDEELARFLGGIRDNVRDTVAKLPEHHAYVARYCGAAVPQAA

SEQ ID NO: 87577 - protein, 563 aa, unidentified
  source 1..563: note = Fimbriimonas ginsengisoli
  REGION 1..563: note = tr|A0A068NQG5|A0A068NQG5_9BACT Tryptophan halogenase; OS = Fimbriimonas ginsengisoli Gsoil 348 OX=661478; GN = OP10G_2440 PE=4 SV=1
MLETDVAIIGGGPAGTTVATFLKKYNPSLDVTIVEREQFPRDHVGESHLPAISAILDEMGVWDKVEAAGFPIKIGATFKWGAKKDYWETDFLHHEKFREEARPAKFVDQRRKTAFQVDRSIYDKVLLDHAQSLGCRVFEQTKVAQVLHEGDRITGLSVVSQDPDVTEQVGSDGLIKARYYVDASGDIGILRRALGIEIEAPTALRNIAVWKYWQDATWAVTIGNGGTRIQIMSLDWGWMWFIPITPTRTSVGLVLPASYYKTSGKTTEQLYEEAIATEPLISRLLETATPEDGLFATKDWNFLAKRLAGENWFLAGDSCGFADPILSAGMTLAHTGARKVAFTILELDRNEQDPEWLKQEYEDGHRQQIRHHMQFADFWYTSNSQFTDLKEYCQEIAETAGLTLTPESAFQWLATGGFTVDEPGVAAALTYRVSGLKLLAVEMGAAAPEWELTKTNFWRLNLDGATEGKFVRYLEGRVVPIPCLKRGPKVLPIVDVFKHLLKAMKRNMDSILILEDCVNAMIREDGIPPQDAALLTIEGIESLILEGWIKGKAVPSRPFIKVT

SEQ ID NO: 87578 - protein, 521 aa, Xanthomonas arboricola
  REGION 1..521: note = tr|A0A0E3UF98|A0A0E3UF98_9XANT Tryptophan halogenase; OS = Xanthomonas arboricola OX=56448 GN=XB05_15350 PE=4 SV=1
MTDTAPSDPQQRPVRRVVIAGGGTAGWMAAAALSKVLGRHLQIVLVESDEIGTVGVGEATIPSLVTFHRLLEIDEAAFMAATQATIKLGIGFEHWRDVDRHYIHSFGHTGTDHWSAGFQHFWLKGRQRGLARDFGDYCLELRAAQEGRFAHLPNGGMNYAYHLDAGLYARFLRRFSEGFGVRRIEGRIGRVETDAHSGYLTALTLDNGTRVEGDLFLDCTGFAGLLIGKTLGVGTDDWSQWLFADSALAVQTESVGAPVAYTRSRADQAGWMWRIPLQHRVGNGIVYSSRYMDQDSAAQVLQRNLSGRALTQPRALRFTPNQRHRVWEKNCVALGLASGFLEPLESTNIHLIQRGIIRLMQTFPQVINDVDIAEYNRQAAAEITHIRDFVILHYHATDRRDTPFWRDCAAMDIPDTLRHRVELFRQSGRVFHQANELFAENSWVQVMLGQGITPKHHHPVADLMGDAELRHFLETIRTRVDAALARLPAHADFLRRYCPAPPLPEPATRLPADAALATGTR

SEQ ID NO: 87579 - protein, 544 aa, unidentified
  source 1..544: note = Moorea bouillonii
  REGION 1..544: note = tr|A0A1U7N9N6|A0A1U7N9N6_9CYAN Uncharacterized protein OS=Moorea bouillonii PNG OX=568701 GN=BJP37_30220; PE = 4 SV=1
MNTVSNPNIIKTIIIVGGGTSGWLSAAYLSKFLQDSCQITLIESSDIGTVGVGEATLPTLQITFKLLGLSEFDWMTRCNASFKLGIKFVNWSGSSKPDIFWHPFGQLKSSPNLGIPISQYWLKNYLQGNTAAFDESCFEHINLCAAQKSPKSYDSPEYSGNIEYAYHLDAGKLATYLKERAKSAGVRHIVDNVLDVALDHRGFISHVITENHSNQTADFFIDCSGFRGLLINQALQEPFISYGDSLFCDRAIAISIPYEKGDRYNYNNGGINPYSTATALSSGWAWNVPLVERSGNGYVYSSSFMSQDDAETEFRKHLGDKANDQPAKYIKTRVGRTRNTWAKNCVSIGLSGGFIEPLESTGIYLVELGLEALIRHFPEKSFSPLLINNYNRFMREIYEEIRDFIVMHYCLTQREYTPFWRTNKYHNFIPDSLQEKLNLWKVMWPIYHGNIGHLFPDYSYVCILAGMGYFPVQSLPLLGYGEHSQEDKIILKTKSRSEQLRELLPDHHEYLQQMFLRNFKASWQSLLAHSSKPMPSSSLSTIVR

SEQ ID NO: 87580 - protein, 505 aa, Xanthomonas arboricola
  REGION 1..505: note = tr|A0A2S6YKV7|A0A2S6YKV7_9XANT Tryptophan halogenase; OS = Xanthomonas arboricola OX=56448 GN=XarjCFBP7653_02285; PE = 4 SV=1
MSQAPIRKVVIAGGGTAGWIAACALSHQFRDLLEITLVESEQIGTVGVGESTVPPIRSFHRFLQIDEQEFLRAVAGTFKLSISFEHWRRQGERYIHPFGITGQSTLVCAFHHLWLESQRRGMPGSFGDYCLETVASRLDRFALLREPAVNYAYHLDAALYARFLRTRSEACGVRRIEGRIQQVTLQPDSGDVASLVLEDGQVLEGDLFIDCSGFRGLLIEQALHTGYEDWSHWLPCDRAVAVQTQALGPPVPYTRAIAHEAGWRWQIPLQHRVGNGLVFSSKHLSDDEAHARLLRDVAAPALKDPWLVPFRTGRRRKAWNRNVVSLGLASGFIEPLESTSIHLTIAAVVRLITLFPADGIAPSQVELFNDISRAEMEHVRDFIILHYHATQRDEPLWRQCRAMELPASLALRLRAWRERAHAWQAADELFRVDSWTHVLMGQGIVPAQHHPLARAMSDHDLRRLLDGIAQPIRHAVDQMPPQQAFIDAYCKAGERVWGLRSPVVA

SEQ ID NO: 87581 - protein, 503 aa, unidentified
  source 1..503: note = Alphaproteobacteria bacterium
  REGION 1..503: note = tr|A0A2N3DFI6|A0A2N3DFI6_9PROT Tryptophan halogenase; OS = Alphaproteobacteria bacterium HGW-Alphaproteobacteria-14 OX=2013660 GN=CVT75_03990 PE=4; SV = 1
MPARLKTILIVGGGSAGWMTAALLSNLFQGLYRIRLVESEDIGTIGVGEATIPAIKKFNELLGLDEVQFMRLTQGTFKLGIQFNNWDKIGSSYVHGFGVIGQDLGWLRCHQYWLKMKLQGEASDFANFSINTAAALENKFMPARTDAGDSPIGHIAHAYQFDAGLYARFLRTYAEERGVVRQEGKIVDVNLRPDDGYVDSVVLESGETLAADLFIDCSGFRGLIIEQAMKTGFEDWSHWLPCDRAIAVPCERSDNFTPYTKATAHGAGWQWRIPLQHRTGNGHVYASSYMDEAEAERILLENLDGKPLAEPNRFRFTTGKRKQIWNRNCLAVGLAAGFLEPLESTSLFLVQSSLIRLIRLFPDGEFDQANIDEFNRQTDFEYERVRDFIILHYKATARDDTPFWRYCRDMDVPATLARKIDLFRANGRIFREDEELFSEESWIQVMLGQGVIPQGYDPLVDIKSEAQVAQFLGNVENVIRKCVAVMPTHEDFVAKYCDAKAPA

SEQ ID NO: 87582 - protein, 514 aa, Xanthomonas cucurbitae
  REGION 1..514: note = tr|A0A2S7DX86|A0A2S7DX86_9XANT Tryptophan halogenase; OS = Xanthomonas cucurbitae OX=56453 GN=XcuCFBP2542_01715; PE = 4 SV=1
MDPAPASDPRQRPVRRVVIAGGGTAGWMAAAALSKLLGRQLQITLVESDEIGTVGVGEATIPSLVTFHRLLEIDEAAFMAATQATFKLGIAFEHWRDVDRHYIHSFGHTGTDHWSAGFHHFWLKGQQRGVARDFGDYCLELRAAQDGRFAHLPNGGMNYAYHLDAGLYARFLRRFSEGFGVQRIEGRIGQVETDPESGFLTALTLQDGTRVEGDLFIDCTGFAGLLIGKTLGVGSEDWSQWLFADSALAVQTESVGPPVTYTRARADQAGWMWRIPLQHRVGNGIVYSSRYTDQDSARAVLERNLQGRALTEPRALRFTPNQRHRVWEKNCVALGLASGFLEPIESTNIHLIQRGIVRLLQTFPQVIHPVDISEYNRQAADEIAHIRDFVILHYHATDRRDTPFWRDCAAMDIPDTLRHRIALFRESGRVFHRANELFAENSWVQVLLGQGIIPRQHHPVADLMGDAELGQFLQGIRSRVDSALVRLPAHADFLQRYCPAPPPLGAATPASPAR

SEQ ID NO: 87583 - protein, 505 aa, Sphingomonas sp.
  REGION 1..505: note = tr|A0A430BEB8|A0A430BEB8_9SPHN Tryptophan halogenase; OS = Sphingomonas sp. S-NIH.Pt15_0812 OX=1920129; GN = BRX43_14205 PE=4 SV=1
MSEAAIRDIVIVGGGTAGWMAAAGIARLAGALPGATITLIESDAIGTVGVGEATIPQITLFNTLLGIDEAEFVRATRATYKLGIEFVDWTRIGHRYVHPFGLYGIDMAGVEFHHHWLRGAALGDAAPLDAYSLAVVGGLDGRFAHPRPDQPNSPLAKLAYAFQFDAGLYARFLRARAEGWGVVRREGRITQVHRHAESGHVASVELADGATIAGDLFIDCSGFRGLLIEETMGAGFEDWTDWLPCDRAWAVPCEPGGDRQPLTRSTARPAGWQWRIPLQHRIGNGYVYSSAHISDDEAAALLLANLDGRPIADPKPLRFTAGHRRRAWVGNVVALGLAGGFLEPLESTSIHLVQSGIARLMALFPDRGFDPLLAERFNAETEREYRDIRDFLVLHYKATERDDSPFWDYCRTLPPPPGLAEKLAMFATNGRIHRENNELFTETSWLSVMIGQGVMPRRHHPIADTLPPAELLHRLGHIRSVVTDTARAMPRQDDYLRQIGCDLGT

SEQ ID NO: 87584 - protein, 498 aa, unidentified
  source 1..498: note = Alteromonadaceae bacterium
  REGION 1..498: note = tr|A0A495DIC6|A0A495DIC6_9ALTE Tryptophan halogenase; OS = Alteromonadaceae bacterium 2052S.S.stab0a.01 OX=1304900; GN = K256_4356 PE=4 SV=1
MHKPVKRVLIVGGGSAGWITAALLVRLLGKTLEITLVESEAIGIIGVGEATIPPILTLNNALNIDEREFIARTNATIKLGIEFDGWHTPGQRYMHAFGHIGKDFPFCGFHHFWLRHQAEGGGSSYWDYSLNYQAAKANRFAHLPAIEQAKLQGLVYAYHFDAALYAGFLREYAEARGVTRVEGTIEATHLNSDNGFINGVHLSDGRRLEADLFIDASGFHGVLIENALNTGYDDWRHWLPCDTALAVPSESVRPLTPYTRSTAREAGWQWRIPVQGRIGNGLVYCSEFIDDDSARESLLDNLDGAPLADARKIPFTTGRRKMQWHKNCVAVGLASGFIEPLESTSIHLVQSSILRLVKYFPHHGIKPAEVKEFNQLAREEMEHLRDFIVLHYVQNQRPEEFWRYCRDIPLPDSLQQKIDLFQSTGKVYTPTEDLFSAIAWQQVMLGQGIQPGDYHPLASALSEQQLAEFLDNLKTIYGQVLEQLPDHEDFLNRYTNKQ

SEQ ID NO: 87585 - protein, 524 aa, Erythrobacter flavus
  REGION 1..524: note = tr|A0A222EXW6|A0A222EXW6_9SPHN Tryptophan halogenase; OS = Erythrobacter flavus OX=192812 GN=CHH26_02865 PE=4 SV=1
MTQVQGEGSGADPLRSICIVGGGTAGWSAAALLARVLRGSGCRITLVESSAIPTVGVGEATIPPIFDFLRNIGADEVEFIRRCQATFKLGIQFRDWLHCDHAYWHPFGNLGVTINQRPFHHYYCRNLAQGHGESLADLCPSVALAEDGKFAFPSPDGNWPGGAVAYALHFDAGLVAAFLREHAEAAGVERLDRRIVGATRGEGERIAAVQFDDGESLAADFYIDCSGFRGLLVEETLNAGFEDWKRWLPCDSAIAAPTAAQQQRAPYTVATARSAGWQWRIPLQHRTGNGLVYASDFISDADAHEELLSGLDSEPLADARVLRFTAGLRKRAWVGNCLAIGLSAGFLEPLESTSIHLIHTGLNRLLDLFPDRGFDPALADAYNRDVWREYAHIRDFLLLHYVPNRREGEAFWDHMRSLDLPDTLAEKIELFTRAGRIMSKQRELFSDISWFYVMHGMGLEPAATDPLVDVAPSAEVRKVIDQLSGAMKAFRSAAPTHDAILERLLDPSETRRPHFGTGGGWATR

SEQ ID NO: 87586 - protein, 495 aa, Trabulsiella guamensis
  REGION 1..495: note = tr|A0A085A7N8|A0A085A7N8_9ENTR Tryptophan halogenase; OS = Trabulsiella guamensis ATCC 49490 OX=1005994; GN = GTGU_02754 PE=4 SV=1
MLSLKGIKRVVVLGGGTAGWYTALSLRKLFSANVEIRVVESTEIGIVGVGEGGLLNFQAALHSVDIDFNEFVRETNATFKWGFCYEGWRTGERDDKYYHPFASASGSASKWEEMGHYPLFSAMINKGIPLTSYLKGFDLIVNNASQEEARNALNNQAVDIINSFHFDSYKIAKYLKKVALSRNIIHQDVIVDHVETNEKGHVTALITQEQEKIELDFLVDATGLARKVIGKAVPSEWFSFKEHLLLDRALPFYMPHPLKNPYLVSRAIAMKSGWMWQIPLIDRVGAGYVYSSKHISDDDALQEIKDYLGYEVTPQQNVIKFEPGCYRQVWVGNVLTVGLASGFVEPLEATSIGQMIEVVRNFTRVLVTSQGVVSDNAIREFNESNFASWMEILDFLRMHYDCPRRDTAFWQDVAKTPLTENYRAFKECMQVRAPRLLDIESYMLYGRRGMFHVVNWMFVAAGLGLIPPGAVVNDLMAIAPEKKQAVVDFLNSLNQ

SEQ ID NO: 87587 - protein, 492 aa, Streptomyces badius
  REGION 1..492: note = tr|A0A328JB49|A0A328JB49_STRBA Tryptophan halogenase; OS = Streptomyces badius OX=1941 GN=A3838_33345 PE=4 SV=1
MSAQYDVIVVGGGPAGSTVSTLVRKRGHRVLQLEKETFPRYQIGESLLPSTVHGIAHLLGVSDELKKAAFTIKHGGTFKWGANPEPWTFDFAVSRRMPGATGYAYQVERMKFDQILLDNARRHGVEVRENSDVLDVLKAEDGRVRGVRYRDSEGREHEVGSRFVVDASGNTGGLYKKSGAKREYSPFFRNLALFGYFNGGKRLPKPNSGNIFTCTFEHGWFWYIPLSPELTSVGAVVNRDSASLVQGDPEKAMESFIAACPLIAEKLSEATRVTEGPYGELRVRKDWSYSNTKFWAPGMALVGDAACFVDPVFSSGVHLATYSGLLAARSLNSCLDGTVDETSAFEEFEARYRLEYSRFYEFLVGFYDMHHSEDSYFWQARKISNTADSDLQSFVELIGGVSSDEFADAARARQRFSEASDEMAGMTHTAAGDADGPHGAVPGKVVGRLMEQSAALQARALLGDEAGAERPVRQGGLAASTDGLGWVPGARS

SEQ ID NO: 87588 - protein, 514 aa, Sphingomonas sp.
  REGION 1..514: note = tr|A0A430BA80|A0A430BA80_9SPHN Tryptophan halogenase; OS = Sphingomonas sp. S-NIH.Pt15_0812 OX=1920129; GN = BRX43_19075 PE=4 SV=1
MIRNIDAASAPIGSILIVGGGTAGWMTAAALARSLGPRRSSIILIESEELGTVGVGEATIPPILEMNRLLGIDEDAFMRATGATFKLGIAFENWRAAGHAYFHPFGRIGAAIGPLPFHLYWQALASADPAAAAGLTDYSLPAVAARAGTFCRPSDDSRNTLSTISYAFHFDAARYAHLLRTQAEADGVVRHEGRIVAIAREASDHPAGPMLQSVTLADGRVLEADLFIDCSGFAGLLIGDARENPYQDWRNWLPCDSALAMPIARATDPLPYTRSIAGAAGWQWRIPLQHRTGAGHVFASDFINREAAERALRASVEGAPLAEPKLLRFMPGRRTQAWRGNVVAIGLAAGFLEPLESTSIHLVQSAITRLLALFPDRAFAPADIAYFNRATAAEFDRIRDFLILHYHATERQDSPFWNHVRTMAIPDTLAERIDLFRSRGRFFPEAFDLFLEPSWVAVLNGQGIRPTCPDPLALDAMDTLADVLPRMRAAIARAAGTMPRHGHFIAHHCAAPVA

SEQ ID NO: 87589 - protein, 506 aa, Xanthomonas codiaei
  REGION 1..506: note = tr|A0A2S7CKY3|A0A2S7CKY3_9XANT Tryptophan halogenase; OS = Xanthomonas codiaei OX=56463 GN=XcodCFBP4690_14390 PE=4; SV = 1
MTQAQIRKVVIAGGGTAGWIAAAALSHQFRDLLDITLVESEQIGTVGVGESTVPPIRTFHRFLQIDEQEFLREVAGTFKLSISFEHWLRQGDRYIHPFGITGQSTLVCAFHHLWLESRRRGMGGSFGDYCLETVASRVDRFALPREPAVNYAYHLDAALYARFLRARSEACGVTRIEGRIQQVTVHPDSGDVASLVLEDGQVIAGDLFIDCSGFRGLLIEQTLHTGYEDWSHWLPCDRAVAVQTEALGPPVPYTRAIAHEAGWRWHIPLQHRVGNGLVFSSRHLSDDEAHAKLLRDVAAPAVKDPWMVPFRTGRRLKAWNKNVVSLGLASGFIEPLESTSIHLTISAVVRLLTLFPAQGIAPSQVQLFNDVSRAEMEHVRDFVTLHYHATQREEPLWRQCREMELPESLAVRLRAWRERAHAWQAADELFRVDSWTHVLMGQGLMPEQHHPLTRAFSDQDLQRLLDGIAQPIQQAVEQFPSQQAFIERYCKARPEVWGARTPVMAR

SEQ ID NO: 87590 - protein, 488 aa, Erythrobacter flavus
  REGION 1..488: note = tr|A0A3T1CI87|A0A3T1CI87_9SPHN Tryptophan halogenase; OS = Erythrobacter flavus OX=192812 GN=prnA PE=4 SV=1
MTAAALSRFCGRDWGITLVESDAIGTVGVGEATIPMIRNFNAALGIDEAEFIAATNGTYKLGIEFVGWGAPDSRYLHAFGLVGRGLGLLPFQHYWLRARAEGFGGPIGDYVLNAIACREERFAHVERQPGSALPPLPFAYHFDAGLYAAFLRRYAEARGVLREEGRVDNVETRAEGGDITSVRIDGGRVIEGDLFIDCSGFRGLLIEDTIQTGWADWSHWLPCDRAIAVPCEPSEPWLPYTRSTAREAGWQWRIPLQNRIGNGHVFSSAHMSEDAAQEALLANLDGKPTAEPRLLRFTTGMRKQAWNRNVVAIGLSSGFLEPLESTSIHLIQTGINRLLDYLPVSGFGPRDRDNFNRRTAYEMERIRDFVILHYHANGREGQPFWDMLRTMAVPDTLAEKIEMFRAGGKIVRDQDELFDVPGWVQVMLGQGIEPRGWHPLADELPRDQLEQFLATVKSAYERDVARMPSHQDYVRRLADQARRKLETA

SEQ ID NO: 87591 - protein, 561 aa, Ruegeria sp.
  REGION 1..561: note = tr|A0A0C1GVY5|A0A0C1GVY5_9RHOB Tryptophan halogenase; OS = Ruegeria sp. ANG-S4 OX=1577904 GN=RA28_03300 PE=4 SV=1
MNNRLRKITIVGGGTAGWMTALILDMVFSRTSATKDRPQICLIESPNISTVGVGEATVPRMPVTLRQAGISERNFFRETNASFKLGVKFCNWNKDAKGNRIDYVNPFAHGQMLEGLEAAEYFLRFGNGDRDFTQSISPHDDLARLCKGARQLGQPEFEQRFGYAYHLDAVKFAGMLTKVCTKRGVEHIQDEVQSVELDEQGNVSHLMLERKGRHDIEMVIDCTGFRGLIINQALGEPFMDYSDYLPNDRAMALQIEHPNPDKIESVTRSTALGAGWTWRVPLYNRVGTGYVFSSAHRTDDQAADEYLEWLGDSGKGLTPRVIPMRIGRVRNAWVKNCVAIGLSGGFIEPLESTAIHMIDHAIRWFAEHLPTRDIEPSLRARYNRQMNKLYDEVLDFICLHYRLGNRTDDQYWIDARTEMKIPDRLAENLELWQNRLPMEHDIEFATLFNFRVYQTVLLGKQVYDTGYGAGIRDRLRPLKKPIWFQWWKGAKMDLAQILKTMPDHKTLLRDIRGELEKPAFGMAAAMQPTVAMPGAAAAPVAIQNMPNFAEIQSGTKDLQLF

SEQ ID NO: 87592 - protein, 506 aa, Sphingomonas sp.
  REGION 1..506: note = tr|A0A430BKC4|A0A430BKC4_9SPHN Tryptophan halogenase; OS = Sphingomonas sp. S-NIH.Pt15_0812 OX=1920129; GN = BRX43_05605 PE=4 SV=1
MTAAAIRSVVIVGGGSAGWMAAAALSRFLPPGTAIRLIESDAIGTVGVGEATIPQLRLFNQSLGIDEDAFVRATGGSFKLGIRFDGWSGPDSRYIHAFGTIGRGAGLLPFHHYWLAHRQAGGTTDLWDCSASARAAAADRFAPDPGRPDLPSGLAWAYHFDAGLYAAYLHHYAEARGVERIEGRIVGVERDGHTGHVAAVRLEGERRVAGDLFIDCSGFRGLLIEETLASGFDDWSAHLPCDRALAVPTGRTRPLHPFTCATARAAGWQWRIPLQHRTGNGLVYASSHLSDDAAAELLVGHLDGPPLADPRPLRFTTGRRRRPWIGNCVSLGLAAGFMEPLESTSIHLVQSGIARLLEFWPDRRLAPAGIAAFNRRSEAEWLAIRDALILHYHANARDEPFWCERRAAPIPDSLAERIDLFRESGRILRQGDELFAEVGWLQILIGQGIVPLDHAPLVAALPPAEREALVAIAARHAEAVAARLPDHAEFVARHCAAPPPTESRTA

SEQ ID NO: 87593 - protein, 505 aa, Xanthomonas sp.
  REGION 1..505: note = tr|A0A0J6IQD9|A0A0J6IQD9_9XANT Tryptophan halogenase; OS = Xanthomonas sp. NCPPB 1128 OX=1775876 GN=ACP93_18185; PE = 4 SV=1
MIAAPLRNLVIVGGGTAGWMAAAALARVLGPDYRITLIESEQIGIVGVGEATVPHIKAFNNLLGINEAEFVRHTQGSFKLGIEFADWQRPGTSYVHGFGSEIGHPLGLLPFQQYWFKQALAGKARPLGAYTLNTVAAKRDRFMTSATDVPPNSPLANIAYAYHFDAALYAGFLRGYAEQRGVSRREGIVEEVLLHPESGDVLSVRLASGEAIAGDLFIDCSGFRGLLIEQALHTGYHDFSHWLPCDRALAVPCAKVGLPTPYTRATARAAGWQWRIPLQHRTGNGYVYCSAHISDDEAAATLLANLDGPALADPRPLRFVTGRRKQVWNRNVVALGLASGFMEPLESTSIHLVQSGISKLLELFPREGISPVLVRRYNERIAFEFDRIRDFLLLHYHATERDDSAFWRHCRSMPITPELQETLDLFRDSGRFYRNGDEMFAEISWVQVMVGQGILPRAYHPLVDQVPQADLERFMASVEQTIGHCADAMPPHQAFIDRYCAARPA

SEQ ID NO: 87594 - protein, 509 aa, Sphingomonas sp.
  REGION 1..509: note = tr|A0A432VNN9|A0A432VNN9_9SPHN Tryptophan 7-halogenase OS=Sphingomonas sp. TF3 OX=2495580; GN = EJC47_01025 PE=4 SV=1
MANPAEPNGSRPIRIVIAGGGTAGWMTAATFARFLEVGFEIDLIESEEIGTVGVGEATIPQIRLFNDALGLDEDAFLRATQGTYKLGIEFVDWGAPGQRYMHAFGDIGRDVGLLPFHHYWLRARKLGLAGDLAAYSLNNQAALAERMQRGPARTARVLPDMPYAFHFDAGLYARHLRRYSETRGINRIEGKIVRVTQNDIGDVSGLVLEDGSVVSADLYIDCTGFRGLLIEQTLHTGYDDWTHWLPADRALAVPSARSAAFTPYTRSTAKTAGWQWRIPLQHRTGNGIVYASAHLSDDEATATLLAGLDGEALADPRPIQFRTGKRRKLWNRNVVAIGLAGGFLEPLESTSIHLIQSAIARLMKLLPGHTIAEADRGEFNRQSDFEYERIRDFIILHYAANARSEPFWRMCRDMELPETLSAKIDLWRGNGHITREHEELFTEVGWFQVFVGQGVIPTGHHPLADAIPATDLAEFMDTIAKLNAREVAQMPSHADFIARHCAAPQPVTA

SEQ ID NO: 87595 - protein, 513 aa, Devosia sp.
  REGION 1..513: note = tr|A0A0Q7E5B0|A0A0Q7E5B0_9RHIZ Uncharacterized protein OS=Devosia sp. Root413D1 OX=1736531 GN=ASC89_10925; PE = 4 SV=1
MAGQPHFVIVGGGTAGWIAAFIIQDSIKRLKLDAKLSVVESSKIPTVGVGEATTAAFHVFLTHFGIDIFEFFRKTEATYKLGIRHEDWRRKGFTYYGPIDDPHAVVRPPPGAPSDYLNVYAVSVNEPVQDMRLFGPLLKQKKAPWTKKADGSLIPLGPFLPAYHFDQSLVGKFLKEKSQGVEIVDNVLTGVERNGETGDVTALVFEDGQKLEGDFFIDATGFRKRLIVGEMQAPWISYQRELPVNRALPFWLPVEPGEEIANYTRAWAQEAGWMWQIPTQYRYGCGYVYSDEFRTPDEAHAEVERVLGRKIEVRGDIQFKIGRLEKAWINNVVAVGLSSSFLEPLESTSIHGTIVQMMMFAGQYLRDPAQMGQPLRDDYNRRVGRQVDDFRTFVNTHYMTERDDTPFWREVREHRIHPETKQRLERWKTEMPRREHFADYLFGLPHVETQLHYPVLDGLGLLDPAVAKAEMARDPKLRKFARETHAGLVKEYKQAASKALGHTEFLELVRGMG

SEQ ID NO: 87596 - protein, 510 aa, Massilia plicata
  REGION 1..510: note = tr|A0A4P7BHH5|A0A4P7BHH5_9BURK Tryptophan 7-halogenase OS=Massilia plicata OX=321984 GN=E1742_16270; PE = 4 SV=1
MVQAIRRIVIVGGGSAGWLTAGMIAADHQAASPHGLQVTLIESPDVAPIGVGEGTWPSMRDTLRRIGVPETAFFRECDAAFKQGSLFRGWREPAGDDYYFHPFVLPQGYGEADLVGPWQAAYAQVPFADLVSFQPHLCAKGRAPKQPGTPEYAAVANYGYHLDAGKFGVFLRKHCLERLGVRYVPDHVTGIASHDNGDIAALHTREHGALAGDLFIDCTGMQSLLLGRHFDIPVISQRHVLFNDSALAVQVPYQSDDSPIASQTTSTAQRTGWIWDIGLPTRRGIGHVYSSAHTSDAQAEADLRAYVGSEGMPTPRKLTFEPGYRREFWHRNCVAIGLSAGFIEPLEASALALVEMSAALVSDDLPATRADMDVVARRFNDAFTYRWERVVEFLKLHYVLSRRDGAYWEDNRSENTIPERLRELLALWRHRPPSRLDFHRIEEVFPSASWQYVLYGMGFVPAPGGTRRADPEAAAHYYREAADLTRRMLGALPSNRELLEHIRRHGLQKI

SEQ ID NO: 87597 - protein, 503 aa, unidentified
  source 1..503: note = Cellvibrionales bacterium
  REGION 1..503: note = tr|A0A3D5SDC2|A0A3D5SDC2_9GAMM Tryptophan halogenase; OS = Cellvibrionales bacterium OX=2026722 GN=DHT34_05150; PE = 4 SV=1
MHNRKINRVIIVGGGTAGWMTAAGLAAVLPVDDYDITLVESEQIGTVGVGEATIPPIRLFNHNIGVSEEEFMRKTGATFKLGIEFHNWQTKNQHYFHPFGQYGRAIDGVPFHHYWMKANAENKCGELGDFSLCEVMAKSKKFVPDNTDPKSVLSTIGHAYHLDAGLYAKFLREFAEGKGVTRIEGKIVDVNLKPDNGYIASVQLDSSEVMEGDLFIDCSGFRGLLIEEALETGYEDWSHYLPCDRAIAVPSKNVSATKPYTMSIAHAAGWQWRIPLQHRTGNGHIFCSQYMSEDEATKILLENLEGEALAEPRTLPFKTGRRKKFWNKNCVAIGLSAGFMEPLESTSIHLIQEAIGGLIRMFPGEEFNEAEIDQFNAATARDYDLIRDFLIMHYHINERSEDFWKMCQKMDIPASLHHKISIFKNRGRLFIEEENLFKLDSWLAVLYGQGVRPAAYDPVADRRGLDEITGSLHNIRNSFVKATNAMPTHDAFINKHCKAKFSS

SEQ ID NO: 87598 - protein, 495 aa, Streptomyces sp.
  REGION 1..495: note = tr|A0A1V9KHX6|A0A1V9KHX6_9ACTN Tryptophan halogenase; OS = Streptomyces sp. M41(2017) OX=1955065 GN=B0675_19765; PE = 4 SV=1
MQVEDHEFDVVVVGGGPGGSTVSTLVAMQGHRVLLLEKEEFPRYQIGESLLPSTVHGICRLLGVSEELEKAAFMPKRGGTFRWGSSPEPWTFSFSVSATFSGPTSLAYQVERMKFDQILLDNARAKGVEVREKSSVVDVIEEDGRVCGVVYSDADGIRHEIRSRFVVDASGNKSRIQSRIGGKRHYSDFFQNIALFGYFEGGKRLPAPNSGNILCAAFNSGWFWYIPLTDELTSVGAVLRRDALERVQGDREKALMGLIDECPLIAEYLSEARRVESGPYGEIRVRKDYSYCQDTFWRPGMVLVGDAACFIDPVFSSGVHLATYSGLLAARSINSSLSGDFEETKCFEEYELRYRNEYSLFHDFLVAFYDMHQDEDSYFWTAKKVMNSSAPGLESFVELVGGGASHESGLVNATSYTEQRESTFREFSELADRPAGESGTDRDLFDSTLVQSVLEEGAKIQVHAALGDVDDDEGPLRDGGLVPSADGMRWAEFGY

SEQ ID NO: 87599 - protein, 521 aa, Xanthomonas sp.
  REGION 1..521: note = tr|A0A0Q5GSW6|A0A0Q5GSW6_9XANT Tryptophan halogenase; OS = Xanthomonas sp. Leaf131 OX=1736270 GN=ASF73_17690 PE=4; SV = 1
MSDTLASDPRQRPVRRVVIAGGGTAGWMAAAALSKVLGRHLQITLVESDEIGTVGVGEATIPSLVTFHRLLEIDEAAFMAATQATIKLGIGFEHWRDVDQHYIHSFGHTGTDHWSAGFQHFWLKGRQRGVARDFGDYCLELRAAQEGRFAHLPNGGMNYAYHLDAGLYARFLRRFSEGFGVQRIEGRIGNVETDAHSGYLTALTLENGTRVEGDLFLDCTGFAGLLIGKTLGVGADDWSHWLFADSALAVQTESVGAPVPYTRSRADQAGWMWRIPLQHRVGNGIVYSSRYMDQDNAALVLQRNLTGRALTQPRALRFTPNQRHRVWEKNCVALGLASGFLEPLESTNIHLIQRGIIRLMQTFPQVINDVDIAEYNRQAAEEITHIRDFVILHYHATDRRDKPFWRDCAAMQIPDTLRHRVELFRQSGRVFHQANELFAENSWVQVLLGQGITPKQHHPVADLMGDAELSHFLENIRTRVDAALGRLPAHADFLRRYCPAPPLPEPAAHLPADAALATGAG

SEQ ID NO: 87600 - protein, 489 aa, Sphingomonas sp.
  REGION 1..489: note = tr|A0A0S9CI40|A0A0S9CI40_9SPHN Tryptophan halogenase; OS = Sphingomonas sp. Leaf231 OX=1736301 GN=ASE95_10420 PE=4; SV = 1
MAAAAISRVLGEMPGLAIELVESEAIGTVGVGEATIPQIVLFNKMLGIDEAEFMRETRATYKLGIEFVDWLHPGHRYVHPFGSYGLDMKGIEFHHFWLKGRALGDATPLDAYSLAIVAGVQGRFAHPRPDQPGSPLSKLGYAFQFDAGLYARFLRRLAEANGVRRTEGRIVTAERDAENGHVAAVVLDSGTRIAGDLFIDCSGFRGLLIEGEMQAGFEDWSQWLPCDRAVAVPCANGGDRQPLTRSTARAAGWQWRIPLQHRIGNGYVYASAHLSDDEAAATLLAHLDGAPLGDPRFLRFAAGHRRRAWVGNVVALGLAGGFLEPLESTSIHLVQSAIARLLTYWPTQRFDQREIDRFNAAHVADYLDIRDFLVLHYKATQRRDSAFWDYCRTLAPPPGLAEKLAIFGANGRVFREGEELFTETSWLSVMVGQGAVASGYHPAADLLSDAETLARLAHIRHVVAETAALLPAQDDVLRRIGCDLLEAAA

SEQ ID NO: 87601 - protein, 517 aa, Streptomyces sp.
  REGION 1..517: note = tr|A0A2M9LRZ6|A0A2M9LRZ6_9ACTN Tryptophan halogenase; OS = Streptomyces sp. CB02613 OX=2020328 GN=CG717_06380 PE=4; SV = 1
MLNRVVIVGGGTAGWMTASYLKAAFKDQIDITLVESGKVGTIGVGEATFSDIRHFFEFLGLKESDWMPACNATYKLAVRFENWRKPGHHFYHPFEQMGSIDGFPLADWWLHNGRTDRFDTDCFVMANICDAERSPRHLDGAMLNQPFDEHADEPRGLTMSEHQGKTQFPYAYHFEAALLAKYLTKYTVDRGATHIVDDVVDVKLDERGWIKSVTTAENGELEGDLFIDCTGFRGMLLNKALEEPFISFQEFLPNDSAVALQVPQDMEARGIRPCTTATAQEAGWIWTIPLYGRIGTGYVYAGDYISPEEAERTLREFVGPAAAEVEANHIKMRIGRSNRSWVNNCVGIGLTSGFVEPLESTGIFFIHHAAEQLVKNFPGADWSPVHRDSYNSSIANVMDGVRDFLALHYAAAARNDTQYWKDTKTRKLPDGLAERIEHWKHQLPDTESVFPHYHGLPPYSYMCILLGMGGIDLKPSPALALADGAAAQREFQSVHDRAAALIEKLPTQYEYFTHMRR

SEQ ID NO: 87602 - protein, 517 aa, Erythrobacter flavus
  REGION 1..517: note = tr|A0A222EV29|A0A222EV29_9SPHN Tryptophan halogenase; OS = Erythrobacter flavus OX=192812 GN=CHH26_09355 PE=4 SV=1
MADHTQPNRGRRPRPGRRIVIVGGGTAGWMTAAALSRFCGRDWGITLVESDAIGTVGVGEATIPMIRNFNAALGIDKAEFIAATNGTYKLGIEFVGWGAPDSRYLHAFGLVGRGLGLLPFQHYWLRARAEGLAGPIGDYVLNAIACREERFAHVERQPGSALPPMPFAYHFDAGLYAAFLRRYAEARGVLREEGRIDNVETRAESGDISSVRIDGGRIVEGDLFIDCSGFRALLIEDTLQTGWTDWSHWLPCDRAIAVPCEPSEPWLPYTRSTAREAGWQWRIPLQNRIGNGHVFSSAHMSEEAAQEVLLANLDGKPTAEPRLLRFTTGMRKQAWNRNVVAIGLSSGFLEPLESTSIHLIQTGINRLLDYLPVSGFGPRDRDNFNRRTAYEMERIRDFIILHYHANRREGQPFWDMLRTMAVPDTLAEKIEMFRAGGKVVRDQDELFDVPGWVQVMLGQGVEPQGWHPLADELPRDQLKQFLATVKSAYERDVARMPSHQDYVRRLAAQARRKLETA

SEQ ID NO: 87603 - protein, 162 aa, unidentified
  source 1..162: note = Nonomuraea fuscirosea
  REGION 1..162: note = tr|A0A2T0MQL1|A0A2T0MQL1_9ACTN Tryptophan halogenase; OS = Nonomuraea fuscirosea OX=1291556 GN=B0I32_117172 PE=4; SV = 1
MRSDVQRDARHIHCGQRHARVESGMTGLLASRPMLEGQVRRRITALPGVQVLPDSVATGLLVERDRVTVVRLAGGEPMPADLVVDASGRGSRTPFWLDELGIVPPAEERVMLDVRYGTREFRRRPGDLDGDLIVVVAPTPDSPRGGVALAMEDDRWIVTLVG

SEQ ID NO: 87604 - protein, 500 aa, Sphingomonas sp.
  REGION 1..500: note = tr|A0A3S0SYS2|A0A3S0SYS2_9SPHN Tryptophan 7-halogenase OS=Sphingomonas sp. TF3 OX=2495580; GN = EJC47_02570 PE=4 SV=1
MTAAPPRADTQTIKRVVIAGGGTAGWVAAAALSKHLGPLLDIVLIESDEIGTVGVGEATIPTIRTFHRFLEIDERDFMRATQATFKLGIAFENWARRGDRYIHSFGRVGQSIWMGDFQHMWLRARAEGTGGALGDYCFELTAAEAGKFATGPDAKINYAYHLDASRYAVFLRQFSEARGVTRVEGKIGQVHQHPETGFIEALDLADGRRIEGDLFIDCTGFRGLLIEQTLKAGYEDWSHWLPTNRALAVQTKAVQPALPYTRAIAHEAGWQWQIPLQHRVGNGLVYCSDYLSDDAAHAKLLANIDGETITDPRLIRYVTGRRKRVWDKNCVALGLASGFVEPLESTSIHLIMIGITRLIQSFPFNGIKPALVQHYNALAETELERVRDFIILHYHLTERSDDPFWDRCRTMDIPATLAQRIALFREAALTPQTADDLFQADSWLQVMLGQRLEPASYHHMGHMLSIEHMQRALGDLKGNIASAVARMPTHQAFLDHYCTP

SEQ ID NO: 87605 - protein, 537 aa, unidentified
  source 1..537: note = Pseudomonas protegens
  REGION 1..537: note = tr|A0A423DYX8|A0A423DYX8_9PSED Tryptophan halogenase; OS = Pseudomonas protegens OX=380021 GN=BLX41_12625 PE=4 SV=1
MNKPIKNIVIVGGGTAGWMAASYLVRALQQQVNITLIESAAIPRIGVGEATIPSLQKVFFDFLGIPEREWMPQVNGAFKAAIKFVNWRKSPDPSREDYFYHLFGSVPNCDGVPLTHYWLRKREQGFQQPMEYACYPQPGALDGKLAPCLADGTRQMSHAWHFDAHLVADFLKRWAVERGVNRVVDEVVEVQLNDRGYISTLLTKEGRTLEADLFIDCSGMRGLLINQALKEPFIDMSDYLLCDSAVASAVPNDDAREGVEPYTCAIAMNSGWTWKIPMLGRFGSGYVFSSKFTSRDQATADFLNLWGLSDNQQLNQIKFRVGRNKRAWVNNCVSIGLSSCFLEPLESTGIYFIYAALYQLVKHFPDTSFDPRLRDAFNAEIVYMFDDCRDFVQAHYFTTTREDTPFWLANRHELRLSDAIQEKVERYKAGLPLTTTSFDDSTYYETFDYEFKNFWLNGNYYCIFAGLGMLPDRSLPLLQHRPESIEKAEAMFASIRREAERLRTSLPTNYDYLRSLRDGAQLSRNQRGPTLAAQERQ

SEQ ID NO: 87606 - protein, 532 aa, Serratia sp.
  REGION 1..532: note = tr|A0A2R3H2A8|A0A2R3H2A8_9GAMM Tryptophan halogenase; OS = Serratia sp. MYb239 OX=2033438 GN=CLM71_13470 PE=4 SV=1
MSKPIKNIVIVGGGTAGWMSASYLVRALQQQANITLIESAAIPRIGVGEATIPSLQKVFFDFLGIPEREWMPQVNGAFKAGIKFVNWRESPDRSHNDYFYHLFGNVPNCDGVPLTHYWLRKREQGFQQSMAYACYPQPGALDGNLAPCLHDGSRQMSHAWHFDAHLVADFLKRWAVDRGVNRVVDEVVEVNLNDHGFISSLSTKEGRKLEADLFIDCSGMRGLLINQALKEPFIDMSDYLLCDSAVATAVPNDDAQAGVEPYTSSIAMNAGWTWKIPMLGRFGSGYVFSSKFTSRDRATADFLKLWGLSDNQPLNQISFRVGRNKRAWVNNCVAIGLASCFLEPLESTGIYFIYAALYQLVKHFPDTAFDPRLADAFNAEIVYMFDDCRDFVQAHYFTSSREDTAFWLANRHELRLSDAIQEKIERYKAGLPLTTTSFDDDTYYDTFDFEFKNFWLNGNYYCIFAGLDMLPDRSLPLLQLRPESIDKAEAMFASIQHEAERLRTSLPTNYDYLRSLQKGYAEQSRPASPEIL

SEQ ID NO: 87607 - protein, 506 aa, Xanthomonas sp.
  REGION 1..506: note = tr|A0A0Q5GWV5|A0A0Q5GWV5_9XANT Tryptophan halogenase; OS = Xanthomonas sp. Leaf131 OX=1736270 GN=ASF73_16645 PE=4; SV = 1
MIPAPLRNIVIVGGGTAGWMAAAAFARVLGPGFNVQLIESEQLGTVGVGEATVPHIKAFNNLLGIDEAEFVRQTQGSFKLGIEFVDWQRPGTSYIHGFGTQIGHPLGLLPFHQYWIKQHLRGKAQPLGAYTLNTVAAVRGKFMTSAGDVPANSPLANIAYAYHFDATQYARFLRGYAEQRGVTRIEGLVEQVQLHADTGHVQLLQLASGQVVSGDLFIDCSGFRGLLIEEALHTGYHDFTHWLPCDRALAVPSENVGPPTPYTRSTARAAGWQWRIPLQHRTGNGYVYSSAHISDDEAAATLLANLDGKPLADPRPLRFTTGRRKQFWNRNVVALGLASGFLEPLESTSIHLIQAGISRLLELFPREGISPVLVQRYNDRLAFEFDRIRDFLVLHYHATERDDSAFWRHCRTMPITPELQTTLDLFRDSGRFYRNAEEMFAEISWVQVMVGQGVLPQGYHPLVDQVPDRDAEGFLASIAQTIGHCVDVMPTHQQFIDRYCKAAAPR

SEQ ID NO: 87608 - protein, 487 aa, Sphingomonas sp.
  REGION 1..487: note = tr|A0A430BE79|A0A430BE79_9SPHN Tryptophan 7-halogenase OS=Sphingomonas sp. S-NIH.Pt15_0812; OX = 1920129 GN=BRX43_14195 PE=4 SV=1
MSDRHGPIRRVLVAGGGLVGWSAAAALQRRLPWLEVVILPIAPPADAIADRMRATLPSILGFHEDLGLSDADAVVRTGSNIRLGTLFEGWTTGRAGHLTDYVHAYGRHGRPFEGGSFHLHWARAARHQVPAPFDRFSAAAVMARAGRFAVPADDPEALVGGFEHGLHIDPVRYAAMLRAFALHCGVRERAGDLTGVEIGEDGFVAAALLAEGDRVEANLFVDATGPAARLRSALDDARISWASWLPCDRLILEDAAAMPADPLDRVTAHGCGWRWTGGGSQGLVYASASAGAAEWGGQGVAIDPGTRPRPWLRNCVAIGDAATAVEPLEWTNLHLAHSAIDRIVAMLPGRDCAPVELAEYNRQCAAEAERVRDFLALHYAVSDRPEPFWRAVADVAPPPSLAHSLAQFRARGRLPFYEEETFAKDSWLAVLIGQNVLPERDDPLIALVPPDRATAAMTHHAQALAAAIAALPPAGAAHPILQRSRSR

SEQ ID NO: 87609 - protein, 539 aa, unidentified; identical to SEQ ID NO: 83679
  source 1..539: note = Cellvibrionales bacterium
  REGION 1..539: note = tr|A0A3S5JWX1|A0A3S5JWX1_9GAMM Tryptophan 7-halogenase OS=Cellvibrionales bacterium TMED148; OX = 1986840 GN=CBD08_003305 PE=4 SV=1

SEQ ID NO: 87610 - protein, 410 aa, unidentified
  source 1..410: note = Methyloglobulus morosus
  REGION 1..410: note = tr|V5C4P7|V5C4P7_9GAMM Tryptophan 2-halogenase CmdE; OS = Methyloglobulus morosus KoM1 OX=1116472 GN=cmdE PE=4; SV = 1
MSGQKTVIIIGAGPSGSIAGALLQNKGYQAVILEREKFPRFSIGESLLPQCMEFIEQAGMLQAVHDAGFQLKTGADFIVGDRRSEFYFSDKFSPGFDTTYQVQRASFDALLASEAQRQGCVIHWQHQVTAADFSGARPMLTVTDEQGARYPIDADFVLDASGFGRVLPRLLDLDRPSSFPVRQALFTHLEDRIDDEGYDRNQIRIIVHPDMADVWYWLIPFGNGRCSLGVVGESDIFNAIVGDQAHVFHTLVAQEPSLRALLHNAQFDTAINGIKGYSANVSQLFGQGYALLGNAGEFLDPVFSSGVTIAMKSASLAADVLDRQFQGQPVDWRCEFAEPLQKGVDTFRTYVTAWYEGGLQDVIFYNHQQPNIKAMICSILAGYVWDESNPYVKNSQARLKTLVELCRTGV

SEQ ID NO: 87611 - protein, 503 aa, Sphingomonas sp.
  REGION 1..503: note = tr|A0A430BG07|A0A430BG07_9SPHN Tryptophan 7-halogenase OS=Sphingomonas sp. S-NIH.Pt15_0812; OX = 1920129 GN=BRX43_11885 PE=4 SV=1
MTDGRSILIVGGGTAGWLTAAYLARHLAMVRPGVAITLLDAPEIGPIGVGEGAFPTIRSTLRYLGIDEGGFLRGTSASFKQGIRFDDWLHAPDAGRRHRYLHPFEPPYRSDEVDLVAHWLAQDAATRAPFAEAVTIQHRVAAAGRGPKQAGEAGYEGPLSYAYHFDAIRLGRLLADRAEALGVRRLDGRLVRAVRGTDGSITHLETEPHGTLSADLYIDCTGQHAALIGEALGEPFVSVRDRLFTNRALVCRLPYERDDTPLPTMTIATAHHAGWTWDIGTAEARGIGTVYSDDHLTADQAMQGLADYTGVAADRLEVRALGFEPGYRRRPWVGNCIAVGLSGGFLEPLESTGILLIEAAVAMIAELFPRRGPVAAPAARFNALMTARYEAIADFLKLHYALSRRTEPFWQDNRAAGSRSERLAGLLDQWRYRPPNRFDFTLDVESFAFFNYQYILYGMDWAGDAEPVPQEGGAQLFRKLRQFGDHAAADLPSHRDLVAAMRG

SEQ ID NO: 87612 - protein, 508 aa, Sphingomonas sp.
  REGION 1..508: note = tr|A0A430BA94|A0A430BA94_9SPHN Tryptophan 7-halogenase OS=Sphingomonas sp. S-NIH.Pt15_0812; OX = 1920129 GN=BRX43_18700 PE=4 SV=1
MSEAEETDSGPPWQLRSIVIAGGGTAGWMAASYLAKRLEGRNVRITVIESSAIGTVGVGEATVPGIRDFLRVLDVTEHEVMAATQGTAKLGIEFVDWKHPGTRFFHPFGLYGMRSRGVAFHHYVRKLRQAGHEIDIGDYCLATAMARRNLFMQPTDRPVHDLLYFDWALHFDAALFARFLRAKAMEWGVSHLDATITCVRTDETSGHIRALDTDRGETVAGDFFIDCTGFRALLIGEALGIPYEEWTNLLPCDRAVAVPCVRREALTPYTRSTALSAGWQWRIPLRHRVGNGYVYASRHLSDDEATATLLARLEGEALAEPNAIRFRTGRRSAFWHRNCVALGLAAGFMEPLESTSITLIQTGLEKLLGLLPDRRFDPALEDEYNRTTALEYERIRDFLILHYVANTRRGEPMWDRCRSTALPPMLANKLRLYKARGHLVRYDWESFQDPSWISMYEGFDIQPVTYDLAADHFSEADLAAALDRMRSSIADAVDLAEPHETYLNVLYR

SEQ ID NO: 87613 - protein, 541 aa, Sphingomonas sp.
  REGION 1..541: note = tr|A0A430BE46|A0A430BE46_9SPHN Tryptophan halogenase; OS = Sphingomonas sp. S-NIH.Pt15_0812 OX=1920129; GN = BRX43_14200 PE=4 SV=1
MNEHAIRDVVIVGGGTAGWMAAAAFSRFLNNGHTRITLIESEEIGTIGVGEATIPPLVSFNQMLGINENDFLRETAGTFKLGIEFVDWGRLGDRYFHPFGSHGHDLQGVHFHQLYLRERQRQALPPIATWSMSAVAAAAGKFGRPSPEAQSPIRELLYAFHFDAGLYARFLRRYAEANGVTRIEGKVADVTLRPEDGHVAAVTLADGRQVAGDLFIDCSGFRGLLIEEALETGYEPWGQWLPCDRAVAVPSALTGEPDPFTRATAHKAGWQWRIPLQHRMGNGLVYASQFLDDDAAERELLSRLEGAPLAEPRRLSFTTGRRRECWSRNVVALGLSSGFIEPLESTSIHFIQSGIARLIALFPDKRFDPVERTEFNRQMRELYEDVRDFVILHYKATERTDSPFWDRCRTMEVPDSLRRKMDLFRAKGRVFRDSMELFATTSWVAVAFGQHLWPEHHEPAVDALDEDRVAAALAQMHQGYAQVAQQLPSHGAFLRQTALSPLASGAAPTPVPASAPAPADALPRFSFESDSPFTGTMGSPV

SEQ ID NO: 87614 - protein, 506 aa, Erythrobacter flavus
  REGION 1..506: note = tr|A0A222EUZ0|A0A222EUZ0_9SPHN Tryptophan halogenase; OS = Erythrobacter flavus OX=192812 GN=CHH26_09195 PE=4 SV=1
MTERAQAIRNVVIVGGGTAGWMTAAALARLLGGTGLAITLVESAAIGTVGVGEATLPQIRRFNSLLGIDEREMMARTAATIKLGIEFRDWGRVGDSYIHPFGRFGQEIGPASFVDYWARAHARGMVAPIGQYCLPIMAAMQGRFEPPHGNGTRQPYDYAFQFDAGLYAAWLSELAQSAGVVRREGRIVDVARNSESGAISAVRLEDGAAIRGDLFIDCSGFRALLIGETLETSFEDWSNWLPCNRAFAVPCANGGDYGPYTRATARAAGWQWRIPLQHRVGNGLVYCDAFWDDADAAEALMANLEGEPGAEPRQLRFTTGRRSALWRSNCVAIGLAGGFLEPLESTSIDLIQSGILNLVELFPHTAIEETDRREYNRLMDLEFERIRDFLVLHYVANQREEEFWGAMRAMPMPDSLADRIEDFRERAILPDYADGLFQPVSWISVFLGQNVVPRRWDPRANAMDADELSKRLAAIHSKIADDAAAMPLHLDFLERSGARYIDEAGQ

SEQ ID NO: 87615 - protein, 506 aa, Altererythrobacter sp.
  REGION 1..506: note = tr|A0A316JX33|A0A316JX33_9SPHN Tryptophan halogenase; OS = Altererythrobacter sp. XM-24bin4 OX=2133952; GN = DCO98_01985 PE=4 SV=1
MNYGNPIKHIVIVGGGTAGWMAAAVLSRLKKGRTLDITLIESEEIGTVGVGEATIPPFVEFNQLLEIDERELLSEVQGSFKLGIQFQNWGQLGDSYIHPFGAYGYHMGGISFHQIWRRMQQAGDKRPIQAFNLETMAAYFGKFARTEDYAQEDLPPVNYAYHLDAGRYAAFLRKYAEARGVIRQEGRISHTTLADETGFVASLKLESGKAISGDLFVDCSGFRGLLIEQALGTGYEDWTHWLPCNRAVALPCDRDDGSPPPPFTKATAHSAGWQWQVPLQHRNGNGHVYCDAYMSADEAHEILVDNIAGKPTAEPNHLRFVTGRRKKFWNKNVVALGLSAGFMEPLESTSIHLVNTGVNKLVALLTLEGINPAQVEAFNRLTAKEYARIRDFLILHYNATERTDSDFWNYCRTMSVPDTLTEKVELFKTNGQIFREEDELFTETSWAAVMMGQRIVMGGHNPVADTFDLPATKSEMDEMEKSIRFVVQHMPGHEDYLKRYCPAPAI

SEQ ID NO: 87616 - protein, 515 aa, Asticcacaulis taihuensis
  REGION 1..515: note = tr|A0A1G4RG52|A0A1G4RG52_9CAUL Tryptophan halogenase; OS = Asticcacaulis taihuensis OX=260084 GN=SAMN02927928_1887; PE = 4 SV=1
MQKDPIRIVILGGGTAGWMTAAGFIKGFKPEFASVRLIESDEIGTVGVGEATLPQLKSFNDFLGLNEPEFMRDTNATFKLGIDFRNWGREGDSYIHPFGIHGQAINGVPLFQYWLKARANGHDSDLESYSFPIMACRNLKFDFPSEDDRSVRSTFAYAYQFDAVLYARYLRRWAESKGLQRTEGKVVEVNLRPEDGFIRSLTLASGEVVEGDLFIDCSGFRSLLLGQTLKVPWEDWTPWLPCDRALAVPCDRAGDFTPYTRATAREAGWTWRIPLQHRTGNGYVFSSRFTTEDRAAEVLLAGLDGKAQAEPRLIKFAAGRRKQSWYKNCIAIGLASGFLEPLESTSIYLAQMASDFVMRLFPGKDIDPKLVAEFNRTIDIEYDRVRDFLILHYHANQKPAEEDPTGLWRYVREMTVPDTLIEKMETFKHRGHIHRYRDGLFAPPSWIAVYTGQNILPRNYDRQVDNMSTEAMLEKMREMQERVAVNVEVLPTHADFLRDYCFDPSAKMMQEAGNV

SEQ ID NO: 87617 - protein, 497 aa, unidentified
  source 1..497: note = Massilia lurida
  REGION 1..497: note = tr|A0A562QYN3|A0A562QYN3_9BURK Tryptophan halogenase; OS = Massilia lurida OX=1036180 GN=IP91_04486 PE=4 SV=1
MENKNKPVRRVVIAGGGTAGWMVAAGLSKSLGRLLDITLVESDEIGTVGVGEATIPSLQNFHHLLEINEQEFMAETMATFKLGISFENWRDVNEDYIHSFGTSGTDHWTAGFQHFWHKGRERGLATDYGDYCLELKASLQNRFAHLPKGGMNYAYHMDASRYAKYLRKFSERFGARRVEGKIAEVRMDPDGDIRALRLDSGAEIEGDLFIDCTGFRALLIGGALGVEYEDWSHWLFNDSALAVQTTSVREAVPYTRAIARDAGWQWQIPLQHRVGNGLVYSSRYTDDETSQRTLLAAVAGEPLMTPRVIRFQPGQRKETWKRNCVAVGLASGFLEPIESTSIHLIQRSIVRLLQLFPQDGISQADIDEFNTQANTEIAHIRDFIILHYKVTNRRDTPYWRDAAEMTVPASLQHRIDLFRATGRVFRIPNELFAENSWIQVMLGQGIHPASHHQSADLMGDAELAHFLDGIRGSIERTVAQLPSHQRYVEQYCAGTGW

SEQ ID NO: 87618 - protein, 507 aa, Shewanella oneidensis
  REGION 1..507: note = tr|Q8EBK1|Q8EBK1_SHEON Flavin-dependent tryptophan halogenase OS=Shewanella oneidensis (strain MR-1); OX = 211586 GN=SO_3513 PE=4 SV=1
MTIRKIAIIGGGTSGWLAANHLGRALKGRSGLSISVIESPDIPIIGVGEGTVPSIRKSLQSFGISESEFIRTCDVTFKQSIKFVNWLDKTRHGKHNFYHHLFDIINLHQGDAVSAWLAEQSGHFADFVSTQHLACEVAKAPKLITTPEYAGVLGYAYHLNAAKFAKLLAKNAIEKFNVEHILTTVHDVCLGVDGAIESLQTEQGNLSFDFYIDCSGFESILLAKALKVPFISKAQQLFIDTALVAQIPTQPADVIPPYTKATAHQAGWIWDIALTQRRGTGFVYSSAHMNQAEAERKFDHYLGGKLADIPHRKIPMTVGYRQQFWVKNCVALGLAQGFLEPIEATSILLTDFSARFLAERFPANIDDVDYLAKRFNDTVGYAWERVVEFAKLHYCLSDRTDSAFWLDNQREETISEPLKERLNMWKSFSPIAEDFPSKFEVFNLDNYLYVLYGMKYPTQPHDRGLVAKANLNAYMSNMSNVKRQMLEGLPEHRELIDKICTYGLQPI

SEQ ID NO: 87619 - protein, 502 aa, Novosphingobium sp.
  REGION 1..502: note = tr|A0A4R1UIQ4|A0A4R1UIQ4_9SPHN Tryptophan halogenase; OS = Novosphingobium sp. PhB165 OX=2485105 GN=EDF56_10743; PE = 4 SV=1
MQQDPSSDRVVKRVVVAGGGTAGWVTATALARHLGRLIDVTLIESEEISTVGVGESTVPTFKSFHDLMGIKEDQFMAAAQATFKLGIEFRNWGRVGDRYIHPFGTIGTRVSWMAEFHHFWLHAKSRGFGGELGEYCLEWVAGEANRMSVNAAPNMGYAYHVDATRYARFLRAIAEPAGVKRIEGKIRNVDLHPESGFIDALTLESGERVEGDLFVDCTGFRSLLLGQALGVEFEDWGRWITTNSAVAVQSRSSNPPQPYTGAYAHEAGWRWKIPLQHREGNGIVFCNEFMSDDEARAKLLAEIDGEPTIEPWLLRFKTGMRVKSWFRNCVGLGLAGGFIEPLESTSIHLMMAAVTRLIQDFPFNGCNEALIDHFNEKSRLEFESIRDFIILHYHVTERDDSAFWRRCRTMDIPDSLKERLDLWREDARAFKLEDELFRVDSWTSVLLGQRLAPLGYHRLAEMMPDAELRGHLDRMRSEISKIAAKMPTHPDFIRSYCPAEAF

SEQ ID NO: 87620 - protein, 509 aa, Asticcacaulis taihuensis
  REGION 1..509: note = tr|A0A1G4TQJ2|A0A1G4TQJ2_9CAUL Tryptophan halogenase; OS = Asticcacaulis taihuensis OX=260084 GN=SAMN02927928_0073; PE = 4 SV=1
MTAHPGTIEKICIVGGGTAGWMTAAALSHKLRGLPVAITLIESDEIGTVGVGEATLPAIRSFNSALQIDEAAFMRATEATFKLGIEFRNWGRIGDRYIHPFGDYGQKIDGLPFYHYWHRLGQGERLDEYCYGIMLAEQGKFRHPSTNEGDIESTFGYAYQFDATRYAAFLRQFSEAEGVRRVQGKVVETSLDSVTGHVSHLKMDDGRDIEADLFVDCSGFRGILIEQALHTGYDNWSQWLPCNRAIAVPCESRGPLTPFTRATALEAGWQWRIPLQHRTGNGHVYCSDFITDDEAATRLLNNLDAPALAAPRQLYFTTGRRRQFWNKNVVAIGLAAGFLEPLESTSIHLIQEGITELLQIFPDKQFLASDIEEYNRRMSLNIERVRDFLLLHYVATQRDDSEMWRYFRNMTLPDSLQEKIDAWLTRGHLVRYEFGVFLPPSWVAVLLGQNLIPRRHDLRADKAMRDKIAEGADALRGRIRSSVERASGQAEYIKQVRAASDTGPLMAKG

SEQ ID NO: 87621 - protein, 503 aa, Asticcacaulis taihuensis
  REGION 1..503: note = tr|A0A1G4RTM2|A0A1G4RTM2_9CAUL Tryptophan halogenase; OS = Asticcacaulis taihuensis OX=260084 GN=SAMN02927928_2134; PE = 4 SV=1
MADSIRKIVVVGGGTAGWMAASALSKVFGTQKYSLTLIESDEIGTVGVGEATIPTIQEFNKLLELDENEFMKATNASFKLGIRFVDWKRQGSDYFHPFGVYGVDMNVNFTHYWMRYHLAGGNGDFGLFNPQTIAARMNRFGRMSEINPKAPNVNYAFHFDASLYAKFLRRYSEARGVVRQEGKIIGVSQHPESGDIASVTLESGQTIAGDLFIDCSGFRGLLIEQTLKTGYEDWSQWLPCNRAVAVPCDKISGITPYTMSTAREAGWQWRIPLQHRTGNGYVFCESHLSEDKAMDLILQRLDGKPQGQPRVIRFTTGHRKKQWNRNVIAMGLASGFLEPLESTSIYLVQEAIMKLIRFFPRDRITDSLRNSFNAEMFFAYDDVKDFLIAHYKVTEREDTPFWAYCKHMDIPDSLKARLESFAQHNLSLVKPNELFKEASWFAVLAGQGLMPKSYHPVADLMPEDEFRWRMDRVREGTAGLANSMPGHEAYITKACYSPALVKA

SEQ ID NO: 87622 - protein, 511 aa, Novosphingobium sp.
  REGION 1..511: note = tr|A0A4R1UK62|A0A4R1UK62_9SPHN Tryptophan halogenase; OS = Novosphingobium sp. PhB165 OX=2485105 GN=EDF56_106198; PE = 4 SV=1
MANEPIRSILIVGGGTAGWMAANLLATRLRRLPIEITLVESPDIRTVGVGEATVPAIRDYFRAIGVTEAEVMRASQGTVKLGIEFRDWRAPGTSFFHPFGRYGVDAFSVPFHQYWLKRRMAGDETPLSAYCLPTQAAMRNLMLLPPEQPANDLGVFDWAIHFDAGLFARFLSQRAQDDLGVRHVEGTISGAKRDTENGRIASVSLSDGRTLDADLFIDCSGFRSLLLGQTLEVPYEDWTHLLPCDRAVAMPCTHGDELTPYTRSTALPAGWQWRIPLQHRVGNGYVYSSRHISDDEATATLITNLEGEALAEPNMLRFRTGHRTRVWEKNCVALGLAAGFLEPLESTSIVLIQSGIERLLAHFPDRDFDPTLADEFNRITALEYARIRDFLLLHYWGGQRNEPMWRECRALDLPETLAQRIRTFKGSGKLPRFEWDSFQPPSWLSMFAGFDIWPPRHDPLADQFSTEELAGTFGQIREAIGRAVALASPHADFIADTCAAPSSPQPAAVPV

SEQ ID NO: 87623 - protein, 485 aa, unidentified
  source 1..485: note = Sphingorhabdus sp.
  REGION 1..485: note = tr|A0A220W3M6|A0A220W3M6_9SPHN Flavin-dependent tryptophan halogenase RebH OS=Sphingorhabdus sp. SMR4y; OX = 2584094 GN=rebH PE=4 SV=1
MSGGEQPLRRIAIFGKSHELWPVAALLELELPPDITLVLVEDTRPVEPAAVTVRLDDPLLLRLGINGEDLQKTSSAVFALGCELRDWKDGSSSFFLTGSGSLPAVDDVAIHQIMLRAAELNDQRDRLAYLYQPFRLPARAAAAGKFAFQSPDPRSPLSMLRPTVQIDRAEYAELFRQRTKSRRTEIVKASPKFAFPSSDGGAIDRIALDNGAAIKADFHIDMSGEASGLVTDFPRPDWHSIAGKLPFDRLLSGTQTGVPSAAERHVVARAIRGGLMISTPLRERSTVQLLCLSGHLSADEWRALVGSEAQEIRLDPGYVDQAWTGNMVRLGSASASLGPFLSADTTILHRQAVILANHLPARLDMTVEAREYNRRHLAAVEHVRDFTLLPFALNRRTDLPWSGIEKQRMPENLRRRIDQFRSRGRLVAFEDEIFDEQSWIDLMMGFGIVPDRFDPMAQTLDMAAMPRRLKNLTRAFDRALAEMPL

SEQ ID NO: 87624 - protein, 511 aa, unidentified
  source 1..511: note = Sphingorhabdus sp.
  REGION 1..511: note = tr|A0A220W3Q6|A0A220W3Q6_9SPHN Flavin-dependent tryptophan halogenase RebH OS=Sphingorhabdus sp. SMR4y; OX = 2584094 GN=rebH PE=4 SV=1
MKDRGDRAIREIVIVGGGTAGWMTAAALSHRLGNSGPDIRLIESAEIGTVGVGEATLPQIRDFNRMLGIDEAELMARTSATIKLGIEFCDWGREGDSYIHPFGVHGEPIGPVDFHHYWVRQKGEGKAEEFGRYSLAIEAARLHNFSLPPDVPASLFEAYSYAFQFDASLYAAFLAEYSAARGTERIEGKVVAVGRDGETGFIRSVTLASGEQIAGDLFVDCSGFRGLLIEQELATGFADWSAYLPCNRAFAVPCEIGDPVGPFTRSTARSAGWQWRIPLQHRLGNGHVYCDRYISDQDALDDLMENLEGEPIAEPKQLFFKTGKREKLWNRNCVAIGLSGGFLEPLESTSIDLIQSGILNLIALFPEKQCAASDVEEYNRVMDLEYDRVRDFLMLHYVLNQRDEPFWRDMREMVWPDSLSEKVEAFKRRGLVPQYDHGLFQPASWLSVFIGQNLLPETCDPRVDSMAAGDRASELERIRTAIDASAGRMGKHLAFIETYRARFSGSRSDAR

SEQ ID NO: 87625 - protein, 490 aa, Streptomyces sp.
  REGION 1..490: note = tr|A0A429HK44|A0A429HK44_9ACTN Tryptophan halogenase; OS = Streptomyces sp. WAC 05379 OX=2203207 GN=DMH26_20445; PE = 4 SV=1
MTSDYDLIVVGGGPAGSTAATAVALRGHRVLLLERETFPRYQIGESLLPATVHGLCRILGVADEVAEAGFTLKRGGTLRWGRTPEPWQFSFAMTPRLPEPTATAFQVERSRFDEILLRNAERVGVEVREGSPVRRVLTEGERVHGVEYTDRDGTPRTAHARYVIDASGNTSRLHGKVGGARVYSDFFRNLAVFGYYAGGQRLPEPNSGNIFCAAFDAGWLWYIPLRDDLTSVGAVISPEHYPAVQQDPRAAWQDMIKACPEVARLLTDVPVATEQPYDRVRVRKDYSYWKTSLWTPGMALVGDAACFVDPVLSSGVHLATYGALLAARAVNSALDGSVPEERGFAEFEARYRREYGVFYDFLIAFYDMERNEDSYFWAAKKVTEVDIDEVAAFAELAGGVASGDEAVGATGRLGTYWSAAAAELDAAVDHLTAPDEPRTNPLLTTQVVTDTFRTGNALQEQALYGGPLDAPAAPTPGALTVTEDGLSWVV

SEQ ID NO: 87626 - protein, 488 aa, Streptomyces sp.
  REGION 1..488: note = tr|A0A429HP27|A0A429HP27_9ACTN Tryptophan halogenase; OS = Streptomyces sp. WAC 05379 OX=2203207 GN=DMH26_13625; PE = 4 SV=1
MAVVGGGPAGSTLAALVAKQGHRVVVLEKENFPRYQIGESLLPSTIHGVCRLSGAADDLAKAGFPLKRGGTFRWGARPEPWTFAFSVSPRMAGPTSVAYQVERSKFDDILLKNARKQGADVREGCSVRGVIEEGERVRGLTYADADGNEREIRARYVVDASGNKSRLHNKVGGTREYSDFFRSLALFGYFENGKRMPEPNRFNILCVAFESGWFWYIPLSDTLTSVGAVVRRELAEKIQGDPEKALRALIDECPMIADYLSDATRVTEGQYGEIRVRKDYSYHHTTFTRPGMMLVGDAACFVDPVFSSGVHLATYSSLLAARSLNSVLEGKVDEDAAMKEFESRYRREYGVFYEFLVSFYEMHRDENSYFWQAKKVTANSEPELQSFVELIGGVSSGEQGLMNTDALSERLADNSEEFATAVEKFAANEDGSSVPLFSSSVVRNAMQEAGQVQMRALLGEDAEPETPMFPGGLVSSPDGLYWLPATTA

SEQ ID NO: 87627 - protein, 513 aa, unidentified
  source 1..513: note = Porphyrobacter mercurialis
  REGION 1..513: note = tr|A0A0B2C0Q3|A0A0B2C0Q3_9SPHN Tryptophan halogenase; OS = Porphyrobacter mercurialis OX=1572751 GN=PK98_03595; PE = 4 SV=1
MNDIKHIVIVGGGTAGWLTAGIIAARHQGRRPHGFTVTLVESPNVPIIGVGEGTWPTLRATLRKIGVSETDFFRHCGAAFKQGARFNRWTTGAADDGYYHPLMLPQGFAQTNLVPHWLAAEAEESFCDAVTPQGRLCDAGLAPKTITTAEYDGPANYAYHLDAGKFASFLQRHCCDTLGVRHVLADVTDVHLDDSGDIDRLDTKQGVTIAGDLFVDCTGFAALLIGKTLGVGFRDCSDVLFCDTALAMQVPYDRPDAPIASHTISTAQDAGWIWDIGLPARRGVGHVFSSSHTSVEAAEQALRDYVGPAARDLTVRHLPIRSGHRELFWKNNCVAVGLAAGFLEPLEASAIVLIELSAKIIAEQLPASRAVMDTVARRYNDTTLYRWGRIIDFLKLHYALTKRTDTQFWRDNQRAETIPDRLRELMSLWAYHPPWLHDEFDRAEEIFPAASYQYVLYGMGHRTALQPGSFEADAEQASRLRRENRSYTDRLLGALPAHRALIDKIIHHGLQPV

SEQ ID NO: 87628 - protein, 497 aa, Sphingopyxis sp.
  REGION 1..497: note = tr|A0A1G3JYQ5|A0A1G3JYQ5_9SPHN Tryptophan halogenase; OS = Sphingopyxis sp. RIFCSPHIGHO2_01_FULL_65_24 OX=1802171; GN = A2885_16330 PE=4 SV=1
MSARTRPVRRIVIVGGGSAGWMTAAALGRALAGQDRTITLVESETIGTVGVGEATVPPIHEFNRYLRIDPTDFLRATHGTIKLGIAFDGWGGADNSYFHPFGYLGVEMSGIHFHHYWLRHIAAGGDPDHGPYNLETMAARAGRFVPATRHGPVHHAVHFDAAAYARFLRTYAEDKGVVRVEGKVADVTLDPEDGYIEALTLDDGRRIEGDLFIDCSGFRGLLIEGALATGYTDWNHWLPCDSAVAMPTERSGDPPPFTRSTARAAGWQWRIPLQHRDGNGYVYSSAHLGHDAAETALRANLPGAPLADANRLRFTAGHRKAIWNRNCVAIGLSGGFLEPLESTSIHLIQTTIIRLLALLPRDGFDPHVVARFNRDALHEYATIRDFVIAHYATANRADTPFWRDVAAAGVPDSLAERIEAYRATGNILFEPGDLFGPTNWYAVLTGQGVKPQSWHPIADGLSSEELAARLATLRGRVAEQLSELPPHSEFLRRLSAV

SEQ ID NO: 87629 - protein, 496 aa, Asticcacaulis taihuensis
  REGION 1..496: note = tr|A0A1G4QU62|A0A1G4QU62_9CAUL Tryptophan halogenase; OS = Asticcacaulis taihuensis OX=260084 GN=SAMN02927928_1518; PE = 4 SV=1
MNAQMIKKVVIAGGGTAGWCAAAALSRLLGSVLDITLIESADIGIVGVGESTIPTVRAFHHLIGVDEQAFMRETNATFKLGIDFENWARQGDRYFHSFGTLGKSPWMAHFYNIWLEARSKGLGGSLDDYSLETKAAMAGKFQLHKNLSINYAYHLDAVLYGQYLRKLSEEAGVKRQEGQIVSVQQDAGTGFIASVTLASGEVIEGDLFIDCTGFRGLLIEETLKTGYEDWSHWIRTDRALAVQTESAGAPLPYTKVVAHTAGWRWRIPLQTRVGNGLVYSGAHMSDDEAHALLTKSLDAPMVNTPRVIKYKTGRRRKIWNKNCVAMGLSSGFIEPLESTSIHLFQKSILNLIQNFPFFGITDALVARYNELSDREAEYARDFVILHYKLTERTDSPFWPENAEMTVPDSLQSRIDLFRESGMAYQEPGELFRTDSWAQVMLGQRLEPQGWHRLGALMNPAEMNQVFDGLKATVDNTVANMMPQDAFLKQYCPTAIA

SEQ ID NO: 87630 - protein, 467 aa, unidentified
  source 1..467: note = Alteromonadaceae bacterium
  REGION 1..467: note = tr|A0A495DGY0|A0A495DGY0_9ALTE Tryptophan halogenase; OS = Alteromonadaceae bacterium 2052S.S.stab0a.01 OX=1304900; GN = K256_3898 PE=4 SV=1
MQNLKLVILGNNLDAWITTAYLLREQYRLTAPIELTLCCGYSNHPQVGRIVTAPIDRELFRYLGISEKEILSAGDGHFSLGYAIGKLSEIRTFTWGDTGFDFDGLGFQHLWTWYKQQDSATHPWHAYSFTHHMSEAQKFVHPQEDRQSILSLIDYGLSVDEAALLELVRSRVEADKLRIVDEQPQFNGSDLQNQTANSLQLHSGELLSADLIIDCRCETRRPLFSAGPRMEPGTADVITQLHACNGLWQAQENSDSHQYRWVSPLESPQAASAVLACSKWLEQESLASADISVTEIIQKPWNSHLLVLGTVATGSPLPALSPLYLLHRQLSALVKLLPGDTSSLDVCAREYNRTFSVLRERLTEWRELWSYAAGSIEASGLETSMAHTIALFRSRGKLALNDEPLLSDKDMIKLLIALGIEPEGYDPLLDHKSLQDMARRLSSGSDMLVNSVQQLPDEAVYRAHFLK

SEQ ID NO: 87631 - protein, 503 aa, Asticcacaulis taihuensis
  REGION 1..503: note = tr|A0A1G4TG86|A0A1G4TG86_9CAUL Tryptophan halogenase; OS = Asticcacaulis taihuensis OX=260084 GN=SAMN02927928_3513; PE = 4 SV=1
MPEPIRKIVVAGGGTAGWMTAAWFARLLHGTPVEIVLVESDEIGIVGVGEATTPYLHVFNQVMGIDEDDFLRFTRGTFKFGIEFVNWGGAGRAYHHPFGAPGRDYGPLPFHSVWLRHALANPSDTLEAYNLQSLAARHGKFMRPSGANSPLADLTYAFHFDASLYARYLRQISEAAGVQRIEGRIEQVRLTADGSIEGLSLNEGRSVDGDIFIDCTGFRSLLLGEALGVGFEDWSHWLPCDRAWAVPTARDGAPLPFTRSTARASGWQWRIPLQHRDGNGLVFASAFMNEAQAVDQLVANLEGPPLADPRLIRFRTGRRKKVWEKNCVAIGLAAGFLEPLESTAIMLIQKAIAYLQYLFPDKGFSDADRDLYNADMGREYEVVRDFLILHYRAGERRDSDFWRYCASMSIPDSLQNRIDLFQSRGRIQEIPGEQFRIQSWLAVMWGQGLRPAAPDPLAMTLDEAALNKWLAEMRDVIARCCDYMPSHSDFIAQHCAANLTVPE

SEQ ID NO: 87632 - protein, 501 aa, unidentified
  source 1..501: note = Alteromonadaceae bacterium
  REGION 1..501: note = tr|A0A495DD07|A0A495DD07_9ALTE Tryptophan halogenase; OS = Alteromonadaceae bacterium 2052S.S.stab0a.01 OX=1304900; GN = K256_2221 PE=4 SV=1
MDNPKVKRVVIAGGGTSGWLAAAALSKKLGEIIEITLIESEAIGTIGVGEATIPPMRTFHKLLGIDEQEFMRATAATFKLGIKFENWGALDDSYIHSFGQTGKETWLAGFHNFWLHGQARDLALPFSEYCLELQAAKAGKFATSPQSSINYAYHLDAGNYATYLRSFCRDLGLNHIEGKIVNVAQNPDNGFITALTLDSGEVIEGDLFIDCTGFRGVLIEQTLHTGYEDWSHWLPCDSAVAVQTQSVAPAAPYTRSIAHESGWQWRIPLQHRVGNGLVYCSKYMTDEDARALLLDNIQGETINEPRVIKYRTGRRRMGWNKNCIALGLSSGFVEPLESTSIHLLMMGVTRLMQLFPFSGIHESVAEEYNEQARVELEKIRDFIVLHYYATARDDSPFWRHCKSMSIPDSLRHRIDLFRETGRVFQSEGELFRVDSWTQVMMGQGIMPKEYHPMATMMSDQELKGLLDNISSGIQDAVARMPTHEQFIEQYCKLERSEALGI

SEQ ID NO: 87633 - protein, 497 aa, unidentified
  source 1..497: note = Sphingomonas pokkalii
  REGION 1..497: note = tr|A0A2U0SC33|A0A2U0SC33_9SPHN Tryptophan halogenase; OS = Sphingomonas pokkalii OX=2175090 GN=DD559_05985 PE=4; SV = 1
MSDDRRIRSICIAGGGSAGWMTAAALANALGVGTAITLIESSDIGTVGVGEATIPPIRLFNRTLGIDEAEFVRRTRGSFKLGIEFVDWGRIGARYFHPFGPFGRDFDLVPLHQYWLDARDKGDAPALDDLSMAWAAAKRGKFAPPLADPRSVGSTFDYAYHFDAGLYAALLRDYAEARGVVRIDARIAGADRDGENGNLAAVLLADGRSIPADLFVDCSGFRGLLIEEVLGTGFVDWRHWLPCDRAVAVPCEPGAFTPYTRSTARAAGWQWRIPLQHRTGNGHVHCSAFMGEDEARAILLANLDGAPLAEPRTLRFTTGHRRRFWSHNVVAIGLSSGFLEPLESTSLHLIQAGISKLLALFPSRDMDPLLVDEFNRISIAEFERIRDFLILHYKLTERADSPLWRYCATMAVPDTLQWKIDHFRRYGRLVAREFDLFAAPSWLAVHIGQGNWPVGRDALLAARGIDGRAHLAKLADAMARAAETMPSHADYVAQLTR

SEQ ID NO: 87634 - protein, 484 aa, Sphingopyxis sp.
  REGION 1..484: note = tr|A0A1G3KHC0|A0A1G3KHC0_9SPHN Tryptophan halogenase; OS = Sphingopyxis sp. RIFCSPHIGHO2_01_FULL_65_24 OX=1802171; GN = A2885_15630 PE=4 SV=1
MTAAALAKLLPGQADIQLIESEEIGIVGVGEATLPHLREFIRRLGLDEMEFMRTTRATFKLGIDFVDFGAIGERYIHPFGAYGTDIAGVGFHHYWLRMQAAGQVPPICDFSLPIVAARGKRFAPVPEGGDLLDSSYSYAYQFDATRMAPMLRRFAEAHGTRRTEGKVVAVERDAASGDVARLRTDRGDVIEGDLFIDCSGFRALLIGETLQSPWEDWSEWLPCDRAAALPCAAPDGPIEPYTRATAMPAGWRWRIPLQHRVGNGYVFSSNHVSEDEACAAILGAVEGEPLADPRVLRFRAGRRTKSWDRNVVAIGLASGFLEPLESTSIHLVQQAVTRLVELFPQRRIDACDRDSFNALVDREYDRIRDFLILHYHATRRDDSDFWNHVRTMALPPELERKMALWKDSGRVELYTEGLFLEASWVAVYLGQGVMPRGYDQRADIPPQNRIAQSLADLDGAIRSRVAAWPDHAEYLRQAGAWEAA

SEQ ID NO: 87635 - protein, 467 aa, unidentified
  source 1..467: note = Flavobacteriaceae bacterium
  REGION 1..467: note = tr|A0A349NR28|A0A349NR28_9FLAO Uncharacterized protein OS=Flavobacteriaceae bacterium OX=1871037; GN = DCS66_11675 PE=4 SV=1
  VARIANT 450: note = Xaa can be any naturally occurring amino acid
MRGERHGKDLNPLNKIENIIIVGGGSAGWMTAATLLSQFPDKKITLVESPNIPTIGVGESTVGGGQSGFSGIISWLNMLEINDDFMPHCDAIYKLSIAFKDFYYKDSGTFHYPFGKPYIHNNKTQNMNDWYLKKIRSPEIPVTDYADSLYPAMALVNQNKSLFTDNFSRDHGRTELEKRYSENEVQLYSQYSYQFDATKFGIWLKDHFCKKKYSKKFKHILAEVKDTPLNADGIEHLLLDTGQKLKADLFIDCTGFKSVLMSKFKIPFIPLYSNKIIPNNHAWATKIPYTNKEKQIVNYTNCTAIGNGWVWEIPLWSRMGAGYVFSDKFISHEDALKEFKKELTKKGYTHLEELEYRLIPMRCGIQSQLWIKNTCAIGLSGGFIEPLHSNGLHSTHEFLFNLVRTLAPGRINQWDRQCFTANCHHDFKKFAALVGLTYTLSHRDDTEYWXRRRSVISLIQSIQKLRS

SEQ ID NO: 87636 - protein, 275 aa, Streptomyces sp.
  REGION 1..275: note = tr|A0A286G5U0|A0A286G5U0_9ACTN Tryptophan halogenase; OS = Streptomyces sp. Ag109_G2-15 OX=1938850; GN = SAMN06272765_6629 PE=4 SV=1
MRATLDIDPYVKVNPTLPTNGPWHGFQVDRQRLDALLLDRARQAGAEVRLGCRALEPVVAGGAVTGVRFSGGAWPPLRTRTVIDATGRARWLSRALDLTAPPCSPRLLIWYGYASGACAQRDAAPAIVADDTGWTWTARVGPARYQWMRLDFVPRRGRKYGPPREFAGLESEAPARAADVSWRLCPEPAGPGWFVTGDAGVLLDPASSHGVLRALLSGWTAGSLTAAAAARALDPGRAAGIYRQWLHEGAERDMIHLSARYATLGARGFGRAEGA

SEQ ID NO: 87637 - protein, 508 aa, Sphingopyxis sp.
  REGION 1..508: note = tr|A0A1G3K385|A0A1G3K385_9SPHN Tryptophan halogenase; OS = Sphingopyxis sp. RIFCSPHIGHO2_01_FULL_65_24 OX=1802171; GN = A2885_21000 PE=4 SV=1
MNPVTQQSPHIVILGGGSAGWMTAALFAHHWRENGMRISVVESPDIGIIGVGEGSTPQLKAFFDGLGIAEAEWMPACDATYKLGIAFEGWSEGRPDAGYFHPFPGPLDVHTEAAFFRNAALRRAGVDVPANPDRFYLAARVAARGGGPHGGESFPFDLAYGYHFDAYKLGAFLRDHAVSQGVTHLARKVVSVDVGADGNVRSLGLEGGEALAADFFVDCSGFGGLIAGQALGARFLPFAENLFNDRAVVMPTAHDERGPVVTATKSIAMTAGWRWAIPLTTRIGNGYVYSSRYLDRDQAERELRIALGLTDADGPARHLEMKVGRLERSWTANCLAMGLAQGFIEPLEATALHIVIATAQEFITAFERGGFTPRHRDVFNARIAERYEGIRDYIVAHYRMNRRDADSGYWRDAAGLEALSDNLKAMITAWFTGADMGEAIADRGIGAFYPNISWHCLFAGYGVFPSNAVMRSPVATDRPADLAAIDLFLSRAELNFVRPAFPVAALQP

SEQ ID NO: 87638 - protein, 509 aa, Sphingomonas sp.
  REGION 1..509: note = tr|A0A4Y8ZSQ0|A0A4Y8ZSQ0_9SPHN Tryptophan 7-halogenase OS=Sphingomonas sp. 17J27-24 OX=2555898; GN = E2493_09700 PE=4 SV=1
MTRRGEVKTIVIVGGGTAGWMAAAALARYAGRGRAIRLIESDEIGTVGVGEATIPQIRLFNEGLGIPEEAFVRETLGSFKLGIEFVDWWKPGQRYFHGFGAVGQRLGLLPFHQYWLRYRAGGGRHGLWHFAPNFRAAAGNRFGRPIERPGAPSGVHHAYHFDASLYARMLRSYAEGRGVRRTEGKVAAVDLGGEDGFVEAVRLESGERVAGELFIDCTGFRGLLIEQTLRSGYEDWSHWLPCDRALAVPSERVAPLTPYTRSTAREAGWQWRIPLQHRTGNGMVYCSAFLDDEKAAETLLASLDGAALASPRPLRFTAGKRRAAWKKNCVAIGLAGGFLEPLESTSIHLIQSAIARLLAYFPDAAFDAADIAEYNAQTDIEWEAVRDFIILHYHLNARPGSEFWRHCREMVLPERLAQKIALFGASARITRHNLELFDDPSWLQVMWGQGLRPRAYHPLADGISDRELEEFIALAGQHAQRVVSEMPDHADYIAATCAAPIDERRAAAG

SEQ ID NO: 87639 - protein, 516 aa, Caulobacter sp.
  REGION 1..516: note = tr|A0A2R7L6S2|A0A2R7L6S2_9CAUL Tryptophan halogenase; OS = Caulobacter sp. HMWF025 OX=2056860 GN=DBR10_15985 PE=4; SV = 1
MTGPIHQVVIVGGGTAGWLSACLVAARRPDLSVTLVEAPNIPTIGVGEGTWPTMRETLATIGISETEFLSACDASFKQGSRFDGWVDGSAGDSYLHPFSPPPASDMRDLLAAWRASGSGTPFAAAMSPQHAACAHHLAPRQRSMPDYAAALNYGYHLDAGKFAALLARHATTRLGVTHIAGEVVGIVTAQDGDIAALELKDQSSVSGDLFIDCSGQAALLIDKHCKVDWVDRSDVSFNNRALAVQVPVDSDAPIAAQTIGTAHRAGWLWDIALPTRRGIGCVYASEFLSDREAEEVLRDYVRTKVSSLAADRLNIRQLSFKTGHRAKFWERNCVAIGLSAGFIEPLEASAIVLIELSLKALVDNFPTRRDVMDIHAARFNELFRYRWDRIVDFLKLHYVLSRRDEPYWRAQRVPETIPEQLKQQLAVWEDQPPSLWDLPRVEEMFSPASQQYVLYGMRPAKTPDAGPPSAAALSRLVEVREKARLITTALPTNRAYFTAAQSQTPAKVAPGDAIPK

SEQ ID NO: 87640 - protein, 505 aa, Robiginitomaculum sp.
  REGION 1..505: note = tr|A0A2G2LGS6|A0A2G2LGS6_9RHOB Tryptophan halogenase; OS = Robiginitomaculum sp. OX=2030823 GN=COA85_12155 PE=4; SV = 1
MTHSPIKKVVIVGGGTAGWMSAAVLTRAFGKGVQICLVESEAIGRIGVGEATIPQIHNINKFLGFDEDDFIRHTQASFKLGIQFDGWNQKGECYLHAFGDLGMPLGLTPFHHYWLRARANDQDTSLWDYSLNAQTALQNRFARLDHVGQSRLSGIKYAYHFDANLYAIYLRDWATANGVTRIEGKVVDVKLRSADGFIQSVSMEDGTQIAGDLFVDCSGFRALLIEGALGVGYVDWSHWLPCDRAQAVPSQRTSPMRPYTQSMARKAGWQWRIPLQHRTGNGHVYCSDHMSDDEAASILMQGLEGEALDEPRLVKFTTGRREKFWHKNCVAIGLSSGFMEPLESTSIHLFQSSVSRLLAMFPDQHFDPALSEEYNRQTVFEFERIRDFIILHYVANGRKGEAFWDACRHMDIPDTLTRKIELFRQSGRIFREHEELFTETGWLQVLVGQGVLPQSYHHLADGLSEEELSEFLGNLNTLITRAVGDLPDHESFIARQCAAPDNFAQ

SEQ ID NO: 87641 - protein, 415 aa, unidentified
  source 1..415: note = Caballeronia udeis
  REGION 1..415: note = tr|A0A158ILR0|A0A158ILR0_9BURK Tryptophan halogenase; OS = Caballeronia udeis OX=1232866 GN=AWB69_06173 PE=4 SV=1
MNTDSSKLDTTVDVAIIGAGPSGAVAAALLRKAGRSVLVLERQHFPRFSVGESLLPQSMAYLEEAGMLQAVVEAGFQYKNGAHFIYRDQSSSFDFRDKHSPGWGTTYQVERAVFDDLLIQCAAKQGAEVRFGHTVQAMQTGTAPVLDVIDEAGVAYHVHARFVLDASGFGRVLPRLLNLEAPTRMPARAAIFTHVRDGIPAGATDRNKICVATHPEHRNVWFWMIPLAGGRSSVGCVAEASFLEVPENERDAKLRGLIQQEPTLNRLIGDAPFLMPVRHIGGYSANVERLHGPGYALLGNAGEFLDPVFSSGVTIALRSAHLAVQTLERHFNGEVPDWQAAYDVPLRKGIDTFRAFVERWYTGELQDIIFYPHKTPHIQRFISAVLAGYAWDESNPYVADPVRRLNALHEICKGS

SEQ ID NO: 87642 - protein, 512 aa, Sphingomonas sp.
  REGION 1..512: note = tr|A0A4Y8ZU29|A0A4Y8ZU29_9SPHN Tryptophan 7-halogenase OS=Sphingomonas sp. 17J27-24 OX=2555898; GN = E2493_06905 PE=4 SV=1
MKPVKQPLNLVIVGGGTAGWMAAAAFSRVLGPGVCRIRLIESEEIGTVGVGEATLPHMKSFNDLIGLDEVEMMRETSATFKLGIDFVDWGGKGRRYVHPFGDHGRPALGLPFYQHWLRAVQGGADLDIGDFSYAVVASRLNRFDFPNADPQRIDSTYSYAYHFDASTYARLLRRLAESAGVVRTEGKVREVKLDPLNGEIAALALESGEDVAGDFFVDCSGFRSLLLGQTLGAEWESWSQWLPCDRAFAVPSARATDFSPYTRSTCREAGWQWRIPLQHRTGNGHVFASQFISEDEAAATLMQNLPEEALGEPRMLRFEAGRRLKSWSRNCVALGLASGFLEPLESTSIYLIQVAIMHLLPLLPTTPVDPALADEFNRRIEIEYERIRDFLILHYHATGRDDSELWRYCRAMPIPESLQRKLALFQHSGYIEQYRDGLFTLPSWVAVYAGQGVIPTGHHPLAEGLPYDRLIADLERLRDEVRQRAEAMPAHEDFVGRYAPALALVQASGAHP

SEQ ID NO: 87643 - protein, 510 aa, unidentified
  source 1..510: note = Sphingomonas pokkalii
  REGION 1..510: note = tr|A0A2U0SF71|A0A2U0SF71_9SPHN Tryptophan halogenase; OS = Sphingomonas pokkalii OX=2175090 GN=DD559_12280 PE=4; SV = 1
MREDLIRRIVIVGGGTAGWMAAAALSRLIGRMPGLELELVESDAIGTVGVGEATIPHITLFNTMLGIDEAAFVRETNATYKLGIEFVDWHRIGHRYIHPFGVYGLDMLGVEFHHFWLKARTLGDPTPLDAYSIGIAGGLRGRFAHPRPDQPNSPLAKLGYAFQFDAGLYAAFLRRLAEGMGACRTEGRIVDVRRDGGSGHVAAVLLESGKEVAGDLFLDCTGFRGLLIEQTMGAGFRDWTHWLPCDRAVAVPCALGGDHLPLTRATARAAGWQWRIPLQHRIGNGYVYAGDYLSDDEAVATLLANLDGPALADPRPLRFRAGHRDRAWIGNVVVLGLAGGFLEPLESTSIHLIQSGIGRLMALFPSRGFDALEIERFNRETAQEYEDIRDFLILHYKATERDDSAFWRRCRDLEPPEGLAEKLALFRGNGRIHPAQRELFQQASWLAVMNGQGITPAGYHPVADLLSDAETRERLKHIAQVIDETANAMPLQDDYLRQIGCALPAARQAS

SEQ ID NO: 87644 - protein, 485 aa, Caulobacter sp.
  REGION 1..485: note = tr|A0A2R7L942|A0A2R7L942_9CAUL Tryptophan halogenase; OS = Caulobacter sp. HMWF025 OX=2056860 GN=DBR10_13470 PE=4; SV = 1
MTAAGLAAVLGDSGVSIALVESAEIGTVGVGEATVPHIRHFNARLGLDEADFMRRTQATFKLGIEFRDWGRKGDSYIHPFGGFGQPIGGVAFHHHWLRARQRGEAADLEAYSLPIIAARTGRFAPPSPDPRALASTFAYAYQFDAGLYAAYLRTYAEARGVVRTEGRIRDVTLRGEDGFIEAVVLESGERIEGDLFIDCSGFRGLLIEQALKTGYEDWTRWLPCDRAAAVPCEAVEPPGPYTRATSDEAGWRWRIPLQHRVGNGYVYCSGYISDDEAAKVLLEKLDGRPQADPRFLRFTTGRRRRQWNRNCVAIGLASGFLEPLESTSIHLIQVAITTLLEMFPDQSCAQADQDEYNRVMDLEFERIRDFLVLHYHATQRDDSPFWRDKAAAPIPDSLSYKMALFRERGMVVKYRDGFFLEPSWLAVYLGQNIMPQGYDPMTDAIDPKDSARLLGELQAAVARTAQAMPSHEAYIARFCDARGAA

SEQ ID NO: 87645 - protein, 500 aa, Caulobacter sp.
  REGION 1..500: note = tr|A0A2R7L6Q9|A0A2R7L6Q9_9CAUL Tryptophan halogenase; OS = Caulobacter sp. HMWF025 OX=2056860 GN=DBR10_15970 PE=4; SV = 1
MTHAYQKQRIVVAGGGTAGWMTAAALARTLGDAIDLTLVESDAIGTIGVGESTIPPIVLFNRLLGIGEADFMRATQATFKLGIKFENWKDVGESYFHSFGTTGKDHWSAGFQHFWMHGLTKGHVHSYDDYCLELKAALEGKFAHLPDERMNYAYQLDSTLYAAFLRKMAEGEGATRIEGKIARVELDGTTGNIAALCLDGDRRVEGDLFIDCTGFRALLIEGALHAGYDDWSHYLPCDSAIAVQTASVRPPVPYTRAIAHDAGWQWRIPLQHRQGNGIVYCSRYLDKDAALDRLLGSVEGEVLTKPNVIGFTTGARRKQWHRNCIAVGLSGGFMEPLESTSIHLIQRAILRIIRMLPNGKVSERDIAEFNEQQFADMYQIRDFLVLHYKVTERRDSPFWRHCAALPIPESLEQKIELFRETGRVFRRNEELFAENSWVQVMMGQGIMPETYHPVATKLPPEELEGFLAAQREAVANTVARLPDQQSYLAYYCSAKDERAA

SEQ ID NO: 87646 - protein, 505 aa, Xanthomonas oryzae
  REGION 1..505: note = tr|A0A411Y2L3|A0A411Y2L3_XANOO Tryptophan 7-halogenase OS=Xanthomonas oryzae pv. oryzae OX=64187; GN = EBA04_06520 PE=4 SV=1
MTQAQIRKVVIAGGGTAGWIAACALSHQFRGLLAITLVESEQIGTVGVGESTVPPIRTFHRFLQIDEQEFLRAVAGTFKLSISFEHWRAQGERYIHPFGITGQSTLVCAFHHLWLESQRRGMPGSFGDYCLETVASRVDRFALHGEPAVNYAYHLDAALYAKFLRARSEACGVKRIEGKIQQVTVQPHSGDVASVVLEDGHVIEGDLFIDCSGFRGLLIEQTLHTGYEDWSHWLPCDRAVAVQTEAVGPPVPYTRAIAHEAGWRWHIPLQHRVGNGLVFSSKHLSDDQAHAKLLHDVAAPAVKDPWMVPFRTGRRLKAWNKNVVSLGLASGFIEPLESTSIHLTISAVVRLLALFPGEGIAPSQVQLFNDVSRAEMEHVRDFVILHYHATQRNEPLWQQCRAMELPESLALRLRAWRERAHAWQGADELFRVDSWTHVLMGQGIEPEQHHPLTRAFSDHDLRRLLDGIAQPIQHAVQQMPSQHAFIERYCKAGAQVWGMRSPVPA

SEQ ID NO: 87647 - protein, 506 aa, Sphingomonas sp.
  REGION 1..506: note = tr|A0A4Y8ZV15|A0A4Y8ZV15_9SPHN Tryptophan 7-halogenase OS=Sphingomonas sp. 17J27-24 OX=2555898; GN = E2493_06895 PE=4 SV=1
MNDPRIRSIVIVGGGTAGWMTAAALAKVVGTENVSITLVESEEIGTVGVGEATIPPILLFNKMLGIDEDTFVRETNATFKLGIDFVDWRRPGHRYFHPFGLLGADLPDRVGFVHFWLRWVQEGGNPDFSRFSAETEAARVGRFARTPPTGGALPNINYAYQFDASLYAAFLRRFAEARGVERIEGRIVAVRRDAETGFIAAVTLQDGRSVAGEFFVDCSGFRSLLLGDSLEVPFEDWSRWLPCDRAVAVPCARTNDPTPFTTVTGREAGWQWRIPLQHRTGNGYVFASAFIGEEEATEKLLSRLDGAAQAEPRVLRFKAGRRRVCFEKNCLAVGLAAGFLEPLESTSIHLIQIAVNKLLDMFPNRDFHPAILSRFNDETNQVYDSIRDFLIAHYKLTERDQPFWRHCQDIEPPDSLATKLDLFRGRAQVFPSGFDTFHETNWFAILYGQGFEPESYHPLADNMSSDELRVTLAQIRAAIQKRVDGLPPHQAFLEAVASRPGGGALI

SEQ ID NO: 87648 - protein, 472 aa, unidentified
  source 1..472: note = Flavobacteriaceae bacterium
  REGION 1..472: note = tr|A0A349NY03|A0A349NY03_9FLAO Uncharacterized protein OS=Flavobacteriaceae bacterium OX=1871037; GN = DCS66_24225 PE=4 SV=1
MIKKVIVLGGGTAGLIAALILKTRFPVIEIEIIKSDKIGIIGVGEGTTEHFKAFMNVCEISEKEIIQHTDATFKYGVMFKDWAPHDYLQFPDINHRHRIGLYEAYYAYHIGHNISCEKMMEKNLWNKRLTSDHYCNQYHFNTFKLNDFLLMKAHARGIKITNDEIKSVSLKKGIDVLHGEKRKYKADFYVDATGFKKLLISKLGAKWESFNLPMNEAIAFQTPDTENYNTWTLAKAMSAGWLWRIPTYGRWGNGYVYDNHYMDKDRAKKEVEKYLGYSITIGKHIKFEAGALDRPWIKNCAAMGLSATFAEPLEASSIGTTIQQAFLLCHYLINPNQQDKNNYNQSCKAIFKNTRDFIAVHYLIKRKEKFWKELKITFSDDFKNKLEGWKTKLPFDQEFVERYILFRPLNFILVLWGINYFNREAIYNELFHYGKKAESEIQEHIKRNAKLSLTPSLSHKSYLENIRNQHDN

SEQ ID NO: 87649 - protein, 475 aa, unidentified
  source 1..475: note = Sphingomonas pokkalii
  REGION 1..475: note = tr|A0A2U0SJI0|A0A2U0SJI0_9SPHN Tryptophan halogenase; OS = Sphingomonas pokkalii OX=2175090 GN=DD559_12270 PE=4; SV = 1
MSLTRLLVVGGGITGWSTAAAIKRRVPKLAVTILPLAPPPDALADRIATTLPSVLGFHADLGIGLDDAVVRTGSLYRLGTRFEGWVEGALDYVHAYARHGEGIGGAAFQHLWARAALSGDAPPFDSLSPAAAMARAGRFVLPGGDGPLADYGFGLTLDIPRYTAMLMAFARHVGVEGHLGQLAGVEHDAQGGIAGLVLDDGTRLAADLYCDCTGPNARLHGTLGVGREDWKRWLPGDRLVLEAAPIADPLPMERVVATENGWRWIGPTQQGALYSAAHGTVPGEPIPIAAGASLEPWRHNVVAIGDAAVAIEPLEWSNLHLAHSAIDRLITMLPAGAPHPLEAAEYNRQALAEARRVRDFVLLHYATARRDTPFWHDVAGADLPDSLAHTLRLFRERGRLPFYEEETFDRDSWLAVLFGQAVLPRRIDPLADSVPPAEAMRAIAQRHAAIAQAVQPLPTLAAFRAAQSRHLHERA

SEQ ID NO: 87650 - protein, 513 aa, unidentified
  source 1..513: note = Sphingomonas pokkalii
  REGION 1..513: note = tr|A0A2U0SIU7|A0A2U0SIU7_9SPHN Tryptophan halogenase; OS = Sphingomonas pokkalii OX=2175090 GN=DD559_02135 PE=4; SV = 1
MKRVRNIVIVGGGTAGWLTAGVIAARHQGRMPGGFTVTLVESPNTPIIGVGEGTWPTLRTTLAKIGVSETDFFRECDAAFKQGALFARWTTGADDDAYYHPLMLPQGFHQLSLVPHWITDSKGRSFCDTVTPQGRICDAGLAPKTIATPEYEGQANYAYHLDAGKFAPFLTRHCTTKLGVRHVLADVRSVERAENGDIVAIDTEQAGRIEGDLFVDCTGFRALLLGETMGVPFKDCGDVLFCDAALAAQIPYPEDNAPIATHTLSTAQDAGWIWDIGLPTRRGTGYVYSTAHTSDDQAEATLRAYLGPAGADVGVRRIPIRSGHREIFWKNNVVAVGLAAGFLEPLEASAIVLIELSAKLIAEQMPAVRDVMDVVAKRFNATTLYRWGRIIDFLKLHYVLTKRTDTAFWRDNLLPETIPERLQELLTLWRYQPPWFHDEFDRVEEVFPPASYQYVLYGMGFRSEVEPEALSGDQRLAERAMRENQAQTERLCAGLPRHRDLIRKIHEHGLQPV

SEQ ID NO: 87651 - protein, 527 aa, Bacillus sp.
  REGION 1..527: note = tr|A0A328LLX6|A0A328LLX6_9BACI Tryptophan halogenase; OS = Bacillus sp. SRB_336 OX=1969380 GN=B5P43_28450 PE=4 SV=1
MSRIQKILVVGGGTAGWLTACYLAKALNTAAPGSIRVELVESPTIGLLGVGEATFPSIRGTLAAIGLDERRFLVGATATYKQGIQYVNWVRPPGEPGPDRFFHPFSLPSQRAGSPELLPYWLLGGAPEGMAFAEAVTMQKRLIDHGRAPKRSTDPDYQGPMNHAFHFDAACFAAVLAEHGQSLGVRRHLAMVERAELDVSGAIARIVTREIGELTADLYVDCTGLRGALISGAMQSPFHSRRDVLFADRAVALQVPYPRPDASILPFTRATAQEAGWIWDIGLQKRRGIGYVYSSRHSGATRAEEVVREYVGDAAVGLEALHIKFETGYRPEHWRRNCVAVGLAGGFVEPLESTGIALVELAAYLITHLLPGDVDDMERTARRFNEMMVARYERIIDFIKMHYCLTQRGDTAFWVDNTDAASIPQTLQDRLALWRHRPPHRLDFVTDLEMFMPASWQYVLYGMEFKTDLEPMRSAYPQMEAAQREFAMIRQMAGHALDDLPDHRALVEQLCREHAQRAGRTEAVGAG

SEQ ID NO: 87652 - protein, 503 aa, Massilia sp.
  REGION 1..503: note = tr|A0A0Q7XS10|A0A0Q7XS10_9BURK Tryptophan halogenase; OS = Massilia sp. Root1485 OX=1736472 GN=ASD92_16930 PE=4; SV = 1
MQVPHLNTIVIVGGGTAGWMTATALATALRGRYRIRLVESDEIGIVGVGEATIPMIQRFNTVAGIDEAEFLKATNGTFKLGVEFVNWGRLGDRYTHGFGRLGQDLWMVGFEQYWHKMRALGQARDLADYSITRAAARANKFMLPRTDLGNSPLGEITYAYHFDAGLYARHLRKLSEARGVERTEGKIVRVTRRGHDGHVDAVVMENGERIEGDLFIDCSGFRGLLIEQTLEAGYEDWSHWLPCDRALAVPCESVPALTPYTRATAHKSGWQWRIPLQNRIGNGHVYCSRYISDDEAAHVLLSNLDGKPLADPRPIRFTTGMRKKAWDKNVVAIGLSSGFLEPIESTSIHMIQDSIQRLLDYFPDQGFSATDVEAYNRLSRFHYERIRDFIILHYHANQRDDAAFWQACARMEIPATLRDKIDLFRTHGRLRRVDGELFTEVGWLQVLVGQNIHPQAYHPLVDVQSEEGIREYMEGVADVIRQCVDFMPDHAAFIDGYCKAPKM

SEQ ID NO: 87653 - protein, 506 aa, Massilia sp.
  REGION 1..506: note = tr|A0A0Q7XHB8|A0A0Q7XHB8_9BURK Tryptophan halogenase; OS = Massilia sp. Root1485 OX=1736472 GN=ASD92_22355 PE=4; SV = 1
MDKDRWIGKVVILGGGTAGWMTAAALSHTFGHAVEIVLVESDAIGTVGVGEATIPPIRAFHQLIGIDEAEFIRATGATFKLGIEFRGWRSESSTYFHPFGAYGVERDIGYFFQYWLRLKEKGQVSDFSEFSLCTLAARHNVFAPASERPGDPLQHLQSAYHFDAGRYATYLKGVCLARGVAHKIGDMLTAERNPENGYITGLKLKSGELVPGDLFIDCSGVRAMLLGQALGVEYEDWSRWLPMNRACAVPCEQKLALTPYTISTARPFGWQWRIPLQHRVGNGVVYSSEFATDEAAERCLLDGLEGEPLAPINRIKFTAGRRRTPWTRNVVAIGLASGFLEPLESTSIHFIQSSIQRLIRYFPDAGLSPVCAQAFNKEASREVENVRDFLILHYHATERDDSALWRYVKAMQIPDSLQERIALFRERGQLNLAAEELFQSTSWHAVLLGQGIRPRTYMPTMVLQDDAMLANAYGNLERNFKKIVSRLPDHAAYIKEHKLTSTMENR

SEQ ID NO: 87654 - protein, 506 aa, Microbulbifer agarilyticus
  REGION 1..506: note = tr|A0A1Q2M8G8|A0A1Q2M8G8_9GAMM Tryptophan halogenase; OS = Microbulbifer agarilyticus OX=260552 GN=Mag101_15200; PE = 4 SV=1
MNTQNSKKTDAAVKRIVIAGGGTAGWIAAAALSKKLGDLLEITLVESDAIGTVGVGEATIPPLRTFHHLLGIDEQEFMRATGATAKLGIAFENWGREGERYIHSFGKTGTSAWMCDFHHFWLRGREMGFDSDIGEFCLEHQAAEAGRFATSSKSNINFAYHLDATRYAAFLREISEEHGVTRVEGLIQDVRQDAESGDILALILDDGREIEGDLFIDCSGFRSLLAGKALGSEFEDWSHWLPCDRAVPLQTSATEPAMPYTRSIAEKAGWRWRIPLQTRVGNGLVYCSDYLSDDDASALLLDRVDGKPMTEPRVIRFATGRRKQTWKNNCVALGLASGFIEPLESTSIHLIVTGVVRLMQLFPFNGAEPALRDEYNKQTQRELEDIRDFIVLHYHVNQRHGDPFWDHCRQMAIPDSLAQRIALFRERAHAYQNNDELFRVDSWVQVMLGQGLKPQRHHPVTQMMTEQQMQQLQTGLRSQVARAVQTLPPHHEFIQQYCAEAVATEA

SEQ ID NO: 87655 - protein, 510 aa, Caulobacter vibrioides
  REGION 1..510: note = tr|R0D600|R0D600_CAUVI Uncharacterized protein; OS = Caulobacter vibrioides OR37 OX=1292034 GN=OR37_00489; PE = 4 SV=1
MQPLKTILIAGGGSAGWMTAALCSRLFQGLYDIVLVESDQIGTIGVGEATIPAIKKFNELLGLEEDDFLRKTQGSFKLGIQFRDWWRKGESYLHGFGVIGQDLGWLRAHQYWLRMRELGRAPPFDNLAINNAMALSDKFMRARADMSESPIGHIAHAFHFDAGLYAKHLSTYAQARGVKRREGKIVEVTLRPADGFVQSVTLDDGETVAADLFIDCSGFRGLIIEQALKTGYEDWTHWLPCDRAIAVPSERSEHFTPYTRSTAHDAGWQWRIPLQHRTGNGHVYCSRFIDDDEAERVLLSNLDGAQRADPLRIRFTTGKRKKIWNKNCVAVGLAAGFMEPLESTSLHLIQSSVIRLVRLLPDAGFDQATIDEFNRQTDFEYERVRDFIILHYKATERDDTAFWRHCRDMEIPATLQRKMDLFRANGRVFREDDELFTEESWIQVFLGQGVIPRGYDPLVRVHSDEEIARHLGNIETVIGRCLAVMPSHAEFVSRACAAPAPVASTLVPTP

SEQ ID NO: 87656 - protein, 521 aa, Microbulbifer agarilyticus
  REGION 1..521: note = tr|A0A1Q2M8L3|A0A1Q2M8L3_9GAMM Tryptophan halogenase; OS = Microbulbifer agarilyticus OX=260552 GN=Mag101_15480; PE = 4 SV=1
MQQAPLSICVLGGGAAGWLTAAVLAAEHGRVAGGDCKITLVESPTIPTIGVGEGTWPSMRETLRRIGLSERRLFTECDAAFKQGSLFSAWKTTDPNDQYYHPFSLPHGYFEQDLAPFAEREYAYAVSPQATVCDDHLAPKQLATPEYAGVLNYGYHFDAVKFGLCLSDHCTRNLGVQHVRASVASVQSDVEGNIIALVTETGESHSADLFVDCSGRAAVLIGEHLQVPWVDRSSVLFNDRALAVQIPHTSDESPIASVTRSTARSNGWIWDIGLPTRRGMGYVYSSQFTDSDIVESDFREFLSTEVTQKALEELSFRELTFQPGHREVMWRGNCVAVGMSAGFIEPLEASALALIEQSAGLIRDFLPVSKAQMKLAATRFNSQMLAHWDHIIEFLKLHYVLSQRTDSEYWLAHRRAESIPELLQENLMLWRHRAPARQDFPQAQSLFPPASYRYVLNGMAYACDRTRAPRKERDEARAKVLLGEVQKQLASYKQGLPGNRKLLNQLVARSQTSGSPEEVGR

SEQ ID NO: 87657 - protein, 514 aa, Caulobacter sp.; identical to SEQ ID NO: 83001
  REGION 1..514: note = tr|A0A0Q6TXC5|A0A0Q6TXC5_9CAUL Tryptophan halogenase; OS = Caulobacter sp. Root342 OX=1736519 GN=ASC62_06670 PE=4; SV = 1

SEQ ID NO: 87658 - protein, 513 aa, unidentified
  source 1..513: note = Actinopolyspora mzabensis
  REGION 1..513: note = tr|A0A1G9EGL7|A0A1G9EGL7_9ACTN Tryptophan halogenase; OS = Actinopolyspora mzabensis OX=995066; GN = SAMN04487820_11241 PE=4 SV=1
MVDNVVIVGGGTAGWMTATYLNATFGDQVTVSLVESPNLPTVGVGEATFSTVRHFFHYIGLREHEWMPHCSAAYKLAIRFQNWGGENEHFYHPFERPRHVDGCTLADWWLKVGSEAFDRESFVLAALCEARRSPNRAGGALFDRNLHDGGDLPRREVMNGADTQFPYAYHFDATLLAHFLADLGMRRGVHRVLDDVERVVQDETGAIDHLVTKQHGDIYGDLFIDCTGFRGLLINQTLGARFESFQDVLPNDRAVALRVPVDGESQGIAPYTTATAMDAGWAWTIPLYDRIGTGYVYSSEFTTPEQAESDLRAHVGPAADEVEANHIRMRVGRNERFWMRNCVAIGLSGGFVEPLESTGIFFIQYGIEQLVRHFPGPDRSPALRDNYNRLMAGCFDGVREFLVLHYRAARREDTPYWKAINELPLPPGMADRMELWKSRLPDSGSVIADYHGFEPYSYAVMLLGLGQRPRYPHPALRGLDSAAARAEFERVRAEAEQLVNTLPSQYEYLAGMR

SEQ ID NO: 87659 - protein, 522 aa, Caulobacter sp.
  REGION 1..522: note = tr|A0A0Q6U0V0|A0A0Q6U0V0_9CAUL Tryptophan halogenase; OS = Caulobacter sp. Root342 OX=1736519 GN=ASC62_11085 PE=4; SV = 1
MQRRRSILIVGGGTAGWLTAAYLAKALRVAEQAHLEITLLESPDIGIIGVGEATFPTIRNTLRFLGIDEAHFIRETSATFKQGIRFVDWARAPDNDKKGGGKHHSFFHPFEAPFSTEGASLAPYWLLQNEATRAPFAEAVTIQARVADAQRAPKRPHESDFAGPLNYAYHFDAAKLAQVLAERGRELGVRHLTGNLTETVLDDTGAIAHIVCAEHGDLSADLYVDCTGFRAELIGKALGSPFKSARPVLFADRALACRAPYERPDAPIQSYTVATAHEAGWTWDIGLAGTRGVGCVYSSDHIDDDRAEAILRDYLGGGEIQPRLISFDAGYREKQWIKNCVSVGLSAGFLEPLESTGVVLIEAAVAMIAELFPHSGPVGAPARRFNELMTARYDNIIVFLKLHYALSRRTEPFWRENTDPATMPERLVDLLDQWRHRPPARFDFILDLETFAFFNYQYILYGMGFETDLADGAGEFPDVATAQKLFAKIRGFADRATQDLPSHRDLIAQINRFGFDKALEQA

SEQ ID NO: 87660 - protein, 508 aa, Pseudoxanthomonas suwonensis
  REGION 1..508: note = tr|A0A0E3UN60|A0A0E3UN60_9GAMM Tryptophan halogenase; OS = Pseudoxanthomonas suwonensis OX=314722 GN=WQ53_09240; PE = 4 SV=1
MNNPDQAISPRPVKRVVIAGGGTAGWMAAAALSKTLGKVLDIVLVESEEIGTVGVGEATIPTLVTFHRLLDIKEQEYMAAVQGTVKLGISFENWKDVGHRYIHSFGISGKDHWSAGFQNFWLRGRKEGLASEYSDYCIELQASLQDRFSHLPRYHVNYAYHMDAALYARYLRGFSERYGCKRVEGKIVDVVTDGEGCISALKLERGEVVEGDLFIDCTGFRALLIGKTLGVGYTDWSQWLFNDSALATQTTAVRDAVPYTRAIAGKAGWQWRIPLQHRVGNGIVYSSRHMGDDEARAEFLGSIEGEVIKQPWPVRFQPGQRQQCWVKNCVALGLAGSFIEPLESTTIHLIQRGIVRLLQAFPHAITQPAIDEYNARLNEELQHVRDFVVMHYHISDRRDSPYWQEIAEMRIPDTLRHRIELFRETGEVFNVPGELFGVNSWVQVMLGQGIEPKRYHPTADVMSQADLARFLGDIRHNVLHTVRQMPLHMDYMRSYAPAPVPEAVRQAV

SEQ ID NO: 87661 - protein, 498 aa, unidentified
  source 1..498: note = Sphingomonas carotinifaciens
  REGION 1..498: note = tr|A0A1G7GEL9|A0A1G7GEL9_9SPHN Tryptophan halogenase; OS = Sphingomonas carotinifaciens OX=1166323; GN = SAMN05216557_101846 PE=4 SV=1
MAGQERNRVRVVVVGGGTAGWMTAAGLATLIPAAADVHLVESAEIGIVGVGEATLPHLRAFIQRLGIDEIAFMTATHATFKLGIDFRDFGRIGDRYVHPFGTYGQPLGGVGFHHYWLRRHHGGNPTPLGAYSAGVVAGERARFARPDPTSDALQDSFGYAYQFDATRFAPFLRTHAEARGCRRTEGRVVSVGRDERDGRVTAIHLADGTRIEGDLFVDCSGFRALLIGGELDEAWEDWSHWLPCDRAVAVPCTHAPGPIEPLTRATAMPAGWRWRIPLTTRVGNGYVYASRYCDEDTAREALLAGLEGEALAEPRLLRFRAGRRRHSWSHNVVAVGLASGFLEPLESTSIYLVQMAITALIEHFPDARVTDADRDGFNTAVDAEYDRIRDFLILHYHATTRDDSPFWDHVRTMAIPDTLADRIALWRQTAQVAHYSYGLFLEPSWLAVYLGQNIVPDGWDPRADGADPAKLDQALAALAAGIGTAIDALPPHEASLPR

SEQ ID NO: 87662 - protein, 506 aa, Xanthomonas dyei
  REGION 1..506: note = tr|A0A2S7BYK1|A0A2S7BYK1_9XANT Tryptophan halogenase; OS = Xanthomonas dyei OX=743699 GN=XdyCFBP7245_18795 PE=4; SV = 1
MIPAPLRNIVIVGGGTAGWMAAAAFARVLGPTFNVQLIESEQLGTVGVGEATVPHIKAFNNLLGIDEAEFVRQTQGSFKLGIEFVDWQRPGSAYIHGFGTQIGHPLGLLPFHQYWIRQQLRGKAQPLGAYSLNTVAAARGKFMTSAGDVPATSPLANIAYAYHFDASLYARFLRGFAEARGVRRIEGMVEQVQLHPESGHVVSLQLASGQVIAGDLFIDCSGFRGLLIEDALHTGYHDFTHWLPCDRALAVPCEKIGPPTPYTRCTARAAGWQWRIPLQHRTGNGYVYSSAHISDDEAAASLLANLDGAPLGDPRPLRFTTGRRKQCWNRNVVALGLASGFLEPLESTSIHLIQSGISKLLELFPRQGISPVLVQRYNDRLAFEFDRIRDFLLLHYHATERDDSAFWRHCRTMPITPELQATLDLFRDSGRFYRNAEEMFAEISWVQVMVGQGILPTGYHPLVDQVPDTDAEGFMASVAQTISHCVDVMPTHQQFIDRYCKAALLR

SEQ ID NO: 87663 - protein, 501 aa, Massilia sp.
  REGION 1..501: note = tr|A0A0Q7XIU4|A0A0Q7XIU4_9BURK Tryptophan halogenase; OS = Massilia sp. Root1485 OX=1736472 GN=ASD92_26285 PE=4; SV = 1
MQQNPIRKIVIVGGGTAGWMAAAPLAQRMGQRCEIVLVESPDIGTIGVGEATLPTIRFYNAALQLDHADFIKKTQASFKLGIEFKDWGHVGNRFFHGFGDFGPPLNGIQPHHYWLRLARTFDHMPALENWSMASIMARENKFTMPNDAQPGVTDAYSFGYHFDAGLYAAFLRDYAMARGARRVEGTITSVDQHPETGFVTAVRLADGRTLDGDLFIDCSGFRGLLIEGALKAGYDDWSEHLPCNSALAVPCARVEPLTPYTRSTAKGAGWLWRIPLQHRTGNGHVYSNAFTTDEKARQDLLDGLDGAALDEPRQLRFVTGKRKKSWVKNVVAIGLSAGFVEPLESTSISLIETAIGTLIEQFPDRDFRPELADEFNRIIGSRYESIRDFIVMHYKLTKRDDTEFWRYCANMTIPASLAHQIELFRETGRVAILDRDSFLLPSFVAMLVGLGVEPKRYDPFVDDVDMRQLHGHFAGLRDLIVQAVAKMPGHGAYLEKNAKAG

SEQ ID NO: 87664 - protein, 517 aa, Caulobacter sp.
  REGION 1..517: note = tr|A0A0Q6U9U9|A0A0Q6U9U9_9CAUL Tryptophan halogenase; OS = Caulobacter sp. Root342 OX=1736519 GN=ASC62_07855 PE=4; SV = 1
MTEASTPSIAPSDRDGAISRIVIVGGGAAGWMAAAALSRVLGPRGPSITLVESEEIGIVGVGEATIPPIRTFNALIGLDEAAFVRETQGTFKLGIEFVDWTRLGDRYFHPFGVYGHDFGVAPFEAVWRRLRRGGEAQGLDAYSVCARAAAGGRFAPLPQASGGPPPMGYAFHFDATLYARMLRTHAEAAGVVRREGKVVDIALRGADGFVEAVTLADGERIAGDLFIDCSGFRSLLLGQTLGTPFEDWSRWLPNDRALAVPSANVGPSTPFTRSTAREAGWQWRIPLQHRTGNGYVFSSQHVSVDEATATLLSGLDGEPLAEPRLLTFQAGRREACWAKNVVALGLASGFLEPLESTSIHLIQAGIARLLEMLPTRAFEPADARRYNRLMAADFDDVRDFLVLHFHLTQRDDTPYWRELRAMTPPDSLVERLAIYRATGRIFRETDALFTKTSWLAVLEGQGAQALGDDPLALAVPQDAAAARLAKIAELAGQAVDRMPTHGDFIAAHCLARTPAPV

SEQ ID NO: 87665 - protein, 517 aa, unidentified
  source 1..517: note = Sphingomonas carotinifaciens
  REGION 1..517: note = tr|A0A1G7F616|A0A1G7F616_9SPHN Tryptophan halogenase; OS = Sphingomonas carotinifaciens OX=1166323; GN = SAMN05216557_101252 PE=4 SV=1
MTGENGDMQADGQADGQAGDGAIRSILIVGGGTAGWMTAAALAHALPRGCTITLVESDAIGTVGVGEATIPPIRLFNDTLGIDEGEFLKATKGSYKLGIEFVGWGQEGHRYFHPFGTFGKPFDLLAVHQHWLRARRAGSTIPLDALSMAWGAAARNRFAPPLADPRSVGSTFDYAYHFDAGLYAAFLRRFAEARRVVRVEGEVGDVALDGESGQVAHVTLTDGRRLAADLFVDCSGFRGLLIAGALGVGFEDWTHWLPCDRAVAVPSANTGPLTPYTRSTARAAGWQWRIPLQHRTGNGYVYASRHLSDDEAAATLLANLDGEALGDPRPLRFTTGRRTAFWRRNVVAIGLASGFMEPLESTSIHLIQAGIAKLLAYFPTRAFEPAGIAEYNRVAVTESERIRDFLILHYVLTERGDTDFWRACAAMDIPDTLKLKIDHFRAHGRLVAREMDLFGPASWLAVHIGQGNWPAALDPLIAYAGEPAESVRFVERLAEAIARGAETMPEHAAFIARRIAG

SEQ ID NO: 87666 - protein, 324 aa, Bradyrhizobium sp.
  REGION 1..324: note = tr|A0A4Y9V554|A0A4Y9V554_9BRAD Tryptophan halogenase; OS = Bradyrhizobium sp. MOS001 OX=2133948 GN=CT676_01510; PE = 4 SV=1
MSPLVQPVLRQLGLWPTFLAQGFAPSHRTLTSWDQAGLTSSELLLEARGPSWRVDRRAFDGWLTAEGCRAAERVDAKVCHLAREADGWSVVCDDGTSRSARLIIDATGRARALADRQGSRAKAQDRLIAAYAEATTSGPAAPELLVEAFEDGWWYTMALDQGRRAFACMTDADLARGLRLNTPDGWRRALARTQFVSALASKIIRLEPPRLIPAGSRYAATTAGFHFLCAGDAASAFDPISGHGVVKAMRSGVFAAYAASDCLARGDAAALDRYGAWIAREAAAYATTLSEHYGSVSRWPERPFWRRRRADAPSRNPSSSLLEQ

SEQ ID NO: 87667 - protein, 513 aa, Sphingomonas paucimobilis; identical to SEQ ID NO: 85813
  REGION 1..513: note = tr|A0A0C9N6E9|A0A0C9N6E9_SPHPI Protein/1, contig: SP650 OS=Sphingomonas paucimobilis NBRC 13935 OX=1219050; GN = SP6_50_00800 PE=4 SV=1

SEQ ID NO: 87668 - protein, 509 aa, Microbulbifer agarilyticus
  REGION 1..509: note = tr|A0A1Q2M3F9|A0A1Q2M3F9_9GAMM Tryptophan halogenase; OS = Microbulbifer agarilyticus OX=260552 GN=Mag101_06150; PE = 4 SV=1
MVDSRFSVLIVGGGTAGWMAANLLAHHWRDFPVKISLVESTEIATVGVGEGSTPFLKNFFRTLGIDESEWMPACDATYKSGIRFPNWSKVPGYESYYHPFFSPLDRETGQEFFAQANLRRQGEAVEAVPDYFFHAPYLSAAGKAPIPKRPLPFELDYAYHFDAGLLGKFLRDKAIKAGVEHKQATIERVLVESGKIAGLQTTASENLAADFYIDCTGFRSALLAALPGYQFNEYSDTLFNNAAVTLQVPSDGTGPIKSETVSEAMSAGWMWDIPLQSRTGYGYVYSDQFLSAEQAEQELRGRLGKTDELECRHLKMRVGRVAEHWSGNCLGVGLSQGFIEPLEATALMLVQFTVEQFARSLLVEGMPNPGASITGADLGAPREHFNRTINEMFAGVRDYVAGHYLLNTRDDSPYWQAVRDQSKPPERLLKLMDCWDSGGDFPELLSALGADKIYSMASWYCLFAGMGRFPETTGVQSVESQKLIRELKSFCGGNTGRFNEHRAYLQALK

SEQ ID NO: 87669 - protein, 491 aa, Massilia sp.
  REGION 1..491: note = tr|A0A0Q7XJ04|A0A0Q7XJ04_9BURK Uncharacterized protein OS=Massilia sp. Root1485 OX=1736472 GN=ASD92_29250; PE = 4 SV=1
MTYERIVVLGGGTAGWMAATALATGLQGTTVELVESEDIGTVGVGEATFPSIRNYHQILGIPEADFLRATNGTYKLGIRFRDWRVKGEDYYHTFGDFGMLNGPESLWGQYRRHPRANLPTFGEQCLPTVMAMNDRFCAPGKDAANFNYAYHFDANLYARFLRDIALKRGVRRTEGKVVDVARRPDGGIASLKLDDDRVVKGDLFIDCSGFASLLLGRTLGEPFVDFSHWLPVDRAWAVPSAPVGDNLTPYTRATALDAGWAWRIPLQDRTGNGHVFSTRFIDEEKARDQLLQQLDGEALAEPRLLRFTTGHRAKFWSHNVVGIGLATGFLEPLESTSIYLVQVGVGRLMTLLQRGGPVAPELVDSYNTGLTRQFERIRDFILMHYCLTARRDTPFWQAMAAAELPETLAYKLHAWRETGVLHQYDEEGFDGHSWLAIHAGMQNWPARSDPTLKLIPEEQSLDWVRERATQLATAVATVPTHREYLAKILGR

SEQ ID NO: 87670 - protein, 530 aa, Caulobacter sp.
  REGION 1..530: note = tr|A0A0Q6UMW3|A0A0Q6UMW3_9CAUL Tryptophan halogenase; OS = Caulobacter sp. Root342 OX=1736519 GN=ASC62_03595 PE=4; SV = 1
MDKPIDDILIVGGGTAGWITAAYLARRLGTTRPDGVRITLIESSEIGIIGVGEGTFPTIQNTMRTIGIDEAQFMRGAGAAFKQGIKFVDWKTAPKDGIHSHYYHPFAQPRLLNGGLDLAPYWLMGGAGDIPFSDAVTLQDKVCDAGRAPKRIDDPQYGGPMAYAYHFDAGKLATLLRDVGKATGVKHLLGNVTTVNKGEDGSIASISTAEHGELTADLYIDCTGFAGALIGKAMGSEWIDKGDTLFVDRALALQIPYDRPDAPVATTTISTAHEAGWTWDIGLPERRGTGYVFSSRHTSEERAEEILRGYVGKAGDGLTPRLLTLKVGHRQAHWIKNCVAVGLSGGFLEPLESTGIVLIEAAAYMLARNLPRRGGLEAAARQFNQAMTDRYLRAIDFIKLHYCISQRTDNAFWTDNCDPASIPESLQDHLAMWKHRPPNVFDFPSLHESFKYFNYQYILYGMGHPTAIDPAAHVHGDLARADFARVREAGKRAASSLPDHRALLNAVYAHGFSSKAPDQAMAEAAETVRR

SEQ ID NO: 87671 - protein, 501 aa, unidentified
  source 1..501: note = Erythrobacteraceae bacterium
  REGION 1..501: note = tr|A0A2E0Q417|A0A2E0Q417_9SPHN Tryptophan halogenase; OS = Erythrobacteraceae bacterium OX=2026738 GN=CL953_03515; PE = 4 SV=1
MTAPITDRSAPPLRVVILGGGTAGWMTAIAIASLTGGATDVHLVESEDIGIVGVGEATLPHLRAFITRMGIDEQEFMAATQATYKLGIEFSGFGRQGERYIHPFGTYGRPLADVGFHHFWLRAKAARVASRLDEYSFAVMAAEAGRFAHPRDDADPVDSFGYAYQFDATLFGPYLRERAIARGVRRTEDKVVSVERDERGRVAALMLEGGERVEGELFVDCSGFRALLIGDAEWEDWSHWLPCDRAVAVPCEPADRGIEPFTRAIAMPAGWRWRIPLRHRIGNGYVYSSAHCTDDDARAALLSAIEGSPLTEPRVLRFRAGRRRNGWTGNVVSIGLASGFLEPLESTSIYLIQAAITALLENLPHGPADPGDSDAFNDQMDYEYARIRDFLILHYHATERADSSFWNHVRTMDIPDSLTEKLELWRRCAVVPQYRRGLFLEPSWISVMIGQGVIPEGWDPRAELPSQDGLEKALAGLAQHIASGVRAMPSHGAALGLGANV

SEQ ID NO: 87672 - protein, 497 aa, Kordiimonas lacus
  REGION 1..497: note = tr|A0A1G6SVJ4|A0A1G6SVJ4_9PROT Tryptophan halogenase; OS = Kordiimonas lacus OX=637679 GN=SAMN04488071_0010 PE=4; SV = 1
MTDMRARPRVVIAGGGTAGWVTAAALSSQLKGLLDITLVESDQIGTVGVGEATIPTHRSFHVLIGANEVDFMRATRATFKLGIQFENWGAQGDSYIHSFGQIGKSPWMADFHHLWMQAKADGFGGDLGDYCLELRAAEAGKFALSDKLNLNYAYHLDASLYAAFLRAHSEARGVTRVEGKFVDVRQDGESGFIKSIVMENGDEVEGDFFIDCTGFRAALIEKVLGVGYDDWSHWLPMNRAVAVQTQSAGDILPYTRSIAHEAGWQWRIPLQHRVGNGHVYCSDYISDDEARATLERNLDGEMLFEPRVIKFLTGRRKKLWEKNCVALGLSSGFLEPLESTSIHLFQIAATRLIQYFPFNGCNPALADHFNRLASEEFESIRDFIIAHYHVTQRDDTAFWRDRQAMDIPDTLKQRLALYRDNGLVYKGEEDLFRIDSWIQVLLGQRFETSAYHPAGRLMTTDKLRSSLANYADGVRRTVAQMPSHADFIARYCAMAGE

SEQ ID NO: 87673 - protein, 501 aa, Pseudoalteromonas sp.
  REGION 1..501: note = tr|A0A2A2UT58|A0A2A2UT58_9GAMM Tryptophan halogenase; OS = Pseudoalteromonas sp. HM-SA03 OX=2029678 GN=CKO50_19050; PE = 4 SV=1
MKTHLPTKTIHSLTILGGGTAGWMCAAYLAKHQPNLSITVIESSSIGRIGVGEGSTPHLQLFMQSLGVKERDWMPACQASYKTGIYFDNWNGDNGSYFHPFFSEMDAKTAEVYFVNANARRRGSEYIDKPEHYFLAAVLADKQQAPLPQRPLPKALEYGYHFDAQKLADWLRAFSLARGVKHIHSTVSSVQHHAQEIIALTLESGAQVKSDFYVDASGFNALLIEKTLKVPFISFADQLLNDSAVAIASDKINPLPSSTSAIAMPCGWRWQIPLQGRTGHGYVYSSAHTSPDKAEAQLRQAAQLDKGQAKHLTMKVGMMARSVEGNVFAIGLAQSFIEPLEATALMVTGYSIELLNRLLSQQLEAQAINQQLSDLVLGIKEYVLAHYATSKRADSQYWQDAKIAALSLNELDELLTHWRSGGDFDAWLNQHRMHSPYIRPSWYCLLGGMDHRDSTCQMPFDQAPQHIEQAAKAYLTKLSDEHFTAHTTALEQLQRAQAFRA

SEQ ID NO: 87674 - protein, 505 aa, unidentified
  source 1..505: note = Burkholderiales bacterium
  REGION 1..505: note = tr|A0A257CCX6|A0A257CCX6_9BURK Tryptophan halogenase; OS = Burkholderiales bacterium PBB6 OX=2015568; GN = CFE46_13630 PE=4 SV=1
MKDRAIRQIVVVGGGTSGWMTAAALAKLLGGKSRIRVVESDEIGTVGVGEATIPMIQRFNTALEIDQDEFLRETQGTFKLGIEFNDWGRLGESYMHGFGRLGQDLGTLPFDQYWQKMSQAGLAGPLGEYSITQRAAYAGKFMRTASDLPGTPLADIAYAFHFDAGLYARYLRKYSEARGVVRTEGKVLDVTLRSSDGHVDSLLLDNGDRITGDLFIDCSGFRGLLIEQALKTGYEDWSHWLPCDRAMAVPCAKVGDPIPYTKSSAREAGWQWRIPLQHRTGNGHVYCSRFISDDEATAVLLRNLDGEPLAEPRPLKFVTGMRRKAWNKNVIAVGLASGFMEPLESTSIHLIQTMVARIVSFFPDRDFAQADVDEFNDQVRFEYERIRDFLILHYKQTLRDDTPFWRHCRDMDIPEGLQRRMNLYRSHGRITRENNELFSEVSWLQVMDGQGLKATRYHPLVDVVPQAEITEFLGNIRDVVGKCLDVMPSHAAFIAEHCRAPSIKF

SEQ ID NO: 87675 - protein, 509 aa, unidentified
  source 1..509: note = Saprospirales bacterium
  REGION 1..509: note = tr|A0A2E4IAL0|A0A2E4IAL0_9BACT Uncharacterized protein OS=Saprospirales bacterium OX=2026790; GN = CMN33_02735 PE=4 SV=1
MEIVIVGGGTAGWVTAIIASARHKDHNITVIESSKIGVVGVGESTTGHFTDILTNWASNFGCDQNEFIKETGATLKYAIKHKGWTNDVDDYYIGPIDGTTTAGAVPDCMFNYGLDKLQRKELLNLSTCGHWIHDGKSNFNKHTNQFVNNHHAYHIDAHLAGQYFKKVVLRRHNTTYIDSEVLDVFLNEQGFVKNLKLSNGEIVDGDLFIDCSGFNKVIMKHLPSKWISYQENLPLNTGMPFHLKYKQNETPEPYTTAWAQKFGWMWQIPLMDRKGCGYVYCDAYTTPDKAQQEIETILGQQIDPIKTIKFDAGRQESAWIKNCVTIGLSSAFLEPLEATSIHSTIVQANNLFLEYVQPTIEDTLNPGSISIYNKRTRKLYDDVKDFLVLHYMGGRKDSEFWKYINSGVTQTEFVKELLAMIKYRTPTVNDFPHYQGSAGWPLYSYVMEGINLLDKTKAGKEIDFDMKEGNLYELTQDSFYHQNNIWRDEDQYTYSYKEFIDYFRGLRIK

SEQ ID NO: 87676 - protein, 513 aa, unidentified
  source 1..513: note = Erythrobacteraceae bacterium
  REGION 1..513: note = tr|A0A2E0Q455|A0A2E0Q455_9SPHN Tryptophan halogenase; OS = Erythrobacteraceae bacterium OX=2026738 GN=CL953_03505; PE = 4 SV=1
MTQPENNAIRDLVIVGGGTAGWMMAAAAARVLAGGVRRITLIESDAIGTVGVGEATIPPIHGFNELLGIEEQEFLDATKGTFKLAIQFENWGQVGERYFHPFGKTGRDFDGIAFHQLWSWLRDREGVGPLEDYSMSAVAARNGRFARPDANPRSPLSNLVYAYHFDATLYAAFLRDYAIERGVVRVEGRIVDVELDGESGHVSSVGLEDGASIPGDLFIDCSGFRSLLLGDALGVGFNDWSHWLPCDRALAVPSASDEQIAPFTNSHAHGAGWQWRIPLQHRTGNGHVYASAFMDHDEAERLLMANLKTPPLGECRPLRFQTGVRERLWDRNVVALGLAGGFLEPLESTSIHLIQTGIAKLLALFPDRNFADVERDEYNRLMTSGYAAIRDFIVAHYHVTRRADTPFWNHVRTMDIPDSLKTRLELYRQKGRIFRYDDELFSIASWSAVLNGQGLVPMANDPLCAALDGESLAEAMRRMRQVHHNMAGRLPLHRAALGPAAGDAGAAKARAST

SEQ ID NO: 87677 - protein, 500 aa, unidentified
  source 1..500: note = Erythrobacteraceae bacterium
  REGION 1..500: note = tr|A0A2A4P2E7|A0A2A4P2E7_9SPHN Tryptophan halogenase; OS = Erythrobacteraceae bacterium OX=2026738 GN=COC07_03020; PE = 4 SV=1
  VARIANT 119: note = Xaa can be any naturally occurring amino acid
  VARIANT 140: note = Xaa can be any naturally occurring amino acid
  VARIANT 183: note = Xaa can be any naturally occurring amino acid
  VARIANT 415: note = Xaa can be any naturally occurring amino acid
MRSDFKPRRIVVAGGGTAGWMAAAAIAHTMGDAIDLTLVESDAIGTVGVGEATIPPLVLFNRLIGISEADFMRETQATFKLGIEFENWKRDGEKYFHSFGNTGRDHWSAGFQHFWAEGXERGHTVSYDEYCLELVAAYAXKFAHLPENGLNYAYHLNATAYAAYLRRIAEQAGAKRVEGKIGXVDIDGETGNIAAIGLEDGTRLEGDLFVDCTGFRALLIEGALHVGYDDWSHYLPCDSAIAVQTELAGPPVPYTRAIAHDAGWQWRIPLQHRGGNGIVYCSRYLSQDAAHDRLMSTLDGKPISEPRAIPFTTGARRKQWHRNCIAIGLSSGFLEPLESTSIHLIQRAVIRLLRMMPAGDVSERDIAEFNDQQLTDMIQVRDFLILHYKATERRDSPFWRQCATMDIPDSLTQKXELFRETGRVFRKNEELFVENSWIQVMLGQGIMPRAFHPVAKKMTDEELAHFLQTLREKVARTVANLPDHHAYVAQYCGAKTAQAA

SEQ ID NO: 87678 - protein, 497 aa, Microbulbifer marinus
  REGION 1..497: note = tr|A0A1H3YC72|A0A1H3YC72_9GAMM Tryptophan halogenase; OS = Microbulbifer marinus OX=658218 GN=SAMN05216562_1671; PE = 4 SV=1
MSQAIKKIVIAGGGTAGWMTAAALSKLMGTQLDITLVESESIGTIGVGEATIPTLVFFHRLLGIDEAEFLAATQGTYKLGISFENWRDVGKDYIHAFGVTGKDCWACGFQHFWLRARQLGLAGDFGEYCLERRAAEAHKFSHLPNNGLNYAFHMDATRYAAYLRQFSEGFGVKRVEGKIDQVQLHPDTGFIRALKLDSGQEVDGDFFIDCTGMRAILIEKALHTGFESWSHWLPCDSAVAVQTQAVEPPIPFTRSIARESGWQWRIPLQHRVGNGQVYSSSYQSDDSARSQLLENIEGERLTDPLLIKFQTGRRRKQWHKNCLAVGLSSGFLEPLESTSIHLIQQNIVRFLRFFPQSEIRQVEVDEFNRQSEFDMERIRDFIILHYKVTDRDDTEFWRYCRQMSIPDTLAAKIDMFRETGHVFREANELFVDSWQQVMFGQGLMPERYHPLVDTMPEQELADFIRQVKAGVDDALARLKDHNDYLAGFLPGDQQRAG

SEQ ID NO: 87679 - protein, 491 aa, Catenulispora acidiphila
  REGION 1..491: note = tr|C7PXC2|C7PXC2_CATAD Tryptophan halogenase; OS = Catenulispora acidiphila (strain DSM 44928 / NRRL B-24433 / NBRC 102108 / JCM 14897) OX=479433 GN=Caci_0530; PE = 4 SV=1
MTEQNTVKTANDVDNPDNAEKTRVLVIGGGPGGSTAATLLARQGIEVTLLESAIFPRYHIGESILPSVLPVLDLLGVREEVDNHGFVRKDGAYFEWGPENWDLNFDHLSGASRHSYQVIRSEFDHMLLKNAQAKGVDVREGVKVTEILFHGDRPVAARWSASDNSGAAGTIAFDFLVDASGRAGVMATKYLKNRRYHEAFKNVAVWSYWRDVKPLEVGPKGAIAVCSVPYGWFWAIPLHDGTTSIGLVAKRTTFSDERERLGSIEAVYADAMTQAPRILEMTQGANKIEGYKVEQDYSYVSERKSGPGYVLVGDAAAFLDPLLSTGVHLSTFSALLAAASVSAVLDGELAEQEAVDFYERAYHQAYERLLVVVSFFYNSYNRQTQFFEADKLTRRERHMLNLYESFLHIVTGIEDLDDSIDGGEALEEVAQQIATQKKIDAGHNEAMNSLPDSPRQAVGGLYLELEPRLRIRRTSEAPAGPEPVREARAGL

SEQ ID NO: 87680 - protein, 523 aa, unidentified
  source 1..523: note = Burkholderia catarinensis
  REGION 1..523: note = tr|A0A1J9NIK2|A0A1J9NIK2_9BURK Tryptophan halogenase; OS = Burkholderia catarinensis OX=1108140 GN=BFF94_14090; PE = 4 SV=1
MQNLVKSILIVGGGSAGWMTASYLSKAYGHKVKISLIEAPSIPKIGVGEATIPNLQKVFFDFLGLKEQDWMPHCNASFKSAIKFVGWNTKSDPDDYFYHMFGQLKEVNGIPLSHYWAHLKNTGQTSEQFAYACYNKAKLLNAKLSPKDRDGKSRMSHAWHFDANLVANYLRDLAVSWGVVHIEGEVVETRLNEDGGIKSVRLQSGAEIAADFFVDCSGFKGLLINQALNEPFIDMSRYLLCDSAVAASITHDDEANGVEPYTSAIAMSNGWTWKIPLLGRFGSGYVYSSSFCSKEAATEDFMKLWGVKEDQVKLNHIKFRTGRNRRAWVKNCVSIGLSSCFLEPLESTGLYFIYAAIYQFAQHFPDATRDPRLADSFNKKIEVMFDDCRDFIQTHYFTTKRNDSDFWRANKHDLKISDSLHEKLSAYNAGLVVCPPVTVNESDYYGNFDLEFSNFWTNSNYYCMFAGLNWVPEKSHPKLVYHDEWMKKALTEFQNLKREEEDLSSTLPTTYDYLKNIRGTYSA

SEQ ID NO: 87681 - protein, 514 aa, Sphingomonas paucimobilis; identical to SEQ ID NO: 86335
  REGION 1..514: note = tr|A0A0C9M136|A0A0C9M136_SPHPI Protein/1, contig: SP614 OS=Sphingomonas paucimobilis NBRC 13935 OX=1219050; GN = SP6_14_02620 PE=4 SV=1

SEQ ID NO: 87682 - protein, 505 aa, Caulobacter sp.
  REGION 1..505: note = tr|A0A0Q6TQU7|A0A0Q6TQU7_9CAUL Tryptophan halogenase; OS = Caulobacter sp. Root342 OX=1736519 GN=ASC62_19640 PE=4; SV = 1
MTPNPIRKVLIVGGGTAGWMTAAALAKVLDTKGVAVTLVESDAIATVGVGEATIPPITTFNQILGIDEAEFMRATKGSFKLAIEFRDWLKPGHRYLHPFGAFGLDIEALKFHQFWLRAHHEGWAAPIDDFNLPATAANLGKFALPSKDPGQVMSSIKYAFHFDAGLYAKYLRSYAEKRGVVRVEGKVASVQQHGETGFVTGVTLEGGQVLEADLFVDCTGFRALLIEQTLKTGFEDWGHWLANDRAVALQCEMGGDGLTPVTRATAHEAGWVWRIPLQHRIGTGYVYSSQHISDEDALKTLRSTLDGAPTQEPNFIKFRPGRRKQIWNKNVVAIGLSSGFLEPLESTSIHMIQAGITKLLALFPDKGFNPVEIAEYNRLTILQVELIRDFIILHFHANQRDEPYWKALREMEIPADLKRKMDLFRASGRLFQSDYDLFAEPSWIAVLLGQGVTPERHDPLVDQYDQAFVKAQMARMGALIRQTGEAMPTHEDFVARYCAAPEFAK

SEQ ID NO: 87683 - protein, 522 aa, Sphingomonas paucimobilis; identical to SEQ ID NO: 87071
  REGION 1..522: note = tr|A0A0C9M0I9|A0A0C9M0I9_SPHPI Protein/1, contig: SP613 OS=Sphingomonas paucimobilis NBRC 13935 OX=1219050; GN = SP6_13_00120 PE=4 SV=1

SEQ ID NO: 87684 - protein, 503 aa, unidentified
  source 1..503: note = Erythrobacteraceae bacterium
  REGION 1..503: note = tr|A0A2E0Q308|A0A2E0Q308_9SPHN Tryptophan halogenase; OS = Erythrobacteraceae bacterium OX=2026738 GN=CL953_01575; PE = 4 SV=1
MAIERIVIVGGGTAGWMTAAALSRLAEKRTVAITLIESEAIGTVGVGEATIPPIVEFNQLLGIDEREMMAATQATFKLGIQFANWGQVGESYFHPFGTYGYHMGGIAFHQVWHRARSEGERRPLQIFNLETVAAHFGRFSRTQDFQRDDLPTMNYAYHIDATRYAAFLRAYSEKRGVVRTEGKVVDTTLDPESGFVSSVTMDDGTEVEGDLFIDCSGFRGLLIEQALETGYDDWRHYLPCDRAVALPCEREDGSGPAPFTKATAHSAGWQWCVPLQSRNGNGHVYCSEYMSDDEAHDILVKNLAGKPGAEPNFLRFVTGRRKKAWNRNVIAIGLSSGFMEPLESTSIHLINSGINRLVAILSLDGVTQNQQDTYNRLTDKEYRRIRDFLILHYNATARDDSPFWDYVRTMEVPETLTEKIELFKANGQIFREEDELFNETSWAAVMMGQGIHMDGHGPIAASMVIPELKGELDEMEKSVRFAVQQMPSHAEYVARYCPARVPA

SEQ ID NO: 87685 - protein, 514 aa, Sphingomonas sp.
  REGION 1..514: note = tr|A0A516IU92|A0A516IU92_9SPHN Tryptophan 7-halogenase OS=Sphingomonas sp. AE3 OX=2594473; GN = FMM02_10970 PE=4 SV=1
MSIDAFPQHLVILGGGSAGWMAASYLDRVFNRPDRRRLRITLIESPNIGRIGVGEATIPTLLRFAQFLGIDEATLMKRTHATFKHGVRFIDWNGPDSDYFHPFEALDTTRNFNPAPSWLARSAAGVAGPFDMESGIQRQVAIANRAPKRMMDPDYQGSLPYAYHLDAEEFGDLLADIARSRGVSHVSGRVSEVEHSDCGNVKSLVLDDGRQIEGDLFIDCSGFASVLLGKAMEVPFESFSEHLLCDRAVAIPKPYADGEVARPYTTAKAMDFGWAWRIGLQHREGTGYVYSSKFIEPADAERALREWVGVAEDVPARHLAMRVGMPAETWRGNVIGIGLAGGFIEPLESTGLQLVELALEQLVRYFPLSGINPAARSRFNHVMRTRYLELRDFIVAHYCLTKRSDTPFWQAVTDPAHIPPSVASKLALWNDRHPSDDDNEYTKMLFGHFNWAAVYYGMGGATTDAMRNAAAWCPNPGAHLAELAATANHLIAVLPDHALWLEGLKTIPAKEWAA

SEQ ID NO: 87686 - protein, 229 aa, unidentified
  source 1..229: note = Sphingobacteriales bacterium
  REGION 1..229: note = tr|A0A4Q3GFA8|A0A4Q3GFA8_9SPHI Tryptophan halogenase (Fragment) OS=Sphingobacteriales bacterium OX=2044944; GN = EOP48_22390 PE=4 SV=1
MINEDVKHIVVVGGGTAGWITAGLLAAKCVKEQGRNLKITLIESSKIGTIGVGEGTWPSLRTTLRDMGISETEFIRQCDATFKQGACFRKWVDNSEEDFYYHPLMLPSNLGPLNTIVRKLNNSSVIDDFSYSNILCSQEAACERGLAPKNITTPEYQGVLNYAYHLDTNKFSVFIKEHCINKLNINHVVNDVVGTTMGDNGEVDSLLLADNTELVGDFYIDCSGFAGLL

SEQ ID NO: 87687 - protein, 504 aa, Microbulbifer agarilyticus
  REGION 1..504: note = tr|A0A1Q2M2N5|A0A1Q2M2N5_9GAMM Tryptophan halogenase; OS = Microbulbifer agarilyticus OX=260552 GN=Mag101_04510; PE = 4 SV=1
MKSRAIKTLNIVGGGSAGWMTAIYLNRYFNRDVKNYQINVIESPDIGIIGVGEATVHSIRFFFAAMGLDERELMAETNATIKSGIMFRNWMKPVDGNTHEYFHPFDQQQPGGSVDISTAWFVGGRSDRQRYDEGVSLNSHLIKSGQCPKSGSSPQFQAIAPYGYHLDATLLARFLRRKAVEQGVCHIEATVLDAEVEQGEILSVATDQGSFSGDFFVDCTGFRGLLIDKLQKDNWESFSGVLPCDKAVAIQREMPEGATPRPYTVATALSSGWAWQIDLVNRQGSGYVYDSSRLSPEQAESELRSFLGTDASVIKCTHLDMKVGCRKDTWVGNCVAVGLSGGFIEPLESTGLHMIHLGVSLLATHLAGDDGSAVLRASYNEKMRGFYQDLKQFIVLHYCLSNRDDSEFWRNAPATVEGCHWLNSRLPLWKHKICEYQDFAGSYASIFTDTNYRYVLYGMQHYPSPRFSMSDTEVGTIFGRFEQLVGRAKTASMEHDKFLKLVHG

SEQ ID NO: 87688 - protein, 505 aa, Pseudomonas sp.
  REGION 1..505: note = tr|A0A1B8V2P9|A0A1B8V2P9_9PSED Uncharacterized protein OS=Pseudomonas sp. AU11447 OX=1843184; GN = A6723_011725 PE=4 SV=1
MLNLSNCRRVAVVGGGSAGWFAALELRKLFLDKVEVVLVEAESLGIIGAGEGSLPNFNRALEHYGLDRTEFMRETHSTHKLGLALEGWRSGAPDDIFLHQFSYSHDGVDLTSWVEPNGSYPLASILINQGYQLQHYPATWKMWQEGASQATAEAFLQSLPAKTPMAYHFDARKLASYLRDIAIKRGVQHINATVESVRLDEQRHVTALVLPDREIEVDFVIDASGLHRLIIGKTLNASWQSYADHLLLNRALPFFIPSQTEHPPLVTRAIAMKHGWMWCIPTLERLGVGYVYCDRYTDKEAAIKEVQDYWGMDIEPANDFAFEPGHYDQVWLGNVMAVGLSSGFVEPLEATSIGQTLDQLARFGELIVACDGIIPQQLIDQFNHEIGRYWDGIRDFLFLHYDTPRNDTEFWRAASNAAAPSTYKELKRTLAHRPPRLMDMEQYQGGPFRMFGVPNWMSVAAPLGILSREATALDLRSLSQEKRQRLGSFLAKVESRMKAESGASN
